United States Patent Application Publication US 2026/0103690 A1 - sequence listing, part 57

SEQ ID NO: 275688 - protein, 344 aa, unidentified
MTTIMIGLDLAKNVFQIHGIDAKGEVTVQRQLRRAQVAPFFAKLAPCVVGMEACGGAHYWARTLQGLGHEVRMMPAHYVKPYVKRNKNDSRDAEAICEAMSRPTMRFIPPKSEEAQAMLAMHRTRALLVRQRTMAANALRANLAEFGIVAAQGNAGLHRLMEQLVAPTCPLPASAQAALALLARQWEQVDIAVRELEVRIARNAREQEAARRLMEIPGVGPLGATAVLAKVADVSVFRTARDFAAWLGLTPRESGTGGKQRSGGISKQGDHTLRQLLIMGARSRLNRVRTNAASDPWLRDLMARRPTKVVVVALAAKMARVIWALLKTGERYRAKQRAAGAVAA

SEQ ID NO: 275689 - protein, 339 aa, unidentified
MKDQDVSDVVRTKKRTAMRYIGIDVSKATFVVAYSSDKGGEIRTFNNTTAGIRQFIGTLPKDGSIHCVMEATGNYSALLLYMLNVAGITVSMENPLKVKNFAKAMLSTIKTDKSDARLITLYGEKMNPRPFKVQGEAILRLRQKRTVIRQLTKQITAMSNLRGSLACLPVPDKGATHTVDETIKFLEKKRDRLQSELTDLVEVEFSRQLALLTTIKGIGITLATALIITTGGFTYFQNAKQVARYLGICPTYEQSGTSVNIKGHINRNGDAYTRGLLYIAAWPASRFNAQCKETYTRLRQNGKSGKLAMIAVANKLVRQAFAVVAHDKEYVDGFVSNRP

SEQ ID NO: 275690 - protein, 358 aa, unidentified
MRDVSKEQPKTTAGVDIGDKYSYLCLIDTESGEVIEEGRLRTTPEAFERRFASEQPLRVAIEAGTHSPWASRVLEGCGHEVLVANARKLRLIYSNKRKTDEVDAENLARLARVDPKLLYPLRHRGEESQAHIALIRSRDVLVSSRTQLVNHVRGAVKSFGARLPKCPARSFHKRAAEHIPEALLAALAPVLEQIGSLTERIRQYDRRLEAIAKEHYPETELLRQVEGVGPLTALTFVLTLEDPYRFERSRSVGAYLGLVPARDRSGERDPQKRISKEGDEMLRRFLVSGAHYILGPFGSDSVLRRHGQKIASRGAKNAKKRAVVAVARKLSVLLHSLWISGEVYEPLRNAHRSGVQAA

SEQ ID NO: 275691 - protein, 360 aa, unidentified
MGRISPKASVVASSISVGARTVVRVSEPGSARLGLHREGPAFAVGESVGRPDSFVGIDVAAAHLDVSVTPSGESWTVAYEAEQLSDLVTRLAAIQPALVVLEATGGIEMPVVSQLAAAALPVVVINPRQVRDFARATGRLAKTDAIDASVLAHFAEAIRPEVRPLPDEMTQELTELITRRRQITEMITAERNRLSRVRSAVRNRIRSHIRWLEEELAAVDGEIADRVQASPVWREKENLLRTVPGIGPVVSSTLLAGLPELGSLNRKQIAALVGVAPFNRDSGTLRGKRTVWGGRAHVRASLYMAALVGTRWNPTIRHFYERLLAAGKPKKLALVACMRKLLTILNAIVHAGTSWAPHYA

SEQ ID NO: 275692 - protein, 438 aa, unidentified
MQVVYSRCCGLDVHKDQVTACVLVFEGKSERQIRKKEFRTYWKELQRLKMWLYANKVGHVAMESTGVYWKPVWHVLEGHFPLLLANPYHMHNIPGRKTDQNDAEWIADLLAHGLLKASFVPPQPIQELRDLTRYRVKVMGEFNRVHNRMAKVLEDANIKLGSVASDILGVSGRQIIRALIAGEQRPEWLADKAVSSLRSKREELRLVLRGEVSEHHRYLLRELMDDLERIEAKIGRIEGEIVQRMAPYEKQLERLDTIPGVDWITAWTLLAELGDDMSAFPDAHHAASWAGLVPGSYESAGKRKSSRTRHGNRWLRRALSQSAWAVTHKKNCYLTANFYRRAARSGTKKAIIATAHEILIIAFHILRDGSVYQERGGDYFDRLNPERTQRRLTARLERLGWQVVLKPIENSSEVAPLPRRRGRPCKCAERGIDCKHRH

SEQ ID NO: 275693 - protein, 416 aa, unidentified
MKMPPPAPSEEGAVIKYVCGIDIGSQSCAGCICRPDKSVVIKSITFANAREGWQIWEEKLNQLDAPAGQILIGMEATSRYGENLYHELEQRGYVLRLLHPGQTHHFHQQRALRAKTDRLDAMTIARTLLSGEARIGYVPSDQVATYRELVRLHTQLSDTAASYQNEIQALIVVLFPEFTQVFADPCLPTALSVLKAFPSAQALVEAGVDPLFQVLRAQKASHYGRPTAKKLVALANQSVSSGRARAGRSTSLRILCDQLEHTQANLARLNAEIEHLLNTDPGVKGLQQVPEFGPKTVAVLRAELGDVQRFSRTDEVIAYGGMDIEIKESGLWKGKAKLSKRGSGLLRRVLYMTALRCIHRQDSAFGIYYQRLVDRGLKKGSALMAVMRKLLAVAAHLLMHEGEEYDPSKVCGSSEG

SEQ ID NO: 275694 - protein, 372 aa, unidentified
MEKFSKYVGLDVHKDTIAVAIAAEDSEVRFYGEIANNPTAIIKLVKLLSKEGELVSFCYEAGGCGYKIYRQLTAMGKDCIVVAPSLIPRKAGERVKTDRRDSINLARLYRAGELTPVWVPEDEQEALRDLTRAREDMKHFERQAKQRLLAFLLRHGWMYSGKARWTHAHYRWMETVKFDRQAQQIVFQEYKDIVNSFGTRVEEIENQMQIHAKESLSWPVIESLMALRGVNFITAFTLIAEIGDLQRFASAPKLMAYLGLVPSERSSGNSVRRGGITKTGNSHVRRVLIEAAWTYRFAARRTPIIQRRMDKVPTAIQEISWSAQKRLCQRYKSLQTNGKLKVQVCTAVARELTGFIWAIGQATPMMKNTPTN

SEQ ID NO: 275695 - protein, 401 aa, unidentified
MLNCGVDWASDHHDGCIVDADGAVRWRRRISHSPEGIAELRAAIAAREPDPAQVAVAVEISHGLLVGALVEAGYVVYPINPTAAERFRDRRKPSGGKNDRLDAEVLAQAVRTDRASLRALLPDSALANEIATLARDRHALVREHTRLTNQLRSALHEYFPAALIAFDLDANSTLAFLERYPTPAAAAKLSAFQIAAFLKARRANRDLAAKATAAKEAFRAPAFAARPEIARAKARLVRVLCAQLQALRPELDAYERELDRLLKTHPEGELFRSLPGLGVILASRVLAGTGDNPARFSSAAGLCAYAGTAPMLIQSGKRAVVKARHACPKEFRDAVQQWADQARRRSPWAAEFYRRHRARGHNHNESLRALGNRLLELLFDLRRRGLRYDEAVHAANIRWAA

SEQ ID NO: 275696 - protein, 352 aa, unidentified
MHASTVAIDLAKEVFELAFADAQGRVIERKRLSRRAFIRSLETRPPLRVLMEACGGAHCWARRFQRQGHTVRLLPARDVRPYVRGNKTDRNDVAGILEADRCAGIAQVPVKTPEQQGIQALHRLREHLKAERTATLNLLRGILREFGVAVPLGSAKVPAAVRDALEDGDNELPMTLRHSLAEQIDRLSQLGRDMAAIEQRLEEFASREVSVQRYRTVPGVGLLTATALRASAGDLSRFRSGRQFSAWLGLTPREHSSGQQRRLGGLTKRGDVYVRTLLIHGARAVLQAARMKQRRGQALDPLQAWALKIQDARGHNKAACALANKLARRLWAMEHHGMPFDPRHVSERPHAT

SEQ ID NO: 275697 - protein, 420 aa, unidentified
MARTVEIVYPVCCGMDVHKNFLVACIAVTNEQSHTEHHIRRFSTFTGDLRRLSEWLASYNCRDVCMESCGKYWIPVFNALEKTCNVCLTHPKYVKAIKGKKTDKKDAKWISELFKCDLVRSSFIPPPEIRQLRDLCRYYVKLTGFASGEKNRAQNCLTMCNLKLDDVFTDVFGKSATRVLDALLEHGNGDFELDGLVHGKCKSSPEDIRAALDGELNPVQAEKLNLIRQHMDDINDLKVALEKLIYSLVAKYQAQIDLLMTVPGISTPLTAIRILAEIGTDMSVFETAKQLVSWAGLTPQNQESAGKKKTTRIGRAGAYLKPLLVQIALNCGKSDKCPELKNKYLALKKRRGGKKAVIAISRKLLTAIWHILSKNEAYNAELYRKTDKPPVAREFTTAQAVAFLRSKGFVIVDEETGEVV

SEQ ID NO: 275698 - protein, 439 aa, unidentified
MVLPRGHHVLHTGAAERKALPSSEAGDPTIVGRLKGVVPIHLGLGPPQVVRRTPGISCKAPIRSGVCFIDRMDSPLRLSRHHVPEPPSCKEKEESVEKHTVVAVDVAKAVFELAVSEEPGRVKLHRRLSRGEVEVFFAQAPRSTVVMEACGSAHYWGRQLQGLGHTVVLLPPHQVRPYVTRNKTDRADAKGILEAHRNSDLRPVPVKSLSQQVLGSIHRFRAGWIGARTAQVNTLRGLLRELGFVIPEGIERVLPQVRLLVADAESGFPDSLRWTVSAACDEIESLGERIRQAERQLEALAEQTPVVERLRSVPGIGLLTSTALVAFVGDVQRFPSGRHFASYLGLTPREYSSGLRHRRGRISKRGDSYLRVLLVHGARSVLCHAKKASAHDHLRTWALKLQSRTRHNKAAVALANKLARIAWAVWRKDREYESIAPAA

SEQ ID NO: 275699 - protein, 363 aa, unidentified
MTSMVPVPEVVQRRHRVVIGVDTHKYVHVAVALDEFGGVIDAQRFAADRAGYALLIDWALGLGRKLTFAIEGTGSYGAGLTAAVRRRDIGVIEVLRTDRRDRRLRGKNDTIDAENAARAVLGGHATAVPKAGDGVVEMLRQIKVAKDVAVKARTAAMISLKAVIVNAPPELREALQPLSKMALIERCAGLRPGPVTTVAAATKHTLRSIARRWQQLNEEIKTHEALLTQLTGQLVPQLVAAFGVGPDTAAELLIVAGDNIDRVRSEAAWARLCGVAPLPASSGLTKRHRLNRGGHRQANAALYRAVIVRMQHHEPTRTYVARRTLEGKSKAEIIRCLKRLLARETWALLRPLRTASRTAPASP

SEQ ID NO: 275700 - protein, 312 aa, unidentified
MTYKHIGIDISKRTMDIYWDDQHSQIGNDKVSIRKLIKKINRAPETVLAVCEPTGGYEKLVLSLFNKAGIKTHLAHANKIKFFARAKGPHAKTDKIDAKLIYEYAKLMEVKPDIILHNESTEKMGELLKRRKQLNNQLQEEKNRLDKSWGQESKNSIKSHIKWLEKEIKKLVELLKTLEKESEDLKTKVKLLTSIPGVGPFTAWHLIAFLPELGLEESKKLSALVGVAPYNRDSGSHSGKRHIFGGRSIVRKALYMAAISAIRCYPEFKTFYQTLVGKGKPPKVAIIAVVRKLISVINSVVKRQSPWVNVSA

SEQ ID NO: 275701 - protein, 344 aa, unidentified
MYPFYLGIDLHLKRTYAVLMDNTGKIIDERRIRNDEIEEYLAEVVPQNTYAVLEATRNWPFMYDLLSENLERVELAHPKELKAIATAVVKDDAIDSKTLANLARLNYLPIAYAAPKETRDLRTAMRHRDWLVRQRTQCKNRVHAVLAGYNFVSPVSDLFGVKGREFLAERTQKLQPGARRSIRDHLALIDQLDQLIQALEKDVNLTTEQQAMVRLLKTIPGVGQLTATIITAEIGDIQRFNSPKALCNWAGLTPKVRKSDRTVRHGRISKQGSSYLRAAMTRAASIASYTSKRWYQVHESLVPRCGKTAAKVAVARRLLTVAFFMLKRNEPYREEYGKKPTDDR

SEQ ID NO: 275702 - protein, 329 aa, unidentified
MSEVVVGLDVHLKNTQVTVMKLSGEVVKKERIRTCKAELRRSLEEVPIGSRVALESVGFCWPWIDFLDELGFEPLLANPLRVKLRAEDVKNDKVDSKTLADLTRMNWLPTCYVPSSEMRWLRSLLRHRAFRTKLCTGVKNRTKSEFRKRDIELNVNLGTLKGRKLASDLGVFEVSQNLELLEVMDRQTREIEVMLFKRYGHVKPVELLMSIPGIGFLSAITLYAEICDIKRFSSAEKLAHYAGLVPTVRQSGEHSFTGKETRGDAWMKCILIEVAWAHVRYCPDGHLAEVFKDACKRKGDSCDAIKIVARKLVNVIWAVWTSEKEFMVK

SEQ ID NO: 275703 - protein, 409 aa, unidentified
MVHARCAGLDISKRDAKVCVRIAGAGRRKTVETVTTWGSMTSQILALRDHLIAERITCAVMEATSDYWKPFYYLLEDAGFDVLLVNARHVKNLPGRKTDVADATWLAQLGAHGLVRASFVPPEPIRHLRDLTRARTAITRERSREVQRLEKLLEDAGIKLSAVASDILGVSGRAMLESLIGGNRDPAALADLAKRRLRSKIPALTEALTGRFTEHHAFLARVHLDLVDQHTAAINHITTRIEATIKPFHWFRDLICTIPGISILTADVIIAETGADMTRFPTAAHLASWAGTTPGHNESAGKVKSSQTRPGNPYLQGALGAAAMSCAQNPGTYLGARYRRIASRRGPQKANVAIQHSMLIAIWHMGTNGCIYDDPGADYFNRLHPERAKKRAISQLEAMGYNVTLTHAS

SEQ ID NO: 275704 - protein, 370 aa, unidentified
MTGVYVGLDVHRKKTVYVIQGSDGEVVAEGSTPTHREGIQQIALKHELEPGTQVCLECGVQAGMVCDALEEIEMVPVVVDAAEVRKKARRRGQKTDRRDAFEICDGLRRGIWASIVYMPPPPVRRLRRILSRRRHFVRLGTQQINAAKFLLRAEGILTEESISLTTEAAWSKLTARSETGTLRGHLELHARTWDLALKHTGLLEKELRAALEPFAEIMGWLTSVPGIGLVTAASFIAVVGDPSRFPDSNHLVSYLGLAPSMFDSGDTERHGHITKAGPPYMRALLCEIAQQASRPRHPLHPYFVRVAAKSGYKKAAIAIAQRLARIMYRMWLNREGFDVSKLNVERDGKARTKIYHWKIRQPAKALAAAS

SEQ ID NO: 275705 - protein, 490 aa, unidentified
MPERRLVGIDLGITSEHTVCVLRADGSQVCRRRCRPTPDSMAELERAALTGAPDGTRLEVVIEPTGPAWRPVAVYFVRRGHLVHRVSSAKAADLRRFLSRHAKSNSIDAMTLAKLAYLDPEGLIPLDLGGREQAALDRRVRACHRLTRLAGEHKTRLRDLVRQLLPDTPLEGALGQADLAILERTGADPHRLARLGKARLARLIAGASHGQLGELRALRWLDAAHSALELFADHPALAFDDLAEEIKTEVRLLRATEAELSTHASARDLAYAQVDPEGLARSLPGLGEVGAPSLVAALGRPARFPSGRHARSFSGLTPRSSETGETDRKGQPISKAGPSRLRTTLVLAADHARRQDPQLARVYYLQMTERGGCHAKAICVVAAKLAERARAVLVRRLPYELRDTDGRPVSAEQAKAIIAEQWTVPEEVRRRRRSRKTRGKAPQQVGTRHVNASARGAATRRPSPPPILAPELVQIKEVLSTIAQRTIVRP

SEQ ID NO: 275706 - protein, 347 aa, unidentified
MGNSITDLSSVTTVGLDLAKHVFQVHCVDASGRVIVAKALRRKDVLSFFAQLPRCLVGLEACGSAHHWARELIKLGHDARMMPPTYVKPYVRRQKNDAADAAGICEAVTRPSMRFVGGRTLENQAALMHHKAREMLVAQRTQLINALRGHLAEIGVIAAQGLKNARELARVILAEGDETIPACVRAALAPLVRQLHVLDQEITRSDRTIAAMARGDEMARRLMTIPGLGPVTASAMAASVQDVSAFSGPREFAAFLGLTPRQNSSGGKERLGRISKMGNRYLRKLLVVGAHAVLYHRKPHEDALRSFAKKLMQTKPFKLVAVALANKMARIAFAIMRGKTTYCAVSA

SEQ ID NO: 275707 - protein, 412 aa, unidentified
MVTCGIDWAQDHHDVALVDADGRLVARRRIPESVAGFAELTAMLADADDDPEDPIPVAIETPRGLLVAVLRASGRPIYPINPTSVARYRERTSMSGKKSDHGDAVTLANILRTDIDQHRRLPADTELAQSITVLARAHQDATWRRNRAGNELRSLLREYFPGFLHAFADRPGGITAPEARAVLAIAATPAKAARLSKPQITAALRRAGRQRGLTTLAATIHQQLRLPQLRHPAPVEDAFGIQAVALLATLDAECANVDRLGEATAATFAQHADHRIITSFVGVGDLTGARLLAEIGDDRTRFADARALKAFAGSAPVTKASGRSIRITHRHVKNNRLAAVGFVWAFIAAGCEGPTRAHYLTRRDHGDRHPAALRHLYNRMLGQLYHCLQTGQTYDPIKAYRPPPTHPTRAAA

SEQ ID NO: 275708 - protein, 338 aa, unidentified
MELYAGIDLHSNNSVLTVLDGQDRTVYAKRLTNDLAAIIAALRSCAGTLRGVAVESTYNWYWLVDGLHDAGFVVHLVNTAAVKQYDGLKHSGDFSDARHLAHLLRLGILPTGYIYPREQRAVRDLLRKRSQLVRQRSAQILSISNLIARDLGTHAGGNEIKRWQSAHIDALPLLDEQIQALKANLAVMRCLDSQVDALERSILAKAKLREDYQALRTVSGIGEVLALTIALETGDVGRFDSPGQFASYARVVDSRRESNGKKKGVGNAKCGNKHLAWAFIEAAHFAVRYDAAIKRWYQKKCAGSLSVVAIKAVAHKLARACWHIMKDGKPFEVSKAFG

SEQ ID NO: 275709 - protein, 405 aa, unidentified
MWYAGIDWADQHHDAVVIDEAGKRVGTTRVAHSAAGLDTLVTFLKGIGDIAAHPDHLACIVETNRGLLIAALLDAGLPVYPVNPKTVDWHRKPAGAKTDAIDAYLLARTGRSDRADLRRLTPDSPLIAELKALTRDQDTLIQSQTRLVNQLTACLKAYYPVALDWCGKLQQPTTLAFLQAFPTPEQARAATVEQIATVLKAAGHSTAEVKARQIHDRLSQPQLRGDAVVTRTKTRLMLTLAAQLRVLLPEIAAYDDEITRLFRLHSDSRACASLPRAGTRLAPRLLAEWGDERGRYTDAASVQALAGTSPAPFQSGTFAKAHRRYACNKPLRNALQQFAWQSTQKEPWALTDYQRKRRDGKSHPMAVRALANQWVRLIYALWTNHDTYDPATFLAAQQAHAPRAA

SEQ ID NO: 275710 - protein, 355 aa, unidentified
MDSKKYIGMDVHQATISVAVMDADGKVVMDCVIETKAAIILEFIQGMRGTLWVTFEEGTSAAWLYDLLKPHVAKVVVCDPRKNALLKAGNKNDRIDAHKLAELLRSGLLSPVYHGGAGVRTLRELARSYLTITKDLTRVRNRIKGLYRSWAIPCGGQKVYSPRYRSAWLKKLTEAGVRRRAEWLYQQLDDLQPLRREARRELLAESHKHPANTVLRQVPWLGPIRVALLIALIQTPHRFRTKRQLWAYSGLALQTRASGESRVSGGQLYRAKRQPSLRGLNENHNHELKAVFKSTATRASTSAGPFGDFYAALLATGMRPTMARLTVARKIAAIVLTIWKKGERFDPEHLKRQAA

SEQ ID NO: 275711 - protein, 361 aa, unidentified
MNTTTVAIDLAKDVFQLAIADENLRLRESLRLSRPQLTQWFAKHTVSRVIMEACGSAHYWARRFASDGIQVVLLPASYIRAYVRRNKTDSADAAALLEAARGGQIVPVQVKSETQQALQGLHRIRSQWMASRTERINLLRGVFREFGIPLACGARTGVENISRVLADPASPIPELIRLSLKMVLEEIRVLEARVTQIEHQLTAFAKQCPACKLFMSIPGIGLLNATALVAATAGSVAHFQSARHFASWFGLTPKESSSGNSRFLGRISKRGDRYLRMLLTHGARSVLRAAAAARTKLIEPSGIRAWALNLQARSNHNKATCALANKIARICYAVLRDQQPFGQPTTRFSKKVSRHPFAMAA

SEQ ID NO: 275712 - protein, 317 aa, unidentified
MERILGVDVSKDYLDTDTLPPTQQRRFTNDPAGTAELVEWARGFRPDRIVFESMGPYQKAAVGALLAAALPAVVVNARQVRDFAKALGILAKTDTIDAAVLARFGQVVPTIVRPLPTPEIQAFQELYDRRGQLVRMLAAEKNHRYAATSAKVIKNIDAHIRYLENQIETLEDRMDQFVQNSEAFKARDEILQSIPGVGPQVSRTLLAYLPELGQGTRQQLSALVGLAPFNDDSGTQSHTRHIRGGRAKVRLGLYQAAVVAIRHCPPMKDFYIRLKARGKASKVALIAVARKLLVLANALVRSMKPYDPANSVCLPSA

SEQ ID NO: 275713 - protein, 458 aa, unidentified
MEQALAQRKKVSLKPGKSRAALTLTHPNAAGIDIGSAAHFVAVPPDRDDEPVREFPSFTVDLNAIADWLEACRVDIVAMESTGVYWIPLYELLESRGFTVLLVNARHVKNVSGRKSDVLDCQWLQQLMTYGLLRGAFRPGEQVCVLRSLWRQRGMLLKSQARHVQHMQKALTQMNVQLANGISDGVGETGQRSLRAIVAGERDGQVLGSLKNSRIHASVDEIAKSLQGNWRAEHLFALKQALGAFDFVGTQLAECDREIEQQLQTLQVHEGEPGKRKKRSGSARNAPKFDLRTQLFKMCSVDLTRIDGIDVTTALAVISETGADLSRFPTVAHFASWLGLCPGTKITGGKAISGRTKRCANRAAQALRLAAASLRTSQSALGAYFRRMCSRMDKPKAVTAAAHKLARLIYTMLTKGEEYTDQGQDYFEERYRERVLRQLNQRAQKMGMQLVPAPQAAG

SEQ ID NO: 275714 - protein, 255 aa, unidentified
MPYIGIDLSKTHLDVDLGTGPVRRFAQSSADYAALLAALPAQAICVLEATGPYGLRLLAALHQAQQPVCVVNPLQVRRFSQSQLRRSKTDRTDARLLTQFGTLFTPPLHQASPLWLSQLQQRQALLDLLTRQRTALRNQRHALLESPYPDPVSEQILDEDIRRLDERIGQLEQGLEATAKREAGADYGHLLSIPGIGRRIATALLLAGPGLRAFAGWRQAVAYAGLCPRHFESGSSVHGRPRLSKLGDGRLRRLL

SEQ ID NO: 275715 - protein, 417 aa, unidentified
MNQYAAYLGIDWADKKHDLCLLDTATGKKTRLVIQHTPAAIAEYFTSLRVRYAGQQIAVGLEQSRGPLLFALLQYDFLVLFPINPTTLAKYREAFSPSRAKDDPTDAEYVAELLLQHGDRLKAWHPDDDETRTLRYLVEHRRRLIADRTRISNRLTSLLKCYFPQVLDWFPDIRTELVCDFLRRWPSLSELRGVRQTTLLKFFRSHHSVRRDSLEKRLSAIKQAVPLTTDRAIINSSVLMTKALAAQMQTTIAAIREFDNEIEKLCAAHPDFPLFQSLPGAGEVYASRLLAVMGTDRERWATADELACLSGIAPVMERSGKSVWIRWRYFCPKFMRQSFHEYAGESVKHSFWARAYYEQQIARGKTRQAAVRALAYKWIRIIWKCWQTRTPYNEVKYLESLRKKGSPLLSFAAKNAA

SEQ ID NO: 275716 - protein, 354 aa, unidentified
MIIIGADYHPTFQQIAFVDTETGELQERRLDHPEAAEKFYRELAAQGTKVRVGMEASGHARWFERLLAELNFELWIGDAAEIHRKRERKQKTDRQEAQPILHLLLKDDFPRIWVPSWENRDLRQLLWHRHRMVQARTRMMNQLQAVALNEGLRCKKKLWREAGRKQLEAFRLAPWASRRRHDLLELLDRLNPTIAALSQAIEQEVEKCPEAQRLMTHPGVGPLTALAFVLIIERADRFQCGKQIASYLGLVPLEDSSGNRRRLGHITKQGNSLLRFLLVEAAQVTVRSLPEWRSKYVHLTMRRGRKIAKVAMARKLAVRLYWMMRKEWDYEQVKKFGSHAGQPGHRYGVKSNIE

SEQ ID NO: 275717 - protein, 412 aa, unidentified
MEALYSRCCGLDVHKSSITACVLLEQSQKRGKHIRRFGCTTRELRELVTWLRELGVEHVAMESTGVYWKPVWNVLEANFHVVLANAQHIKAVPGRKTDTKDCQWIAELLQHGLLRSSYIPSLIIRDLRDLTRARTTLSQEHSRIASRIQKVLEDANIKLASVASNTLGKSGRAILQAIVEGEQNAERLADLALGHLRIKIPQLQAALEGQVREHHRFLLQSLLRQLHFIEAEIALLDTRLDQLEKEHVELGEALSRWITVPGVDRVAAWSFIAEMGTDMTQFPTAAHLASWAGVCPGNNESAGKRISSKARKGSPWLRRMACQSAWAAARTKNTYLSAQFKRLAARRGRKCAIIAVAHSILVIGYYLQGRRCTYSDLGSNYFDRLHAEGLKRYLVKRLESLGHSVILEPRTA

SEQ ID NO: 275718 - protein, 339 aa, unidentified
MELTVIAVDIAKKVFQLHWVEPETGTIERLKLKRAQVLPWFANREPSLVMLEACGGAHEWGRQLHTLGHTVRLLAPKTVRPFVQRNKTDAADAKGIWTAGQQPGAKFVAVKNDAQQVVLSLHRLRAQLMKMRIMQTNELRGLLYEFGIVLPEGHCALLKELPAAMIEAQSRLPAMLIESLQEQIRRIHGLEADIGSIERRLSQQLRDTPACKTIAEIPGIGLLTATAIVASMGSPTSFKNAREFAAWIGLVPRQTGTGGRVRQLGISKRGDAYLRTLLMHGARAVVRSDRATKWPWLSELLKRRPYSVAVAALANKLARTIWAVLAKGQEWRPHAWQAT

SEQ ID NO: 275719 - protein, 322 aa, unidentified
MNNEYILGIDVAKAKLDIALRLPSGKYRSKVVPNTSDGFNTLTEWLKRHGADNVHACMEATGTYWESAAEFIADAGHTVSVVNPAQIKAFGTASMVRTKTDKKDARLIAQFCAEKRPAQWEAPPEVIRELRALVARRDALEAMRTQERNRLHVARAAVLDGIEKHIEYLKEEIESVDAELQRKIDDNPKLKEQRELLDTVPGLGLKTIPVLLAFFSALRFGNARQAAAYAGLDPRQHESGSSIYRKPRLSKMGHVLLRKSLYMPAMVTVNRTEWGREFKARLAANGKAPKVIICAMMRKLVHVAFGVLRSGEPFNALLHNAA

SEQ ID NO: 275720 - protein, 450 aa, unidentified
MAQSRPLFLGMDVHKESIAVASVAHAHGADVTFLGTIGTRQCASASLLRKMPSKATHLIFVSAAGPCGSWLSRYRTKQDDACGVVAPALLPKKPGDRGKTDRTDAMQWARLARSGDLPVVDVPQVDEEALRALARARADTLRALQAATFRLQAFLLRHALRSPGRAPWGPAPLRGLSEVVWPPPAPHIVFPEDVRAVTAHPERRQRLDHARHAQGTSWRLPPGVEALQALRGVQCTAAVTMVAEMGALPRFESPRALRQCLGLLPAEYPSAERRRQGAIPQAGTTQARSALVAGAGASRSPAQGSRPIHLRREKHPKILQDISWKAQGRRCQRSRQLSAHGKHATGVTVAIARALAGCMWARAQQVPVTLSDQDSVRRHDALRRMADVHRTRRSPGGVEPSAALRGEERTREPRARQAPDGGQDGGRQPPERRRSNRRLFLAPSLPMHRG

SEQ ID NO: 275721 - protein, 446 aa, unidentified
MLAESVDEDQVIARVAAVDIGKAELVCCVRVPGAEGAKRRLQEVSTHSTMTRSLAELANHLVDLRIERVVMEATSDYWRPVFYLLEAHGLEPWLVNARDVKHLPGRPKTDVLDAVWLCKVAERQMLRPSFVPPRPIRQLRDFTRYRIDLVGARTAEKNRVEKLLEDACIKLSVVASDIFGVSGRAMMAAMIAGERDPKVLAGMARTRMRAKIPQLQEAFTGHFDDHHRFLLAQMLARIDGIDADIAVLDTQIEALLAPFAQAAARLDEIPGIGPVAAAIIIAEIGVDMTRFPTAGHLCSWAKFSPGISSSAGKNKGNGSTGHGNRYLARVLGEAAVIAGRTDTFLGERYRRIARRRGKKKAIVAVGRSILVIIWHLLADPRLPSTTSAPTTSPETSTPRPRSATTSDSSKPSASQSPSNPQPEPPATNHPGSAGSCRLPTHPSFSD

SEQ ID NO: 275722 - protein, 353 aa, unidentified
MRKMQDFIVKGKRIFVGLEDSKRTWKLCVRSEGTVIAETSMPAQYDNLRNYLRGKYPECEVVVMYEAGFGGFWLHDLLRGDGIECFVTPAHTVTQAKVNRVKTDRGDARRLALILENNDYVCCHIPDKEHREDRQISRTLSQIQNKITATKNQIRKFLDWHGLNGDLPSGAWKAADYRKLKSLKLSSPLQVCLDAYLRTIECLEQICLGLLAQLKAVSEKDNYRELVALKQSCPGIGWLSAIRFTLEWGSLTRFPSGRHFASYVGLTSSEHSTGETVHRGHITGQGSGRVRGWLIQCAWRAVRSDPVLLDKFHRVWRNSGSKKKAIVAVARKLAVRIRAIEISKQPYAVAVIE

SEQ ID NO: 275723 - protein, 353 aa, unidentified
MENSITYVAMDTHKKEHKVALHYPCHEEIVRFAVKNTAREIKKLVNKIKKQASADVKFCYEAGVCGFTLKRRIEALGCQCTVIAPSLTPIKPGDRVKTDRKDAVKLLAMFEAGLLTEVHAPDQEQEAARELARCRQSAQENLKRIRHQILKFLTRHGYVYAEGNHWTQKHLHWLGSLEFDLPCLRDVFDSYFTEMQHCLQRLVSLDKELAKLAESNPYKEVVSLMRCFHGIDTLTAITIITEIFEFGRFSSPGELMSYLGLTCSEDSSGQKERRGSITKAGNKRVRRLLIETSWHYRHPYIAVSKVLRERRKDQPQWAIDIADKARQRLRKRYWYLVNNGKMPCKATVAIARS

SEQ ID NO: 275724 - protein, 436 aa, unidentified
MRGCRCSMIMGFTKPIEHFNLQRKKVITMNTLYVGIDVSSKSNVIYLMLPNGDKHSNFSVANSHEGSTQLVKRILSALTSHSLDTVLIGLEATSVYGDNLVYFLREDATLAPFNRKIHVLNPKQVKKFHDAYNDLPKNDYVDSFVIADCLRFGRINKEVYMGDYRYKALQNLTRARFFAVQNLVKEKQRFMNVLFKKYSTMTQEKVFSDTFSTTALAVYDEFESAEALANMDLHELTDFIIEKGKNRFPDPDAVAKAIQKAARSSYRLPKTVNDSVNQVLSISITSMKALESQIKEFNKAIKAQMELLPNVLISIPGIGPVYSAGIMAEIGDINRFNSQAALAKYAGLAWKQHQSGGFESEVTRLIPSGNRFLKYYLCEAAFSLVRCDKEYSDFYRLKYKEVNRCQHKRALALTARKFVRLVFRLLKDNRLYCPAK

SEQ ID NO: 275725 - protein, 350 aa, unidentified
MIIVGCDYHPGFQQIAYVDTETGELQEQRLAHREEAEGFYRDLGAGGAGVRVGMEASGHGRWFERLLAELKIELWIGDAAAIRAKRVRKQRTDRQDAQHILNLLVEDRFPRIWVASWENRDLRQLLWHRHRMVQARTRVMNQLQAVALNEGLRCKKRLWREGGRQQLESLTLAPWTSRRRCDLLELLDRLNPTIAELSQAIEQQVEKYPEAQRLMTHPGVGALTALAFVLIIGDANRFSRGKQIASYLGLVPTEESSGDRRRLGHISKQGNCLLRFLLVEAAQVTARTDAEWRSKYFHLAMRRGRKIAKVAMARRLAVALFWMWRRKWNYQQLQKFGSHAGQPGNPHGVQ

SEQ ID NO: 275726 - protein, 428 aa, unidentified
MTLATPASVEPYAALVGLDWADEVHALSLCAAGSTEVERATLEQTPEALAHWANRLRRRFPQGKIAVAVEQARGALLAGLSQYEHLVLFPVNPKSLARFREALYPSRAKNDPVDANLLLELLAKHGDHLRAWQPDTVATRQLALLTEQRRQFVDQRTALTNQLLAHLKGIFPQALQFVGKDLGSRLATDFLAQWPTLQALQQVRPAKLRQFYYGHNSRAHELIAQRLELLKRAVPLTTDPALLGAHSLAIQTVAAQLAALRPFLEQYDKDIAQLFSAHPDAPIFDSLPGAGPVLAPRLLACLGTDRQRFEKAVALSCYTGVAPVTEQSGKNQYWVHLRWSCPKFLRQSWHEFANASIKSSAWASCCYEQFRKKMDHHEAIRKLAFKWQRIVWRMWQEHRPYNEEQYLASLRKYGNQLLTAPIAQPSTR

SEQ ID NO: 275727 - protein, 321 aa, unidentified
MIAMKYYTSTTQFNCGIDLHARQMYVCVMDRDGQKLVHTNIKNNDFAFFLKLVAPYRHDLTVCAECMFGWYWLADACQAAGLQFVLAHALYLKAIHGGKNKNDRIDSEKIAHLLRTNLIPPAHVYPAEKRPLRALLRQRLLYVWNRSELLSRIQSHQLAHNRPTLRQTPYNREPWAKQLLTAEPDPVRQLALQNDLALIGHYDTQLATLEQELLKLTRQTASRDFTLLQTTPGIGDYLGLTILHEIGDIARFPTVKDFLSYCRLVKGTIASAGKIKGLRGAKLGNPYLRWAFGEAAVVAKRDPLVIGPLAQRLEARLNNKF

SEQ ID NO: 275728 - protein, 334 aa, unidentified
MNYKTIIGVDISKKTIDVALKQFNNPTIPHCQFSNNQKGFTAMTNWIRKQTTTETQDLLFCMEHTGVYVLPLACYLSENKLCFCLENPYHIKHSMGLQRGKSDKADAKMIARYAAMHQEELKLSNFPGKIIIKLQALLAYRERLVNAQKGFKVANGELSAFVEKQISSHINKETNSLIKCFENRIKKADKQIDELIKQDIQMNKNYELAKSVKGIGPIIASYMIVYTQNFTTITDSRKFASFSGIAPFEHSSGTSIKKGNSVSHLGNKKMKRLLNNGAWNAARHDNEIKIYFNRKVAEGKNQLSVINAVRNKIVSRVFAVVKRGTPFVNIVNYT

SEQ ID NO: 275729 - protein, 340 aa, unidentified
MNATTYGLDVAKRVFQMYWVDAQTGEIVNRRFRRDELIGFLAQRPAGRVALEACGSGHWWARKIKALGHEVVLLHAKFIRPFVQTNKTDAADARAIWTAVQQPEMRTVAAKTEDQQAMLSLHRMRALVVKFRTMQVNQLRGLLYEFGATFRVGRVAGLAEIRARMAELEDALPGAMICSLQDQLQRIDALEQDIDRLEQRIGAWQKQEAACCAIAAVPGIGKLTATALVATMGDAKTFKSGREFASFLGLVPRQSGTGGKIRLGSISKRGDPYLRTLLIHGARSVMCHAKVPTTWQKGIQARRPANVAAVALAHKMARTAWAILAHGQAYQKDYVSVKPA

SEQ ID NO: 275730 - protein, 357 aa, unidentified
MTTQQKQSCLFIGIDVHKDTHTAVGISPYGEKLFEIMVGNYKNDFENLTNKVEEMKGTLSPFFGLEDVRGYGERLAGFLYEKYPVYHVPSILVDRQRQNATHPEKSDSLDALGVAKVMIQSIDTLLPYTISKESEKAKQIKEISIDREDLVLERTRLKNQVHTLLYRIYNTEYEQKFKDPFSIKALRFWSKAKPKCDPYLLKTMKRKIRRLLDIHTEVVDLEKDMDKLLTEGEYTIQTASGCGVVIASTIIGEIGDITRFTSPGALSKYAGCSPRERSSGKKTRHVKSRSGNRRLNCAFHRMALSQISRMGNDRARAYFKRKISEGKSKSQALVCLRRQMVNIIWMMLKHKTIYKNA

SEQ ID NO: 275731 - protein, 357 aa, unidentified
MPTVPSLFDTLVTVGVDTHSQAHVAVALDQRGARLDELAFSNDPSGFVELLDWAETMGVIDRFGVEGTGSYGAPLARWLTNLGFVVVEVNRPDRADRRRRGKDDAIDAEQAARAVQAGTATVVPKAGTGPVEAIRMLRNVRAGAVKDRTRSLNQLHALRTTAPDALRAELGGLTVTKLVAMCVRLRPGDDLADPVHAAKMALRTLARRIQQLNDEIAALDKQLDPLVAATAPTLVAQQGVGTDVAAGLLIAAGDNPQRLRSEAAFAALCGVNPIPASSGKTTRHRLNRGGNRDANRCLHVVALTRMRWNPATGDYIQRRISGGKTKPEAMRCLKRYLARTLYRAVLADLANALKTAA

SEQ ID NO: 275732 - protein, 369 aa, unidentified
MEDYNAFVGLDVHKDSISVAIADAGRDGEVRMYGTITNTPDAVSRLMRKLVQRHGKIEVTYEAGPCGYGIYRQLAEMGIVCRIVAPSHTPKRPGERVKNDTRDALMLARLLRAGELTFVWVPDATHEAMRDLVRARQVASQDVRAARALIQMFLLKHGLRCKSKAWCLRYRKWLTSLPLEHAAQKFALQSYINRLDQAEARKAEIEGQMVHLIPGWTLAPVVHALQVFKGIGMVIAATLAAEIGDFSRFASPRQLMAYLGLVPSEYSSGSKQRPGGITKAGNKIARVMLVEAAWSYKWPPKVGVLLMLKRENYSQALKDIGWKAQVRLNQRFRRLEGRGKRSTVAAAAVARELVGFIWATAISAMPKAV

SEQ ID NO: 275733 - protein, 425 aa, unidentified
MEDPQMNINMLPQTNSNVNIACDVSKDTINLVVKFGKHCIERQIPNHSFELQKHLNQLKDFLHRCGFQRIWVVAEPTGVYHKNLLRTARRLGLCTRLVSVESVARMRVVETNDTGKTDTKDPHVIHTLASMNKTLKHRILPEPYNLLRHWNKIYDKADKEVIKAKASFRTVLKDLFPDFNKSTKFILSNSGRALMKKYQYNPYRIACSGRCRFKNVMRKQVPRIRNSTLDEIFDSAQASVLSKQSPRKVDILVIELIHCWQGLSLFLKRKGQAETAMEKLYGEAQRLDPGLPEPVRGIITPFLLSRIVAETGPLSDFKHSRKLMRYAGLNLCECKSGDYTGKAKISKKGRRLLRKVLAQVVFPLTPKGKLYGKYYHKKKETMPGTKAMIVISRHFLKVLFGVYKSGKGFEKKRMFTCESQIDLAA

SEQ ID NO: 275734 - protein, 387 aa, unidentified
MAQVNDLSRSLTAFDPISTLVLVVEMSKAKWLVSGAVPGVERQPLKKLEADATALLRLIERWRNEAVRAGRPISRIALAYEAGRDGFWLARWLIARGIEGHLIHSASVAVSRERKRAKTDRLDAAMLMRVFLGWLRGERGHCGMVAIPTMEEEDARRPSRERECLVNERSRITNRMKSALARLGVRGFKPHLRKAPERLAGLRTAEGTDLPANIIEELRRDMARLALLREQINSIEKTRAARLERAPDTGPHAMVRLLARVIGIGIETADMLVREILSRRLRDRRAVARYAGLTGSPDESGLKRREKGLAKAGNARVRRGLIQLAWRFLVFQKDSALARWYRTRTEGPSGARKTTMIVALARKLLIALWRLVTTGEVPDGVALRPAP

SEQ ID NO: 275735 - protein, 481 aa, unidentified
MASRKKSTFERLSSERLNRKQRRELERRLRAEDPGLEIVHRNVAGIDVGNESHFVAVPPGRDPQPVQEFGSWTADLERMAEWLKACGIEMVVMQSTGVYWVPLYDILEARGVKICLANARHTKNLPGRKSDVQESQWLMKLHTYGLLRDSFHPSDEIRALRSLWRLRDRHVKEAVRTVQHMQKALITMNVQLSNAISDITGVTGQAIIREILNGERDPWKLAKFRDWRIKATEEEIARSLEGNWRDDMLFELRQAVDAYDFIHKQIVACDQRLKTLLEVLPARPITGREAEVGAAEVGQRSTPRRKKQRNTPAFDLKEELTRICGVDLTRIDSIDVMTAQTLVAEVGPDMSRWPTEDHFASWLTLTPNRDVSGGKVVRQEPRKSKNRVAGALRTAACTLLRSQSYLGAKYRALRTRLGAPKAIKAMARHLACLIYRMLKYGQAYVDQGTQYFEQKRAQRELSSLQRKAAALGYQLVQPASA

SEQ ID NO: 275736 - protein, 383 aa, unidentified
MNKTIRYIGLDVHAETIAVAVAEEGRDGEVRSLGMIPNTAEAVGKLIKKLGPAPSLRVCYEAGPTGYVLYWQLTQLGVACEVVAPTLVPVKTGDRVKTDRRDAVKLARCYRAGELTAVWVPDAAHEALRDLVRAREAAKKDQLRARHRLSKFLLRHGRRPPAGVKAWTELYLKWVNTVRFEQPAQEATILDYKAEVDHAAARIVRLEQAMDEAINQAPPAMQAVVHALQALRGVAKLTAATIVAEVGQLSRFASAKQLMSYGGVVSSEYSTGNARRQGGITKTGNAHLRRVVVEAAWSYRHRPYVAATLRKRQQGLSPAINQMAWKAQHRLHKRFLSLQAASKPHQKVVTAVGRELLGFIWAIGVQVERSQAPGGAPTMRLVA

SEQ ID NO: 275737 - protein, 409 aa, unidentified
MLEMEGNEMKGPIVSVDVSKGESHYQGFKDLNIKYSNVRKIKHDKQGINELFKLIKEMEQSLNCEVCVVYEATGVYHCVLKKFLDDHNIKQFIINPLLSAKTRKNDSLRSPKTDKLDPKSIAKTFYNQNLYQSSKSERIYHELRELSRYYEDVLVHIRKDKVAFRAQLDIVFPGYDTLFVDLYGPVSLTIIEKYPHPEMIVNKSVKTVSKIIQKKTCHGESVSQSKAIKAIEFSKTVYSGCNKDDIEVIILKRLIDNLKAHLNEAETILNEMVKLAQDLPNFEIIRSIPGIGDNLAARILAELGDVSRFKKFSQLVAYVGVDPRINESGQEDGQHLHITKKGNKRLRCLLYLAVTCALRLKTDNNKIKEFYIKKMQQSNPMCSKAAKIACVNKLVRIIHNMCKNGTLYQ

SEQ ID NO: 275738 - protein, 309 aa, unidentified
MDQVSVGIDVSKDRLDVHIRPSGEAFAVARDGEGLAALIARLVPLSPRLIAVEATGGFEIIVAAAIGGAGLPLAVVNPAQVRHYAQALGKRAKTDPVDAEVIARFVEATRPEPRALPDEATRMLADLVARRRQIIVMMTAERQRATRLPKRLMRSCERVIRVLEKELATLDEDIDTTVRGTPAWRAKEDLLVSVPGIGAITARSLIAELPELGNLDRRKIASLVGLAPFTRQSGQWRGKAFIGGGRRTVRAALFVATMAAVRYNPTIRIFRERLLAAGKPKMVAMIACMRKLLTILNAIAREQKPWQNA

SEQ ID NO: 275739 - protein, 387 aa, unidentified
MFLVGIDVAKDKHDCFICDSEGNVLKDVFTFSNDREGFNLLLSFMPTSSENVKVGLEATGHYSLNLINFLIDNGYSPVVFNPLQINLFRKAHTLRKTKTDKIDAKLIALMLSSSDAKPHLDLSYHVMDLKSLTRYRSRLKDQLARLKISLTRIIEIMFPELEDCVYSINQKSTIALLYEFPSKELIANAHLTRLTNVLKDNSRGKYSKDKALEIRNAAINSIGTSSDASSFELVQTIDMINFYSSKIDDLDAKIKDIMIELESPILSIPGISYNLGSIILAEIVDINRFDTSSQLQAFAGLDPATHQSGKFIATGVSMVKRGSPYLRWAILNAARLVAMRDPCFKDYYQKKRKEGKHHFVALTHVAKKLIRVIFKLLKTNTQFVPQT

SEQ ID NO: 275740 - protein, 408 aa, unidentified
MFIVGIDIAKKTHVAAITDDTGKCIGKAFKVSNSVEGFNTLLQKLAEISTDISQFVFGMEATGHYWLNLYTWLGDKGFTIHVINPLQSDALRRLQIRRTKTDPIDAQLIAECIRLGKYCKTNLADDDMLALRDLTRQRFYLVDMAGDIKRKVISMMDRIFPEYESLFSDMFGRTSCQLLKECTTPEEILAVDTERLCEILRKSSKGRFKQQKADQVRESARNSFAVILSSQSLSLLVKQMIEQLELLESQIGQIESLIEQLYAKFNCKLTKIHGVGITLAAVILSEIGDISRFQTPKQLTAFAGLDPVIKQSGSFSATTVHISKRGSPYLRRALWLAANTVKQWDPVFAFAYQKKINSGKNKTQALAFITHKLLNVVFTILKNNIDYLPLFPPDFDSNQLPQNFHFTP

SEQ ID NO: 275741 - protein, 415 aa, unidentified
MAEVMIGVDPHKGSHTAVALGADEVPLGQVRVRASAAQAERLLAWAAAWPERAWAVEGAGGLGHLLAQQLVAAGERVLDVQPKLAARVRLLAAGAVNKNDPNDARSVAVVALRSAACPQVRADDHAAVLKMWAKRHRDLSRARNQVACRLHAVLCELIPGGISKQIRAAAAARMLEQADPSGVVQEARRELAAEFLADLRRIDAQRRDTHRKLAAAVRASGTTVTEVFGVGPVVAAAVIGDVRDISRFPGKDYFAACNGTAPAEVSSGNRVIYRLSLRGNRRLNHAIHMAAVTQIRYRHSRGRAYYDKKIAEGKTAKEALRALKRQVSDAIYQRLKADARRAAAAGIAGPGGHPGNGSVASVAGLHPADRLFGQATPGPAPTLRPRPGPSKATPRTSNPRRTRRSSRQSRERAET

SEQ ID NO: 275742 - protein, 387 aa, unidentified
MTVPGEVFKIIPRHYDIFGGLDVAKKNMAVTFTDHEALMRSLRLPYSSAHLLHYVRKHFPDRRVAFVYEAGPTGFGLHDELVTAGYRCLVVAPSMVPTAPGDKVKTNRLDSRKLSVQLRGGELRSIHVPAPRYRELRHLVQLRDTQVGQLKATKCRIKSLLLCEGLAFPPAPENSQWSARVLSELLELPCSPAVRFELDQLIGTLHFHFNSAAAAQKQIRYFCQNDPELRQSIRLLASLPGIGAIVATHLVARLGDWREISNVRQIAAFLGIVSSEHSTGEKENRGRITRTGDSRLRNKLIQSAWTAIRKDAELRAFYLRIYHRHPKKLAARKAIVAVARKLTTRIYAILKEQRPYVLRPENLPAPLTAEETVGPRGRLDGPQNEQP

SEQ ID NO: 275743 - protein, 393 aa, unidentified
MVEDVHWFVGIDWATQSHRAVLLDAEARQVGEREFSHGGAGLTELRDWLLQKTAAAPGQIAVAIEMPHGPVVEMLLEHGFAVFAINPKQLDRFRDRFTVAGAKDDSRDAHVLGDSLRTDRKAFRKLATDNPVVIELREWSRIADELQQERTRLANRLRQQLWRYYPQMAELTDDVGDAWFLALWHKVPTPAAAAKVTEKAVARILKDHRIRRLDAATVLLTLRKTALFVAPGTTEAACVHIRSLAARMHLVNQQIREACNALDSLCAKLGAPDEESPSGQSHEQCDVAILRSWPGIGRIVLATLLTEAAQPLQARDYHALRALAGVAPVTRQSGRQRFVIRRLACNRRLQTAVHHWSRVAIQHDAAARRCYDALRQRGRGHAAAWPGPCTCFA

SEQ ID NO: 275744 - protein, 364 aa, unidentified
MQYVSNNTELSSHEETRCQFNGSTGVIKLGIDVHQQFYTVVVQEGGSNPKPPQRFRKEAFLHWAARLKQQGAAVHAVYEACGFGFGLQRQLAALGIACHVVCPQKLDEHNRRVKTDSLDAKALCLKLDRFVQGNQDALALVRVPTEQEEQLRAIHRQREQLVKARKQLEAQGRSLIVNHGIEPVQSWWKLRTFAALPVPAWLKELLANSQPILIALQEKIRVLSLQLQSAAGPDQPRGLGAMSSVVIDREIGNWHRFRNRRQVGSYTGLCPGEHSSGNTRLQSCVTKHGNPRLRAALVELAWRLVRFQPNYRPIVKWNEVLRKGALFTGAPPKKAIVAVGFQLAVDLWRIRMGCVRAETLGLIN

SEQ ID NO: 275745 - protein, 346 aa, unidentified
MEYYVGLDVSLKLTAICIVDRTGKIEREGVVSSDPEAIATFIKSHAPHVARVGLETGATATWLWTELNKLGLPVICIDARHAKAALKMQINKSDRNDAVGIARIMQCGWYKEVRVKDLDSHAVKALLVSRALLVKIKRDIENQIRGLLKNLGLVIGRAKMNVFAVRAAELTGDRPELAAAVVPLLSARAAIEQQVADLDRKVMRLARNNAQARRFMTAPGVGPITALCFLATIDDPTRFKRSRSVGAYAGLTTRRYASGEIDWTGRISKCGDKMLRSYLYEAANVLLTRVAKWSTLKAWGIRLAKRSGLRKAKVAVARKLAVILHRMWIEGTEFKWSSKEAANQPA

SEQ ID NO: 275746 - protein, 336 aa, unidentified
MKKISFFIGVDISKSTLDVAIIDQNSPNAALHSVFPNSKTGITSLLSWIRKHASKNKEDLIFCMEHTGVYGLPLCSVLSEKNILYSLVPALEIQRSIGIQRGKNDKADSKAIAKYAYTRRDNMTITTMPDKAILKLRYILSQRDRIVKAKVMFENSKEVERFCESNAAKVLEKENKTIITFLKKRIEHFDKIIEQIILEEPLMANQYKLITSIPGIGLQIAANIIAYTQAFYLFDCPRKFACYSGVAPFPYQSGSSIKGRTRVSHLANKKMKSILSLGALQAIRNDTEMRLYYQRKVEQGKNKMLVLNAVRNKLLQRIFAVVKRETPYVKLAQHMA

SEQ ID NO: 275747 - protein, 353 aa, unidentified
MKIVGMDLGQNKSAWESLDTQTGEVSRGEVRMNDDALRKLLMKIGPDQLVVESGPLAARVHDLAVAAGVAVLVADATQDAWLWKNVKRKTDADDANKLVRLAALGQINPVHIPAPAVRERRHLLEYRAALVAEQTRCKNRIRATLVLQGLKLPSGKKGWSIAARETLAQHVRPLTECDPTELWRGVLQTELKHLAQVEQLVAAVTGKLDQLAQADPQVARLRTIPGVGPRTAEVIVTVLDQPDRFATRRQVAAYAGLVPRRWQSGQMDRSGRITKRGSPLLRAILNQSAWIAVRCNPELRAFFLRIGGGQKKRKKQAIVAVMRKLLVIAWALLRDETTYQATRLRTEAEKTAA

SEQ ID NO: 275748 - protein, 358 aa, unidentified
MKKIVVGIDISKEKIDASAIDVTGSHPGVVRLDYRVFDNRPMGFRRMLVWVRHLKEGACLDEVLFCCETTGGYDRSLCDYLYAKGLSIWREGALQIKRSMGVRKCKDDKADSLMIAEYAMRHMDKAVIYETPSQSVRELKSLLLYRHKLVQEKTEKTVRMKELEATSFRSKSVSFILRDARKSIKSIEKSIKECERQILDLYKADGDLKKSYDHLTSVSGIGIVNATAFIAYSNNFTGITTANKLASYWGCASFRERSGTSLDRRAYVKCYSSSLLKAYLTQAAECAIKEHGIYHEYFLRLTAAGKPYRVIINNVRNKLIHLAYSLVTNDVNYEREHESLRKKRKSEQGKSVSLEIIN

SEQ ID NO: 275749 - protein, 371 aa, unidentified
MKSIIYIGMDVHKKTYSLCALLKETGEIIGETKISADVSLIIKFIENAKKSVDSDDVQIKTGYEAGCLGYSLYWQLAEKGIECDILAPSTMHRSAKNKVVKNDRRDAKNIATNLANGTYKSVYVPTDEYVEIKEYIRMMHDFKIELKKVKQHINAFLLRFGHQYPGKSKWIPAHIKWLKELELSDMYREILDEYLSQLEILSEKIERFKYRLEELSQKETYKEKIGQLRCIKGIDTTVAMTMHAETSDFDRFPTANAFASYCGLTPGEDSSGDSYHRVGITKQGNSIIRTTLVEAAQVLVRGTIGKKGKKVKSKQKDQDVKVIDYADKAVIRLQKKYHRMIFRGVKRNIAITAVARELACFVWGIETGHIS

SEQ ID NO: 275750 - protein, 310 aa, unidentified
MDAIYVGIDVSQARLDVHVLPGGEAFAVARDGKGLEELIERLRAFSPQLIAVEATGGFETIVAAAVAGAGLPLVVVNPAQIRHFAQALGKRAKTDPIDAAVIAHFVEAVKPELRALPDEAQRLLAELVGRRRQIIEMMVAERQREKRAANIRVRKSILRHIRVLEKELPEIDEDIGTLVRGSTVWREKEDLLVSFPGIGNTLARTLLAELPELGALTRREIASLVGVAPFTRQSGHWKGKSMIGGGRAAARTALYLAALVASRHNPILKTFYARLLAAGKPKMVALIAVARKILTTLNAMLRDKRKWQPA

SEQ ID NO: 275751 - protein, 479 aa, unidentified
MIKSVGIDLSSAGEHKVRCLDESAQPCDGFNFETSSEGFVKLEERIFVEGANPIIIFEPTGLAWLLVSIYLKARHPDCHLVRVQARKVVALRKYLRRSSKSDKIDALTLAKMPFIDSEQLEEVYLPPAKIYTMQRLARQRKRLEGEIGTRKKRIGSIVDGYLPGLRRAFSDPWSAHARAFLCSNLNPMGVVHASEKTLHAFLSKARRHGKYNAAESHMVYLSCKDAATRYQFSNPVGTIDDNFFADLQEEISRELRIMEMLEAESDAIAKRLEQLYLKLHPSDNLRTIPGVGEHTAPIFLATVGDPARFQSQSAFANYTGVVPAAKQSSEAEAKGLRMTKAGPATLKWALYQSSQIGRRCDPQLASVYYQQMAHHGKNHKQAMGAVMSHMGARVLAVLRENKPYELRDIQGRRVTGEKARKIILENFQVPDEIKRERRRHKTVASSTKSWGKDREMAICSTNEAAIAPQPAIIAAISSV

SEQ ID NO: 275752 - protein, 307 aa, unidentified
MSTFVGVDVSKSTLDLALLDGISQSFSNAESGWKGILDLLQPLKPSCIILEATGGYEKGIFRVLRAANLPVVRVNPRQVREFARSLGILAKTDKLDAQVLARYARVTEPEIRPVLEDETLRSLVTRRNQLVAMRTQETNRLKQNPTSTIEADIQAHLKELETRIATFTRCIKDELARFPSSSLLQAIKGVSAITTAALLAELPELGKLNRKQIAALVGLAPFNRDSGSFRGKRRVWGGRASVRSALYMATLSAIRFNDKLSTFYQRLRKAGKVFKVAVTACMRKLLTILNATVRELEAEQQKAASPV

SEQ ID NO: 275753 - protein, 364 aa, unidentified
MQGREPVDSLLSFNLSLPTNMTTIQLNKTALEIKLSIFAGIDVGAEELVLVIRKDGKPSDPQTFANTPADRTRLVKKLAKLTGIRVCLEATGAYHFDLAIGLHDAGVLLMVVNPKASHNFAKVLMKNSKTDAVDAHTLAEYAARMDFVPWTRPSDEKLALHCFARRIDAITSQKAAAKNHLHALSVRQETPKAVLKDAKLAISQLENRIDRLTNEALALIGKFPELKRILELLVGIKGVGKTSAIALMGELLLLPPGLSHREWVKFAGLDPRVFESGKSVHKKSRLSKAGNRHIRSTLYMPALSAKQHDPHIRAYFLHLVENGKKPLQAVCAVMRKLLHAIHGMLKHDEPFDNTRFYVIPVSDR

SEQ ID NO: 275754 - protein, 400 aa, unidentified
MLSIGIDVSKGKSTVCGMKPGGEIVYAPFEVQHTREGMSELVSLLRSSGEEVRAVLESTGSYHCPVVAALLENGIFVSVVNSLRMKRFCSQSIRKVKTDRIDAMQIALYGLAYWQELQPTRLPEDTYRELQLLARQYYQMTSLLIKAKVDFNAICDQVLPGMQELMNDHAGRHKLSDFVLRYRHTTHILEMGETRFRKDYCKWAEKKGYRNCERMAALIFATAQNGIPVLPNAPSTQIVITEAIRVLHTVEASRDAILTQMQALAKTLPEYSLVREMPCIGDTLAPRLIAEIGDVRRFHSKRALIAYAGIDAPPYQSGKFCANNRHISKRGNRYLRKTGYEVMQSYVMHKPANDPIFTFIEKKRSEGKSGKLAMVAGLNKFLRVYYGKVTELYRSLPAIE

SEQ ID NO: 275755 - protein, 417 aa, unidentified
MALKIIYPICCGIDVHKSFVVACIASTNGKGVTIYNKRRFSTFTSGLRLLSSWLSENNCCDVCMESTGKYWIPVYNILEQTCKIVLAHPKYVKAIRGKKTDARDAKWIADIFKHDLVCGSFIPPFDIRQLRDLTRYNVKLTSFITGEKNRAQNCLTVSNIKLDDVFSDVFGKSANAITEQLLLNPNGNFDVAGYIDGRCKTSPDKIQEAIDGFICSEQVQKLKIIRSHMDSLNVCKDSLLSNINSFAEKFRTQIELLKTVPGIQDYSAISIISEIGVDMSVFPTAKHLCSWAGLVPQNNESAGKKKTTRITRAGAYIKPLLVQCALNVCKSDKHPEIKNRYLMLKKRRGHKKAIIAICRMLLTVMYAMLKKSEAYNPALYRKVDIIPNNRSFSVQQAVAFVAKHGYTVVDPDGVLAS

SEQ ID NO: 275756 - protein, 341 aa, unidentified
MTEITRIAIDTSKSVFTLHAVDATDRPVLRRNLRRRELLAFFEKLPPVEVVLEACGGSHHWGRALAALGHRVRLIPAQYVKPFVKRGKNDRNDAEAISVAASQPSIGSVPVKSAEQQAAAMLLSVRELLVRQRTQLVNALRGHAAEFGVVAPLGDKGVAALQAEIATADEAAVPAAAKQAIALLGGEVDRVEARLAVIDAKLMQQHKADPLSRRLATQPGIGPIGALNFALRVDPAQFKSARHFAAWLGVVPRECSTGGRQRLGGISRAGDERLRQLLVLGATAVIRHAKPGRPGVSPWLLNLLSRKPRKLVAVALANKMARIVWAMMTSGEAYRPYPVAA

SEQ ID NO: 275757 - protein, 376 aa, unidentified
MGHHSEAFIGIDTSKLKNAIAIAEGGRDGEMRYLGEIDTTDAATRKLIRKLAAKYAKLTFCYEAGPTGYGLYRLITSLGHECSVVAPSLIPRKAGDHVKTNRRDAQSLARNLRAGELTAVWVPDERHEAMRDLSRARESAVDDLKSKRQQILSLLLRLGLHYPGKKTWGKSHRNWLASQTIGQREQRIVIEELLGAERQAQDRVDRLEQAIREAVPEWSLAEVVTALMSVRGIDLVAAVTILAELGDLSRFISPRELMAYLGLVPSERSTGDNVKRGGITKAGNRRARRILVEASWSYRYPPRIGRDKQAKVDAAPEPVRAIAWKAQTRLSSRFRMLSKKGKRPTIVVTAIARELCGFIWAIHRVVTSPGATTASR

SEQ ID NO: 275758 - protein, 345 aa, unidentified
MSMGIYVGRDVHLNSNAAVWGKAKEKPRTLVISPTEEGFRALVEAVGPGEVWAVYEASSCGFEAYDRLRELGWKVSIVAPTHIAKSVHGKKRKTDLRDAKRLWEILISHGELGTEMAQIWIPGHELQEEREVVRRRLKLSESSCRVKNGILSLLRMHRLKRPEGMKKAWTSKHVEWLRGLTRETKLGTRVRTVLGSYLRELEFVMEEIRRLDLEVEALAQTPAYRAQVERMTEMPGVGVLTALTFLVELGDIRRFDNRRQVGSYLGLVPASYESGDADDRKGHITRLGPPRVRKVLNQAAWQLVRLDPLWRQRYEGIAIRGGAKTAIVAVMRKLGIELWQRARSA

SEQ ID NO: 275759 - protein, 303 aa, unidentified
MTYYAALDISVRTVAICIVDQEGAIRLERSVRSELPDILKVLTEFGEPIAKIGFEAGVLTQHLTYGLKAAGHEVVCMEARQVSAALAAMRNKTDKNDARGIAQILRTGWYSRVHVKSIESHYVRALLASRKAIFNKCIDLENEVRGLLKVFGVKLPPRVYHGAFDGEARKGIEGDRQLTEALAPLLDARLVLLRAFRDLDARVKRMAREDQVCTRFMTVPGVGPLTALTFKAAIDDPARFTSSRTVGAHFGLTPRRFQSGETDNPGRISRAGDADVRAALYIAANSMMMRSIQWSWLKAWARA

SEQ ID NO: 275760 - protein, 363 aa, unidentified
MSDRTSMMTPAAITILAIDLGKFRSVACRYDTSTGTHAFETIATTPPAVHDLLVEAAPQLLVIEACGVCGWIADLAESLGIEVRVANTLGEAWKWKRVKRKTDRDDALKLAKLAATDQLPTVHIPKLAVRQHRALIRYRHALIDRRTGIKNTIRSLLDAQGLSLPGRSRGWTIQSLNELKALSRPLSECDEKNLWRGQLASELTMFQQVTALIKEADKRLDALAAGDERVTRLRTIPQVGARLAELVVTTLDDAKRFRTAKQVSCYAGLVPKQYQSGQMNRLGRITGQGPGLLRRVLVQVAWGLQRRTDTRGHAVFERLCHGQRTRRKQAAVALARKILIWCWAILRDNSVWDATRDRRLAVT

SEQ ID NO: 275761 - protein, 329 aa, unidentified
MFYLGIDVAKAKIDCCLILEDSAGKKKTKTFPNTPKGFEQLQAWLNHHAAGPAQTIALMEATSVYHERLAGHLFDAGFQVCVANPARARYFAQSMSRLNKTDKADSEVLARFAMTADLHFWQPLPGHIQLLNALLDRRAVLGEDLQREENRLEKAESTFTIEPVLQSIHKNIKQLSRHIQDLDRQIDDHIDQHPDLKNDKELLSSIPAIADRTSLLMLSFLRSHAFERASQAAAFAGLVPIQRQSGSSIHGRSRLSKAGSSKIRAGLYMAAIVATRHNPHIKGMNDRLLANGKTKMMAVGAAMRKLIHLCYGVLKHQRPYQENYCANSQ

SEQ ID NO: 275762 - protein, 326 aa, unidentified
MTRTICGVDISSQSLDARIGREGAFAQFPNTTEGIHALRAFCQAHQVELVAMEATGGYEQLAFAELSEHDLSVAILNPRSVRQFAQSMGSLEKTDRIDAGMIAWYAEVKKSPPACLAPKSQQHLRALVTRLRQLTDIRTAQLNQQRLVTDRAVQKLFTRLLAEITRQIHALEKKIAALLDQDPLWRELNLAFRTIKGVADRTVARLMAEMPEIGVLSNKSISKLAGVAPLANDSGQHQGKRAVRGGRASVREILFIVASVVGRYEPDFIAFQQRLRAAGKPPKVVRIALAHKLLVRLNAKAREVRQRMQALESDRMLSRLDPCKAY

SEQ ID NO: 275763 - protein, 398 aa, unidentified
MTESSDYESVQVFIGVDVGKDTHHAVAINRSGKRLFDKALPNDENKLRSLISDLKQHGQILLVVDQPATIGALPVAVARSEGVLVGYLPGLTMRRIADLHAGEAKTDARDAAIIAEAARTLPHALRTLKLADEQIAELSMLCGFDDDLAAQTTQASNRIRGLLTQIHPALERVLGPRLEHPAVLDLLQRYPSPEKLASLGEKKLAAQLCKLAPRLGKRLAADIAQALAEQTVVVPGTNAAAVVLPRLALQLITLRKQRDEVALEVEQRVLAHPLYPVLTSMPGVGVRTAARLLTEVACRAFASAAHLAAYAGLAPVTRRSGSSIRGEHPSRRGNKALKRALFLSAFAALRDPLSRAYYTRKMSQGKRHNQALIALARRRCDVLFAMMRDGTFYTPQGS

SEQ ID NO: 275764 - protein, 428 aa, unidentified
MKYNTQNAKIKSITEKTLIVRIDVGSETHFARAFDWRNYEYSKKPLEFSNTEAGFMTLKAWMADFAEKYGKNVVIPGMEPTGHYWFNLGAYLQDNGMKPVHVNPHHVKKSKELDDNNPNKNDRKDPKTIAALVNEGRFSYPYIPTGIYAEIRSLSNLRLQTQEEITRIKNRIARWFSIYFPEIKDVYRNPDSVSGLMILKEAPLPQDIVKLGVDGINKIWRDAKLRAAGLKRAKTLVTAAEHSIGSQEAPDSARIELKNLLNDYEIYKNREEDLMSLTEEKLSEIPHIDKLLEIKGVGLKTVSGFVAEVGDITRFDNPKQLQKLAGYAIVECSSGKHKGESHISYRGRKRLRYVLYEAAISLIARNEEFKEVHRYYRTRKENPLKKMQSVIAVACKVLRIFYTILTKGVTYDGAKMMQDIKRPQMLAA

SEQ ID NO: 275765 - protein, 407 aa, unidentified
MICVGIDVSKRKSTVCFMAPGDKIIRRPFDVKHTKEELQPLVDEIRVQAKYDEIKVVMESTGVYHLSIAYFLQQNGIFVSVVNALKVANFNKAENFRHTKTDSIDSTNIARYGIAYWAKLPQFDLNGDKYFLLKRLCDAYLNFSEERSRILLQLQSQLEQTMPGIFDLFGGFDINSGKDKLLDFLERYCHIEDIIAKSEAEFVASYREWAKEKGYRSNESKAATIYAQAKNGIPSIPNNPIVRETIMWYVKLLRRADEALMASLTRMEDIARDLPEYELVGEMGGVGRVTRVALIAQIGDVRRFKNKHSLICFAGLTPSIHESGKFRASQNHIVKKGPARLRKVLYQVMMSLVMHKIPKDDAVYRFIKKKEAEGKYKKVAKVAGMAKFLRIYYGRVMHLYRDLGLAA

SEQ ID NO: 275766 - protein, 382 aa, unidentified
MNGTSLTHHRRSARAHSSTLFIGLDVHKETIAVAYGAEAREAEVVFLGTIGTRQGDLDKLIRKLQSKGKTLHFVYEAGPCGYWLYRYLSKTDLKCWVVAPSQIPKKAGDRVKTDRRDAVQLARLLRSGDLTPVYVPGVEDAAIRDVVRAREEALKDGKAAQVRLQAFLLRQDMRYEGRATWGPAHLRWLAEVVCPTPAQQIVCQEYVRAVSEHTERLQRLETELQTLVQPWRWAPVVEAIQALRGVQFTVAVTLIAELGDLSRFDNPRQLMSYRGLTPSEHTSGERRRQGAITKTGNSHARRALLEGAGADRYPAKVSRHRQLRLEKLPQVIQDISWKAQVRRCNRYRRLMARGKNANQVVVASARAMAAFVGAIARTVKGT

SEQ ID NO: 275767 - protein, 359 aa, unidentified
MEQKRFVGIDLGKRTFEIKFITSNGSVTGTNGKTCPSGRKELYKKLLPTDRIAIEVCSLGMVMAKEIIQQVGAEVVLLNPSQIALIYRSVKKNDKEDALKLARLVQKFTNEELPKVELPTEHEENLRQILTELRQLKNDRTKEINRVHAIFVECGITEIKKSNLATHKNRSECIRILKGIFLSQAERSLRKLELIEAQILEVEELLDKEIDGDKSIETLITVPGVGKQLASSFVAFLGDGSRYPNVSSIGAATGLVPRLDMSSTSLRLGHITKKGNSNLRSLLILAAWSHVRAKNGGALKEKFLYMTIAQSKSKKVAIVAIARKIAELMYSLLKNNTQYEKRAPVSIKKLATEALVVAS

SEQ ID NO: 275768 - protein, 375 aa, unidentified
MNNTIFVGLDVHKETIAIAYAKANSRDVESLGIIMNESMAITKLVKKLEAKGATLLFCYEAGPCGYGLQRQISSLGHTGVVVAPGLVPSKPGDRIKTDRRDAEKLARHFRNGDLTPVWVPDIDHEAMRDLVRARHSAKEDLHRNRQRLLKFLLRLGVRSPEGARNWGVKHKQWLQGLKLDNEIQQIVLTEHLNAIRECEGRVERFEKEIQVQSSEGETHQAIIAALQGLRGIALVSAATIIAEVGDLTRFDKPQQLMSYAGLIPSEDSSGGTTKRGSITKCGNSHLRRVIVEAAWHYRHRPAVGVNLGKRQKHVSEEVKQISWKAQHRLNLKYRRMVGRGKTKQKAITAVGRELLGFIWAIGQEVKYGKQSDGVA

SEQ ID NO: 275769 - protein, 373 aa, unidentified
MPRYSTAFGMDVHLRSTTVCALDAETGEAVTRRFRGNPWGEVAEWMSGFPGPSLAAYESGYLGFAPQRELSGLGVDCVVAAVSKVPRSAADLSSKNDRNDAARMAKAILSHDVIPVWVPSPEIEGLRDLAGAHDAATARLAAAKQRLLAFLARRGYAYGGTTPAGNPRRYWTYDFLRWLDKVRPADDGGIRALAALRNEVEAAAETRDDLLAEYRAAVAAGPLSAEVEALQSIKGCGFALAAAFASEVGDFSRFRSGRQVTAYFGLAPKQRSSADSVRLGGISGAGNALVRRLAVEGSWSYVQASHQPKLMPKGSGVPLEVRMHGRKGSERLLRRREEMLARGMPQAKANAATAAELVRWLWALGAMCREATE

SEQ ID NO: 275770 - protein, 401 aa, unidentified
MNKFNPEQHRIETASSLEVVRSAGVVERHAAYVGLDVHKETITIAVAEPGREEPTYRGEIANKPKAVEKLLTKLSETYDGGLLLFCYEAGPCGYVLYRRILASGHDCQVVAPSKIPKTPGERIKTDRRDALKLARLLRSGDLTAVWVPDQEQERMRDLSRARDDMKGQERKARQQLNAFLLRHGYHWPRGKSRWTPAHESWLAGLKMEHPWQQVVLEEYIASERAAGERVAQLNDHLMRALPEWSLAPVVDSLIALRGVDKLAAIVLLAELGDISRFDSPRQLMAFLGLVPSEHSSGPRRRQGGITLTGNGHARRMLVESAWSYRFPARWTKHLKGKARNASPEAKQIAWKAQTRLCGRYRTLTRAGKNTKLVCVAIARELAGFLWDIVRHEMPRLAPQQG

SEQ ID NO: 275771 - protein, 414 aa, unidentified
MDVVHPRCAGVDISKRDAKVCVRIADSGRGRARSTVTTWGAVTNQVLALRDHLIAEQVTLVVMEATSDYWKPFFYLLEDGPFEVMLVNARHVKNLPGRKTDVSDAAWLAQLGAHGLVRGSFVPPPPVRQLRDLTRTRTTITRERAREIQRLEKLLEDAGIKLSSVASDISGVSGRLMLDALIAGRHDPVELAELAKRRLRSKIPELTEALTGRFSEHHAFLARVHLDLIDQHAHAIDEITTRIEVVIEPFRGARDLIVTIPGISTLVADVIIAETGADMARFPTAAHLASWAGTCPGSNESAGRVKSTRTRPGNPYLKGALGIAAMSAARSRDTYLSVRYRRIASRRGPIKAIVAVEHTMLIAIWNMLTTGTFYADPGSDFYTRLNPDKAKHRAIDQLRKMGYDVTLHPLAQAG

SEQ ID NO: 275772 - protein, 415 aa, unidentified
MKVVFPTCCGVDVHKTFLVATIITTPTDSLQPHYQKKRFSTFNSDLNRFADWLVEHNCLDVCMESTGKYWVPVFNILEKRGIRVVIANPKWVKAVKGNKDDTKDSKWIGDLFRIGLVKSSFIPDLHIRILREFTRYRYKLVSMKSSEKNRFQNAFTVCNVALDSVVSDMFGKSATAITDYLTSDESFDTEHCVSLLQRSLKKKAEQVLESIEGFSIADEQKARIKIIREHYDFIEEMIAKVDTCVNEMVAKYEGNINLLCTIPGIDRRSAITIISEIGTDMSQFGSSKRLCCWAGLTPGNNESAGKKKSVRISRAGVYLKPALVQVAHAAVNDNDHPYYKLKYERIAKRRGKKRAIIAIARMILTAIYSMFSTGELWNPVDLYKIDMPEHLKEQQLAKAIKQATRFLEKQGLSVA

SEQ ID NO: 275773 - protein, 412 aa, unidentified
MFKIFRNNCCGLDVHKTWIYACIGITDPNGRTEYKQARFSSFSNGLRELAAWLARYSCTEVCMESTGKYWIPVFNILEKSCFVTLAHPKYTKPQKGNKTDRKDAKWICDLFMCDMIKPSFIPSPEIRQLRDLMRYRFKLTNMLTGEKNRAQNCLTVSNLKLDDVFSDVFGKSARSITCYILDHPGETFDVSSFVDPRCKTPVSEIQAAVDGAISPEQAVKLRQCLAHIDELEAHRKEIESEILQIAEPFSAVLDLLSTLPGLDKNPMTAIAILSEIGPDMSVFPSSKHLVSWAGCCPRNDQSNQKVKSRRISRAGSYLKPLLVQVSNALIKSKKHPEFKERYHRIKSRRGHKKAIIAVCKMLLTAIWNMLSKLEPYNPEGFLEHRPVRQEKTLTVSQALELLRLRGYTITNP

SEQ ID NO: 275774 - protein, 344 aa, unidentified
MECYVGLDVSLKQTSICVVNEKGLVVREGVVDSVPEAIAGFVRSKAPGAVRVGLETGPTATWLWTELARLDLPVICIDARHAKAVLKMQVNKNDRNDAAGIARIMQTGWFKEVRVKDLDSHAVKALLASRALLVKIKRDLENQVRGLLKNFGLVVGHGTFNVFAVRAKELIADRPELTSAVSPLLTARTAIEQQIGKLDRQVLKLSRQDAQARRFMTVPGIGPITALCFKATIDDPARFRRSRSVGAYIGLTTRRHASGELDWSGRISKCGDAMLRMYLFEAAGVLLTRVPKWSALKAWGTRLTKRNGLRKAKVAVARKLAVILHRMWVDGTEFNWSNNKEVAA

SEQ ID NO: 275775 - protein, 360 aa, unidentified
MRYSTIVGIDTHSKKNAVCAIVPATGEMREAVLSEDPEQLLAWIVEQDFPKPVGCVYESGPTGFGLARSLVAGGVACTVAATSKLSYRVDRQKNDRVDAKWLAQQMIAGGVREVRVPTPEEESLCHLSRLRGEVAADLRKAKQRVSSFLLLTGTEYTLTKKKWSKTFRKWAASCEFDQPADTFAFRCKMSAVLRLEERLAEVEAEILRIVASSPKLSERMSRLTCIHGVGKVSAFSLVCEVHDFDRFNNGASFASYLGLVPSENSSGKKVSRGAIAKQGNSHLRRILVEAASCYSKPFKAVRSEDAAVPEAVRAKAEKCAARLRKRRAALKKRGVSANKAKVAVARELAEWIYHIAVMPA

SEQ ID NO: 275776 - protein, 355 aa, unidentified
MQYIAFDAHKHYTLASVARPDGGVIREERIEHQRGALEAFLARCERGSPVALETIGNWYWIVDEIEAAGCLPRLVHARKATLMMGEINKTDRLDVRGLNRLQRHGTLPTVWIPPGELRDQRDLPRTRMMLVRQRTQLKNRLHATSAKYALHDFEISDVFGVRGQARLRGRLELLPPHTAYASRPLLKHIEELGSQIREFEERIRRTFEPTAAIRQLITVPGVGLTLAVVVALEVGDVARFASAEKLAGYAGTTPRVHASGGKTRFGRSRPDVNRSLKWAFIEAANTICLTRRRRPLQHVSQLYERIARRKGHPTAIGAVARHLAEATFGFSGNRNPIANPRLRPCRPQGVSARFP

SEQ ID NO: 275777 - protein, 407 aa, unidentified
MEVFVMISVGIDVSKEKSTVCIMKPLGEIIAGPFEIDHMDSELRGLAKMLHAMNEEVKVVMEATGIYHLPVQTYLAEKGFFVSVINPYQMKQYRTEGQGLRKVKTDKADSMIIAKYGIDHWSSLKESVSQNEKYDELKILSRQYRHYMRIHVESLLGLTHLLDYTMPGIKGEFKSWNPDNGKDKLSDFVDHYWHYENIAKRSERQFVESYVKWAKRKGYRQSQEKASKIYSMAKEGIPTLPANQTTKMLVNQAVEVLKRVDETLNTILSRMKELAKALPEYPVVRSMGGVGDTLAPRLIADIGDVRRFHSAKALIAYAGIDPPPYESGKFHGTNRKILKRGAASIRKTGYEVMRSLKSHPPAEDNEVYLYIMKKESEGKAKKSAKIAGLNKFLRIYYARVKEVYTKE

SEQ ID NO: 275778 - protein, 398 aa, unidentified
MIAVGIDVSKGKSTVAVLSGLGELLLSPRDYPHKEDSLNELCTWLHSLNDEVRIALEFTGYYHYSIRDKLIREGFFVSVVNPYLMKKFNDGSVRKGKSDKKDAIKIATYCVEKRNHLKPWNYLGKPYETLKFLSRQYHQMISLKTKQKVQLDNLFDLVMPDVKKVFLLTNRPTSCLALYDFVEKFQSWKVIKDMTYSTFEKRFLSYMKKKGYRPNASKAQRLYNIAQNSLLPREANYCTSLILKQRIQLAKSTESATVAILKQMQELVKTLPEYELVHSFNGVGDILTPLLIAEIGDIRRFTSGKALNAYAGNDAPPFQSGTYLGTRRHISKRGSPFLRKVGYEVILALKISKPIQDPVYQFILKKQAEGKPKMVANMAGLNKFLRIYFARVMELFAI

SEQ ID NO: 275779 - protein, 345 aa, unidentified
MEHVAIDLGARKCQICVRASDGTILEERRHDTAQLKEYLEGRPKSRVVVETCAEAFGVADAALALGHEARVVSATLVRTLGVGARRNKTDRRDARVLSEVSCRIDLPSVHIPSKTARERKTVCGMRDALVGARTKVINTVRGWLRGQGKRLPPGATSTFTNRVRALCGDTPSYVERQLRVVDALSQEIAEADQAVEAEAKDDQTCRNLMTVPGVGAVTAVRFVAAVDELGRFESAHQLESYLGLVPGESSSSERQQRLSITKAGPTRLRWVLVQAAWSLRTRCRAREALPLQMWAHQVEQRRGKRTATVALARKLAGILYAIWRDGTVYQGTRAATVVDATATTT

SEQ ID NO: 275780 - protein, 406 aa, unidentified
MIFVGIDWSEAHHDVCVLDDQGMVLAKGKVSDDVSGVGRLHAMAAEHAEDPSEVVVGIETDRGLLVGSLVQAGYRVYAINPLAASRYRDRHAVSRAKSDPGDAKVLADLVRTDRQNHREVAGDSELAEAVKVLARAHQNLIWSRQRQVNALRNTLREFYPGALRAFTTSQLATIEACSVLAMAPTPTWARDKLTLQRLRRSLSASGRKRNLDRRAGQILHALQAPELSAPALVEQAYGDVVGSLVVVIDGLTHQIAKLEAELAERFEGHPDAEIITSLPGLSSVLGARVLAEFGDDPTRYDDARARRRYAGTAPITRASGTRRVVLARVARNRRLSDACYLWAFSSISASAGARRYYDAHRARGKTHHQALRALANRWVGILHGCVAGRELYREEVAWVAPVLEAA

SEQ ID NO: 275781 - protein, 378 aa, unidentified
MKRILKIGMDVHTSNYTLCAMEPIIGEDDRVFATIKVTPDYKNILLFIENLKTKLGLNDEYDIQCGYEAGCLGYSLYKQLTAAGVKCVILAPTTMLTPQGVRIKTDMRDAYMIAQCLSYGGYHAVYIPTEDDDSVKEYLRMRNDHKLALKKIKQQINAFCIRHGFCYDGTKWTQAHLKWLKKPEITNQLYRETLDEYMASYEEQEAKIERYDKRIEEIAEQTRYHDKVKKLECFLGIKTHTALSLIVETGDFERFAKGNQYASYLGLAPGENSSSDSIHRLGITKAGNSHLRQLLIEASGGICKGAVGHKSKDLRARQNGNTAEVIAYADKANTRLRSRYYKLIRHGKKRNVAVAAIARELACFVWGMMTDNIEMKAV

SEQ ID NO: 275782 - protein, 347 aa, unidentified
MLHAGLDLGRRKLHVCLLSDQGEHLDQLAVPPDVDSLRTLARRIDEVHGEPVCAVVESMTGARLVHDTLEQEGWSVEIADAQKVKGLAPLTCKTDKIDSLVLATLSQRDLVPAIWLPDPHIREERELARFRLHLVKHRSMLKHRIHSTLINFGRPCPVTDLFGVEGRRLLERLEVPEPWRGNVTASVALIDDLERQIAETNRRLRAGHADHPYIPLLVSAPGIGWVLAFTIASEIGEIERFSSPEKLTGYTGLCPRVNQSGDADRRGPLTKHGPRYLRWALIEATMHALKHPAYSERYQRNKRRLGKQRGAKIAQIDVARRLAHAIWHMLTRNEKFAPRGAALRLAA

SEQ ID NO: 275783 - protein, 387 aa, unidentified
MPACGPRPGRVAIQVSLAAIFVSLELSRSTWLITSLVPGGGDKMSKHSVRSGDVAELMAHFAKLRDKAHVRAGASFPIIVIQEAGLDGFWVHRVLERAGIESHVVDAASILTSRRRRRAKTDRIDGEALLRTLLAYKRGEPRVCAMVRAPSPEEEDRRRLCRERKTLVAERVAHVNRIKGLLFAQGIADYEPLRGDRRQRLEVLRTGDGRPLPLYLKAQIGRELDRLELLLEQLKAVEAERNAVLEPTNDAAPIAVQALAGLRGIGPEFTAILWSECLFRSFRNRRQLAAYAGLAPTPWQSGSVQHEQGVSKSGNPRLRSTMIQLAWLWLRHQPTSELSLWFRERVKRNGGRGKKTAIVALARKLLVALWKFSSSGVVIEGAMMKAA

SEQ ID NO: 275784 - protein, 392 aa, unidentified
MSQHCHFDASRSLTTLEQDSTIIAVIEMSQTKWLVAALIPGVERQPIKKFDAHEETLLKLLHRWRREAGHAGRNIKRIVVAFEAGRDGFWLARWLRARDIEVYVIHPTSIAVSREHRRAKTDRLDTELLMRVFLGWLRGERRHCSMVAIPTIEEEDARRPNRERQTLVTEQTRIINQMKAIFARFGIRTLRPTMRKVAEKLEDLRTAEGTPLPQNTLAELRRHLARLRIVRDQIRAVEQERLRKLAVASAAEKKSPHAMVRLIARVLGVGVETADMLVNEIFSRHWRDRKAVARYAGLTGSPDESGSRRRERGLARAGNVRVRSGMIQLAWRFVRFQKNSALAQWFAARTADGRASTRKTMIVALARKLLIALWRLVTRGEVPQGVALRPAS

SEQ ID NO: 275785 - protein, 460 aa, unidentified
MLRKVKTSTPKGGFMGSEVNRYERFCQFKQDIRGSVEHLIIGMDVAKDKHHAFFGMANGKTIYKRLIFTNDLSGFDKLMSHVESLTTQHGLSKVVFGLEPTGNYHKPLADWLISKDHLVVLVGGKAVKDNRELIDGRWDKNDTKDSANVADLVSQGKCQFYEQPGTRLNELRNLLSLRKRLKKQEHAFRMRIRNGVLTKFFPEMDHYWGSSVEENLAIVERCLSPRKISAMTFPEFVKRVTTTDRGTRQLHRLQSIYDAAGHSVGLPMGSADEFEAGMLVKDLRAVRTRIKETMEQVETVCREFESYDILQTIPGYGPYISALVLAAIGEPERFKSRKHVRRLAGLDLCASRSGRKSDQAVPVISKRGDADLRYGLYQAALIASYHSDDFRRLFNRMLKGRERERGIKTKMRVKLAEKMLVIAWTLMKKKEPFTPLFLRAANTVFGETELGSAGEQPNKG

SEQ ID NO: 275786 - protein, 317 aa, unidentified
MITEGYVCGIDVSAKKLDVALYCDKKFIREWVVENTEEGVAALVHELRQVQSKLTVMEATGGYEELALYRIYEAGLSVARVNPRHTHHFGISMGLLAKQDNIDARVLAEYGIRTDVQPSTLKDMENRAFSAALERRRQLVIMCTAEKNRLKQSHFTVRAKIQRHIDWLTNEITGCEREMHDLVKKMPVWTDNADTLKTAKGVGDIVAFTLLADLPELGTLTAKKIAALVGIAPYNDDSGKRKGYRSCRGGRANVRTILYNATMSATRCQGPIRQFYMKKKAEGKPFKVAIVAAMRKLLTILNAMIRDQQCFRLPAAA

SEQ ID NO: 275787 - protein, 415 aa, unidentified
MAKKGKKNPSTPENLPILHPHAAGIDVGAEEHWVCVPADRDAQPVQKFSAFTCDLHRLADWLTACRVTTVAMESTGVYWIPLFQILEARGFAVALVNARHVKNVPGRPKTDRFDCRWLQKLHSYGLLAPSFRPPEDICQLRSLLRHRENLIQMTVKHIQHMHKSLDQMNLHLHHVISDVTGVTGMRIIRAIVAGERDPKALATYRDYRIKSAQDTIAKALEGDYRPEHVFTLTQSLALYDFTQQQIAACDQEIERVLGTFDSLIDPDEHPLPPPTTAHRRPQRNEPAFDLRTHLYRITGVDLTQVPGLQAPTIHIILAEVGLNMHKWPTDKHFVSWLGLCPDNQISGGKVLSTGSRRVQNRASRALRMAAQSLRTSPSYLGAFHRRMRSKLGPAKARCPFRKSCASIFGRHPRVE

SEQ ID NO: 275788 - protein, 372 aa, unidentified
MTSIIYVGMDVHTTNYTLCCYSMEDYRFFAEVQVEPDAKNILKYLARIEKQQSRDCRIVCGYEAGCLGYSLYHQLHAHGIDCVILAPTTMMTKPGKRIKTDRRDARLISKCLAFHTYSSVYIPTEVDNAVKEYIRMRDDANSALARVKQQIIAFCIRHGKIHDGKSYWTNKHLEWLSSLDLGNKILSEVLQEYLIRYYQLREQVDMYDMRINELAQAEPYRQKVEKLGCFRGIAAHTALSFCVEVGDFRRFATAQQFASYLGLVPGECSSGDKQQYTGITKAGNSHLRKLLVETAQVFGRSATKSGKSVALKERQAKCDSLTVAYADKANARLKKKYFKIAMRSKVNIAKTAVAREMACFIWGMMTDNISCA

SEQ ID NO: 275789 - protein, 422 aa, unidentified
MLEESRDEEQIIARVAALDIGKAELVCCVRVPAPDSARKRLQEVSTHSTMTRSLIGLANRLVELGVERVVMEATSDYWKPVFYLLEAHGLDPWLVNARDVKHLPGRPKTDVLDAVWLCKVAERQMLRPSFVPPAPIRRLRDLTRYRIDLVGVRTAEKNRVEKLLEDACIKLSVVASDIFGVSGRAMMAALIAGERDPKVLAQLARSRMRTKISRLEDAFNGHFDAHHAFLLTRMLHRIDGIDADIAAVDAQIEAYLAPFASAAARLDEIPGIGPVAAAVILAEIGADMARFPTAGHLCSWAKFSPGINSSAGKTKGNGSTGHGNRYLARVLGEAAVGASRTDTFLGERYRRIARRRGKKRAVVAVGRSILVIAWHLLADEDTHFTDLGADHFTKHTNPEVKKRNHIRQLEALGYTVTLTPAA

SEQ ID NO: 275790 - protein, 406 aa, unidentified
MIHVGIDWADTTHFICILDDNGKKLESFQIPHNHKGFEGFDRKISRFGAPSQVRVAIETKDSLLVDFLLELGYQLYFMNPMQTARFRDRHRMSRSKSDAFDAYVLADAVRTDAHLLHALQELDEISLQLRVLTRTREGVVNRKVAIHNELTAHLKRYFPVALELFGGVDNAEAIAFLSTYPTYQQAKTVTQTRVTALLMKHTEVSPAIAARHATKACALLKEKQAQPQASIAQAYPVVVKSLLRQMKNILAELEVLDEEIATLYRDHPNKDLLESLPGVAEKLGPVLAAEIGTDLTRFQGVKALKAFAGVCPVTGQSGKYKSVFFRRACNKQLRRAVHLASLAALHKPWARELFDRLRSQGKTYGRSLRAVGEQLLEILYAVLQRGVPYDDEYHMQMKVVHGRHCH

SEQ ID NO: 275791 - protein, 349 aa, unidentified
MKISTVGLDLAKNVFQVHGIDGEGAVVVRRALRRRQVMPFFEKLGPCLIGMEACGTSHHWARALSGLGHDVKLMPPAYVKAYVKRGKTDAADAEAICEAVTRPPMRFVAMKSTGQQSILALHRTRDLLIRQRTQLVNMIRAQLAEFGIVIAKGIQHALELMERLADGEVLEIPPLAVKVVVTLARQLRDLQARIGELEKDLVKWSRGNPMAKRLETIPGIGVITASALAPTVTDPRQFTSGRQFAAWLGLTPRANSSGGKARLGHISKMGDRYLRRLLVNGMMSRLRWLRLRPDSQPWAARLLRRKPAKLVAVAMANKTARIAWAVMTRDQTYRPQPINGAPTHGGLTA

SEQ ID NO: 275792 - protein, 405 aa, unidentified
MTRLPTEEFAACIGIDWADAKHESCLQAAGSEQSECSTLDHQPDAINEWVSTLRTRFKGQPIAICLELNKGPIVSALRQHDFLVLFPVNPLTLARYREAFTPSQAKDGPTDAELQLELLLKHRDKLKPLQPQSPTMRALEQLVASRRRLVGDKVRLTNRLTSTLKNYFPQALQWFHDNDTTLFCDFLTQWPTLKAVQLARRSTLERICRDHHVRSPDVIQQRLHAIKSATPLTTDEGVITPNALLAQALVTQLRATLHAIEEFDKAIAQRAQSHPDFPFFDTLPGAGAVFAPRLLVAFGEQRDRYASAAELQKYAGIAPVTERSGHKAWVHWRLQCPTFLRQTFVEWAAESTRHSFWARAYYQQQRAKGASHQAAVRALRSNGFAFSSGVGRIARRIRSRSISTP

SEQ ID NO: 275793 - protein, 455 aa, unidentified
MPRKSAKASFDLTRHIQGAAAIDIGSRMHMAAVSPEAAKDPIRSFGTFTSDLHALAEWFKECKVTSVAMESTGVYWIPVYEILEQHGFDVILVNARYAKNVPGRKTDVSDAGWLQQLHSYGLLRGSFRPQADIAALRAYLRQRERLVEYAAGHIQHMQKALMEMNLQLHHVVSDITGVTGMQIIRAIVGGERDPETLAAKRDVRCRSSAEVISAALMGNYRDEHVFALTQALELYDIYQERIMACDRRMEGLLLLLSHDSAKPAADLPKPRIKTKQVSAPSFDVRGILYRLLGVDLTQIHGIGVSLALKLVAECGTDLRAWPSAKHFTSWLCLAPGNKISGGKLLSSRTRRSSSRAAALLRLAATTLGRSDTALGAFYRRLSARVGKAKAVTATARKIAVLFYNTLRYGMVYADPGAGHYDEIHRKRVVSNLHRRAQSLGFVLHPIPVATEPAVS

SEQ ID NO: 275794 - protein, 329 aa, unidentified
MSPAIIYFGLDVHKDSITVAVLPADAAAPTRVDRLPNDLPKLKRHCARVAAEGALRICYEASGAGFVLHRALRAWGYHCDVIAPSLIPTKPGLQRKHDRYDATQLARLYRAGELTAVRVPSETEERIRDLVRCRETLQRELLRSRDYLLKFLARRGLVFRAGKHWTQAHLTWLRALAGPESPLETEDVEVLNEYLALFDYTLGRRQALDQRVAALAETPSLRTAVQWLQCFRGFQVQGAMVLQTELGDWRRFDSPRPLMAYWGLVPREDSTGARERKGSITKAGNAHCRHVLIQAAWSYRHPPKVSVALKARQRGQPATVLSHAWKAQH

SEQ ID NO: 275795 - protein, 346 aa, unidentified
MTHSTTVGVDLAKNVIQVSVVSARGKEVLNRSFTRRKFAEFLGKQKPALVAFEACATAHYWARAAARHGHVARIIPAKFVAPFRQGHKTDSNDALAVAEAARRPSIKEAPMKTVEQQGLQAIHRSRQLLIQECTALSNHLRGLLMEFGVVIPQGFASLLRAVPEVLEDGENELPDIYRPTLHRMYIRLLELREHIEAMTKEVEVLVKQHPICSRLTALEGIGPIGALLLYATLGSGNAFSGSREFAAYLGLAPRQYSSGGKTNIVGLSKKIGNSRLRSILILGARAYTYRLKEPKSSKDRWLKDVITRNGHSRAAIALANKNVRTAWAMVTQGTEYQRRGQLKVAA

SEQ ID NO: 275796 - protein, 321 aa, unidentified
MYSIGLDVSKSTINCYIPNGEVDLIIDNNLKSLNQFYSKLKKIYKKDIDKLVFIFEPTGSYSTLLKRFCTKKKIKAFIVNPKQSHNFAKAVAQRNKSDEIDARVLSKMIVIASENDIKIPIYDENIEDIKDYMSYYKFVVKQLVQAKNALEAMKHNQSNKHILKSLEKKIDAFQKESLQIIVKIKKIISQDQFLYKSFNNIRSINGVGDITAIVLLHLFLKYPAANQRQIISLTGLEPTIKSSGSSVRTKPKISKAGSKLYRGTLFMSALSAIRFNPKIAEFYNRLKSNGKQSTVAQVAVMRKLIIIAHSLYKNNQQFIWN

SEQ ID NO: 275797 - protein, 336 aa, unidentified
MIVIGVDVHKQSLTAVAVDEVGRAVAELTVGSPAELVAWSGSLDAERLWAVEDCRQLTGALERRVLAAGESLVRVPPKLMAPERRAGRARGKSDPIDALAVARAALREPRLDRPRAGEAALRELKLLVDHRDDLVDERRRVQQRLRWLLHDLDELTVPPGALDRPLWLDRVAHRLRCAEQTVQIRIARELIGRCRSLTRSILALDRELQSRTEQRAPRLLTLPGCGPLSAAKLLAEIGPIERFETDAQLARHAGVAPLEASSGKHQRHRLDRGGNRQLNCALHRIAITQARVHPRARAYLERKQKEGKSRREALRCLKRQLARTVYTTLKTESALT

SEQ ID NO: 275798 - protein, 369 aa, unidentified
MPHVTSIGLDVHARSVAAAAFNPFTGEVVHRDFGTDAAEIAEWALGFEEPRACYESGPTGFHMARELRALGLDCAVAAVSKMQRPAADARRKNDRRDAEFIARMLATHNIVEVPLPDAAVEAARDLDRALDDATAEYRRARQRLNMFLIRLGHVWDERNADGARKGSWTRAHWRWISGIRLEGPQRDVLEYYVTAARCAESDRRQLEKKVLALARTDRWRPAVEALSCIKGIDTLTAFRLAAEAGSFTRFRTAPAFASWCGLVPSERSSGETERRGGITKTGNRLARTVLVESAWHYLTCTPRPKAPAPGADVPAAIRARADDCTARLCRRREALAAAGKSSCKANAAVARELACWVWEIGRRAEGTLG

SEQ ID NO: 275799 - protein, 344 aa, unidentified
MNITTIGLDLAKNVFQVHGINDEGDVIVRRRLRRAQVFGFFEGLAPCLVGMEACGTAHFWARELVALGHEVKIIPPSYVKAYIRRGKNDAVDAAAICEAVTRPNMRFVPIKSEEQQAALMLHKARELLMRQQTMLVNALRAHMAELGMTAPLGRGRVEDIIAVIEDDEDESIPPLAKAALKPLVAQLRANEDATAALDSEIKAWHKGNVASRRLATIPGIGFLTASAIAATVPDPSFFRSGREFSAWLGLVPRQNSTGGKDRLGRISKQGNSYIRRLLVLGATSMLRHARTRTAPGADWVNSLLERRPARLVTVAMANKTARIAWALLAHEETYRAPAAPAMTQ

SEQ ID NO: 275800 - protein, 420 aa, unidentified
MSEMFDWYVGIDWASEVHQVCLVDDRGVVRGERAVRHGGEELAALAAWLIETTGAAPERIAVGIELPHGPVVESLMERGFAVHALNPKQLDRFRDRFSVSGAKDDRRDARVLGDSLRTDTRCFRRLKPDEPRLIELREQLRMTEECKHERIRLTNRMREQLWRYYPQMLDLSDDLSAAWFLDLWALAPTPAKALRVRESTIAKLLKKHRVRRFDAAEVMRRLRRPALTVAPGTVEAASVHVSALRDRLRLVTRQIAAAERRVDRILTELAASPEEPEAAPGQPPQQSDVTILRSLPGVGRIVCATLLVEAGGPLKAGDHQALRALSGVAPVTRRSGKSCVVLMRQACSQRLRDAVYHWSRVAVQCDATCKARYQALRKAGHSHGRALRTVGDRLLETACAMMRSRSLYDPQRTAREPQAA

SEQ ID NO: 275801 - protein, 449 aa, unidentified
MNSIRFVGLDVHRESIRACIRDGNDDILSEHSLGCTRDEIESFARSRLARRDVVALEATFHSWAIVDLLAPHVGRVVVSNPLATKAIADAKIKTDKIDARVLSELLRLDYLPEVWTPDAATRERRATCARRAGLVSDVVRIKNRIHGVLAKTLVPKRKGDLFDRKGRLWLESLDLPEHARRQLESDLRLLGLAERELGIHEAELVRGAWDDPRVKLLVTMPGVDVTVALAILAAIGDVDRFRDGDRLAAYLGLVPSTYQSGERCYHGHITKRGNCKARWLLIQAAQHLAGHPGPLGVFFRRIEKHKNRNVAVVATARKLAVIAWRMLTTGEPYRYALPKPTSGKLARFRTRATGARRKGGNPKGAPRHPNYGTGVQTRTIPALPTVYAGEGVPLARPPDRLAPGERRMLEQNGASPFVQSIQSPEVRPRKLPKNSGVQCAGAVHDATST

SEQ ID NO: 275802 - protein, 407 aa, unidentified
MDIIHQQCAGLDVHKDEVVACARVVTGRRVLRTPARFPTTTKGLLALADWLDEHQCHVVALEATGVYWKPVWHILEARVQLVLANPGHVRAIPGRKSDMNDAAWLADLLAHGLIRGSFVPPPAIQELRDLTRTRKQLGRQIAQHSLRLQKTLEDANLKIASFVSDLLGVSGRAILRGLIDGETSPAQLLARTTGMLRADPEQLCTALEGRVREHHRFLLRLHLTQIEALEKGIESLDVRLEVLLSPFRAVTARLCTMPGVSTLVAQTILAEIGDDMRRFPTPGHLRSWVGLCPRLDESAGKRRSTRLRHGAPWLKTVLIQAAWAAVRHRDGYPHAQFQRLKAKRGPKKAIVAVAASLLTAAYFILRDEVEYRDLGAHYFDRHDATRAAARLTKRLEALGFAVQLTPA

SEQ ID NO: 275803 - protein, 404 aa, unidentified
MGQVFVGHDWAEEHHDIDIRDGEGRSLGRARLSEGVEGVARFHALVGALVEHPSAVVVATETDRGLFVGSLVAAGYQVYAVNPMSVARYRERHSTSGAKSDPGDAAVLAELARTDRHHHRRVAGDSDLAEAIKVLARAHQSLIWTRQRQLNQLRSTLREYYPAALELGDLHGPDALGVLTVAPTPSLGRRLSRTRIGSAIARAGRQRRVEQRAAEIQAVLRTDQLSPPAVIDEAMGASVSALVAVVGEFNTQIARLEEQLSERFDQHPDAKVVRSLPGLGTILGARVLAEFGDDPNRYDSAKSRKNYAGTSPITKASGKSRVVLARYARNRRLADACYLWAFAAITASPEARSFYDARRAAGDTHNRALRALANRLVGLLHGCLRHDTLYDAHAAWDHRHQRAA

SEQ ID NO: 275804 - protein, 392 aa, unidentified
MIYVGIDIASEKHDYFMLQSETGTVFSSSAITISNSEEGYKKLHRDISAFCGATGDSQVRIGLESTGIYHTNIINFLLSHDYKVMMINPILTNMARKASKVHCPKNDNLDSQTICKYLIDNRDKFSPYTLSVYHNEALKSLSRKRFFIVEDLRKAKSAVNNLVQLIFPEFKTLFSNIYGDSAIAILKEYKSPKNLAKAHKSKAASLIHGRCKCTAEQLFATAKMSVGISEDYYTFQLIDAIEEMEHIRHRIEGYDAQIKAYVDELCPNLLSIPGVGYITAGLIAGEIRDINRFHSAESLIAYSGVDVTVYQSGKYRAQNLMPSKKGSKYLRYALFQVARIIWQWDPTFKAYYEKKQSEGKHYYVILGHIQKKVIRVIYSILKNGTVYEPCFA

SEQ ID NO: 275805 - protein, 387 aa, unidentified
MPQPNDLSRSPIALNQDGTVIAVIEMSRSSWLVAGIVPGIARQPLKKLAPDEAALLGLLERWQDEATQAGRQITRIAVAFEAGRDGFWLARWLRAHGIEAYVIHPTSVAVSREHRRAKTDRLDTALLKRVFLGWLRGEPGHCTMAAIPTLEEEDARRPNRERESLVGERTRIVNRIKANLARLGIRGFKPTVRDAAERLDTLRTPEGAALPPNTSAELRRDMARLHFVATQLREIEDARRERLELRPDQGPHAMVRLLARVIGIGIETADMLVHEILSRNLRDRRAVARYAGLTGAPDESGSRRREKGLAKAGNARVRRGMVQLAWRFLLFQKDSALAQWYRTRTADARGGTRKTMIVALARKLLIALWRFVATGEAPEGVVLRPAS

SEQ ID NO: 275806 - protein, 416 aa, unidentified
MEIEHTHCAGLDVHKKTVVAAIIVPDGQGGLRKEVRTFGTMTADLLGLSDWLLSFGVTHVAMESTGEYWKPIYNILEENFEVLLVNARHIKQVPGRKTDVMDAEWIADLLRHGLLRSSFIPPVGQRELRELTRHRTNFVRERASLVNRIQKTLESANIKLASVASNVMGVSGRAMLEAIVAGTANANEMAGLAKGRLREKREQLDKALDGRVKPHHRFVLSELLCQVDSLDESIARFDAEIEKYCHPFEKEVELLDTIPGVAQRIAEVIVSEIGNDMSRFPTADHLAAWAGVAPGNNESAGKCYSGTTRHGDRALTSALVQAAHAAARTRNTYLSAQYHRLAGRRGKKRAIVAVAHSILVISYHIIQRKEPYRDLGGDYFDQRRPEATAKRLLIRLQHLGYDISRIEQTATLPTVA

SEQ ID NO: 275807 - protein, 333 aa, unidentified
MIQLKEGIEMNKPVLGIDISKLKFNICLINSNQKPRHKVFPNTLSGFEQLITWLSDQNAGDAQACLEATGTYGEALALFLLQAGYYVSVVNPAAVKAFAGAGLSRTKTDKVDADLIARFCLSQEPEVWKPPAPEIRELQALVRRLESLIEMRVSEENRLSSGVVVEVVRRSLEEHIAYLIEQIKHTEQMIREHIDNHPDLKRQSELLDSIPGVGQTTAALFLAEIVDIRQYKSARQVAAFAGLVPRERRSGTSVRGKVRLSKIGNARLRKALYFPAITALRCSEFFKQWASGMRERGKCKMSVIGAAMRKLIHLAYGVLKTGKPFDPNWAKTT

SEQ ID NO: 275808 - protein, 346 aa, unidentified
MEYIALDVHKHYTWARVENDQGHKVYECKLAHRRGTIKNFAKQWSPGTPVAVETVGNWYWVIDEIEAGKGSPQLVNARLAKLMIGSVNKSDKLDAKGMNRLQRVGTLPTVWIAPSAVRDARELPRTRMVLSKQRTQFKNRIHATLEKYGLKVEGVSDAFGKAGRRIIEELCSKLPPHTEQALRLMLDELDHVQANLKTIEGQMQQAFAPCQQTAYLHSEPGVGEMLAVVIWTEIGTIERFGRAEQLASYAGLVPREHSSGGKVRYGRVRKDVNLYLKWAFTEAANSAVLNRERCEYRHVARLYENVKARRGHGKAIIAVGRHLAEAAFWMLKKGENYREPMSSTQR

SEQ ID NO: 275809 - protein, 326 aa, unidentified
MTASQASDNSFIGIDVGGASFDVAWHRGDCAHYANRPDGVAALLAKLKAGPAISRIVVEPTGGYEKPLVKTLRRAGLPVEIVHTSRFSAYRVMVGARAKSDSSDARLLAAYAAAPDDVRGRKPHHVEVPEDAIREELAELASRRDQLKHMIHGETCRLTTVRSAKLRQAITAHLDVLKAEDAQTHQTMLALVRARVDLKKAQGLLKTIKGLGDKSALACIALVPELGHVGNRAASALVGVAPFTRQSGTMTAPARIHGGRAAVRNILYMAAVSASRHNPVLRPFYQRLLAQGKKVKVALIAVLRRLVVFANAVLRSGQPWKGATAS

SEQ ID NO: 275810 - protein, 349 aa, unidentified
MSHKSAPPTVSTIGIDLGKNSFHLVGLDQRGAIVWQLKCSRAQLERRLANIPCCLIGMEACCGAHYIARQLAALGHDVRLLPAQYVKPFLKGHKNDYRDAEAIAEAVQRPTMHFVAIKTPEQMDLLALHRVRSRLVGQRTGVTNQIRGFLMERGIIVRQGVVPLRRALPDILSSNTGALSPRIVNLIAELVQDWRRLDERIAAVSADIETLAEQDEACQRVMTVPGVGPIISSAVVAAIGNGAGFTQGRDFGAWLGLVPKQESTGDRTILGKISKRGNKYLRTLFVQAAHVVLARRPSAAMRSLWPWIEQASRRLHRNMLAIALANKLARIAWAVLARGRSYQPRIVAI

SEQ ID NO: 275811 - protein, 442 aa, unidentified
MAMKTRESSPWQIKHPNAAGIDVGSAEHYVAVPIDRCAQPVRKFACHTQDLQALADWLIECGVDTVAMESTGVYWIALYELLESRGLKVCLSDARRTRNVSGRKSDVLDCQWLQQLMTYGLLSAAFRPAEQICAMRAVMRERARLISEQGSCTQLMQKALTQMNVQLTNELSDIAGKTGLAIIRGIVAGERDGKKLAQLRDYRNHASAEEIARSLQGNWRREHLLCLANALELFDVYQRLIGKSDEQLQAMLAELPSVVEQAVPKSKKRGGKHAPSFDARAALYRCVGVDLTRIGGIDIGTALCVLLEIGWDLSKFPSVRDFTSWLGLCPGTRITGGKRIGGATKRTHNRATQALKLAAQGLSRSGCWLGAFYRRKAARLGAGKAITATAHKLARLIYALLTKGEAYVERSEEDYEQEHRKRTLRQLERNAARLGMRLEPAV

SEQ ID NO: 275812 - protein, 354 aa, unidentified
MTTMTDPSKEVILGADTHEDVHVGSVIDTLGRVKGTTSVPTTAAGYVELEVWARRFGTVIAAGVEGTGSYGAGLARHLAAVGIPVIEVNRPNRQHRRRRGKSDPTDAEAAARAVLAGEATAAPKTRVGVVESIRVLQLARASAIKARTQVANQIRDLVLTAPEGLRHQLRELNTRQRVERAARFRPALGADPNAATRRALRHLARRWQTLSIEIDELTRDLDRLVRHAAPSLLAQRGVGTDVAAKLLIAAGDNAHRLRNDAAFAALCGASPVEASSGKIRRHRLNRGGDRQANNALWTVAMVRLSCDPRTRDYAERRTKEGRSRREIIRCLKRYIARELFPLVLNDLQHTTALT

SEQ ID NO: 275813 - protein, 389 aa, unidentified
MKIFVGIDIAKLNHFAAAISSDGEILIEPFKFTNDADGFQLLVSKLESFDKNSIIIGLESTAHYGDNLVRYLVAEFYQVCVLNPIKTCQMRKNNVRKTKTDKVDTFVIAKTLMMQDVLRFITFFDLDMMDLKALGRFRQKTIKQRTRLKIQLTTYVDQVFPEIQYFFKSGLHQNAVYALLKEAPSPKEIASMHMTHLANLLKVNSHGHFTKEQAKELRILAQKSVGANDSAISIQITQTIQQIELLDSQLEKIEAEMTDIMKFNDSVIMTIPGIGYINGGMILGEIGDIHRFSNPNKLLAFAGLDPSVYQSGNFQAKTTRMSKRGSRVLRYALVNAAWNVVRNNATFKAYYDAKRAEGRSHYNALGHCAGKLVRVIWKMLTDEVEFNLE

SEQ ID NO: 275814 - protein, 347 aa, unidentified
MRILALDLGKNKSVFVDYLTSGGEQNFGKIGTNADEVRKLLQRLRPDRLVIEAGPAAGWVCDLAQRHDVSVQVANGNDERWRWKTVKDKSDRKDALKMAVMSEMDSLPTVHVPEASVRQWRSLIEYRHSLVDRRTAIKNSIRSIYERQGLCLPSATKAWTEQRLKEMKQEAAGASAQDLWLFQVGCELAQLEALEKQIEVAESKLAELGQASEAVKRLQEAPGVGPRLSEAVVAILDDPKRFKNGRQVGCYVGLTPRRWQSGKSDRQGRISKAGNRLLRELLVEVAWLGVHRDTWMKDVYEQVRRGSDKRKKIAIVAVARRLLVKLWAMLRDGTRWKDPVRSPAAAA

SEQ ID NO: 275815 - protein, 346 aa, unidentified
MDEIIRVGMDTSKHVFQVHGVNSSGEVVLRRRLRRREVAPFFAGLSAVVVGMEACGGAHHWGRVLGEMGHEVRLLPAQHVKPYVKRNKNDAADAAAICEAVARPSMHCVAVKTVEQQAALMLASSRENLVGELTRLGNRIRGHAAEFGHVAALGPSKVKALLARLMADEDLPKLARDMFAVLERQYAAIAAELGELERELKRWQRSNEPARRVAMIPGIGPVTSAHLVLKASDPGAFSSGRDFAAWLGLTPKDHSTAGRRRLGGITRAGDETLRSLLVLGATSVIQQVRRGRGPDWPWLRALVAHKKPKLAAIALANKMARIAWKLMVSGQRFEPQRLMTAMANAD

SEQ ID NO: 275816 - protein, 373 aa, unidentified
MKRILKIGMDVHSTNYTLCAMEPTIGAEDRIYGEIQVAPDYKEVLRFIDALKMKLGLDNEYSIECGYEAGCLGYSLYQRLTEAGVKCVILAPTTMLTQQGKRVKTDRRDAHLIAQCLCYGGYHPVYIPTGEDDAVKEYLRMRDDHKLALKKLKQQINAFVLRHGHQYTGTKWTIKHFAWLHKLELAPMYRETLDEYMASYEEQEAKIERYDKRIEEIAAGACYQENAKKLSCFLGIRTHTALSLIVETGDFKRFAKGNTYAAFLGLVPGEHSSSTNVNRLGISKAGNRHLRCLLIEAAKGICKGAIGHKSKELRSRQNGQSAEIIAYADKANTRLRSKYYKMIRHGKKKNVAVAAVARELACFVWGMMTENIA

SEQ ID NO: 275817 - protein, 465 aa, unidentified
MKKQRAATKQRAATKQRAVDAIEGLPPLNLNAAGIDVGNDEHHVAAPPGRQTRSVEKFGSFTADLHRMARWLKACGVDTVAMQATGVYWVALYDVLESHGLKVNLVNARHTKTLPGRKTDVQECQWLQKLHTFGLLNNSFRPVEEIRVLRSYMRQRENLVAAAGICIQHMQKALTEMNLQLANVISDISGVTGMAILRAIVRGERDPYKLAALKDERIQASREEIARSLAGNWREELLFVLEQSLQLYDTYLGKIGDCDRRIEVHLKTMDGKIDVETQPAPEARRIYRPRKHMPRFDLRSQLYRLTGVDLTQIDGIEVQTAQTVISEVGTDMSRWNSEKHFASFLGLCPDNRISGGKVLKRRTRRVVNRAATALRLAAWCLLRSQSALGAKFRRLRARLGAPKAITAMAHHLARLLYRMLKFGKEYVDKGIDYYETKYRENQLKWLTKQAAALNLQLVPSKQVAG

SEQ ID NO: 275818 - protein, 351 aa, unidentified
MMIIGVDYHPSFQAIAFFVEETSECGEQELNHSDGQAEKFYRDLKQRGISVRVGMEATGYSRWFERLLAELGFEVWIGDPAEIKAKRVKKLKYDRYDARLLRRLMLENNFPRIWVPDPENRDLRQLLWHRHRLVQMRTRIMNQLQALAMNEGYRWKKKLFSEQGRAQLEKLTLAPWASRRRQELLELLDRMNPTIEELTAAVEREARKRPEVLRLMTHPGVGPLTALAYVLIIGTPTRFARGKQIGTYVGMIPSEDSSARKQRLGHISKQGNSLLRFLLVEAAQAAARNHPDWRRRYIHLAMRRHKSIAKVAMGRRLAVRLYWMWRNGCEYSQSLEFSSYAGKLGTGHGAK

SEQ ID NO: 275819 - protein, 454 aa, unidentified
MQKQDSYDYYVGIDCAQNKHDFAMKNNQDKFLIKKGHFSNTLQGYEKFLNTVLSKCPNKDKILFGMEVTGIYGTNLYERLKSDGYHVVMIFPDSVKNYRDYKRLNKTDKIDSACIAELLLNGDAQIVHVEKNGYTDLKAYIRRRNALKVTCTQETNRFLAKVCLYFPDLLKVFPSGRATLKAIFSIYPTPYSIIEADFDELVSVLQKASKNKFGVDKANELIHAARKSIVVRKSISDGELYNIHSLIDSIDFLESEIRNLEKIIDSKAEEFPTYHVLLTLTGCGKITAATIVAEIGDISRFHKASQIVSLAGLYGDNSKSGSSVNKRGKISKKGSRYLRHAIYMVAEFARRNNPIFKAYFTKKKNGDRTKHILAVNAVANKLCKVIYSLMKNQSTYIIQYRDLAKLSESTQNEFFQNAETDFSAKTRRKKYLYEDEYGELHEFVFKSIKKALIE

SEQ ID NO: 275820 - protein, 278 aa, unidentified
MDEVKRFVGIDVAKAQLEVFIWPGGETFSVANDEVGIGALRRQLEPADFVILEATGGLEMPVASALAAAGLAVAIVNPRQVRDFARATRRLAKTDRLDAEVLARFGEAVRPEARPLADEQAQALEALVTRRRQLVEMLTAEKNRRANAPKVLHRSIDEHIRWLEKRLSGLDDELAELIRDTPLWRERDELLRSVPGVGKVLSSTLLAQLPELGMLNRKQIAALAGLAPFNRDSGKLRGSRCIWGGRAQVRRVLYMATVAGNSQQSHYQSFLSATSGQR

SEQ ID NO: 275821 - protein, 414 aa, unidentified
MELLHERCAALDIGKKDLKACVRTPAPRGRRSRRQEIRTFATTTNALRAPRDWLVAEKVSLVVLEATGDYWRGAFYLLEQCLNVMLVNAAHAKGLPGRKTDVADCAWLCQLGECGLLKASFVPPEPIRHLRDMTRYRAALTAERSREAQRLEKELEDAGSTLSAVATDILGVSSRAMLTALINGERDVRVLAEMAKARMRPTIPQLVEALTGHFGEHHAFLCRIHLERIDQLTAAIAELSTRIEQEMRPFAHQLERLATIPGVGPAVAEVIIAETGADMARFRTAAHLASWAGVCPGHHESAGKRKSGKTRHGDRWLTAALGTAAMAAARTRERTYLGARYRRLAPRLGKQKALVAVEHSILTAVWHMLTNDVDYHDLGGDYFTRRDPESAMRRIVRQANALGFTVRFDPIRAA

SEQ ID NO: 275822 - protein, 469 aa, unidentified
MTVKREGEVGVGKSLKAKKEKNKRKIVKLESLKQLNLNAAGLDIGAAEIYAAVPEGRDEISVRRFDTFTADLNALADWLEACGVDTVAMESTSVYWIPVYEILEKRGFELYLVNARQVKNVTGRKTDILDCQWLQQLHTYGLLRGSFRPSQEICELRTLLRHRGNLIRWRAAHIQHMQKALNLMNLHLTNVISDITGVTGMKIVRAIVAGERSPKVLAQYRDSNCKNSEEVIAKSLAGNYSSEHLFVLQQALELYDIYTAKIRVCDAEIEQLYGEFDPQVDIVEKPLQAPKKPRRKNKNAPEYDLRTYLYQMTGVDLTAIDGLEVLTIQTIISEVGTDMSKWKSVKHFTSWLGLAPENDISGGKVLRRSTKKVKSRANLAFRQAAMGASRGQSALGVFYRRIRARHGPGVAIVATAHKIARIFYVMLRERREYISPDPADYEAKQKERAIKHLKWKAAKLGLQVSPAPV

SEQ ID NO: 275823 - protein, 349 aa, unidentified
MGVLIGIDPHKSVNAAAAIDDQGELAGHETFPANQKGLRALQRWAKRFPERRWAVEGAAGIGRPVAQRLAMAGEKVVDVPPKLSSKARVLSTGNARKNDRLDATFTAQAALHNERLAPVQPEDGDGAYVEVLRLLTERREDLVAERTHALNRLHVLLRDLLSDTVRKQLSADAASKLLRRVRPRDEPARTRKQLASEVVRDVRALDRRIADLDERIRQEVEASGTTLTEVFGVGSILAAKIIAIVGDVARFPSKAHFASYAGVAPIEASSGEVVRHRLSLAGNRRLNQVMHMIAVCQARSDPRGGAYHRKKLAEGKSRREAMRCLKRRVSDAVFGALVADSARASLAPT

SEQ ID NO: 275824 - protein, 383 aa, unidentified
MSVLNTRAEHDHLIEILQSYDRPVVCAFEATGNYHRPIAWRLVEAGFETRLVSSLALARTREALHNGWDKNDPKDAQVILHMLRIHSTQVYHDPLRAGINDVQELSKTHEAIANAKTEIQHRILTHYLPLYFPEIERFRGNSRSDWFFAFLDAFPTPSSITTLTKEKFVEAAWDVVGRKVSKSQILMDIYETARTSIGLPLPLDAPAIRMFRMVVAEARSLIRQRNEIEAQADELLRHSRDYQILRQIPGIGPINALTIIAEAGDLRRFHHHRQFLKFCGLDLSTQQSGQYRGQTRLSKFGNARLRRTLWIAGQVAIRQRENGFRHKFERYIARDRDNPDLRRKAMTAITAKMARVVHAVIKSGSDYRPFVEGRVPGGRTSVS

SEQ ID NO: 275825 - protein, 438 aa, unidentified
MSNNVIFNLDELFISVGIDVGADFSWMSILLPNQQFVRKPYKILHNNINSLTTAVSKIKEAEELYSLESRIFLESTGIYHYPLFCYLRDKGFNCSVINPIITKNSTNMNIRKVHNDRFDSKKAALVGLKPDLKVSLMPSDLALNCRNLCREYYDLMDNRCAYVNKLQAELRMAFPQYLGIFSKVTINTSLTLLETYTSPSAFLEADKQEIIDIIKSTARFGLTYAQNKYTAIIQAANEANEFGYIIDSNIKRIRLYISFIRKYDEEIDRILDAMHELIDSNEDTDFVKQIHLIETFKGAGFLSAISLMGEIGDFSAFSKPKQLFAYFGLDPAVKQSGKFEGTKIQMSKRGSAIARRVIHTLTLQSISTSRTGEAKNPVLRDYYLKKCEAKPKLVAMGAVSHKVCNMIFAILRDNKPFEIISPEEHIKQYNAAKCDIVA

SEQ ID NO: 275826 - protein, 375 aa, unidentified
MLDTTTFIGLDVHARSIKAVSLDVMTGEVRAATFGYDAGAVAEWVRSVDPGARCVYESGVTGFDLQKRLSGLGVDCVVGAVSKMIKPSADRRRKNDRNDAEFLARMLSVGNVVEVWVPDDECEAARDLTRALEDARDDLSRSKQRLSKFLLRHGLVFDERTPTGRRKGNWTRAHWSWIESIRFAEGADNDVLAYYVDAVRRAAEEKARLEGLVEAEARKPRWRRRVDSLRCLKGVDTASAADLVFEAGEFSRFRNARSFAAWVGLTPSEHSSGESDRRGAITKAGNKHLRKTLVEAAWHYLTCSGRPKDLARGQAPDRGARRHAAKGVRRLVERREALLARGVHGNKANVATARLLGVGGRPHGRGGVGGAVPRT

SEQ ID NO: 275827 - protein, 413 aa, unidentified
MQVVYERCCGIDVHKQTVVACVIVPGPDGQPLKETRTFATMTVHLEALADWLAGLGVSHVAMESTGVYWKPVYNLLDDRFAILVVNAERIKALAGRKTDVQDAEWIADLLRHGLLKGSFIPSEVLRELRDLTRYRTKLGDERKSEVNRVQKVLEDANIKLASVASDVMGVSGRAILAELVEGQTDAATLAALAKGRLRDKQDLLVKALSGRVRPHHRFMLAQHLSHIDFLDEAMAQLDQQIAEQMRPFAAALATWDALPGINQRIAEIIVAEIGADLAPFEDADHLASWAGMCPGNHESAGKRKSGRTRKGSPWLRRALIEAAHGAAHTKHKYFQALYRRLAARRGTQRAAVAVGHSLLVTGYHLITRQTAYEDLGGNYFDERDREAVKRRAVRRLEKLGYRVELAPCAAPAG

SEQ ID NO: 275828 - protein, 346 aa, unidentified
MKVTYQTCCGVDVHKSFLVATIIKTTAGIEPSYQKKRFSTFNNSILDFKSWLLENECHDVCMESTGKYWVPVFNLLEDQINVTIANPKWVKAVKGNKDDTKDSKWIGDLFRLGLVKSSYIPCRLIRILREYTRYRYKLVSCRSSEKNRYQNALTVCNIALDSVVSDIFGKSSSSIIDYLLEQSGTTINHEEIASKLLKSLKSKEDAVIESIEGYQMTDAQKYRMRLIRAHMDYITAEINDIDKQIESLISSDPDYDKAIRFLTTIPGVKRDSAITIISEIGIDMSQFCNSKRLCCWAGLTPSNNESAGKKKSVRITRAGVYLKPALVQCVHAAVKSDKSPYYKTKY

SEQ ID NO: 275829 - protein, 309 aa, unidentified
MDTIVVGIDVSKDRLDVSVQPAGTALSYNRDAVGIEGLIEALAPLAPQLVAVEATGGFEAVVAASLAAAGLPVVVVNPAQVRSFADALGKRAKTDRIDAQVIAQFAAAANPPVRALPDAATQALADLVTRRRQIIQMIVAEGQREKRASVRARKSIQRLLKSLRTELSEIDAEIDESVRGSAIWREKENLLASVPGVGSGTARTMLAELPELGTLNRRQIAALAGLAPFTRQSGKWRGKSFISGGRASVRTALFMAAMTAMRCNPALRAFHHRLRAAGKPKMVALIAVARKLLTVLNAILRDKTKWQNA

SEQ ID NO: 275830 - protein, 386 aa, unidentified
MQTPNDLSQSRIVLKQDTTLIAVIEMSLSSWLVAGIVPGVKRQPLKKLPVDESALLKLLNRWREEAEKAGRKIERIAVAFEAGRDGFWLARWLRARGIEAHVIHASSVAVSREHRRAKTDRLDTELLKRAFLGWLRGERDHCKMVAIPTIGDEDAKRPNRERESLVGEQTRIVNRMKAALSRLGIRGFNPKLKKAAERLEDLRTPEDEPIPPNTLAELRRDMERRRLVRSQIRDIEDARLGRLEKAPGDGPHAMVRLLARVIGVGIETADMLVQEVLSRNLRDRRAVARYGGLTGSPDESGKKRREKGLARSGNARVRRGMIQLAWRFLMFQKDSALAHWFYARTKQAPQTRKTMIVALARKLLIALWRLVREGAIPEGIVLRPAL

SEQ ID NO: 275831 - protein, 345 aa, unidentified
MNWIGIDIGKLYCQVCEIAASGDIWEARVRTQRDRLEVVLRERGHARVLLESATESEWIARVLEAMGHEVIVADPNYAPMYSQRTRRIKTDRRDARALADACRLGAYRPAHRTTDARRSVRSLIGVRENLVRTRTRSIQLIRALLAREGLRPRTGHADTFVTRALELTVPAAVRDAMEPLLQVLGSVNAQVTALDARLEHLAEEDSAARRLMTVPGVGPVIALAFVATIDRVDRFRNAHQLESYLGLVPREWSLSEVQRRGAITKAGNKRVRWLLVQAARAVARTPTRLTTRPLWEWTDRLSRRRTGRVAIVALARRLAGILFAMWRDGTDFDVARVGRPAARSV

SEQ ID NO: 275832 - protein, 347 aa, unidentified
MLHAGLDLSRKKLDVCLLSDDGEHLDQLAVPPDVDSLRTLARRIEEVRGEPICAVIESMTGARIVHDTLEQEGWEVEIADAQKVKGLAPLACKTDTIDSKVLAVLSHRDLVPAIWLPDPRVREERELARFRLHLVKHKSALKCRIHSTLINFGRACPVTDLFGAEGRRLLERLEVPEPWRSNVTASVCLIDDLEHQIAVINRRLKEGHADHPYIPLLMSVPGIRWVLAFTIAAEIGEIERFASPEKLAGYTGLCPRVNQSGERDRRGPLTKHGPTYLRWALLEATMHALRHPAYAERYQRTKRRLGKQRGAKVAQVDIARRLAHAIWHMLSRKERFAPRGAAFRLAA

SEQ ID NO: 275833 - protein, 327 aa, unidentified
MTASVASHNQIFVGIDVGGLSFEAAWHRGGSTQYQNRPDAIAAFVARLSAEKQIIRIAVEPTGGHEKALVKALRGAGLPVEMVHTSRFAAYRKLIGAKAKSDTSDARLLAAYAAAPEEVRGRKAGHVVLPQDDVREQLAELAARRDQLKHMIHAETCRLSTVRSPSIRDEITAHLQALRQADRKTHDAMMLLVRQRDELRNAKRLLQTIKGIGDKTALTSIAAVPELGLISNKAAAALVGVAPFARQSGTMKAPARIHGGRALVRNAFYMAAVTASRHNPVLAPFYARLIAAGKPVKVALVAVMRRLVVYANAVLRSGQPWKGAEIG

SEQ ID NO: 275834 - protein, 309 aa, unidentified
MEHFVGIDVAKDRLDVHIRPGGEVFMVARNGSGLALLVERLQTLAPALVVLEATGGYETVVASALAAAQLPLAVVNPRQIRDFARATGKLAKTDRLDAAAIAHFAEAVRPPARPVATAEAQALGELVARRRQVIEMIIAERNRRRMASQRRVIRAIKRHLALLQAELSELEGDIDGAIRNSPAWQADADLLASVPGVGKATLRTLIAELPELGHLNRRKIAALVGVAPVNRDSGTMRGRRTIAGGRPAVRTALYMAALVASRANPVIAAHYTKLRTAGKTGKQALVACIRKLVVILNAILRDRKPWIPA

SEQ ID NO: 275835 - protein, 310 aa, unidentified
MDAIYVGIDVSKDRLDVHVRPSGEAFAVPRDGKGLDALVERLRALTPTLIVVEATGGFETIVAAAIGGAGLPLVVANPAQIRHFAQALGKRAKTDPIDAAVIALFGEAVKPELRPLPDEAQRLLAELVSRRRQIIEMIVAERQREKRVANTRIRKGISRHIRVLEKELPEIDGDIGTLVRGSPAWREKEDLLKSFPGIGDVLARTLLAELPELGTLTRREIASLAGLAPFTRQSGRWKGKSMIAGGRGTARWALYMAALVASRHNPLLKAFYRRLLAAGKPKVLALIAVARKLLTTLNAMLRDNKKWQHA

SEQ ID NO: 275836 - protein, 359 aa, unidentified
MGLASWLVAGLLPGVNREPLKKIAPDPEVLLRLLYRWRDEAIKAGKEITRIAVAYETGRDGFWLARWLRDRGIDAYVIHATSVAISREHRRAKTDRIDTAMLKRGFLGWLRGERGHCSMALIPTIAEEDAKRPHRERESLVKERTRTINRMKAILAQFGVRNFKPALRKAAEKIAEVRTPEKVPLPPNAAAALRRHIEHFRLTNEQIKAIEKIRLQRLRQNPTDKFNAMVFLLVRIIGLGVETAEQLVHEILFRNLRDRKAVARYSGLTGSPDESGARHREKGLSRSGNERVRKILIQLSWRMLRFQPNSGLVRWFKARTASSRRSRKPMIVAFARKSIIALWRYANTGLVPEGFQLAK

SEQ ID NO: 275837 - protein, 327 aa, unidentified
MEQSVVGIDVAKDSLDVFLICGSQQAYHQFANDLAGFRQLLAWLKHKRANRAHACLEATGQYSDGVAGYLYEQGLPVSVINPARIKAYGRSKLQRNKTDKADAELIARFCAEQQPALWKPPPLYFKELQALVRRLDDLQVNLDQEHNRLQSGIQSDTVIAGLRAHLAFLEEQIEQVKQAIQGHIHQHPELKHQQDLLVSIPGVGRLTAAKLLGEVRNITDFQDARQLAAYAGLTPKNFFSGSSVRKKSILTKTGNANLRKILYMPAISAKRWNPIITAFCKRLLATGHSPMEVIAAAMRKLLHLAFGILKSGRPFDPNYLVNVQASS

SEQ ID NO: 275838 - protein, 353 aa, unidentified
MVVVGADVHKRTHTFVAVDEVGRKLGEKTVTAVTAGHAEAVMWAREQFGAEVVWAIEDCRHLSARLERDLLGLGQKVVRVPPKLMAQTRASARTRGKSDPIDALAVARGFLREPDLPVASHDDVSRELKLLVDRREVLVAQRTATINRLRWRVHELDPERAPKPRSLDLAKHRRLLGDWLDAQTGVVAELARDELTDITRLTETINALATRIGHRVRDAAPVLLAMPGCGELTAAKLVGETAGVTRFKHEAAFARHAGVAPVPVWSGDTRGRVRMTRSGNRQLNAALHRIAVTQIRLDGLGRTYYRHRLDHGDSTTEALRCLKRRLSRIVFHHLHTDHNNRSGQSMRYMNRPT

SEQ ID NO: 275839 - protein, 355 aa, unidentified
MNDAKYIGMDVHQATISVAVLDSAGKLVMEAILETKAETILQFIHGLRGSLHVTLEEGTCAAWLHDLLKPHVTQVLVCDPRKNALIKAGNKSDRIDARKLADLLYLNKLNPVYHGETGIRALKEVARSYLALTRDTTRVMNRLKALYRSWAIPCAGQRVYAPRYRSEWLVKITEAGVHRRAEIYYQQLDALRSLREQVRRDLLAEGRKHSAMKLLRQIPSIGPIRAVLWIALMQTPHRFRTKRQLWAYCGLALKTSTSGEYRIVGGQLKRAKKFVAIRGLNANHNHDLKNIFKGAATRAAAVPGPFQEFHAGLVARGMKPTMARLTLARKIAAITLIVWKKGVGFDAEHLKQQAA

SEQ ID NO: 275840 - protein, 430 aa, unidentified
MTKLSSTPADAVLVAIDMSKHRQEVLIERPEGGRRRRMTVMATKTDYDRLASVLADIGRPIVVGFEATGNYHRTLAHRLLTAGFELRLISSVALARTREALHNGWDKNDSKDAQVILHMLRIGATQRYVDPLAAGINDLQEMSKTHEAISKAKTQTWHRILTHYLPLYFPEIERFAGNSRSDWFLALLERFPTPASMTALGQEAFTSEAWSLVGRKVSKARLINDIYETACASVALPVDEDSVAIVMFRMVIAQARSLIRQRDEIERTAHAMLSENRDYQLLRMIPGIGPINALTILAEAGDLRRFAHHRQFLKFCGLDLATCQSGTFRGRTKLSKYGNARLRRTFWMAAQVAARQRDNSFRDKLGRYMEGHASDPDRRRKAMTALTAKMARVAHAVIKTGTEYRPFLERADTRWKDPSLLCREGATATL

SEQ ID NO: 275841 - protein, 336 aa, unidentified
MLIIGCDLHTRFQRIAMLDTQTGELVERRLEHENGEARAFYAGLPEPARVGMEATGYSQWFETMLAEQGHELWVGDAAEIRAAVVRKQKTDSRDAYHLLDLLLKDKFPRIWTASPRERDVRQLLRHRHKLVGWRTSVRNQLHALAMGEGICRKGKLWTAAGRQELEGLALGPWASRRRQELLQMLDWLAAPIRALDEAVIQEAERRPAARRLMQQRGVGPVTALAFVATIGPVERFRNSKQVVSYLGLNPRESSSGGKQRLGRISKQGNSMLRFLLVEAAQTAAREDPELRRDYLRLKFRRSSAVAKVAIARKLVVRLYWKLRHAGQPGAAGSYAG

SEQ ID NO: 275842 - protein, 342 aa, unidentified
MDYYVGLDVSLEATSVCVVDGSGSVIRESKVASEPESLIAWLLGLGLPLCRIGLEAGPLSQWLYGGLREAGLAVELLETRHVRDAFKAMSVKTDRKDARGIAQLMRLGWFRPVHCKSLAAQETRALLRARKLLQAKRHDVEMSLRGILRGFGLKVGKTTPRGFAVRVGELVSDHATLRGIAKGLLAARAVLDREFAVLERQLRAIARGDARARLVMTTPGVGVLTALTFVSAIDDAARFKSSRQVGAHFGLTPKRYQSGEKDVAGRISKIGDRTVRTALYEAANVILTRPVKGSGLKSWATRLARRAGPRKAKVALARKLAVILHRMLTDGTPFEAGQAAKA

SEQ ID NO: 275843 - protein, 377 aa, unidentified
MLRIIKIGMDVHSKTYALCALEPKIGEEDRFLASTQIPADYKYILAFIIDLQRKLGLDNDYDIVCGYEAGCLGYSLYKQLISSKVKCEILAPTTILTPQGNRVKTDARDARMIAQCLGHGGYHSVYIPDDEDAAVKEYIRMRDNHKADLTRIKQRIGSYCLHNGHYYEGTKWTLKHLRWLRTLELSPLLRETLDEYMASYDTLAARIERLDARIDELAGMAKYKEKVKKLTCFLGIKTHCALSLVVETGDFTRFAKGNTYGAYLGLAPGENSSGEKVHRTGISKAGNNHLRCLLIEAAQGICKGKVGHKSKALQTRQKGNPAGVIAYADMANIRMRAKYYRMIRHGKKHNVAIAAIARELACYVWGMMTENIGLKVS

SEQ ID NO: 275844 - protein, 346 aa, unidentified
MNVFIGLDVSLASTAICVVSEHGEIVKETTAASEPETLVSAIREISHQVVGVGLEAGPLSQWLYKGLYEAGLDTVLMETRQVKGAMKAMPIKTDRRDAEGIARLLQMGWFRPVHCKSISAQETRALLTSRKAVQNALINIELSVRGMLRNFGLKLGKVSKGDFEARTQELVEGNTMLEAACAPVLRVRAALRKELALLDKYVRDLAKVDPMCKLMMTMPGIGAVIALTVKSAIDNPDRFKSSKDVGPWVGLTPRRNQSGEKDVIGGITRAGDVGLRAALFQAATVMLNQGKHSWLTAWAFRVAQRRGKKRATVALARRIGVVLHRMWCDETEFRFTRDPAIKTAAA

SEQ ID NO: 275845 - protein, 374 aa, unidentified
MSDSHLFVGLDVHKATIAIAVAEQGRTGEVRYIGNFPNNPASIISQLKRFVERYGSIECVYEAGPCAYTLYRRLLAAGIPCIVVAPSKLPLVKGRVKNDHRDAVALARLLRAGDLVPIWVPDPVHEAMRDLVRARQAASFDVRKARQRIQSYLLLRDRHFAGKPWSYRHTRWISDQQFEHRAMQITLQGYVNALEQAESRRTELDAQIRELLPSWSLAPVVIALQALRGVASVIAVALVAEVGDISRFASARDLMAYFGLVPGEHSSGSTVRPGGITKQGNSAMRALLYEAAWCYRQSAKIGQWMKARLPAGVPQFARDIAWKAQMRLCGRYRKLIARGKKSQIAVTAVARELLGFVWAIARAQASHESAAIGA

SEQ ID NO: 275846 - protein, 316 aa, unidentified
MTSYNNLIGIDIGKFNFIVALHGNKKVVEYENNLTGINSFLEDYQQLFPSSLCILEATGGYELELLFTLSQRSVAVHRANTRKVKNFIRSFGNSAKTDALDARALALYGYERSNQLELFVPQSSQALELYALVQRRSDLKQILVAEKNRLKSPKLGTTAMIIKDSHNSVIKVIANQIDSITLKINAIITESPILAAKKKELKTIAGIGDIVANELLALLPELGRLNRRQIANLTGLAPKANDSGKFSGYRPTGHGRSLVKPLLFLAAMAARNSNSSFKIFYQDLINRGKKKMVALTALMRKIIVIANAKLRDLYAQ

SEQ ID NO: 275847 - protein, 320 aa, unidentified
MMAQNDLVVVGIDVSKDKVDACIRALALQQTFPSSAQGHRQLVAWLRKHQVNKAVMEASGGYERGWARVLRESGIEVRIVDPKRVRSFAQSAGRLAKNDAIDAQMIAWFAETFSQAPGQVHDAAHEELVALVKARIALVDLKTRLEVQHQHAAPASVQKARARVLKSLVGELAKLEAIIAATIKATPCLAERAEIIESVPGLAETTSANLVAGMPELGQVSNEIAAALIGIAPYDDDSGNRRGERHIKGGRRWVRNALYMPCVGAATLNNPVLKAYYDRLIAKGKKPKVALVACMRKLIVILNTMIARGQKWDPSRYALN

SEQ ID NO: 275848 - protein, 356 aa, unidentified
MKEFSNEIPERTIGVDVGDRRSQVCMIDRGGEVILETSVATEREAVQKFFSQLAASRVVLEVGTHSPWMDREISQLGHEVVVANARKVKAISESQTKSDRFDAEMLARLGRVDVRLLSPIEHRGVQVQADRALLRARDALVRCRSQLVTSVRGQVKSFGHRLKSCSVEAFARKVSGQIPDELLAALDPLVEQIVTLSEAIKRYDRLIDRAARDRYPQTARLQQVSGVGPLTALAFVATLEDPARFTKSRDVGPFVGLVPRRHQSGGRDPRLGITKAGDQYLRRLLVQAGHYILGPFGPDCELRRFGLRIIDKEGTAPKRRAVVAVARKLAVLLHRLWVDGADYDPWYQSGRNKEAA

SEQ ID NO: 275849 - protein, 386 aa, unidentified
MPYKIAGIDVHKRMLHVVVSDVEVDGEYEFTRRVFGSYPEALRSLAAWLVQQQVEEVVMESTAQYWKPVWGALERYWKPICGKRESARRRSGTLHLAQALSNRGRRGRKKDFRDAERLVKRLVANELTLSFVPDVEQRLWRTIMRTKYQLTCNRVQLQNRLEALLEEAHIKLSSLVSDLLGASARRMLKALAEGETDPIALAALADERLRATPERLRDALGVCQELNSVYRRLIEMASEELTSIDKRIDELKQAMADLLRPHEDQVKRLVEVPGLSVDSAQQIIAEVGATASTFPSEKHLSSWVGACPGEEESAEVNYSRRSPQGNRHMRRILNQAANAAVKHKGSIFQISLSPLCAAHGAQSNHWDNCPQTLSPDLENTAPSSPL

SEQ ID NO: 275850 - protein, 357 aa, unidentified
MKTKIPAVEKLTVGLDLGDRRHSACVLDASGEILAEEVIVNTRECLVAFSARFPTATIVMETGTHSPWVSRLFEARGHRVYVANARKLRAISASHTKGDDEDAQMLARLGRADPKLLSPVRHRREATQRALVRLKVREALVRSRVKLVNSVRFLLKSLGVFVSSSIKAMAFTRKVRAQLAPVDAVLVEPLLAAVDVLNAQIKALDAELETLAHETYPATERLRQIPGVGPLTALCFVLTLEDPKHFAHARAVGPYLGLVPRRDQSGESDKQLGITKAGHAQLRCLLVNCAHYILGPFGPPCLLRAAGERIAARGGKSAKKRAVIAVARKLAVTLLALWKTGAEYRPLPEPQSLAQAA

SEQ ID NO: 275851 - protein, 411 aa, unidentified
MEQIHDRIAGLDVHRDQVTACARIPGPRGGVRTEKARFGTTAGGLAALAEWLAGHAVTLAAMEATGVYWKPVYYALEDRFLVWLCNAHHVKNVPGRKTDMSDAEWLADVAAHGMVRPSFVPPPPVRELRELTRYRKKQIDTRAAEIARLEKVLQDAGIKLTSVASKVLTQSGRAMIEALIAGQRDPAALAGLARGKLRPKIPELTAALDGRFGEHHAAVAARILAHLDCLDEAVAALDEQIAARVAGRYSSAVRLLADVPGLERRSIEVIIAETGADMSRFPSPAHLASWAGLCPGNHESAGKRRKVATTQGNQWLRRTLIESARAAARTKGTYFGAQYRQIARRRGPNKAAVAVAHSLLDVIWHMLTTGEIFTDLGADYYTSRQDTEHQAQRLVRRLEKLGYTVELAATS

SEQ ID NO: 275852 - protein, 405 aa, unidentified
MERKQKDWFGPHRLYLGIDVGKSFHWAVGLDPDGSIRISRRLDNRQEDVDALLDEAGEGALVIVDQKNNIGSLVVRRCRAKGVDVGYLPGKAMKNAREMFPGTAKNDRIDAEAIAQTGIGLRTAIRPIAETDDLGASVSLVSSQLSYATRRATMARNRLHAVLLESDPAFEAAADLSSAWQLEAMAGFGGAKGLAAAGRRRYCTLCARQGVPAQARDAFWKAAMRSASSAFHPDAEDMLARSLAREILEADSERTELSAELGRLLQDDETYRCLLTIPGIGPKTASALATSIDISLFPGDSKLAAYCGLAPADHDSGSSIRSQRDAHGGNKALKNLLIFSCNSLVGTKNRFGRYYDACVARGMRHNKALKAVARKRLRVIYAVMRDRVPYVEPPADNVEKTPATA

SEQ ID NO: 275853 - protein, 310 aa, unidentified
MIIPHRYVGIDVSKHHLDVFDEAVGTSERIANAPHAITELVARWRCDAFVVFEATGVYDLELREALRQAGIKFSRINPARARDFARAGGKRAKTDPIDARMLASFARAMQPTTQEISTPARSALARLAKRRDQLVHMRAQEKNRRSEAEDGAMAERIARLIEVLNREIAEIEAEISALIKAEAELAEDAQLMRSLPGIGPVACMQLITQMPELGHIGPKQAAALAGLAPFNVDSGAYRGKRKIGGGRKRVRDALYMAALNAVRRDDRFKAFYARLRQAGKPAKLALIAVARKLLTVLNAMIRDRQSYIPV

SEQ ID NO: 275854 - protein, 340 aa, unidentified
MPLYGGIDLHANNSVVVLLNEQDQVVYQKRLPNDLPTILEVLAPHHAEIKGLVVESTYNWYWLVDGLMEAGYRVHLANPAAMQQYSGLKYSDDHSDARWLAHMLRLGVLPEGYIYPKAARAVRDLLRKRAHWVRQHTANVLSVQNIMVRNTGARLSVKRIRELPKQELKRLLPEADQVLAITSSLAILDCLSQQIKALEKIVDQRLHHTPSYEQLLTVKGIGTILAQTIALETGDINRFPTVGNYASYCRCVDSTKISNGKRKGQGNVKNGNPYLGWAYMEAAQYAIRFNPSAQRFYQRKLAKSNNNTTLARKAVAHKLSRACYYVMRDLVPFETTKAFG

SEQ ID NO: 275855 - protein, 416 aa, unidentified
MSGKSEIACGVDVHNKFIVATILSSDGLKLQNRFETSLEDLLKFKNWLKENGCHKVALESTGNYWLPIYHVLEGSVNFILANAYQIKHIPGRKTDSLDSEWIAELCLKNLISPSRIFTKDHRELRSLTRARESLIKIRTKIKNRVTHELEAACIKLSSVIADVFGKSGRHIVDGLLNGMDLEKILESIPSGRVRKNKEEIRGIIQANLSSSQIFLLRSHLNMIDAVTKQIEEIDAKISDQISLRNEDMRIALSMPGMGFISASTILAEIGDFRDFSSANKLAAYCGLVPSVYQSAGKLINGHITKHGSPHIRRIIIEVAHAIILTKKLSKLKKFFLRVKARRGAKIGIVALARKVLCILHHLLVSRELYQDDLLNKPRCIKNPRLHPKTAMDLEEMIRTIIKAGYEVRKNECLESG

SEQ ID NO: 275856 - protein, 485 aa, unidentified
MENRPGRVTNRHPYWLDDWRRLSSAISTGSGTYAQMMSFEDSAIRIMGDSPPEGFHPQGMMEEQELMSKGNSEIAAFVGLDWADQKHAVTLQESGNDQRYRFTLDHTPEALQSWIQSLRDRFGGRPVAIAVEQKRGALIYALMHVEFLHLYPVNPVAVAKMREAFYPSGAKDDPLDADLLLDILISHRRHLRLWTPDDALTRSIQLLTEDRRRVVDERTALTNQLTAALKTYFPQALDWFGDLHTPRACAFLQRWPTLQQLKQATPSSIRKFYKAQGYRGDDKREQLIAGIKKAQPLTQDSAVLLSCSMKVEILVQQVPLLTEAIERYDQKIAALFDQHDDSTLFGSFPGAGPALAPRLLAAFGSNRERFECASELQELSGIAPVTEKSGEGIWIHWRLACSKFLRQTFHEFAGCSIVQSDWARACYDQLRKRGKSHHAALRALAFKWIRIIFRCWKDRTPYDEAVYLKSLQSRRSPLAADLAAQ

SEQ ID NO: 275857 - protein, 465 aa, unidentified
MKQKPSSGKAASRRAPKKGASPQPSINTQTHPDAAGIDVGAEEFVVAVPPGRCEEPVRTYTTFTSGVHALREWLLECGIKTAAMESTGNYWITLYDVLTEAGIEVYLVNARHVKGVPGKKTDVCDAQWLQQLHAAGLLRKSFRPALGIVPLRFLMRHRAEMVGDAAKQLQLMQKSLTEMNLKLQHVFSDIDGVSAQAIIDAILAGERDAKKLAALRDKRCRSSPEDIIEALRGDYREEYLFVLGQSQRTYRQLREAIAACDEKLGELAARVECEVSGPLPEAPKGQRHVGKNSPQFAVFETAWRFYGVDLGGVPGISSGLLGALISEVGTREQLLAAFPTPERFASWMGLCPDNRISGGKVLKAKTRKVQSRLAGAFRLGVFGLQRSQTQMGSYLRRMKGKMGKAEGTTAAAHKLARIVHGMIKSQKPYDEKEAFKLTPQSEARRRKALEKQAAALGFTLQPAAA

SEQ ID NO: 275858 - protein, 419 aa, unidentified
MAFKILRKNCCGLDIHKTWIFACIGITDSNGRTEYKQARFSSFSNGLRDLADWLAKYSCSDVCMESTGKYWIPVFNILEKTCWVTLAHPKYTKPQKGNKTDRKDAKWICDLYMCGMVKPSFIPPPDIRQLRDLMRYRVKLTNMLTGEKNRAQNCLTVSNLKLDDVFSDVFGKSSRSIIQYILEHPGEQFDVTPFIHRRCKHPVEEIQAAVDGVVSREQAAKLKECLLHIDQLNAHRERIEAEILRLAEPYPYQLELIRTVPGFAAAPLTAVALISEIGVDMSVFPSAKHLASWAGCCPRNDQSNKKVKSTRISRAGCYLKPLLVQIANAVIKSDRHPECRERYRRIKARRGHKKAIIAVCRMLLTAIWNVLSKLEPYSAKGYLADKLTEHSVVISKAEGLALLRKRGYIFKDELAVESG

SEQ ID NO: 275859 - protein, 360 aa, unidentified
MRHLSAKLLSDRISSEWEPSMGEVTTIGLDLAKHVFQVHGVDAEGATVLRKQLRRAQVLAFFSRLPPCLVGLEACATAHYWARELRALGHEVRLMPAQYVKAYVKRNKHDAADAEAICEAVQRPTMRFVPVKTADQQAAVLLHRGRERLVRQRTGLVNALRGHLAEFGVIAPQGLRNVGELIAIVRDDGDTRLPDVARQVLQVLANQIEQIETAVAALERQLLAWHKSNPVSQRLASIPGIGPIIATAIATTVADPKVFRSGREFAAWLGLVPRQNSTGGKIRLGGITKRGNRYLRRLLINGASANLLRSKATKADPWVIGLRRRRPPLVVAVALANKTARIAWAVMLREKEYQPRAMAA

SEQ ID NO: 275860 - protein, 324 aa, unidentified
MANRTMICAGIDTGKYKLDVAIDGSSEQLQVDNTPEGYKVLSDWLRQHRVKRVGIEASGAYEQAVVVELRRKRFVVVVFQPAQVRAYARFKGQRAKNDKIDAALIATCTAAVKKVHDAPDPRLLPFAQQLTMIDQIGEDIARLKNRLESCRNTRIQQVWQEDLARLEKRKRAELKALVAAIREHRDLAERLDLISSVNGAGLPTAVAILVRMPEIGKITREQAAALAGLAPYDDDSGQRAGGRHIQGGRERLRRALYTAALPASMRWNPQLKELYNRLIAAGKEHKYALVACARKLLIFVNTVVARGTPWQNQTPQRNEVPATA

SEQ ID NO: 275861 - protein, 343 aa, unidentified
MESYVGLDVSLRRTSICVVDKAGKLLCEGTVNSTPEAIIEFVKSKAAGAVRIGLETGPTSTWLWTEIKALGLPVICIDARHAKAVLKMQINKSDRNDAFGIARIMQCGWFKEVRVKRIDSHVVRALLESRALLVKMKRDLENQIRGLLKNLGLLIGTARGQAFHARVQELVEGKPYLAVAVLPLLETRNNIVRQITDLDRKVLMLARNDNRARSFMTVPGIGPVTALCYRATIDEPSRFKRSRSVGAYVGLTTRRYASGEVDWTGRISKCGDAMLRSYLFEAAGVLLTRVHKWCTLKSWGTRLAKRVGLRKAKVAVARKLAVILHRMWMDGTDFQWSADKVAT

SEQ ID NO: 275862 - protein, 398 aa, unidentified
MTESSDYESVQVFIGVDVGKDTHHAVAINRSGKRLFDKALPNDENKLRSLISDLKQHGQILLVVDQPATIGALPVAVARSEGVLVGYLPGLAMRRIADLHAGEAKTDARDAAIIAEAARTLPHALRTLKLADEQIAELSMLCGFDDDLAAQTTQTSNRIRGLLTQIHPALERVLGSRLDHPAVLDLLQRYPSPEKLASLGEKKLAAQLCKLAPRLGKRLAADIAQALAEQTVVVPGTNAAAVVLPRLALQLITLRKQRDEVALEVEQRVLAHPLYPVLTSMPGVGVRTAARLLTEVACRAFASAAHLAAYAGLAPVTRRSGSSIRGEHPSRRGNKALKRALFLSAFAALRDPISRAYYTRKMSQGKRHNQALIALARRRCDVLFAMMRDGSFYTPQAS

SEQ ID NO: 275863 - protein, 339 aa, unidentified
MKKVFIGIDFSKLKFDAAIYSVDTKAIVATEVFDNEQSGYVDFLQWVKATTRCQKSGMLFCGEHTGYYSGNLSVFLYESGYDMWLVSGLEIKLTQGIKRTKTDRVDACKIAEHAYRYQDKVVLFQPVSKSLDEIRELLSYRERLVETRKMLTTSAKEMKRVKDNASCDYIYRDSIEYIKTLNASVRDCEKRIEALLKQDISLKTNYKLVSSVVGIGLVNAALILVATDNFTKFDNPRKFGCYCGVVPFEHSSGTSVRGKTRVSKMANKHLKTKLTLAAQNAVRFDPDLKEYYQRKRSEGKNNWLVLNNVKNKLIHRIFAVVRDGQMYEKQYVHPLKQVA

SEQ ID NO: 275864 - protein, 415 aa, unidentified
MEIIYSRVAGIDVGKREVAVAVRMPGDIPGQRRQLVRKYKTFYQVLREMVAWLVEQGVTHVAMEATGVYWKPVFHALCEAEQIEVLLVNARHAKNVPGRKTDVKDSEWLAQLLECGLLRGSFIPPKDIAAIRELTRYRKKLIEERTRELQRLSKVLEDGGIKIDSVASSITTLSARDMIEALIAGERDPRVLAELARGVMRNKIPDLTMACAGRFGDHHALLARMHTDHIDHIATMIEVLDHRIEEVVDPFAEPLRLLRSIPGIGERAAQVIISEIGVDMSRFPTAAHLASWAGLCPGNNESAGKHKTGRTRKGNVEVRTILTECAWSAGRTGTYVGAQFRRMHRRFGKTGGGKAAIAIAHTLIVIIWHVLHDRAEYRDLGADYFTRYDNPDARKRRLIHDLQSMGYEVTIAPAA

SEQ ID NO: 275865 - protein, 418 aa, unidentified
MNQDLIARLSRRYLALDIHKHYSIVAGVDFEGKVILEPVRVEHADLPAWLEKHIQVTDHVVIESTTNAWTVYDLLEPLAEKVLVANPIKVKQIAQARVKTDVRDTLILARMLAANMIPAIWVPSVDVRSLRYLLSQRRRLTGMHTQIVNRMHSVAHRHHLSHPRGKRFNEKNTVWQQDDELSEEEKFQLELDMATEKHLSEQIGKITRKLSKMSHQKPWRESMMYLMQLPGFGVVTGMTVLAAIGDISRFEDFKKLASYSGLTPGVEQSGTKNRGKKITKEGRKDLRWAMVEVAQRAVKSDPLWERRFQELCRRMHRNQAIVVIAHRLLELVWIVLSRKQPYRHFSHERIAYKYLTWAWQLSEADRDGLTRQQFARYYLMRMGIGHELEKIALNPRYPRRLASEVELLTLRPDLFQSG

SEQ ID NO: 275866 - protein, 351 aa, unidentified
MNKLSVVGLDLAKNVFQVHGISTDGEVVVRKQLRRSEVRKYFAKLESCLIGMEACGGAHFWSRELTQLGHTIRMMAPAFVKPYLKSNKNDRNDAEAICEAVQRPSMRFVQPKLPEQQAVLHLHHGRQLLVRQRVALSNHMRGVLSEYGIVLPQGVKVLSRQLPEILEDAENTLPMLARHLLAELKVEHDQLIGRVGRFEKQLKAWHANSLVSQRLASIPGIGVLTATALAATVGEGEDFKNGRQLAAYLGLVPRQASSGGKDRLLGISKRGDGYLRSLLIHGARAVIHHIRRRLKAGRPGGNPWVEQLLLRCHVNEAAVALANKMARTAWVLRARNETYCLARPIESNVPK

SEQ ID NO: 275867 - protein, 402 aa, unidentified
MADKTDCTNKTVFVAIDIAKNKHDVKIKWPNGRTKILKIANSLAGYQSILDGVNEKCFYENITAAFEPTADYHRNIAYWLNQNGVICHLASSLACARAREMLHTSWDKHDRKDAGVILYLLEQGITKPFYDPLIAKTMDIQEISNTYQQITIARTRCLNSLMNHSITLYFPEMERFIFSSRAEWFCKFLLKFPTPKSITRYHKETFVRRAWDVTGRKVAKQRFLEELYEIACESIALPVDVNSLAVDMFKLQLKRLLALTMERKSLELRAESLLQDRIDYQRLRTLPGVGPIIAMMIIAESGDLKRFSHHRKYLKFCGFNLSASQSGTCQGSYRLSKRGNARLRYAFWLAATTAIRLCENGFRRKYQQCIKKDPENADVKRKARTAVAVKMARVAHALIKKD

SEQ ID NO: 275868 - protein, 354 aa, unidentified
MQRTTKYVALDVHQATTVAAVRAANGRVIARTILPTEEPAIVAFFRGMRGAVHVALEEGTQAQWLHDALVPLVERVVVCDRRGEPQQGNKADQVDAEQLAERLRQGSLRAVYHGSPHRAVLKELTRSYANLVEDTTRVMLRLKALFRARGIPAPGKRVYHPRERAQWLAQLPDAGARSRAAVLYAELDVLRPLRPRAKAAMLAEARRDPAWGVLRTIPFYGPVRVALLLATMRTPWRFRTKRNLWAYAGLAVVTKTSAEYGWVNGRPVRRHRAPLTRGLNRNHNRVLKDVFKGAATAATTRPGPLQDWYHGVLARGVRAELARVTLARKLAALTLRVWKHGEPFDPTKLTTQAR

SEQ ID NO: 275869 - protein, 338 aa, unidentified
MDQYAGIDVSLECSSVCVVDASGMILREARVASEPEALIAWFRWSGFELERIGLEAGPLSQWLFAAMRQAGLAVELLETRHVRKAFEAMPVKSDRNDARGIAQLMRLGWFRPVHCKSMSAQETRTLLTARKLVQSKLQEVENSLRGFGLKVGKTTGLGFAGRIEELVAGHPHLQVVTRALLSVRAVLRSEFAAFEKQTRKMAQSDARTRLLMSTPAVGPIVALTYVSAIDDPARFTSSKQAGAHFGLTPKKYQSGETDYTGRISKIGDSSVRTALYEAAHIMLTKPLKGCTQLKSWAMRIARRAGMRKAKVALARRLAVIMHRMLADGTPFNPAAAAT

SEQ ID NO: 275870 - protein, 339 aa, unidentified
MELYAAIDLHSNNSVVVVIDEVDHEVYRKRLSNSLPAIVAALRTCPAPVQAVAVESTFNWYWLVDGLLAEGFDVRLVNTAAVKQYEGLKHSGDFDDARHLAHLLRLGILPTGYICPRPERALRDLARKRGQMVRTRSQQMLCVNNLLARNLGQHLAAQQIRKLDARQIDALPLLTHHKLAIKANLAVMACTDEQVHELERELLSHAKLRQAYQRLLTISGIGKVLALTIALESGDMDRFRDAGHFASYARMVDSRRESNGKTKGAGNVKCGNKHLSWAFIEAAHFAIRNDDVIKRFYEKKCAKSRLKVIALKAVAHKLARAAFHVMRDDTAFEVRRAFG

SEQ ID NO: 275871 - protein, 405 aa, unidentified
MNAVGIDVSKGRSTVTIRRPGDVVIMPPRDIPHMQSEINALIEQIRGLDGETKVCMEHTGRYYEPIATWLSDAGIFVSAVNPILIKDFGDDSLRTPKTDKADSKKIARYTLDRWAKLPQYGSMDKTRNQLKTMNRQFGFYMAQKTAMKNNLIALLDQTYPGANDFFDSPARSDGSQKWVDFIAAYWHVDCVRSKSLKAFTEHYQNWCRRKGYNFSADKAEKIYRLSSDLIAVFPKDNNTKMLIRQAVTMLDTASETVESLRLKMDEIAATLPEYPVVMAMNGVGPTLGPQLIAEIGDVTRFTHRGALTAFAGVDPGRDESGQRVRKSVPTTKKGSPYLRKTLFQIMDGLIKRSPADDAVYAFMDKKRAQGKPYYVYMTAGANKFLRIYYGRVKEYFATLADSEET

SEQ ID NO: 275872 - protein, 409 aa, unidentified
MLFIGDDWAEAHHDVEVQDETGRRLARRRLPEGVAGMAGLHALLADHLGDGEPGDVVVGIETDRGTWVQALLAAGYQVYAINPLSVARYRERHVTSGAKSDAADAKVLADLVRTDRQHHRPIAGDSDLAEAIKVLARAHQNLIWSRQRQANALRSTLREFYPAALAAFDEIAGRDALAVLQLAPTPTRARTLSQSKIGAALRRAGRKRNIEAKAEQIQTVLRGDHLAAVPAVELAFGHTVTALVGVLAELSRQIDALESELVAHFDRHPDAEILLSQPGLGPVLAARVLAEFGDDPTRFADARARRNYAGTSPITRASGTRRVVLTRIACNKRLRDALYLQAFATLKATPGARGYYDAHRARGHTHHQALRALANRLVGILHGCLRHRTTYNAATAWPDTDQPENAAAA

SEQ ID NO: 275873 - protein, 348 aa, unidentified
MISMPDSVIDVVGGVDTHADAHVAAAVDRLGRVLGTGAFATTRSGYLELIAWLESFGRVTTVGIEGTGAWGKGLTRVVQDTGIDVVEVIRPNRQTRRRYGKSDMVDAIAAARAVLNGEATATPRDTDGTIEALRLLRIARRSAITTRTRTANQLHAVITTAPDPIKAQLNGLTMTRITRIATNYRPGTNLTNTTHATKYTLKTLAQRWRTLTNEINHLNTQLDTLVAHAAPPGLLDICGVNTHTATDLLIAAGTNPHRITSDQSFAALCGVSPVDASSGHHIRHRLNRGGDRQANAALYRIVIVQLRYHQPARDYMTRRLQQGRTKPEVIRCLKRYVARTIWTHLNPN

SEQ ID NO: 275874 - protein, 472 aa, unidentified
MSKGSGLSRSQRRRNARKERLRALVPRDGSVIGIDLGEEKQVLAVIDHDVRVLWRKTARVKAHRLGEALDLAVAAARERGFASVTVACEPTGPRWMQVQRLCGERGLVLVCVQPLASHIAREQQDYTTHKRDESDAVLIARLACELHCYVPEELDQAWAHLRQLGRRREQLVKAATAAAQRIGDFLSTAWPSAETAARVPFKSLTWLACLEVVTGRCGGDPARIADLGEAEFFALVSGAVRGWGASRAVARIARNVLAVVEDPDAVGWSRRGLFARIAGELADLRGLRAELAATEARMRAVLGGELGLSRIGDIPGLTLTGAAVILAEAGDPRRYETSKSLVKHAGLSPADTSSGAFEGTSRICRRGRPGLRTAAWRAVLPLLVHNPVMAAKYQAMVGAAEDAARAAAAAARPGSAQAAQSGRAARAARAKARVACAAALLRWVYFMTVHDASWDLAAFSGQITRDDLPETA

SEQ ID NO: 275875 - protein, 435 aa, unidentified
MKVLHERVAGIDVHKDMVKVAIRSPGEKPWTRKTEILEFRTFYGVLQEMARELRRRGVTHVVMEASGVYTEPVYYALAEQDFTEVAVINPAHAKALRGHKTDAKDCARLAELFECGLLRGSYIPPAELKEVRDLTRYRMKTVQARTSEIQRLGKALESAGIKLGSVASSITGTSSTAMIEALIDGERRGGVLADLAIGRMRAAGKLADLSMALAGRFTEHHALLCRLHLDRIALFDDAVDGLDKRITGKAARWQREAGLLTSVPGFGDVVAQAWLGEIGPAPHRHFATHEKLASWVTLCPGNNISARKRKHGRTGDAGTYIKPMLVQAAWAAIRARGRLQARYNRLVRRFGGDKNPGAKKKAITAIAHTLLKIAYQVLKSGTPYQEPGADFYTRRESPEQKQAWLERQLLKLHPGCTVTVTVTVSPPEAALPAGT

SEQ ID NO: 275876 - protein, 343 aa, unidentified
MAKDTMIGVDLAKNSFQIHAATLNGEVKFRRKLTRTQFLSFMAAQPPAVVVMEACGGAHHWARELAPLGHDVRLIAPVYVKPFVKRQKNDAADAEAIVEAAQRPEMRFVEPKSAEQQARALLFRTREQLVHQRTELVNALRSYLYEYGHVLPIGIASIRRIEAIVEDTDNDLPDLVRDICRDLLQQIAEKTARIDALMKRIRATAEDTETARRLQTMPGVGPVTALAVEAFAPPLESFRCGRDFAAWLGLVPRQNSTGGKQRLGRVTKAGQADIRRLLIVGAMSRLTWLGRKSIRPGSWLARMLERKPKMLVAIALANKMARAIWAMLTRGEDYRDPVPAAAA

SEQ ID NO: 275877 - protein, 338 aa, unidentified
MNIVFLGIDLAKNVFQLCGLNQAGKPVYTKRTGRKELLQTLANIPACLIGIEASTGAFYWQREFEKLGHKVKVISPQYVKPFVRGQKNDGNDAQAIAVALMQPTMQFVPPKSPEQQDIQALHRARQRIVNHRTATVCQIRGLLLDRGIPIGSAVSRARRAIPLILGDAENGLSSRMRRTIAELYDLFNDLERRIHFFDKEIETVFRQSEACQRIAKVKGIGPKTATAVVAAIGKGTEFKNGRHFAAWLGLVPRQHSSGDRQVLMNMTKKGDKHLRTLFIHGARAVVRVATNNNDGHMNQWVNQLKERRGFNKTTVAVANKNARIIWSMLRNDTEYQVV

SEQ ID NO: 275878 - protein, 313 aa, unidentified
MSQNTMTTIYAGLDIAKLNLQLHLAGRFHDLPNTAAGHRRLLKLLALHPGVQVICEATGGYERDVVAALHQAGIPVSILNPARVRHFARAQGQRAKTDRIDAAVLTAYGQALQPKPTPARSAVEQQLTELIRRRGQVLETLVAQRLQSQHLTVPALVRQARSLVRRLEADLEQIETQLKELRAQTAQLDQRAQKLEAITGVGTVTALSVLAELPELGTLNRRQAAALAGLAPHPRESGRWQGRRTIGGGRAAVRRALYMAALVAARSNHQLKAFYQRLRAAGKPAKVALTAVMRKLIVLMNQILKHPNFALQN

SEQ ID NO: 275879 - protein, 451 aa, unidentified
MTGHQVSKVKLSTQHFGDRPTMTKLSSTPADAVLVAIDMSKHRQEVLIERPEGGRRRRMTVMATKTDYDRLASDLADIGRPIVVGFEATGNYHRTLAHRLLTAGFELRLISSVALARTREALHNGWDKNDSKDAQVILHMLRIGATQRYVDPLAAGINDLQEMSKTHEAISKAKTQTWHRILTHYLPLYFPEIERFAGNSRSDWFLALLERFPTPASMTALGQEAFTSEAWSLVGRKVSKARLINDIYETACASVALPVDEDSVAIVMFRMVIAQARSLIRQRDEIERTAHAMLSENRDYQLLRMIPGIGPINALTILAEAGDLRRFAHHRQFLKFCGLDLATCQSGTFRGRTKLSKYGNARLRRTFWMAAQVAARQRDNSFRDKLGRYMEGHASDPDRRRKAMTALTAKMARVAHAVIKTGTEYRPFLERADTRWKDPSLLCREGATATL

SEQ ID NO: 275880 - protein, 449 aa, unidentified
MEILYTRCAGCDVHKKTIKVCLLMRDANGQRQKELRTYGTTTEELLKLSDWLKEQGCTHVAMEGTGVYWKPVYNLLEGSFEMLVVNAQHVKTVPGRKTDTKDAEWIADLLQHGLLKASFIPSAPQRELRDLTRYRVRLTEERAREVNRVQKTLEDTNLKLGDVVSDIVGKASRMILGAIVDGETDPVKLAGFALGRVHATEHQLVAALTGHVDDHHRFLLREHLTQIAHLEQAIDRVTKEIARRFTPPPSPDDEDPGYSGGEQAKSRTETTAPEPSSSPKAALNWEEAMILLCSIPGVSERAAFAILAEIGIQMQQFPTAGHLASWAGVCPGNHESAGKRLSGKTRKGNPWLRRVLIQVAHAASRQKNSYLAAQYRRIAARRGTKRAAMAVAHSILVIIYHLLSEGTSYQERGEAFFEERDRETTERRLVNQLTRLGYQVELQPIAQAS

SEQ ID NO: 275881 - protein, 416 aa, unidentified
MEQVTWYVGIDWGSERHAVCLVDATGRRREERGIVHTAEAVQACLDWILTTAGVTPAQIAVAIETPRGALIDACLARGLLVFAVNPKQLDRFRDRHTVAGAKDDRRDAWVLADSLRTDSAAFQPVHQEDPVVVQLRELSRAEDDLDGEFRRLANQLRSQVHRLAPDLLARCPGADEPWFWALLEAAPTPAAQRRLTRARVDHLLRAHRMRRWRGADVVERLQGPSFPHAPGVVEAVEAQIRLILPRLEVVHAQRLACGGQLEQLLQQLRDRPRDADERGEHRDIAILESLPGVGRKVAVTMLAEAAQPLAHRDYARLRAHMGTAPVTTASGKRRLVSMRRACNRRLRWAAYHWGRTSVQHDAPSAAYYRQLRARGHRHGRALRSVVDRWLRILIAMLRQNTLYDASRFAVAIDNGA

SEQ ID NO: 275882 - protein, 339 aa, unidentified
MNVMIGIDPHKASHTAVAIDRAEDHLSSLKVRATHRQVDQLMDWAQSFEKRTWAIESVGGMGYLLAQQLVARGEDVLDVPATLASRIRVLATDRSNKNDPNDARSIAIAALRAPRLRIVEPANHVEVLRLLAKRNMDIGNQRQRIVCRLHSLLSELAPGGMAKELYVSDADTLMARLDPQTPTQQMRFDLVQELLDDVRRLDTQIKESHRRIKVAIKASGTSVIDVYGVGPIHAAALIGYSGDITRFADRDAYASYNGTAPIEWSSGGRVVHRVSRRGNRKLNHALHMAAITQLRNPGTQGRIYFERKVAEGKTKKEAVRSLKRQISNSVYRQLLLDAR

SEQ ID NO: 275883 - protein, 387 aa, unidentified
MSKKKGRVVGLDVHPDSFAGAVVEGSDPASAQVLSTSRRVELEQLEKWASSHTNKEDILVLEASGNAFAVAARLRRIGREVEILDSHRAGKVGKVYCANDRVDAVKIARIYLSALSPVVWQPDAKTLERREIFSAYQGVVKESTRARQQLRAMLNEHCVRLEKGFRVCHPKAITRLLALREWTPARRMLLQQLHGSLVAARARRTLLRRHMAQEIVAEEALLRLTRLCGINLVTLYGVVAAVGDVRRFSHSKKLVAYLGLNPSVSQSGNFEGNGALKRHGRGALRALLIQSGKRLLEVTNPLQKWGLAVAARRGRNKAAVAVARKLCVALWHVMMGHLIGALERLDTLETKLSKFATEVGPAALTAFGYNNKADFVEKKVYVLRSYP

SEQ ID NO: 275884 - protein, 409 aa, unidentified
MQVMHEVCCGLDVHKKSVTACVVWATGRRHQTREFGTFTKELLELSDWLRSCGVTHVAMESTGVYWKPVWNLLEGQFEVLLVNAQHIKAVPGRKTDQKDSEWIADLLQHGLLRPSFVPPTPIRELRDLTRYRASLAQEINRISNRIQKVLEDANIKLASVATNALGASGRSMLEAIVHGEQESQKLAEMSRGLLRNKIPELQQALQGRVTAHHRFLLRELLDHLYFVESKMRRIEQEVEEQLRPFQSEVARLCTIPGVDRVTAWSLLAEIGLDMEQFPDARHLASWAGLCPGSHESAGKRKSGKIRKGSLWLRRCLCQAAWAVSTKKNNYLSARYRRLAARRGGKRATIAVAHDLLVIAYYILRDQACYRDLGPDYFDRLNPGPLRRRLTKRLEGLGFKVTLESLSQVA

SEQ ID NO: 275885 - protein, 349 aa, unidentified
MGEVSTIGVDIAKSVFQIHGVDAGGTVVIRRRVGRARVLEFFADLPPCLVGMEACATAHQWAREVKKLGHDTRLMPPTYVKAYVKRGKNDAADAAAICEAVTRPSMRFVPIKNVEQQSVLMLHRTRDLLIRQRTQLINALRAHLAELGLVAAKGREGVHQLVTVVTECGGERLPSNARFACQAIVTQLHAVQIEISGLDKRITQTHRVNADSKRLDTIPGFGVILSTAVVATMTDPKAFKTGREFAAWIGLVPRQNSTGGKDRLGSISKQGDRYLRRLLVVAATSVINSARARPYKYPWVIELLGRRPTKVVAVALANKMARIAWAVLAKGEPYRAPTRSSKAVVPAAA

SEQ ID NO: 275886 - protein, 363 aa, unidentified
MDKYIGFDIDSNKTIACVVQKGKKDMYTTLKTDIGQMKNFLQKQRQDGEKLYLTFEISGEAGYRYDSLIDLVDDITVSNPTKMTWIYRTAKKTDRIDARKQAILLSIGEVPKVHIPSKEIRQWRVTIQHRRKIVNKITQVKNRIQALLKANGFIRPAQRGSWWKLSNRAWMRQFTEEIGITSEQLWRMSLADMLDELELLESQLKRVTKYLDGYLENQAGGKLLMSIPGVGPRTAEAVLAYTDDIKRFGRSKQYCAYFGLTPKLDESGSNRRLGHISKQGPSVVRWLIVEAAWRAIKKSPALRQFHEHVMSGQKGRKKIATVAVARKLLSIMRAMQTSGELFNEGLVCRECGFGRLVEVAKSA

SEQ ID NO: 275887 - protein, 338 aa, unidentified
MKLYGGIDLHSNNSVIALLDEEDQVVYRRRLPNNLATILGELAPYRESIEGLVVESTYNWYWLVDGLIAAGYRVHLANTAAIVQYAGLKYTDDDSDARWLAKLLRLKLLPEGYIYPKGERAVRDLLRKRGQLVQQRTSNLLAVQNLLARNRGESLSANAIKRLSSEEVDHLLPEPHLALAVNSNLGVIRVLDEQITVLEKTIKAYIKPSGALQFLLSVSGIGDILGLTILLETGEIRRFASVGQYASYCRCVGSERISNNKRKGRGNTKNGNRYLAWAYVEAAHFAVRYNPQIKRYYQRKAARSHGVVAIKTVAHKLARACYYILRDQVPFDVNKAFT

SEQ ID NO: 275888 - protein, 415 aa, unidentified
MALKIVYKICCGIDVHKNFVVACIAKTDKQGITTYERHHFSTYTKGLKQLLKWLLDRNCKDVCMESTGKYWIPVYNVLEHDCSIVLAHPKYVKAIRGKKTDKKDAKWIADLFKHDLVAGSFMPPADIRQLRDLMRYRFKLTCFKSSEKNRYQNCLTVSNIQLASVVSDTFGKSSQKIIAKILENPDNTSFDIESLIHGSMKDKLPELELAIDGYITPEQAAKLKIIKEHFDNLEARKAELEELILALANPYQQEISIILTAPGFKNTFTAIGIISEIGTNMEAFPSAKHLCSWAGLTPTNNESAGKKKSVRVSKAGCYIKPLLVQCANAAIKSKKHPEIRDRYLRIKKRRGHKKAIIAIARMLLTALYHMLKNGENYNSDLYQKSDILPTTREITVEQAILMAQFQGYRIKSATE

SEQ ID NO: 275889 - protein, 443 aa, unidentified
MGRRCIGMDVHREFAQLAVWEHGKVRQAGKIGLTAEALRVFCDSLGPEDEVAIEATCNTHAIVRLIRPHVARVVVSNPQKTRAIAEAKVKTDKVDAAILAELLAADFLPSVWVADEATHALRRQVARRSNIVRQRTRLKNQVQAILHRNLIARCPAADMFGIKGRSWLASQDLPTDEQVAVDALLRQIDFHNQELRIIDAALAHAALAREEVLRLMTIPGIDATVALSLVAAVGDFRRFHRPEQLVSYLGLNPRVKQSGGMPASHGKITKQGRAHARGMLVEAAFTAARTPGPLRAFFERVRARRGVQIAIVATARKLACLCWAMIERGEDYAFARPSLTDKKRRALELRAGLPSRQGRKGTAAAYSLTEVRQRELELARQAEHAYRRQVADWQANRPAKNKPGVAAANGTRLKRPSAGQAARQASVPEPALRSGVDHAHRQG

SEQ ID NO: 275890 - protein, 408 aa, unidentified
MKRYYLGVDWADEFHQVWVSDPDGNRVIEKKVVENVEGLTEFGRWLDESRAKGIELWAAIEKPHGRIVDFLLDHGVVVYPVNPKALDRARDRFRMSQSKSDGFDAYVLAEFLRTDHGHLRALEPNSDPAQELKLLTRDQYRLVRQKARLLNQLSRTLKEYYVRPLEMFSDLESNIALDFLDQYPTPHDLSKLTRRQWNRFSKREHHLGEERSKELWEKLNQPQLKIPEHVVRAKARLLKVLLAQLKPLRDAVESYNERVKSFFASMPAAELVTMLPGAKTGTIIATLWAELGDAKSRWESFRHLQAEAGVVPVTKASGKSRIVQFRFSCNKILRHAAYWLAFVSLNRSEWANHYYRDQRAKGHSHHQALRALGAKWLKIIFVMWRDHTPYDENIHLANITRQKMRQAA

SEQ ID NO: 275891 - protein, 371 aa, unidentified
MAKRLKYIGLDVHKETIAVAVAEGERGGEVRFHGTIPNEDDAVRGMVKRLAGPGITLDFCYEAGPCGYGLQRLLTRQGQPCIVISPSMMPRRPGDQIKTDRRDAMTLARLLRAGDLARIWLSVQAHDAIRDLIRARRRAQEDTSAAKQRARSYLPRHDRSSSGNSTWTTTYWRWLSEQRFDFAHQQLAFEAAKRRVLEAQARTARLEAALVEAVDGWRFAPLVRSLQALRGVRLIVAATLVAEVGDLTRFQNPKQLMAYLGLVPSEYSSGARVQRGRITRAGNAHARTMLVEAGWTYRLPAREERRYRDRVADLPEDIQAIGWKAQVRLCQRFRRLSATGKPQPKVNTAIARELVGFAWDIARRVQPVVAV

SEQ ID NO: 275892 - protein, 370 aa, unidentified
MLDTTTFVGLDVHARSIKAVSLDVMTGEVRAATFGYDAGAVAEWVRSVDPRARCVYESGVTGFDLQKRLSGLGVDCVVGAVSKMIKPSADRRRKNDRNDAEFLARMLSVGNVVEVWVPDDECEAARDLTRALEDARDDLSRSKQRLSKFLLRHGLVFDERTPTGRRKGNWTRAHWSWIESIRFAEGADNDVLAYYVDAVRRAAEEKARLEGLVEAEARKPRWRKRVDSLRCLKGVDTASAADLVFEAGEFSRFRNARSFAAWVGLTPSEHSSGESDRRGAITKAGNKHLRKALVEAAWHYLTCSGRPKDLAKGQAPDRGARRHAAKGVRRLAERREALLARGVHGNKANVATARELACWVWAVGLMAEEA

SEQ ID NO: 275893 - protein, 339 aa, unidentified
MKNKKYFIGLDVHKKKTTYVVRDKIGNILLEGEAATLYSELYEQLKLYLKSAAIGLEACTSYYTLYQSFLKNNYSIKVANTIQMRQLIAKNDRLDAKRLSEMLRLGTFPCSYIPDKDIQHLRSLIQVRHALMEEKVRCNNRIQAFLDRNGVVMPICEAFSKKWRHTLMQYMGSGEVSLEMRYEYDHFEFLEKKNKQLDQEMQGYAHKHWKNEYKLIQGITGFGPVLTCYIIANILPIKRFISNRKLRRYAGVVPTYKESAGKTSKGHIPKTSSRRLLRWALIQAANAAGRTNTKLGRYYRMKKKQKNNASIAHVAVASSMIDIIYKVLTTKKPYNPKNC

SEQ ID NO: 275894 - protein, 368 aa, unidentified
MHMIVIGTDTHKVTHTCGAVDARTGQIAGELTAAARKPGFREPLDWGRGLDPERIWALEDCRHVSGAFERFLIAEGERVVRVPPKLMGESRKGERSRGKSDPIDALAIARAALKEGPETLPAAQLDDEALELKLLLDHREDLVRARGEDQQRLRWHLHDLWPEFELPAGCLDRIVWLDRIARKLARPEQSARVRIARELVRQVRDRTRRAADLEREITALVRAQAPELLALPGCGALTAAKLVAETAGVERFASDAKLARLAGVAPIPASSGNRWRHRLDRGGNRQLNCALHRIAVTQGRVHPPAREFLARKQAEGKSRMEGLRCLKRHLARAVWQALHAARDRESHNSLSLIDEVPKLGPVAGLALT

SEQ ID NO: 275895 - protein, 367 aa, unidentified
MKKVSTILAKQSRKSFQQKLTIGLDLGDRNSWYCVLDEVGHIQLEQRVRTSAKGLGEVFGAMPHSRIALETGTHSPWISRLLREFGHEVIVANARKVRLIGESRKKDDRLDAQTLARLARIDPELLCPVKHRSAQAQADLMMIRARAGLVRARTGLVNTARGLAKSYGERLRGCNVRNMNPQKTEGLSAELQAALEPLLAAIESVSERIAEYNQRIEKLAQESYPQVAVLKQVKGVGTLIALTFLLTLEDPHRFDKSRDVGCYLGLQPGRRNSGQSEPQLHISKEGDPYLRTLLVQGAQHILGPFGVDCDLRRWGLKLADRGGRNGKKRAIVATARKLAVLLHHLWVSGEVYEPLHNNRRVAVTAAA

SEQ ID NO: 275896 - protein, 444 aa, unidentified
MQLKQRIQPTIESAKTMSESIAAAALQAVAAYIGIDWADQKHDVVLRSASQPNKVEHRIIEHKLEALMEWVGQLQQRFGGQAKILVCLEQSRGALIYHLMGYEFFELYPVNPLQLARYRETFSPGGAKDDRADAELLCELLYCHRDRLRAWKADSELTRKLVFFTEGRREAVDQRARLSQAIKSQLKVYFPLALELLNNDTTTALAADLLLRWSSLEALQKQSAHTLRKFFYGHNCRGEAKMLERLQLVQEAQPLTQDAAVIEPAALRVQMLACQLKHLLPDIARYDKKIAELFAVHPDRFLFENLPGAGLALAPRLAVAFGSDPNRWESAQEIATLLGIAPTRRASGKKTGKKASVHFRQACPKFHRQSFHEFAGCSIRYCPWADAHYQTQRARGKGHHTAVRSVAFKWIRICFACWKQRIPYDPQRYLQALQRRGSPLADAC

SEQ ID NO: 275897 - protein, 360 aa, unidentified
MQAFGNEIFREQKLTIGVDLGDRSSAYCVLNEAGEIVLEHKLPTTQEAMKQVFGSMPRCRMAMETGTHSPWVSRLLTALGHEVIVAHAQKVRLITKSRRKDDRLDARSLARLVRIDPELLGPVKHRSAQAQLHLTEIRARAVLVSARTALVNAARGLVKSYGERLPKCGTQQFSRETTSGLSAGLREALEPLLQEVESLNERIQEYDRRIEKMAKQTYPETTLLKQVKGVGDLIATAYVLTIEDPHRFRKSRDAGCFVGLQPGRRNSGESEPQMRISKEGDEYLRTLLVQGAHYILGPFGEDSDLRRWGKKLSARGGKNAKKRAVVAVARKLAVLLHRLWVSGEVYEPLRNSQKTMNAAA

SEQ ID NO: 275898 - protein, 402 aa, unidentified
MNSVGIDISKGRSTIAVMRPFGEVVISPFEVRHTGSELSKLAKQLKSLDGETRVVMEATGNYHAPVAKLLHDAGLYVSVVNAKLVHGYGNNDLRRVKTDRKDAVKLANYGLDRWLTLPRYIPEEDTRLLLKNCYRQYQQYSKVQTMLKNNLISLLDTTFPGMNRLFNTPARADGSEKWVDFAADFWHCGCVCECSEKVFMNKYQRWCRKHGYNFSERKALDIYTEASGHIGVMPMSDTTKLLVAQAVSQLRATSAALAVLKQEMQTLASQLPEYPIVMEMFGVGPALGPQLMAEIGDVRRFHSKKALVAYAGIDAPPNDSGDVTGRHKGMSKVGAPSLRRTLFLVMSVYLQNAPLDEPVYQFMDRKRAEGKPYRVYMMASANKFLRIYYASVKAYLETLERF

SEQ ID NO: 275899 - protein, 418 aa, unidentified
MNEDGNTRVSRRYVALDIHKHYCVVAGVDREGRVLLQPVRVEHADLEGWLKKNLRASDHVVIESTTNAWYVYDLLTPLVERVVVANPIQVKQIARARVKTDVRDTFILARLLAANLVPEVWVPPIHVRQLRQLLSQRRQLVETHTQIVNRMHSVAHRHHLTHARGKRFNEKTTAWQKDKRLSKVEQFQLELEMENRVYIEKQIGRIGKEVAKMSHQKPWADSMTYLMQLPGFGVITGMTVLAAIGEIQRFESARHLASYSGLTPGLEQSGTKYREKGVTKEGRKELRWAMVEAAQRAVKSDPVWKTRFLEMQKRMHRNQAIVAIARRLLELVWYVLTRRQPYRHFSQERIAYKYLTWAWQMDEAARDGLTRQQFTRYYLMRLGIGHDLTRIALNPKYPRKLASEAELLALRPELDHIE

SEQ ID NO: 275900 - protein, 415 aa, unidentified
MEPMHQRVAGIDVHRMKHVVTILIGQEDGAVSSETREFGGFKRDMRALVAWLQTHRIQQVVMESTGIYWKSVFAHLEAAGIAALVVNAFHVKNVPGRKTDVGDSEWLAQLARFGLLRGSFIPPKDLRELRIVSRYRRKLTGMLAGEKNRLHKLLDDAGIKLGGVVADIDGVCASKMVEGLIAGGKPDELAALGRGKVRATTDILEAAMDGELSARHRLVLDMAYDHLRYLEGKLAALDRYLLAAMQPYAWAWRLLQTIPGIDAISAAMILIEIGDDPHRFGSPARLASWSALCPGNNESAGKRKSGKTRHGNPIVRYLLCEAANAARRTKTVFRAKYESLVIRRGHKKTIIALAHKLVRTIFCVLVQRKPYRDSTVDYEAASVAKNAPRWIRALKKYGYWPQVAAPSAPIVATAS

SEQ ID NO: 275901 - protein, 357 aa, unidentified
MTETTMTTVGVDIGDRFCQLCVLDETGELSEETRVATTRPGLRRYFERMPRARIALEVGTHSRWISQVLVDLGHDVYVANPRKLRGIYENDKKTDRTDAQWLAEVARFNPKLLSPIQHRSERAQGALERVLARDVLVRARTQLVNHVRSRVKCAGARLKGHAPETFSPGLLDEIPEERRAALRPVLETLEGLNQSIKRCDRDIVQVSEQEFPETKVLRQVKGVGVLTALTFVATIEDPSRFASSRRVASYLGLRPRLDQSGQQDKQLGISKSGNPLLRRLLVISSQWILGPFGVDSDLRDWGLGLAARGGKGAKKRAVVAVARKLSVLLLALWRSGGAYEPRRQKSPVSDESSLKVA

SEQ ID NO: 275902 - protein, 416 aa, unidentified
MDVAVERCAGLDVDKKTVTACAIVPDADGRPTKAVRRFGTMAVELEALAVWLAERAVAQVAMESAGAYWQPVWNILEEHGGFELVLANARRVKAVPGRKTGIRDSEWLAELLRHGLRRGSYGPDRAQRELRELARYRTALGEERTAHVNRLQEAPEPATIKLASVASDVTGVSARAMLAEPVGGDADPAALADLAVGRLRAKLPDPERALVGRVTDHHRSLVPRIPAAIDFLDGELADLDARVADLERPFADAVARLDGIPGVGRRVAEILVAEVGPAVDRFPSAEHPASWAGLCPGNHESAGKRLSGTTRKGSRALRRALRRALVQAAHAAGTARRCYLGARYHRRVARRGATRAAVAVAHAILVIAYHLLTRGTAYADLGPGYFARRDAAVTERRLVARLEQLGFDVTLSPRVA

SEQ ID NO: 275903 - protein, 316 aa, unidentified
MDGANQVWIGIDVAKATLDLHFLPTGQSHSRPNTPPGHQQLRKLLPDPTGCLIVLEATGGYERQLVADLLDAGYRVAVINPKRARDFARALGLVAKTDRIDARVLALFAQKVQPAPSEKTPEKQAEIQQLVSRRRQLIDLRTMESNRLEVTAAKTAQKSIQAVLKILERQINSIEAAIEALVQANEEWRQKAQLVQSVPGLGGVTATTLIADVPELGKLNRQQISALVGLAPFNRDSGQHQGKRSIGGGRKSVRSVLYMAALAAKRCNPVIQAFADRLAQHGKPFKVVLTACMRKLLVILNALLKSGQSWNPKTAS

SEQ ID NO: 275904 - protein, 356 aa, unidentified
MNTQKDNVIDFRGQHFYVGLDIHKKSWAVNIRNNGMRLKAFSMDPYPEKLERFLDENYPGGTYHVVYEVGFCGFGICRTLLDMGIDCIVVNPADIPTGHKERDRKTDPVDAAKLARELEKGSLKCIYIPDEADQNLRSLCRLYRSTVKDTTRVKNRIKGHLYFNGIELPRHTSQWSGKFIDHLRSLPMDNGPAKEYLMICIDSLEKCRQTTVLILKKLREYVHDHRNPSIFQNLLTVPGVGLKTALVLYTEIIDMKRFRTLDHLKSFVGLVPSTDSSGENDWVRGLTYRKNKHLKHVIIEAAWVAIRQDPVLLHKYNKLIVQMKAQNAIVKIAVNLLDRIRYVWNNNRPYVKGVIR

SEQ ID NO: 275905 - protein, 361 aa, unidentified
MSLASWLVAGMIPGVNREPLKKIAPNPEVLLQLLHRWRDEAIKAGKEITRIAVAYETGRDGFWLARWLRARGIDAHVIHATSVAISREHRRAKTDRIDTAMLRRGFLGWLRGEPGHCSMAIVPTVEEEDAKHPHRERETLIKQRTSTVNRMKSILIKFAVRDFNPALRKAPAKLASVRTPEGIPLPSNAVAALQRHMQRFSIIKEQIKAIERTRLQRLQRDPTEKFNAMVFLLVRIIGFGVETAQQLVHEMLSRSLRDRKAVARYAGLTGSPDESGSKRREKGLSRCGNRRVRNILIQLSWRLLKFQPKSDLVVWFKKRTANARGSRKPMIVAFARKLIIALWRYVNTGLVPEGFQLRSAA

SEQ ID NO: 275906 - protein, 385 aa, unidentified
MIHVGADVHIRNSVLNAKDEDGQVLARGRYGNTMVELSGFFAPLERRSKATGEPIRVVMESTGNSRAIQRLLTDYGREAGIDLTADVLHARKLRVIAESVNKCDRVDADILTELSRSNFKLPTCYMPDDEEFALREHLRARTDLVRIRTMVKNRVHAILHRRGILTPTTDLFGRRGGTFLDQLNLDQAGRITMDRFRALIDQLDESIKQSTACLRTVMREPRWSKPAALLQTMPGIGLITSLMILAELGDLSRFRSRAAVANYAGLVPRHRDSNDKRWSGHITRQGSAHLRGVLIEAAWMAAPRVPVYQALFDRIAAKKNKKTAIVAVARRMLEDAWMLLIKDEAFRYVPAFLGDAQEDRTRTPAGPEHRELRSRVPQAASSVAG

SEQ ID NO: 275907 - protein, 334 aa, unidentified
MKKRYFMGIDVAKATFDFCLLSSSGCCLWRGRLDNDARAIEHFLAQLRARGWKLAQIHFGLESTGVYGKALVAALHQAGLAVSVLNPAQVKYFAFSVLRRTKNDQVDAEIIARFGRERKPVATRPLRPIEEQLKLLVHERESRVGEQSRERNRAKKDPFQIELPTLISRQRHQRLQQLAKEIAQLDAAINSLIASDECLKTQSKLLCSIPGIAAVTAAKILSELAGKEFHSARQLAAYAGLTPAEFRSGFSLYGKTHLSKIGNAFLRKALYLPAAVARRWCKPIQPWIRILESRKLHDLAIRGAIMRKLLHIAFGVLKHQKPFNPLLVSFAKTL

SEQ ID NO: 275908 - protein, 344 aa, unidentified
MREIIRIGMDTSKHIFVLHGVDAAEQVVLRKKLSRKQVLDFFAKLPPTVIGMEACGGSQHWARELGKLGHEVKLMAPQLVKPYVMRNKNDGRDAEGLCEAMGRPSMRFVPVKTAEQQAALMLTGIRDGLIARRTQLGNTIRGHAAEFGLIAAKGVDKVEPLLARIAQDETLPALARELFVVLGREYTRLEGELGEIEAKLMAWHRSDATGRRLAQIPSIGPIIATMLVMKTPDPLAFRSGRHFAAWLGLTPQDHSTGGKTRLGKITRAGDEDLRRLLVIGATAVIQQARRGRGHHSRWLLALIQRKPPKLAAVALANKVARIAWKLMATGESYDVARMNPIPAT

SEQ ID NO: 275909 - protein, 423 aa, unidentified
MKLTYPICCGVDVHKTFLVATIITSEYAMPHYHQKRFSTFYSGLVAFKKWLLENNCKDVCMESTGKYWVPVWNVLEDSIHVVIANPKWVSAVKGNKDDKKDSKWIGDLFRMGLVPGSYIPSKNIRILREFTRYRSKLVSMRSSEKNRFQNAFTVCNLTLDAVVSDMFGKSATDIENYLLKTDIVDPAQCVSLLRGSLKKKSSDVVEAVSGFNMTPEQKERVRIVQGHFDDIDHRITQLDEVIGNLVAGYEGQIALLCTVPGIGRRTAITILSEIGTDMTGFGSSKRLCSWAGLTPANNQSAGKKKTVKISRAGVYLKPALVEAAHAAVKATEKQPYYRIKFERLMKRRGKKRAIIAIARMILTAIYAMLSTGEVFNPCDLEKFDMPEELKKKRMLASAKEAVKLLVSLGVVSAGSISLDALAG

SEQ ID NO: 275910 - protein, 345 aa, unidentified
MPNLNHFRDFTYVVGIDIAKSVFQVHSCNTQTGEIQNVPIKRAKLLEHFVNRGKCLIGMEACGSSQYWAREFQKLGHTVRLMDPKRVKPNVRHNKSDRADAEGIYWALVNGVQAVAVRNNIEQDIHTLLTMRSRLMTLRTGNINHVRGLLAEYGQVMPKSPAQFLKHVSDSINNLEGEVDSLVIDMFRSLVEQIKAGEDKLRELDSEITKLAKQTKHAEHFLTVPGVGSLITANLCVLLANPSAFASGRQFAAFVGLVPMHTGSGGKTINTSIPYRCDKRLRALFVEGAQAVARSKHPADWVKNILARKPKKVALIAIANRMARQCWAVAHYEQPWRDMSIATAA

SEQ ID NO: 275911 - protein, 396 aa, unidentified
MYYVGIDVSKHHHDATVIDATGRVVIAPFRFLNTRQGVATLLSRLRPLNPVCIAMEATGHYWLPLYEALIDRGYSVSIFNPFQIKAYRQIGLRKTKTDAVDSFWIADFLRIGRGQPMVVPTPLVRQMRELARFRFSLLQRQGNIRRRALTILDRVFPEYLTLFPRPFSPTSRALLRRAVTASSFAAWPLEDLAQTLSRASRGHFGLREAGKLQCLAQDSLGIRSLGPVAYLEMQLLLDQLALLDDQIATLDEELARLLQRTGTYLTTIPGLSTTLAATILGEIGDIHRFANLKQLVAYAGLDPTVHQSGQFQASHSRLSKRGSTYLRWALWMAASIARQHDPDLKALYQRKRSQRKHHNVAMAAVCHRLLARIYVVLKEQRPYKARDSDTRHSPID

SEQ ID NO: 275912 - protein, 392 aa, unidentified
MACIAATDEKGVTTYSKPKRFSTFTNELRRLSAWLTQNNCRDVCMESTGKYWIPVYNILEPTCNLVLAHPKYLKAIKGKKTDKRDAKWIADIFKHDLLNGSFIPPVLIRQLRDLVRYHAKLTSYMSGEKNRAQNCLTVSNIKLDDVFTDVFGKAADAITKRLLESDEPFDITPYLTKNIKASPKDIQAAVDGVMCAEQAEKLRIIRSHMKNLELCKANLESAILTIVEQFLPQVNLLVTVPGIKSFSAIAIIGEIGVDMSVFKTSRHLCSWAGLTPQNDNSAGKKKTTRISRAGVYIKPLLVQCANAAVKSNKHPEIRNRYNSIKKRRGHKKAIIAIARMLLTAIYNILKKNEPYNSELYQKADMPPKNREVTLEQAIFIVQRQGYIVAASP

SEQ ID NO: 275913 - protein, 430 aa, unidentified
MHNKNYISVGIDVGSAFSFMTILAPDETVILKPFKITHNNKDSLERAVSEIKKAEELYSLESRTFLESTGIYHFPLFCYLVDCGFNASIINPIITHSTKNGNIRKVKNDKIDSKGIAKLGLSKDIPVSQFPAKLVLELRSLTRKYYDLTDERSAHINKLKGDLHTVFPQYLDVFCDVTGKTSTMILRQYGTPDKILRGHKKTLIEKISKASRKGLAKASERYEKLCAAANAAKTFGCQIDSIYFNIFLTLDLVEKLDSALDSILNRIRQLITFNKNEKFIQQIKLLNTIPGVGFLTAVTIMCEIGDFSAFRNPKQLFAYFGLDPEVNESGKFVGTQLHMSKRGSRIARRAIFAVALASIRTKRNGEGINPYLRKYYELKSGQKPKMVAIGAVMHKVCNIVFAVLRDEKAFELRSPEEHCKQYQRPALAAA

SEQ ID NO: 275914 - protein, 387 aa, unidentified
MPLAADLPAQTQPVPRPAQVLYVSLELSPSKWLVTSLLSGTGRMSKHLVIGGDGNALLRLLAALRTRAEQRAGAPVVIVAIQEAGLDGFSVHRLLEANSVESWVVDPASVAVPRRMRRAKSDAIDGETLLRTLLAFRRGEPRVCSMVHPPSVEEEDRRRITRERRTLLRERIEHTNRIKGLLMSQGVTGYDPLGKDRWARLESLETRDGHALPPRLKAEIGREIERLELLARQIRQVEAERDALAATVPEVAASPAALLLRLKGVGPETATLLWLEGLFRTFANRRQLAAYAGLAPTPWLSGRIRREQGISKAGNPRLRTAMIELAWLWLRHQPESALSRWFGERVRAGGGRNRRTTIVALARKLLVALWRYLVHGQVPDGAVLKPS

SEQ ID NO: 275915 - protein, 429 aa, unidentified
MTRISAGVDVPKNRSTVCIMDQDGKFIMRPFLVWHSTEELDFLADTLKRLNGEVRVIMESTSIYQYPIALHLKEKGIFISIVNAYKVKKFANTDFRGGKTDKKDSRTIASYGISYWDKLVEWQIPKDTYFNLDLLNRTYMNAKKHRQIILQELQHYIDCAMPGMDKELHSLNLSTKKDFMLDFVEKFWHRDEIVNMTEAEFTEVFTAWAKKKGYRPVEGKAAKIYAIAKSCIPYYPANPTVKTILQCIVDKLSGVNRTLVTIVTQMIEEAKKLPEYQIVREMPGVGDPLAARFFGSAGDIRRFKNSKALVAYAGIDSPPDESGDFSSTHRHITKKGSKVFRDTGYEIMMALRAQKRTWEKVRKNPEVYDYMLRKEAEGKPPKVAKIAALNKFLRIVYARIKELYDNMALAERAKTKTRSKTRAKTKVTA

SEQ ID NO: 275916 - protein, 371 aa, unidentified
MNSIVYVGMDVHKEQYTLCCYSYDTDKVEYKQTIPSDYKLVLKYMEQIRSRYEGEVSFVCGYEAGCLGYSLYHQLKDHAVDCKILAPSTMAITNTHHVKTDKRDAANIARCLAFHTYSEVYVPDNDDNDVKEYIRMRDDQKLYLKKVKQQILAFVLRQGKRFEGGKTYWTIAHLKWLKTLELSDLQREALDEYLLTYEYLTEKISRFDERIEELASVERYEEKVKHMSCLLGIKTHTALSMIVEVGDFERFEKAPKFASFLGLVPSEDSSDTRVNRYSITKAGNSHLRRLLVEAAQSYTRGNVGHKSVALKQRQKGNPPEVIAYADKANERLRRRFYKMTLNKGVNRNVAATAIARELACFIWGMMTEHVS

SEQ ID NO: 275917 - protein, 349 aa, unidentified
MGEASTIGIDIAKSVFQIHGVDLDGTVVIRKRVSRAKFLEFFADLPSCLVGMEACATAHQWARELKKLGHDARLMPPTYVKAYVKRGKNDANDAAAICEAVTRPSMRFVPIKSVEQQSALMLHRTRDLLIRQRTQLINALRAHLAELGLVATKGHEGLQQLVVAVTESGDERLPSNARFACQSIVAQLHAAQTQISGLDKRITQTHRANADSKRLEAIPGFGVILSTAVVATMTDPRAFKTGREFAAWIGLVPRQNSTGGKERLGSISKQGDRYLRRLFVLGAISIVGTARTRPDKYPWVTELLGRRPTKVVAVALANKMARTAWAVLAKGETYRAPTRSSNAAIAAVA

SEQ ID NO: 275918 - protein, 445 aa, unidentified
MRRCIGLDVHREFAQVAIWEAGVVRQAGRIQTTPEGLREFAASLCASDEVVLEATGNTYAIARLLERQVGRVVISNPQKTRAIAEAKVKTDKVDAAVLAQLLAAGFLPSVWLPDAATFALRRQIARRAHVVRQRTRLKNQVQSILHRNLVGRCPAADLFGHKGRAWLAAQDLPQDEHQAVTALLRQLDFHGQELRIVDAELGRVALERDEVRRLLTIPGVDATVALAIVAAVGDFGRFSSPQRLVSYLGLNPRVRQSGGHPAQHGRITKQGRAHARGMLVEAAWAAAKTPGPLRAFYERVRARRGMQIAVVATARKLVTLCWHLVVKGEDYAFARPSLTDKKLRSLELRAGLPSRRGQKGTAAAYSRKEVRRRERALAEQAELAYRQLVGNWQPKPPPTQPTRKGVGVAAATGARRSSPQGGKAARQGFQPQGPALRSGVDHAQP

SEQ ID NO: 275919 - protein, 381 aa, unidentified
MTRATRTAEYTGATTLCLYLAFELGSNEWKLGFATEPGATPRVRTMPARDLARLTREIADAKQWFGVQAATPVRSCYEAGRDGFWLHRYLTSSGIANVVVDSSSIEVNRRLRRAKSDALDARKLLGMLLRYHAGERAVWSVVRVPTVEEEDRRQLHRELRTLKQERTRVANRMNGLLANQGLWLPPGTDVGAAAKTVRLWDGSPVPAALRARLEREWEHAQFLRTRILALERERQRAIAHGHGEAIDKVRQLLRLRAVGPTGAWVYVNEFFGWRRFRNRKEVGAAAGLTPTPYQSGDERREQGISKAGSRHIRAVAIETAWCWLRYQPRSRLSRWYQARFGRGGTRARKVGIVALARKLLIELWRFLEFGVVPEGARLKTA

SEQ ID NO: 275920 - protein, 416 aa, unidentified
MRTLKLTLKGYKMYYVGIDVAKEKHYVCILDDTGEYAVKPFWIYTNVLGLRELIKRFGDLSLDNDDFLVGLESTGAFSENLYEYITDSDYKAVLLNSYQTAKFRDFSTMKKIKNDAIDALVIAELLFAGKYKESHISNDAYHSLKVLGRTKKSLMDKIKTLKREISTVIATVNPEISRVFPNIFTRTALEVIKVYPTATDIAQATPKKLTRLFRHIKGNNFSEDKAKFLIDLAKTSVYAGRACKARASLLSSYIRILELYCQEKKEIEAQIKQLIEEEIDTIDNTVENLQSIPGVSDKTISAILGECGDLRRFDSAKAFIGYLGLYPTQYQSGNSLSVGRLAKRGIPIAKHALYMAAVGSVLHNQQLNKIFRDKVSSGKSKKEALIILSKKIATIMYSIVKHNKPYDSHRVFIPNR

SEQ ID NO: 275921 - protein, 351 aa, unidentified
MSAAATILALDLGKYKSVACLQETQAGEARFQTLTTARAELARLIERHRPAVVVIEARALAGWVHDLCAERGVACKVANTASEAWKYKHAKRKTDRDDALRLAQLEALGQLPAVTNPPRRTREWRALIAYRQGLVGRRVMARNRVRALLLGQGPPAPRGRRAWTATGLEGIGAYARPLSECGPDDLWRGPLHLALAEPRQARELIGQAEARLDELAEASEAVRLLETVPGVGPRTAEAVAAHLHDPARFRSGKQVSAYGGLVPRQFQSGENDRRGRVTKRGPALLRKLLVECAWAMLRYNAWARAVYARLSRGQARKKQAIVALARKLLVRLWAMWRDRTPRRDGAGAVPA

SEQ ID NO: 275922 - protein, 352 aa, unidentified
MVVAVQYRRPSLNKNVMVQIYGIDLGMSSFDVSFLSESGSVRHLSGVKNTVHGISKFLLSLPSSAVLCAEHTGVYGDLLLRLCTLNRICLCFVPGYQIKHSLGLQRGKSDPLDACRIREYAERFYDLLRPCFYPGEEMSELQELYRTRSLLVESRKRLDTLNIGDNCKSSVSLAADHARRAVLAELNTQISGLDHEIEALIQNSSEFSRNYQILTSIVGVGPVTSCELIIKTENFRKLDTAKKCAAYAGIAPYPKESGKMKCGHKISPMGDKQLKTLLFLCARSAKEHNKEIRLYFLKKHKVEKKHFFVAMNNIANKLLRLIYSLIQKQQTYDRDYIQKDPRCVVISEVSKC

SEQ ID NO: 275923 - protein, 319 aa, unidentified
MLVGIDVAKAELVVATRPGGERWTVENAERGVRTLVERLRRDGAQLIVLEATGGYELLCVAALVAASLPVVVENPRQVRDFAKATGQLAKTDRIDADLLALFAERVRPELRPLPDEEAKELEALLARRRQLLEMLQAERNRLGQVFGRGKAPVKKSLKAHIAFLERELRMADTDLGDMIRASPAWHEREDLLRSVPGVGPVLSLTLLANLPELGRLSRRAIAKLVGVAPLSRDSGTLRGRRFVHGGRASVRGVLYMGALVATKRNAVIRAFYARLLAAGKPKKLALVACMRKLLTILNTMIRTGQRWCAEHTDRAVIHA

SEQ ID NO: 275924 - protein, 326 aa, unidentified
MEHELHYIGIDTAKEKLDVDVLRPDGRHRTKKFANTTKGHDELVSWLKGHKIDHAHICIEATGTYMEPVAECLYDAGYIVSVINPALGKAFAQSEGLRNKTDTVDARMLAEFCRQKRPAAWEAPHPLERALRALVVRHQALTDMHTQELNRTETAREVQRPSIDAHLLWLEAELKRLEKQIKDLTDDDPDMKHRRKLLESIPGIGEKTSAVLLAYIGLKDCFAHARQFAAFAGLTPRRYESGSSVRGTSRLSKAGHVSLRRALYMPAMVATSKTEWGRVFRDRLAANGKKGKVILGAMMRKLAQVAYGVLKSGVPFDAARHNPVAA

SEQ ID NO: 275925 - protein, 347 aa, unidentified
MTSIVKQVVGIDVAQDELVISLGRMGHDTGIEIFAFKTFANNEKGFNGLVAWVDKLAVKGIKVRYVMEATGVYHEKLAYYLSDQGQEVSIVLPNKISNYFRTLDVKTITDKTASQAICRFGLERKLEAWKKPKKIFKDLRQLTRERDQLIADRTVLKNQLHAEKAEAFPNESSIKRVTKRIQLNDKQELEIKAEIAELVKKDSELVKKINTITTIPGVGKLTAVIVLAETNGFELIKNKKQLVSYSGLDVRLKDSGTSVKGKPRISKKGNRHLRKAMYMPALAAMRFNDQHKAVFVRLVSKHGIKMKAAVAVQRKILELIYTIYKTDKAFDKNYTNTNIPAETAQNS

SEQ ID NO: 275926 - protein, 397 aa, unidentified
MSMFFVGVDVSKDYSSAQGLDGEGKRLFYLEFSMDGEGFSQFLEVLKTHCEDLSGVMVGMESTGCYHINLFAFLCSEGMVCVVINPLLISNFARLSLRKTKTDKKDALTIAQFLLAHGSELFQVSYCQSSQDLKDLARERESLAVMIAGLKNDVRRLLQMTFPELEHRCKLFTETMMRFLIKFPSARAIRTAKPREISKALIHAEGKRKRVFLSAEEIIKLAKVSVASESVAKEWILSEKIETLLYLEEKKARMTEALVEACRSVRVDELDIITSVDGISKVTGSTFLAELGDIKTFRSYKHVIAFAGLDPSIHQSGQYEGISRLSKRGNRHLRRVVFLMTLCAVRSQNIFREYFLKRKEEGLPPKKAILATAHKLLRVLFAMLTSKSYFRKEVVEA

SEQ ID NO: 275927 - protein, 402 aa, unidentified
MHYLGIDVSKASHQCIILDTSGEALGKFFTVQSSKDDFIKLAKKLSELNIPKTDLTIGLEATGNLWENLYSFLKEQGFNVILLNPYQTNKFHEAMLKKAKTDSIDALVIAGLLRSGCASSSYIPDEDIQSLRDLVRLKDGYLKDVKNYKRKAYSLLNLVFPEFLNLVKDPFNIVSTDILLRYQTASDFKNLKPKDLIKIFRHRQGNNYDDSWADKVISSAKDSIYSGKAHKARGLVLKSLVQNIKYLKEQIELLDNEIQLLLKPDDKSQNSDVDNLLTIPGVGPKTIAVFLAEVGNIQRFLSCKDFIGFVGFYPKIEQSGSSLNRAKLTNKGSGILKHALYMASVASLIHNPYLKSVYHDKVSQGKCPKQALIVVARKLACIMYSMLKNNSVYNPERVAMAI

SEQ ID NO: 275928 - protein, 387 aa, unidentified
MQRNDLSRSLVAFDQNSTLVSVIELSLKSWLVAGLVPGVERSPLKKLGADPDMLLALLHRWRAEAIKAGRQVERIVVAFEAGRDGFWLARWLRARGIESYVIHPTSIPVSREHRRAKSDRLDTQLLMRSVLGWLRGEVKHCSMVAIPTLAEEDARRPNREHEMLVKERSRIINRMKATMVRLGIRTFNIKLRKAAEQLAGLRTPEGVPLPANTLDELRRDMARLRLIREQLNAIEKARLARLKAAPQEGAHPMLLMLAKVLGIGVETADMLVHEVLSRDLRDDRAVGRYGGMTGAPDESGSKRREKGLAKGGNARVRRGMIQLAWRWLMFQKGSALAQWYRTRTAGARGDVRKTMIVALARKLLIALWRYVTTGEVPAGAKLRPAAI

SEQ ID NO: 275929 - protein, 325 aa, unidentified
MDILGIDISKATFDVALLIGVRTRHATFSNTEAGFVQLLAWLAKCRPDPDASLHACMEATSNYGLDLADFLHGHDVGVSIVNPARVKAFGASELTRNKTDKLDAALIARFCRAHSPAAWTPPAGHLRELRELVRRCDALKAARVQELNRAQAGFVSPAVAASIAAHLEWLDCQIEAVTAEVRKLTAADRVLSCNLALLRSITGFGEVSATILLAELPNIAEFTPKALAAFTGLSPQEHTSGSSVHKPGRISRIGNERLRSTLYMCALSARRHNKALADFVQRMTNAGKAPKVILVAVARKLLVYAHAVIRTQKPFQPFPDALSSV

SEQ ID NO: 275930 - protein, 366 aa, unidentified
MRKNSTVVKNGNKSFKQPALTIGLDLGDRSSCYCILDELGNVILERSVPTTSSGIRQAFGKMPRSRIALETGTHSPWVSRQLARMDHEVIVAHARNVRLIGESSRKDDQLDARTLARLARIDPGLLGPVKHRSAQAQIQLTVIRARAVLVSTRTALVNAARGLTKSYGERLRKCGTEQMNRDSSEGLSQELREALDPLLREIESLNERIKEYDQRIEQIAKEVHPEVARLKQVKGVGTLIALTYVLTLDDPRRFRHSRDVGCFLGLRPGRRNSGKSEPQLHISKEGDRYLRTLMVQGAHYILGPFGQDSDLRRWGLKLAERGGKNAKKRAVVAVARKLSVLLHKLWVSGEVYEPLRNNHKVVRAVA

SEQ ID NO: 275931 - protein, 421 aa, unidentified
MPNIEIGVDFMVKENFIYVGIDLHKETHTAVMIDCYNQKLGEITFPNRPADFPKLVTKVKKCNTDAKEVVYGLENAYGYGRPLAVWLIDKGYFVKDVNTAISHRQAKHRGAMYRKSDSDDAEAIALATLNMLDKLPDACPNDAYWSLGQLVHRRDNIMKQRTRLVNQLHEQLCIAYPSYKSFFNDISRPTALYFWEHYPSRKYLRGKSVEDLRKELVPVSHNRCSTKNCEKILDAAASDKVKNNAYQDARDMVTLSIVSDLQHYDSQLAEVDKMLEQMYKMLGCTLTTIPGVNVITAVKILAEIGDIKRFSNANKLAQFAGIAPLHLSSSGKGKDVATKQGNRRLQATIYFLAIQMVQVSSKGTPRNSVVRAYYEKRKAEGKTSQQALICISRRLISIIYGMLKHGTEYRMPVVENAGEKL

SEQ ID NO: 275932 - protein, 341 aa, unidentified
MREFISIGVDLAKNVFQLHGIEREGGSPFQRKLTRTKFREFFSRLTPCRVGMEACGSAHYWARILAAMGHEVVLIAPAYVKPYVKRGKNDAVDAAAICEAMSRPAMRFVPVKSADQQAVLMLHKTRELLVKQRTMSVNALRGHLQEFGLIAAKGIHRVPELVALAQADEGLPEEARQAVALLAWQSEQLEMKIDGLEKTIAASSAKRPKSRLLQEIPAIGPLIGSAMAASLPDPSAFKSGSDFAASLGLTPSQRSSGGKERLGAITKKGNRYLRKMLVVGCTSVLRVAHKYKGALAEWIVAMKAKKPERVAAVALANKLARICWAILSTGESFRQELYVRA

SEQ ID NO: 275933 - protein, 369 aa, unidentified
MVENTLFLGLDVHKKTISVATVDGSARAEVRFYGTIENTPDAIRLLCKKLSKDGRRVHACYEAGPCGYNVQRHLTRLGHRCDVVAPSRIPRKAGDKVKTDRRDAMTLAQTLRAGQLTEVWVPDQAHEAMRDLVRLRSQAMRDLRKTRQHLLSFLLRHERISPFGHWTKMHRRWLGELKFAHPAQHLALEEMLHRIERAEELCERLKQAIGELVPQWSLAPVVQALQALRGISLITAAVLVAEIGSFERFDNPRQLMAYLGLNPSEHSSGATVRRGAITKTGNGLARTSLVEAAWTYRFPARITQIIRDRLKALPEPIRAVAWKAQVRLSARYRALIARGKSAPIAIVAVARELVGFIWAIARMVEPKFT

SEQ ID NO: 275934 - protein, 337 aa, unidentified
MTLYCGIDLHGNNSVVAVMDENDQTVYERRLVNDLATIVGVLRTYQAELAGCVVESTYNWYWLVDGLMDAGFVVHLAHTSAMPQYAGLKYSNDFSDARQLAHLLRLGILPTGYIYPKQERALRDLLRRRLLLVRQRTLQHLSLQSLIARHSGQSLSSNQIKTLETEQLAVYLPSPILLAGQITHQARCWLDTAITRIEKELQQQITPREDYQLLQSVSGIGPVLGTTIALETGTIERFASPGNYASYARCVKSEKISNGKYKGQGNKKNGNKYLAWAFMEAAHYAAIWNPQIKRYYQRKQAKAHVLVAKKAVANKLARACYHMLKRREVFDVTRAFR

SEQ ID NO: 275935 - protein, 271 aa, unidentified
MRIIGCDLHARQQTLAMLDTETGEVVNLTLMHEGNNVREFYSKLPRPVLVGIEATGSMHWFLNLMEELGIECRVGHPVQIRAAEPRKQKHDRRDADLILKLLAENRFPAIWLPSKELLDLRALLLHRHQWVRMRVRMQNALQAIALANGLRRGPALWSYDGQAKIAFLPLLPHAAYRRSALQAMYKNMQSEIENLTRRVAEQAGNRCGARLLMTHPGVGPVTALATEVFLGDPQRFTDGKTLASYVGIQWRASAARRSDQTGQSPVAVSLG

SEQ ID NO: 275936 - protein, 339 aa, unidentified
MTTKFIVGADISKATIHFCLFIGSQNYLQREIANEKPSLKNFILEIISLKKSYEKSNSCTVDIVFACEFTGIYNYILTTTLAELKIETFVIHALNIKLSMGMTRGKNDAIDAIMIAEYTLRFSDKLRVWNPDDATIGELKHLETLRARYVKSKIQLSQCEDDYKKFTELSIYQTIKGINDPVIEALENAITLIEKQMLILIKNNEALKNTYEILNSVPGIGPVIARSIICITNNFTKFDSAKKFGCYCGVVPFNNSSGSYKGKNKVSKLADKGMKKLIHLGAMSIINSENQFGKYYKRKIAEGKHHTLVVNNIRNKIIITAFACVTKGKKYKEDYVYAA

SEQ ID NO: 275937 - protein, 424 aa, unidentified
MKKRLYRSTPVKSLKLEPLLAALDAGPVTVGVDIAKDDMFATIEADGRPVVTVCWRHPEQTMMFVEVVSVVAARGPVEVVMEPSGTYGDALRSSLGKTGIPVFRVNPKRSHDAAEVYDGVPSLHDAKCATILCKLHGDGASELWPQRSDHERKLAAMLRILEIHTKELHRNCNRLEGLLARHWPELTRHLDLRTATLLELLIAYGGPHAVAEQEDEARSLMTEIGGRYLDPSKVEAVIACARTSVGVDQLEEERELVRRVAEEARRAQKLAGKVKRRVERLSETAGVTKDLAPVVGKTTAAVVVAALGDPRNYESATAFLKSTGLNLKEKSSGKKQGALHITKRGPGVVRLFLYLAVLRLIQNNPVVRAWYAKKVRRQGGRAKSKAVVAIMRKLVLALWYVAHGQVFDATKLFDTTRLKLITAS

SEQ ID NO: 275938 - protein, 342 aa, unidentified
MLIQTVGIDLGKAVFHVVGLHASGTVALKRRFSRSQLLAFMANLPACLIGMEASCGAHHLGRDLAGQGHTVRLIPAQFIRPFVKSNKNDFIDAEAITEAVQRPTMRFVQIKTEEQLDLQALHRVRDRLVSRHTGVINQIRAFLLERGIVRRKGREFLSRHMPALLHEGDSHLSPAIRRLLQLLWSEWQALEEQIAAVTEEIERTAKQDAACIRLTAVPGIGSLVSTALVASIGNESAFSRGRDLAAWLGLVPRQHSTGGKPRLLGISKRGNAYLRRLLIHGARSVITQADRAKHPLGVWMSQLESRMHRNAVIVALANKIARIAWAVLSTGKPYRGMVLADA

SEQ ID NO: 275939 - protein, 347 aa, unidentified
MTTYAHKPIIGLDLAKSVFHAVEMNSEKPSKPVVRKKLRRGQMLPFFANHPPACVAMEACASAHYWAREIEKLGHEVKLLPPRDVRPFVSGNKNDYNDAVAIAEASQRPTIHVVRMKTVPEQDRQAWHRMRDLLVGQRTAQINQIRGRLGEYGVVIPQGARQFCKAIPEILEDGENGLSDRFRKLLNDAYAHLRRIDERIEAYEQELIEANRQDEEIQRLQTIPGYGPMVSSAFKTAIGDGRAFDSGRDVAAYLGLVPKQHSSGDKTVLLGISKRGNKRLRTLLVHGARAVVAHAEKKSDAFSRWVVDVIARRGSHKAIVAVANKLARIGWAVLVSGKPYQLKLVAA

SEQ ID NO: 275940 - protein, 327 aa, unidentified
MMFIGIDISKEKINLSWLRDQLTNKIKTKVFKNKHQDFEKIEKWLLNTTKSVASELVITLEPTGVYHEALMYFLHEQGFNIILANTGKAKKYADALNIIHKTDKSDATMLAHYGCAKHAVVDYWQPEALEVRELKALIRRLDALESNRQREANRLEASEFSNVSARVRQSIKVTIAFLDDEIKQLKSDIDDHIDNEPGLKRNRKLLESIPGIGHVLSRELTYLFAAKKFNKAKEAAAYCGLIPRHNESGKLKGRTTISKLGPARIRCKLYMAAIVAGQWNKRIKRHKLTLINNGKTPMQAVCANMRKLIHICFGVIKNQEEFKLQES

SEQ ID NO: 275941 - protein, 383 aa, unidentified
MHQTHRSVVRRPAGTRHPRPAVWKGDDITTIAHPQPTRVTVGVDTHKDVHVAAAKDALGRRLAITRIPTTPAGYQNLLAWAHGLGEVDAFGVEGTSSYGAGLARFLRGHGQRVVEVNRPDRQARRRNGKSDPVDAEAAARAVQAGEATAAPKVGTGTVEMVRALRTARQTAIKARTQTINAIKALLVTAPVELREQLRKLSARRLVRAAARLDPGELTTPTAAAKLALRTLAERHLALDAEIAMLDTELDRLTATAAPQLRALFAVGPENAAALLLAAGDNPDRLRSEAAFSMLCGSSPIEASSGKTVRHRLNRGGDRQANAALHRIVIVRLRWHQPTKDYLARRIKQGKSKREVIRCLKRYVAREVFAALKQMDPNEPTIAT

SEQ ID NO: 275942 - protein, 440 aa, unidentified
MAKRAQQQRTATEAAKEKGARGGSARPAGGTKADSDRKVACCRTGDSGSSELPSNAGWRQGRQSRIREEPTVDQGITHVGLDAHKGSISVAVLLASGKREEWQVANERGAVKRMVRKILREAPGETRFCYEAGPCGYSLQRQIEEHGAICSVIAPSLIPVKPGERIKTDRRDARKLAELFRAGLLTEVQPPSEADEAVRDLCRAREDAQADLTRCRHRLGKMLLRRAIRFTEGKRVWSMAHRRWLRDLRFDNATDQVVFDDYLAAIDHAEERVKGLESKLVEVSQKAPYAEPAAALRCFRGIDTVTAMTIVSELHTIGRFASPRQLMAYLGLVPSEYSSAERRRLGGITKAGNSHVRRVLIEAAWNYRHRPNVKSLRKRREGQPAKVIAVADRAMQRLHRRFARMLHAGKAAPKVAVAVARELVGFVWAVMYPMALDNVN

SEQ ID NO: 275943 - protein, 380 aa, unidentified
MNDHIEAFVAFDTSKLRNAVAIAEAGRSGEMRFLGEIDNTPKATAKLVKKLAGKYHRLAFCYEAGPTGYGLYRQITSLGHECVVVAPSLIPKKAGDRVKTNRRDALDLAAQLRADQLTAVWVPDPRHEAMRDLTRARGAAVEDLRSKRQQVSAFLLRLGRPYEGKTNWTKTHMNWLASQKLEQAEQRIAFEEMLLAVRQAQERVVRLEEAIRGAVPDWSLAEVVEALMAMRGIDMVSATAFLAEIGDLSRFRTPRELMAYLGLVPSEHSTGDTVKRGPITKTGNRRARRILVECAWSYRHPPRVGKEKQDKVAAAPRAAREIAWKAQNRLYARYRALTRRGKLKTLVITAMARELSGFIWAIARELATTHAAARLQGIQG

SEQ ID NO: 275944 - protein, 400 aa, unidentified
MAVMIGTGPHKGSHTAVAVGAAEEPLGKLRVRACPDQAGKLVAWAQAWPERTWAVEGARGLGRLLAQQLVAAGERVLDVQPKLAARVRLLEAGDTNKTDPNDARSVAVAALRSKGRQEVTADGHAVVLKVRAKRHRDLSRTRNQVVCRLHAVLCELIPGGVPDEITAGQAARILEQVAPAGAVAQARCELAAELLADIRHLDAQRREARKKLAAAVTASGTSLTDVFGVGPVIAATVIGDVITVARFPSRDHFAACNGTAPAGVSSGQRKIHRLSLRGNRRLNHAVHMAAINWIRHKHSDGRACYQRKLAEGKTRKEALRCPRRRISDAIYARLRADARKAGPGGQPGNDTGSSVTGSHPGHRLFGQATSGPEPSLRAPATFTQATPAPEPSAKKIQRAT

SEQ ID NO: 275945 - protein, 474 aa, unidentified
MKAKNHQKDAKATGKIIRPAKDMPVINPHAAGMDIGATRHTVCVPEDAVPAGQSPVREFGAFTSDLDKMVEWLRACGVTTVAMESTGKYWIAPYQKLKAAGIDVVLSNARYLKHVPGRKSDMLDCQWHQLLHSYGLLTGSFRPSEDIVGVRTLMRHRADLVVQCGQAVQHMQGAFDEMNIHLHHVISDLDGETGLRIVDAILAGERDPEQLAKLRDQRIRKSTPAELVEALRGDWQEEHLFVLRQARQTYQWVHRQMDECDLELEKTLAQVKANPAVVIEEQRPPNPEGRTPKKKKKRCAGNAPKKDFTEELKRICGVDLTNIVGLNVLSVLMLIAEIGVDVSHWRNVKAFCSWLGLCPGSKVSGGKRLSSRTRGVNNRASLLLRSLAPSIGRTDSWLGVYHRRMRARLGPAGANTATARKLATVIYHLLKYKEDYIDVDRILYEEKFRRCRLSRLRKQAQELGFQLTESPKVA

SEQ ID NO: 275946 - protein, 348 aa, unidentified
MDLFIALDVSLASTALCALNAHGKVVKEAKVDSEPEALIAVLRALPGRVVVVGLEAGPLSQWLHLHMSGAGFTVVLLETRQVKGALKAMPIKTDRRDAEGIARLLQMGWFRPVHCKSVSAQEMRAVLSTRKSLQQALINLELSLRGVLRNFGLKMGAVTKIRFEARVRELVDGNLMLERAATPVLRAREELRKELAGLEKLLRDLAKTDPDCRLMMTMPGVGAVVALTMRTAVDDPGRFHSSKDIGPWAGLTPRRTQSGERDVIGQITKAGDAALRTALYQAANAVLCRSAPSWLKAWALRVAARRGKKRATVALARRIGVVLHRMWRDGTEFRFTREEAMAATPRAA

SEQ ID NO: 275947 - protein, 387 aa, unidentified
MAQVNDLSRSLTAFDPISTLVVVVEMSKASWLVSGAVPGVERQPLKKLEPDATALLRLIERWRNEAMRSGRPISRITLAYEAGRDGFWLARWLITRGIEAHVIHSASVAVSRERKRAKTDRLDAAMLMRVFLGWLRGERGHCGMVVIPTMEEEAARRPSRERESLVNERSRITNRMKSALARLGIRGFKPHLRKAPERLADLRTAEGTGLPANVIEEFRRDMARLALVREQISSIEKTRAERLERAPDTGPHAMVRLLARVIGIGIETADMLVREILSRKLRDRRAVARYAGLTGSPDESGLKRREKGLAKAGNARVRRGLIQLAWRFLMFQKDSALARWYRTRTEGPSGARKTTMIVALARKLLIALWRLVTTGEVPDGVELRRAA

SEQ ID NO: 275948 - protein, 350 aa, unidentified
MMIIGCDYHPGFQQIAFVDSDTGELQERRLEHREEAEKFYRDLAAQGVKVRVGMEASGHARWFERLLSELQFELWIGDAAEIRTKRVRKQKTDRQDAQLILRLMLKDDFPRIWVASWENRDLRQLLWHRHRMVQARTRIMNQLQAVALNEGLRCKKRLWREAGRAQLEAFPLAPWASRRRSDLLELLDRLSPTIAELTQTIEQEAEKCPEAQRLRTHPGVGSLTALAFVLIIGRAERFQCGKQIASYLGLVPSEDSSGDRRRLGHISKQGNALLRFLLVEAAQGTVRSLPEWRSRYFHLAMRRGRKIAKVAMARKLAIQLFWMMRKEWDYEQVKRFGPHAGQPEHRRGVQ

SEQ ID NO: 275949 - protein, 353 aa, unidentified
MANHTGGVVGGVDAHTDEHHVAVVDLQGRLLGATAFPTTAAGYARMISWLRSHGEVERVGVESTGAYAAGLVRALRAGGISVVEVNQPHRHARQRLGKSDPIDAELAARAALSRTATAVPKQTSGIVEAIRQLQVVRTSALKARHAALQQLNDLIVTAPEQLRSELRHGRTMRAKAALCQKLRPDTQRIHEPAQAAKLALSSLARRIHELDREILELDRQLEQLVRAAAPRTTQLFGVGTQGASQLLIAAGQNIDRFRSEAAFAKICGAAPIQASSGRTNRHRLDPGGDRQANRALHMIAVRRLRYCQRTQAYATKRTADGLNKRDILRCLKRYIARETFHTLRADLKALDST

SEQ ID NO: 275950 - protein, 397 aa, unidentified
MLTYDPTLPRYGTDVMKQAPPTVSAKLTAQSFISVGLKGGAMAPIYIGVDFHARQQTICYLKTETGELVISELKHQNKEQVRAFYQQFQEPVIVGLEASGYSPWFEALLEQLGCEVWLGHATEIRRRARWRQKNDRRDAELIWDLMVHDEFPRLHQPALSSREVLRMLRYRQKLIKLRTMTKNSLQAIALQAGLAKGPQLFTAAGQEQFKAAEMSPVLQWQRDHWFELLKPFNQQLLETVVWFKAQSKDDVQIQRLLTHPGIGLLTALCILHTLQPVSRFRNARKVAAYVGFDPVERSSAERQHFLGISKAGSRMLRYLLVEAVQTAVRHDEDLKRFYKRLAERRGRPKAKVAAARKLLIRAYIMLRDEIDYAEFRRRAVAARLARHGQGPTKCPRY

SEQ ID NO: 275951 - protein, 369 aa, unidentified
MVAATRHIQKGSLMRKMQDYIVQSKEVFIGLEDSKKSWKVAVQCEKQLIHQTSMPVDYYALIGYLRNKYPKCIIKLMYEAGFHGFWLHDLLMKDGIECVVVPPHTVTDEKVKRVKTDKIDARRLAYNLEKGDYKSCYVPDKERREDRQLSRTLEDVQGDIVRTRNRIWKMLDFHGIDPKIDSEKPGKNDIRNLRKIAMENPLLEALTVYIDLLEVYWQKQKVLRDALRALTKKAKYQKTYDIIRSAPGIGWFTAIRLVLEWGEDMKRFANSRKIAGFIGLAGGEYSTGDTVKRGSLTGLGHRRSRSWLVECAWASIRKDPVILDKYKRVLSNTGSKKKAIVAVARKMAGRLWYCVQNNQPYVVGLVSES

SEQ ID NO: 275952 - protein, 343 aa, unidentified
MHTITTIGLDIAKSVFQVHGTDAAGQVVIRRQLKRRAVLAFFQKLPPCLVGIEACASSHHWSRELQALGHAVRLMPPAYVKPYVKRQKNDMADAEAICEAVTRANMRFVPTKTPEQQGCLMLHRTRHLFIRQQTAVINSIRAHLAEFGIVAPVGRKGVMELLQVVADPSDKRVSEVTRACLASLGNQLLSLKEQILEFDRMIMAWHRSNEPSKRLRYIPGVGPMLATALVASVADPKTFRSGRNFSAWVGLVPKQHSSGGKNRLGSISKQGDRYLRSLFVAGALSVIRYAKIHGTKHRPWLTALLARKPTKVAAIALANKLARMAWAMMARGERYRNPAALAA

SEQ ID NO: 275953 - protein, 311 aa, unidentified
MTEHTIGVDISKSHLDVFDAERREAKRFENSISGFRAFGKWLGKLEITRVVYEPTGPYHLNFEERFCDKLPLVKVNPLQARRFAEACGTRAKTDALDARGLARMGVALELEPDIPVAKTTRILKDLQVARVALIKERTRLNNRAHVQTNAVLKRQTKARLALVEKQLCELDREIDVLIQADRTTARRRVIVQSIPGLGSVASAAILTYLPEIGTLDRRQVGSLAGVVPYNRDSGQWKGKSFISGGRKPLRDALYMPALVAMRYNPDLKAKYEALRAAGKPAKVAIVAIMRKLIETANALVKADRVWVPKTS

SEQ ID NO: 275954 - protein, 338 aa, unidentified
MKAYAGIDLHSSNNYVGIIDENDKRLYGKRMPNKLNHVLTALEPFRDRLEGVVVESTYNWYWLVDGLQEHRYKVHLANPSAVKQYEGLKHTDDKWDSFWLAHMRRLGILPEGYIYPKEHRAARDLFRRRLLFVRHRTANILSLQSMITRNLGFKMSGNAIKKLKEADANELFDCPNLVFMAKNNIAAIAFLAKIIIGIEKQVKPQVKLRKEFEMLLTIIGIGDILGPTIMLEVGDINRFEQVGDYSSYCRCVKSERLSNGKKKGENNKKNGNKYLAWSYVEAANFAIRHSVAAHRFYQRKKAERNGIVAIKALSNKICRASYYIMRDQVAFDEAMLFR

SEQ ID NO: 275955 - protein, 405 aa, unidentified
MLFVGDDWAEDHHDVELQDQAGRRLGRARLPEGVVGIARLHELVAGHLGADEPGEVVVGIETDRGPWVRALVAAGYRVFPVNPRQVARYRERHHTSGAKSDAGDAHALADMVRTDRHQLRAAAGDSDQAEAIKLLARAHQTLTWERQRHVLRLRAALQEFFPAAVAAFPDLAAADALALLAAAPDPASAARLPRPQVVAALTRAGRRGVPAKAEKVQQALRAEQLAQPKAVVAAYAATVRATVAVVGTLNAEIEALGEQVQAQFGKHPDAAIYRSQPGLGGVLGARVLGEFGDDPDRYRDARARRNYAGTSPVTKQSGKRTVVLARFARNDRLADPLHQQAFCALTASPGARAYYDQLRGRGAGHHAALRQLANRLVGILHGCLKARTRYDEATAWSHRTADAAA

SEQ ID NO: 275956 - protein, 330 aa, unidentified
MTLFARLKERARKRAGQDFPIIAIQEAGLDGFWIHRALQQEDIESHIVDAASIMTSRRRRRAKTDRIDGEALLRALMAHKRGEPRVCAMLRVPTPEDEDRRRISRERQTLIAERVAHVNRIKGLLFSQGIKYEPLRRDRRARLEELRTGDGRPLPHHMKRQISRELDRLELLLGQIKAVEAERNTTLAKVNEANLPMPAKMLMGFKGIGAEFTMALWSEGPFRHFDNRRQVAAYAGFAATPSQSGTLDREQGIAKSGNPRLRTTMIQLAWLWQRHQPDSLLSRWFQERVAGKGRRIRKIMITALARKLLVALWKYITAGVVIERAVMKTA

SEQ ID NO: 275957 - protein, 345 aa, unidentified
MNKVSVIGLDLAKNVFQIHGVDIDGEVVVRKQLKRTQIRRFFANLGPCLIGMEACGGAHHWSRELTRLGHSVRLMAPAFVKPYLRSNKNDRNDAEAICEAVQRPSMRFVSAKLPEQQAVLHLHHGRRLLVRQRVALSNHLRGILSEYGIVLPQGIKVISRRLPELLEDADNELPMLVRPVLAELKAQYDQLMERIERFEQQLRAWHATSEVSQRLASIPGIGLLTATALAATLGEGQDFKNGRQLAAYLGLVPRQHSTGGKERLLGISKRGDSYLRGLLIHGARAVIHHIRRRLRAQRPGGNPWVEQLLQRCHVNEVAVALANKMARIAWVLSARNETYCTAASV

SEQ ID NO: 275958 - protein, 339 aa, unidentified
MKYTPVGVDIAKHVIQIHFINEHTGEVVDKQLRRQDFLTFFGNREPCLIGMEACGGSQHWARELTKLGHKVRLLQARFVKAFVMGNKNDVMDARAIWMALQQPGKEIAVKTEEQQSVLVLHRTRMQLVKFRTAQINALHGTLLEFGETIHKGRAAMEREFPEALERMKERLPPYLIMVLENQYNRLNELDSLIEDIEKQLTSVARQNETCKRLLDIPGVGPLIATAAVATMGEASAFKSGREFAAYVGLVPKQTGSGGKVRLLGISKRGDTYLRTLFIHGARAVALVAKEPGPWITELKKRRPASVAIVAMANKLARTVWAITAHDRKYDRNHVSIRPY

SEQ ID NO: 275959 - protein, 381 aa, unidentified
MFNLPIFVGLDYHQKSIQVCVMNQKRQTLANVTVENDPDAVHRVVAPFGSNVHVAIEASTGVANFADILIHRFHWHVEPAHPGYVARLKQTPDKSDWTDAKLLADLSRVGYVPRVWLAPEHIRDLRALVRHRHGLVEQRKQSKLRLRADLRNHRIVCPHSPWTIQGKDWLLDPENISSLTLRFLLRSHYDTIAYFDKKIREVTDEMCENVTDDPVVKQLLLQPGIGPITAITMRALIGHFDRFQTGKQLAHFCAVCPRNNSSAGQTTTGGLIKAGDVLLRQVLIEAAHRLIRHDDYWGGMALRLHNNGKKKCVIVAAVANRWVRKLFYQMTKPTPTDGDTSGFSRHGQESTGSLENPSDAGTRRPAAPKGSVQTVLPSVLP

SEQ ID NO: 275960 - protein, 358 aa, unidentified
MESQDIKYVGIDCGKKSLEVVRIHSENSLKERRQFSTTETGINNLLKWLTQNDIVGLEAGAQSFRIAKSILNKGIQVIVLNPGDLATIYQSLKKTDKEDSLKIARLIQRYPMEELPVVPVPTDEEEDNRRLCTEQENWTRQLTQGKNRLHSLFTQAGLTEITKKHLRTKSSRETSVTLLPSPYQKEAERILQVLDLVEQNLKLIEEETKDALKKNPAYVQTIMSMPGIGMVTSLAIMSYMGDCKRFSSGKQAAYYAGLVPRVDISGDTVRYGKIVSRGCHSIRRVIVQAAWSLVRCQHGGKLKEFYERLYSKKGAKKSIIAVSRKMIEVLYSMIRTGALFDSMPEEVLHRKLAQHGLM

SEQ ID NO: 275961 - protein, 379 aa, unidentified
MQSIVYVGMDVHKESFTLCCYRFEEDKLRFQQKMAPDYKNILKYLEQVRKQYKEEVEFVCSYEAGCFGYTLYHQLKDHGVECIIMAPTTMAVTNTNRVKTDRKDAGNIARCLAFHTYSKVNVPTAEDEATKEYIRMRDDQKKALKIIKQQILAMVLRHGKRYEDGAKNWTVRHVAWLNSLDIGGILQEVLDEYLATYEYLTDKIERLDQRIEEMSKEEQYQEKVKKLSCLIGVKTLTALSVIVETGDFNRFATAPQYAAYLGLVPSEDSSGERQSRAGITKAGNNHVRRMLVESAQSYTRGRVGAKSKDLKGRQRGNTPEVIAYADKANERLRRKFYRMTLKNGIKRNVAATAIARELACFIWGLMTGKTNGTTDESIC

SEQ ID NO: 275962 - protein, 405 aa, unidentified
MRIMHECCCGLDVHKKMILACLLRQGSEKQIRQFGTTTGELQTMKEWLVQSGCTHVAMESTGVYWKPVYNILEGSLELLVVNAQHMRTVPGRKTDVRDAEWIADLLQHGLLKASFVPPVFERQMRELTRYRTALTNERSRTTQRLQKVLESANIKLSSVVSDIRGVSARAMLDQIAGGVTDPKLLASLAKGQLRQKRAELEAALVGRIEPHHRFLLVELLAQMDYLDESIERLNVEIGDRFRPFEQDLQLADTIPGVNLKTAQALLAEAGTDMSRFPTSRHLSSWAGICPGQNESAGKHHSGKTRKGNRWLRHALTEAAHAAAHSKDTYLAAQYHRLAARRGKKRAVIAVAHSILVILYHMLRQRQSYRELGSNFFDQRDKTGLQRRLVQRLEKLGYTVELHSAA

SEQ ID NO: 275963 - protein, 344 aa, unidentified
MDHFVGLDVSVKETSVCIVDDTGRIVKEVKAASEPQALLKVLGNPAYRFKRIGLEAGPLSQWLFSGLAEAGLPVVCVETRHMQAVLKAQINKTDRNDARGIAQMMRAGLYRPVHVKTLRSQKLRMLLTHRKLLQSKAIAIENDLRGTLRNFGLKVGMVGKMRFEARIKELVESLPDLAELVEPLLIVRRSLREQIVILHRRLLAIVRDDEVCQRLMTTPGVGPVVALTYRATVDVPARFRKSKAVGAVFGLTCARYQSGEIDWSGRISRCGDEMMRVMLYEAAQSMMRSKKWSWLKAWAMQIARRRGMKKAIVALARRLAVIMHRIWVDGTEFRWTREQAAAAA

SEQ ID NO: 275964 - protein, 349 aa, unidentified
MNATIVGVDLAKNIFELAVADADWHIAQRQRLTRAKFFGFFVQLAPCQVVMEACGSAHYWARRIAGLGHTVRLLPAHYVKAYVRRNKTDQADAAALIEAARCAQIREVPVKTVEAQQIQSLHRLRSQWMSTRQRYVNTLRGILREFGFAIPLGVNVAKEQIGVALAAFDSEVPQALRATLTDMLQEVRSLEEKILGVEHQLNALTRADVRVQQLRQIPGIGALTSTALRAIVGDIQRFPSGRHFASWLGLTPNERSSAEKRRLGKISKQGDVYLRTLLVHGARSALLAAHRAERSGHALDHLRRWALDCERQRGHNKATVALANRLARIVWATWSHERPFDGNWRAQAA

SEQ ID NO: 275965 - protein, 354 aa, unidentified
MRKMQEYIVKGNRIFIGLEDSKRTWKVCVRCERVIVHETSMPAKYDVLRSYLEKRFPECTIKVMYEAGFQGFWLHDLLVEDGIECVVTPPNKVSCPKSDRVKTDRRDARLLAQNLECGLYVSCHVPDRELREDRQISRTLEQVKKKIKAQKNQIRRMFDFHGLNDGLPEKKTWTDRDYLSLRTMELPYSLKVSLEADLTILETLLAVKKDLLEKLRALCTKERYKLGVQTKQSIPGIGWETATRLTLEWGDLDRFRDGKRMASYVGLTSSECSTGDRERRGRITKQGNPPVRGWLIECAWRAYNKDPVLLNKYRRVVHNTGSAKKAIVAVARKLVVRMWSLEHNHQTYQLGVIE

SEQ ID NO: 275966 - protein, 400 aa, unidentified
MIDIDETGVFLGLDVGKSNHHGHGLTPAGKKVFDKALPNGEPQLRAVFEKLKAKFGTVLVVVDQPASIGALPLTVARSAGCKVAYLPGLAMRRIADLYPGEAKTDARDAAVIADAARTMPHTLRSLELADEITAELTMLVGFDQDLAGEANRTSNRIRGLLTQFHPSLERVLGPRLDHPAITWLLERYGSPAALRKAGRHKLIEVIRPKAPRMATRLVDDIFDALDEQTVVVPGTGTLDVIVPSLAKSLAAVHEQRRALEARIEALLEAHPLSQVLTSMPGIGVRTAAVLLATVGDGTSFPTAAHLASYAGLAPTTKSSGTSVHGEHAPRGGNRQLKRAMFLSAFASLHDPASRTYYDRCRARGKTHTQALLRLARQRINVLFAMLRDGTFYEPRTPRPA

SEQ ID NO: 275967 - protein, 370 aa, unidentified
MKKHSTTPKSPKQTSACKGGPITIGLDLGDKTSRYCVLGANGEVMSEGSVGTTRKAMAEKFAKMRRCRVAMEVGTHSPWLSRWLSSLGFEVIVANARQVQLISASSRKNDRLDARLLARLARVDPQLLRPIRHRSETAQADLMRIRVRAALVEARTRLVNAARGFAKAMGERLPACDTDSMGVERMESLPEGMRETLKPLLEQVESLTEKIKESDVKIEQIARTQYPETELLRQVSGVGTLIALTFVLTLEDRERFRKSRDVGCYVGLRPKQSESGQSQPQLRISKEGDVYLRTLLVQAAHCILSRRGPDTDLKRWGLKLASRGGKNAKKRAVVAVARKLAVLLHRLWVCGEVYEPLRNSQASGSSKKAA

SEQ ID NO: 275968 - protein, 357 aa, unidentified
MKKLFIGIDFSKEKLDATIILACGMNEIGSREYGCFPNNTTGYRKLCNWVKTNAWNTIAEEWLFCGEDTGSCSIGLSKWLYGKGYDIWIENAYAIKHSSGIQRVKNDKADSAIIAEYAWRQQDKVVPFEPLNESLAQLREIFLYRHKLVGQRVAMELRKEDKSQSNKSKAISFINRKSKHLIAEINKTIAECDKAIDSIIEADEELKENYAIITSIKGVARQNATCMLVYTNNFKKFGYDPRKIACYYGVAPFGKQSGTSVNTPAHTSHFANKLIKSLLGQAAHIAKIYNPEIRDYYQRLISKGKKPQVALNNVKNKLIRIIVALVRKKVPYDQNTYKYYEEREVIERKKNEKLIYC

SEQ ID NO: 275969 - protein, 322 aa, unidentified
MKMALFQVFVGIDVSRDWLDVHVLPFRQRLRVANTPAGWRELIEALSDYPQAALALEASGGYEGGVLRHLVAKGWPVHRLDPYRVRQFARAGGRRAKNDRIDAEIIARYLATFSLEPARLDARLDRLDEQVTYRRQLVEERTRIANQARLLRDPRLQRLSRQRLARLDLLIARQEQALAELIAADPELNAKAAVLRSLKGVAATLAATLLAQLPELGTLCRRKIAALVGVCPYDFDSGRFAGQRRIAGGRKHLRNALYMPTLSAIRSDPTIRAFYLRCAEGKKQKKPAVIAAMHKILTILNARMRDHLDSLKHQQILAHAAE

SEQ ID NO: 275970 - protein, 333 aa, unidentified
MGRHGECGELALSHGNGEAEKFYRNLKEQGVKVRVGIEATGHARWFERLLAELGHELWVGDAAEIKAKRVREQKNDREDARLLRTLLVENRFPGVWLPDVGNRDLRQLLWHRHRLVQMRTRVMNQLQAVALNEGVRRKRGLWSKTGRAQLESFQLMPWATRRRKDLLELLDGLTPRIAALTAAIEKQVEQYPEAQRLMTHPGVGPLTALAYVLIIGSPERFRCGKQIGSYLGLIPCEDSSAGRQRLGHISKQGNSLLRFLLLEAAQAAVRSNPQWRREFLHLTMRRGRQIAVVALARKLAVGLYWMWRKGWDYEKSLQFGSHVGQPGTRYGVK

SEQ ID NO: 275971 - protein, 428 aa, unidentified
MNDSEIIRHQQFCQLKKQIRGSSEHLIIGIDVAKEKHHAFMGTATGKSLLRRLIFENNLEGFCKLLTHAEAVKVQHGLSQSVFGIEPTGNYHKPLGSYLVNANHQVVLVSGLAVKNNRILLDGRWDKHDTKCAANVADLISQGKCLFYDSPPEAIVELRSLLSLRRRLKKEEHSLRMRIRNSLLAKHFPEMDRYFSQCLSENLSIVYWCLDPKKIAEMDFGRFFQLVTTRERGLAQQHRLKAIWQAAAASIGCAVDRTSQFEAQLLVEKILQVQKEIKDTQQLIETISQQFMEYYLLLTIPGFGPYVASLVLAVIGDAWRFGSAKQVLKMAGFDLSAKRSGKSSKKAVPVISKKGNAALRYGVYQAAFIASTRNIDFVEYYTNTLRGREREQGIKTKMRVKLAAKMLVIAWTLMKKKEEFNPDYLNNN

SEQ ID NO: 275972 - protein, 352 aa, unidentified
MTVAIVEARAETRAITGGVDTHADVHVAAALDPIGGLLGVREFAATTAGYARLLDWLGGFGTVCLVGIEGTGSYGAGLARHMATAGVRVVEVDRSDRQDRRRQGKSDPLDAVSAARAAQSGRARGAPKGRDGAVEAIRALMVARRSAARERTRAINQARALILTGPDDLRARFTRRTPAALVAGIARLRPRPGDVMGYAVRIALRELGRRAEFLDGQLECLDELIAPLAAARAPGLLALYGIGPHTAALLLIAAGDHPGRLRSEAAWAHLCAAAPIPASSGKVTRHRLNPGGDRQANHALWRIVFTRMGSDAATRAYVERRMKEGKSKAEIIRCLKRYVAREVYPHLRPAAG

SEQ ID NO: 275973 - protein, 344 aa, unidentified
MLMLRNVVGGVDTHADAHVAAVVDSNGGLLGVESFPADEAGFEDLFGWLVSFGPVLRVGVEGTGSWGVGLARFLAGADVEVVEVDRPNRQQRRKVGKSDPTDAVAAARAALSGAATGIPKTRNGPVEQMRVLLVARRSARTQRIQTLNQLRHLVFCAPEPIRVRFKDRYKTGLVTEAAAMRPRKGSDPVEFTTNTVIRSLARRIQGLNAEMRAIDQALVVLINQTAPTLLELYGVGVDSAATLLVTAGDNPERLGSERSWAHLCGVTPIPASSGKVIRYRLNRGGDRNANAALYRIVLTRMSSHQQTRTYVARRRAQGLSTPEVMRCLKRYVARQVFKQLPRAA

SEQ ID NO: 275974 - protein, 368 aa, unidentified
MINVALDVHVRNSFIKARNGSGDVLAQGRAGNTLLELSQKLAGVERAARDTHQPVRAVLEATGNSRAMALLLERWGKEAEIDLTVDVLDARKLQIIAQSVSKCDRLDAQVLLDLSASNLRLPICYLADSDEFALREHLRSRQDLVRVRTMVKNRIHAVLHRRGILRPEKLDLFAKAGRLFLAQAEIDQVGRKLLGDYLAVVDQMDQLLDDSERLLRQLSRSERWRRNAAILESMPGVGLITSLTILAELGDIDRFRGRDAVANYAGLVPVVRDSNAKTYRGGLVSHGNRPLRSVLIEAAWVAIARAPVYAALYQRVESRRGAATAIVAVARRLLEDAWTMLKKQEPFRYARPLEAGVAASAQAVMRLA

SEQ ID NO: 275975 - protein, 383 aa, unidentified
MKKTQETPRKKDSTKEMVLHMAFELSDTKWKLAFSDCMKRRLVTINARNLEQLQEEIEKAKLRFKLSDDVRIVSCYEAGRDGFWLHRYLLSCGVENKVVDSSSIEVNRRKRRAKTDRIDAGKLLRMLMRYHAGERKLWSVVRVPSVEAEDGRSLNRELEALNKERTMHRSRIRGLLIREGLQVGNPSGKKFLEEVDSLRTWDGKELPSDFKDSIVREYGRLRMVEEQISALRKERERRVQSAATASLRKVSQLRTLYGIGPTSSWDFVMELFAWRNFKNRRQLGAFLGLTPTPYDSGGAQREQGISKEGRGRIRALSIQIAWGWLRFQPKSKLTRWYMERFAEGGKRMRRIGIVAVARRLLIDLWRYTEYGLIPEGARLRPMA

SEQ ID NO: 275976 - protein, 350 aa, unidentified
MKTKPSTATIGIDLGDKKHAVCVLGESGDILREGSIPNRRPSLDKLSAEYPGALMVMEVGMHSPWTSRYLEGLGHRVVVANPRKVRAISSNERKCDRRDAEMLARLARSDEKLLHPVHHGTAEAQRDLLQIKLRDNLVRQRVDVISAVRFTLKSMGIRLPSPHSECFARHARAILEREDPKLLEQLEPSLHVLDAMTEQIRALDKAIGELAATNYPESEYLTQIHGVGTITALTFILTIGDPTRFRRRRDVAAFLGLVPRRDQSGDADKQLPISKAGDAYLRRLLVQAAHYILGPFGPDCRLKRRGLKLAERGGPRAKRKAVVAVARKLSVLLLTLWHDEAIYQPKRRAA

SEQ ID NO: 275977 - protein, 413 aa, unidentified
MTTLHYIGFDVHKKSISFCVKTAAGEIVEEGSLLAQRGALRQWASARPQSWRGALEATLFSGWIYDTLKPYGEQLEMAHPAKMKAISAGKKKSDTIDARTIADLVRCNLLPACYVAAPRIRELRRLLRYRSLVVSEAVRMKNKMAGLLMETGAVYVKEKLHGKKYFASLLEELEEVPESVIDLLRLSRGALEMFESTQKRLVRELLADPELTQRVERLMTIPAVGEITALTWALEVGDPHRFRSGAEAMSYCGLTAALKSSAGKQQHGPISKQRNHWLQSALIEAAKLAPRWNPQLAALQARELERGHRNRATLAVARKLVTYLLAVDKSGQSFQLHTSWTGLRFGSRKWMSGQAAALAVCNDRWRLANLSVVSTLRESSPPSARRPPSPLDFYLSWMSPFFTRFLPKKSPRN

SEQ ID NO: 275978 - protein, 451 aa, unidentified
MMKSKRLSPERDFVPTHPNAAAIDIGSRMHVAAVPPDRDPVPVRSFGTCTGDLKQLADWFERCGVRTVAMESTGVYWIPAYELLEQRGFEVVLVNARDAKHVPGRKTDVSDAQWLRRLHEYGLLRASFRPKGELAALRAYLRQRERLLDYSASHIQHMQKALMQMNVQLHHVVTDVTGETGMGIIRAVVAGERDPAVLATHRDRRCHASEEEIAAALAGNWREEHVFALGQALELYDAYHTKVVECDLRIEIVLRRLRDAAAKPAGRLPPARHRDKTANAPTFDARAALHAVLGVDLTQIHGLGPSLALKLIGECGTDLSAWPNAKHFTSWLCLAPANKISGGKVLSTRTRRSGSRAAALLRLAAVTVGRTQTALGAFYRRLSARVGKAKAVTATARKIATLFYNTLRHGIDYADPGASYYEDRYRARVLANLRRRAKSLGYMLHEMPAPG

SEQ ID NO: 275979 - protein, 359 aa, unidentified
MNKNSMFFVGLDLGDKYSYLSILDQEGEMIEETRLPTTKASFQRKFSTLQHCRMAMEVGAHSRWASHLLTELGHDVLVANARKLRAIYHNPRKGDRADAETLARLARLDPALLSPIHHRSPQAQADLAVLRSRDAIVRCRTLLINHARDIVKASGSRLPSCSADSFAHKVAPDIPEPLRPALAPILDTIASLTKKIKSYDQKAEELCSERYTETNLLRRISGVGPLTALGYILTLENPHRFRMSREVGPALGLIPRRDQSGDHDPQLRITKTGDAYLRRLLVGSAQYILGPFGPDCDLRRWGLKLAERGGKNAKKRAVVAVARKLAVLLHHLWKTGEIYDPFYLAKKYDQASQDIPAAA

SEQ ID NO: 275980 - protein, 340 aa, unidentified
MTITTLGIDLAKSVFQFHGIDTNGVVVLQKNLRRGAVLNFLSKLEPCLIGMEACATSHHWAREIAALGHEVRLIPPAYVKPYVKRQKNDAADAEAICEAVTRPNMRFVPVKTEEQQGVLVLHRSRDLLMRQRTMILNAIRAHFAEFGVIAAQGARKVAELVSRLRDDDDLGLPETARSALQALSAQLDGLAQEVRKIERQLLAWHRQNTASLRLETIPGVGLITATALAASVPDPTVFKSGRQFAAYLGLVPRQNSSGGKDRLGHISKMGNGYLRRLLVIGATSVTRRAPTTDNRTGAWVRSLLERKPARVVTVAIANKTARTAWALLAKGESYKATPAI

SEQ ID NO: 275981 - protein, 317 aa, unidentified
MDDSAVFVGIDVAKAHLDVACRPAGDPWRVANDEAGIAQLVRALEQQHPTLVVVEATGGLEVPVAAALAAARLPVAVINPRQARDFARAVGQLAKTDALDAQLLARFAEVVRPTPRPLPDAQAQHLSALLARRCQLIAMLVAEQQRLPTTLAAIRPWVERHISWLRDERQAVDRELQQLLRASPVWRAREKRLRSVPGVGPVVATTLVAELPELGTLNRKQIAALVGVAPFNCESGILRGRRIIWGGRARVRAALYMSTLVAVRHNPILRPFYERLLAAGKPKKVALTAAMHKLLLILNAMLRQRVSWQPPAQAAAA

SEQ ID NO: 275982 - protein, 309 aa, unidentified
MTLHQTVFGCDISKAFLDIFDPRTRRFLRIGNTSEEIEAFLTSIKDTNCCLIMEATGVHDRKLRHALATHGIAFSRLNPLQARRFAELRGQFAKTDRIDAEGLSAFGAIMKPAVSQPPCAERERLAALARRRDQLVELRALEKRHRAEADDPFIVADLDAVLATLNARIALIEAEIDHYTRSCPDLAEHQSRLISAPGIGKITALTLVAHMPELGTLPPKKISALAGLAPFNDDSGPRRGRKHIRGGRRRVRNALYMAALGAIRANTRFKLFFQAIANRSGSKKLALIAVARKLLTVLNAMLRDKRTFA

SEQ ID NO: 275983 - protein, 378 aa, unidentified
MHRQGQGPHSLRVMGWPAPSGGAVCSSASANQGDNAMSINTLGIDLGKTVCHMVALDEGGQILFRRKLRRDQVLRMTANLPACRIGLEACCGAHHLGHRLSAQGHDVRLMPPEYVRPYVKSNKNDDRDAEAIAEAVGRPTMRFVPLKEEAQLDLQAIHRARERLVRDRTALINQVRGILFERGITVPQGRLRLGRRLPEILRDDTLGISPRIRLLLSDVRAEWQELDRRIDAFDRELAECARRNDKACRLIEIPGIGATIATALVAAIDNGAAFSRARDLSARLGLVPKQHTTGGRPRLGGISKRGNVYLRRLLIHGARSVLPHLAEQSSPVGSWLRGLLSRAHRNVAIVALANKMARIAWVVLRTGTHYEAQTLPTA

SEQ ID NO: 275984 - protein, 380 aa, unidentified
MPDVTTHAPANVRVRVALDVHKRSVVAAIEPEDPREGTLELVELPNTEKALRSLIKRLGGPEGLAVCYEAGPCGYDPYRLLTRIGVACDVVAPSLTPRRPGERVKTDRRDAKKLVGLYRAGVLKFVLPPSPEQEGLRDLLRCRDDLRDARMRARHRVSKQLLRHGHVWEAKKSWTKAHQAWVAHQRLSDPNAQRALEHMGAHLASIDCQIAALDAEIDAIANSEPWSDPVRWLSAFRGISTLTALGLLAEIGDFCRFSSPRELMGFLGLTPTEYSSGEQRHRGSITKTGNRHARRLLVEAAWHYQHAPRVSARLRANAHLLPPDVMARAWTAQVRLNRRHRALTKKGKRSTIANVAVARELCGFVWAAMTHQPLREEAIA

SEQ ID NO: 275985 - protein, 424 aa, unidentified
MPETIKTATVSWEGITHYAGFDWAKDHHDVVIVDQKGKIIKDLTFEHTAEGWAKWKEWVAAHPHLAVAIETSQGAAVEQLLESGVTVYPVNPKSAERYRDRKAPSGTKTDFLDAWSLADALRVDGHGWRALKPLDPLIQELRLLCRDEVELIGKRTEMVNQLQAALLAYYPAALQAFEDWTATPSWSFVQQFPTPELLRQAGRHKWEKFLHVHRLYRPELNDKRLEIFAKAHEFCGAAAVTRAKSRLALTLIKLLQALDQQLEQYRKEIRRLFNEHPDHDLFGSLPGAGEKLAPRLLSELGSDRTLFESAQALQCYVGTAPVSFESGQVRQVYLRFMCNKSFRHAVHLWADLSRKFCSWAQVYYQQLRARGKSHASALRCLGQRWLKILWKMWQTRTCYNADFHMVNQLKHGSWVLSVKAAPSK

SEQ ID NO: 275986 - protein, 367 aa, unidentified
MSRMKRLAVQQLDVSKDYLVIGLDLAKTDTAVIAITTDGELYAIDRLKYSDLLNQARQLGSTVFAMEPCNGMTYLVHELEELGHECRVINGEAVKDYVKSHFAGQKNDLNDAQAIAFLAQDEMLKFIRTKAKSEMTMQTLQVVRQQLIKQRTCSVVCIKGICQNYGLVISKSIMSEAKIRPIIEETQKLPDEIKEPLKRLLRNAARFTIDIKQIDKAIEQGLKGNETAERLLEVPGLGPQCVSRLLTTIGDINRFEGPKNLAAYYGLVPRSHTTGHNEKMGKITKHGDRLMRAFLVQGAHAVLIQHTKGRLPKSALKKWIDKKLSAGMPCSKLSIALAAKLLRIAFAVLKYKKKFDIKKAGVARCSL

SEQ ID NO: 275987 - protein, 340 aa, unidentified
MSIVMGLDQHRAQISAEWLDTITGEISRARIVPADRAGVRKFLARFRADGLEVALEATTGWRFVVEELERIGAEVHLAEPAEAAALKGKKKRAKTDWADARHLRELLLIGRLPESWIPPAHILDLRARVRTRHLLSHQRTEWQQRMHAVLYHHGFPQRRNLLSLESRQWIAGLNLPAAAREQLDIALEIIDALDLQLVPFDSQLHAIARKQSGCRALTGQIYGVGDLTAITILAELGDVRRFQNSRDVVRYGGLDITVYQSDERRAPGHLSRQGPPALRWALYEAAQRARFPASPDRAYYQQLAARIGGNRACLALARKLLKRSYHILKELGDQALAPVS

SEQ ID NO: 275988 - protein, 347 aa, unidentified
MKFYTKQHKYYCGIDLHARKMYVCIIDQKGKVKVHKNIKTDPELFLKLISRYKKNIIIGVECVFCWYWVADLCAKHKIHFTLGHALYMKAIHGGKTKNDKIDSYKIALLLKGGNFPTAYSYPAKWRATRDLLRRRMYISRRCGELVAHIQNTNTQYNLPAFKKKLSRKYNHDGVVERFEDPAVQKSVEVDLAMIDSLNSILKKLEWHIEKTARQHDYHTLYLLRSIPGVGQILALVILYEVHDVKRFPRVQDFSSYARLIRPVKVSDGKWAGHSNKKIGNHHLKWAIKEAAILMLRDSQKAKYFVSKLERKYNKGKALGIYTHKLGRAIYFMLKNKEAFEMKQFFAR

SEQ ID NO: 275989 - protein, 413 aa, unidentified
MVVGVDIGSQIHYARAFDNRGRELTKRIFSFHNDLEGFNSFNLWAETLKTENEKTAVLIGCEPTGHYWFAFAKYVNDHQKRLVMVNPFSVKKIKELDDNSPKKTDSKDPKTIAKLVVDGRYSIPYMPEGIYAEIRDLVYSRDRIMKQHNISANRIQRWLAIYFPEYLGLYTRFDAISGLAVLEKAPLPKDVIALGVNGIRKIWHDKKMRGRGVTEDRAKTLVEAAHNSVGLDGGIGTKSELYMLLEEHRLWTSQLEAVNKVLEEMILKVPHVEKLLAIKGVGSITIAGFIAEVGDIRRFDSPKQIQKYAGLELVENSSGKHKGRTRISKRGRRKLRKILYQVMVPLLARNKEFRGIYDYYVTRVKNPLKRRQAMVAVSCKLIRVFYAVLTKGVEYDRFKMMSDIHRKSDIIAA

SEQ ID NO: 275990 - protein, 426 aa, unidentified
MKYTQNERIMQITERTLIIGIDVGSEKHYARAFNFRGVEYGKLLIFHNDAEGFAMLEDWIRKLAEDNGYEDVTVGMEPTGHYWFNLGEHIKGKDMRIVLVNPHHVKKSKELDDNNPSKTDRKDPKTIAMLVKDGRYMEPYIPEGIYKELRTLMDSRWRIMKELFAIKNRISRWISIYYPEFTKVFADWEGKAAMLILKESPTPAKIIEKGLDGIIGIWKKHKIRAVGRKRAVMLLETASSSIGTREGIISAENELQMLLEDYESKIQQNDKTMKLIESLAREIPGFEKMLEIKGVGLVTAAGFIAEIGDVSRFTHPKQIQKLAGLSLKENSSGKHKGETTICKRGRKRLRYYLTFGMMPLLSKNEEFKALHEYYTSRKENPLKKMQSLVALSNKLIRIFYVILTKNVAYDPQRMMNDIRRPEVKAA

SEQ ID NO: 275991 - protein, 387 aa, unidentified
MSQTAAALIPAPVAYGSTLVLAIEVSNKSWVLAAQVPGLPHTKAKRTIHPEAGALLAAIAGYRARAAATGHSIERVIAVYEAGWSGFWLARWLIRHGVEVYVVQPSSVPVDRRMRRAKSDGIDAELLLRTLLAWLRGEPRVCSMVPVPDEADEDARRCVRERTELISERVGLTNRIGAVLATLGVTDYNPLLRSRCRRLAELRTGLGEPLPANAHAKIKRLLARLELVLTQIAELERERDAVVETEASDKAGKMIQQLISLRGIGVQSATVLVREAFVRRFANGKALGSYAGLASSPYNSGGINREQGIGKGGNRRVRTVMVELAWLWTRYQPSAAQVCWFRERIGPTGRRVRKIMVVALARKLLIALWRFVIDGVVPEGAVLKPAA

SEQ ID NO: 275992 - protein, 333 aa, unidentified
MMNMHSQGRVASEATRPNAGIDVSKEHLDVHLLELGMRVDNDASGWEPLIAKLKESDVDLVVVEASGGYERGLVTALHRARIDVARVNPRQAREFARSMGVLAKTDRVDARCLRDFADVLARHKDRHKYITVPADPERELLAALMTRRRQLVDMRVAEANRLEGATARTVRSIRSVIKTLDKQLHDIDGDIDQHLERHFKPQKELLDSVRGVGPVTILTLTSALPELGRLGRRQIAKLVGVAPLADDSGRRKGVRRTAGGRSEVRAVVYMATLTAIRHNPVIQVFYSRLVAAGKPKKVAIVACMRKLLTILNAIVRDQAPWRTDATLTSSRST

SEQ ID NO: 275993 - protein, 430 aa, unidentified
MKSNTQNAKIEAITEKTLVLGIDVGSETHYARAFDYRGIEYSKKPFKFSNTEVGFATFKEWILDLKERHEKDKVIPGMEPTGHYWFNLGKFLQDNEMKPVLVNPHHVKKSKELDDNNPTKNDRKDPKVIAGLVREGRYMIPYLPDGVYADLRTASNIRFQLQAELTRIQNRISRWFNIYFPEYKTVYGKPDAKSGMLILKAAPLPEDILTLGIDGVNQIWRDAKLRAVGKARAKTLIEAAEHSVGSKEGAVSARMEIRMLLEDYESRNTRLQEVMVLIEELIRKIPMAEKLLEIKGVGIRTVSGFLAEVGDISRFNNPKELQKLAGLALVENSLGKHKGETTISRRGRKRLIYLLFEVAMSLVSKNQKFRELHNYYTTRRLNPLKKMQSLMAIAAKLIRVFYAILTKGVDYDPKKMVSDIKRPAVYLQAA

SEQ ID NO: 275994 - protein, 387 aa, unidentified
MIYCGIDIAKHKHVVSLLDEKGEQIKSVFMIENTRPGFDRLNQELGGVAGPITVGLEATGHYWLALYEELSKQGHTLIVLNPMQVAAYRRSGVRKVKNDRHDALWIADFIRIANLPATSRDIPVILQMRELSRFRFRLSEQVGDCKRKILTILDRVFPEYERLFSNVFVKSSRQVLKTAVSAQEIADYDLSELALLLHSASRGRFGGEQAERMQTAARQSVGIGFLTNAVRVEMGCLLDQIELLEDQRAQVDQAIELLMQEIPQHITSIPGIGPVTGAAILSEIGDIQRFDAPEKLVAYAGLDASVYQTGQFVASVAHISKRGSPYLRHALWQAANVAVQYDPDLLAFYQIKRKEGKHHNVVIGAVCRKLLARVFIVLKEQRPYVIR

SEQ ID NO: 275995 - protein, 320 aa, unidentified
MASRESLFIGIDVSKQTLDVAFGADPHAPRETIPSTDEGVQLLVTRLQRLQPTLIVLEATGGLERMVFAQLLQAGLPTARVQPRRVRALAHAEGRQAKTDRLDARLLARFAERVRPPHHQATDEQRASLRDLLVRREQVIQMRTAEINRLTAAAPNLRPGIQQHIDWLDQEIRALEQERDNEAERTDEVRRKRELRDSVPGIGAITARNLLLRLPELGTIKRTEAAAFVGVAPYANQSGAQHKPRHISGGRRDVRSVLYMATLAATRRRLVRRAFDQRLCQAGKPRKVAIVAAMRKLLTILGAILRQQKPWDPAVHTSAP

SEQ ID NO: 275996 - protein, 328 aa, unidentified
MFYLGIDVAKAKLDCCLLLDPDKAKRKSKSVANTKAGLANLLEWLRTKKVSPNNLHVVMEGTGVYHEQAALVLVETGVTVSIVNPAQVKNFGRGLAVRTKTDGVDSFVLARYGALLKPAAWQPPTLEARVLRALLARREAVALDLQRELNRLEKANVTEIPIFIRQSIDDSIEFLRTQLAKLQQEIDDHIDHHPDLRRDMELLTSIPAVGPQTGSNLLAIVHSYRFDSAEQLAAYLGLVPVERQSGSSIQGRARLSKAGPARIRAVLYMAAVVATKYNPHVKAVYDRLLAKGKAKMAAIGAAMRKLVHLCFGVLKNRTHYQADYAKIS

SEQ ID NO: 275997 - protein, 422 aa, unidentified
MLAESHDDEQIIARVAALDIAKAELVCCVRVPASAGGKRRLQEVTTYSTMTQSLTELANRLVEMGVQRVVMEATSSYWKPVFYLLEAHGLDPWLVNARDVKHLPGRPKTDVLDAVWLCKVAERQMLRPGFVPPWPIRRLRDPTRYRTDLVSARTAEKNRVEKLLEDACIKLSVVASDIFGVSGRAMLAALVAGERDPKVLAQRARARMRGKIDRLEQAFDGHFADHHRFLLSRMLARIEGLDADIAAVDAQIDVQLAPFAEAAAHLDEIPGIGSVAAAAIIAEIGVDMSRFPTAGHLCSWAKFAPGINSSAGKPQGSASSGHGDPYLARVLGEAAVGTSKTNTFLAARYRRIARRRGQPRAVVAIGRSILVIIWHLLHDQDARYQDLGADHYNRHVDPSAMKRSPIRQLEALGYTVTLTPAA

SEQ ID NO: 275998 - protein, 318 aa, unidentified
MPESIVIGIDIAKQTFDAALGVSGSIKTFANDDAGFDTLLANLAEQAVDLIVMEATGGLESNLACALQAAGFAVAVINPRQARDFAKAMGYLAKTDRIDAKALAELAQVLACSPERDRFVTVLPTPEQQALQALVARRRQLVAMQVAERQRLSVSHAAARKSIEGMIMAIRTQLDEVETELAKHIETHHADLALRLSSVRGIGPTTVATLIAEVPELGQLSRREISALIGLAPFNRDSGQMRGKRTIFGGRGQVRRGLYMAALAAIRFNAVIKQFYDRLVAAGKPKKVAIVACMRKLLTILNAMVRTGKAWDDSLHTA

SEQ ID NO: 275999 - protein, 456 aa, unidentified
MSNSKRGRQSTRVLPTVHAQAAGLDVGSTFHVVAVPPELCDESVRTFRSFTGDLHRLADWLRAIGVTTIAMESTGLYWIPAFEILETRGFEVLLVNARDTKNVPGRKTDVNDAQWLQQLHQFGLLRGSFRPHERVVRLRALLRHRERLVDSAATHIQLMQKALMQMNVQLHHVVTDITGVTGMKIIRGIVDGEHDPLTLAKHRDVRCKESVETICEALTGNYRSEHVFALRHALELFDFLQTKIGESDAEIETVLHELNEDRVPPAVPIPHVRHSRGRNEPQFDVRAALYTMLGVDLSQIHGLGPYTVLRLIAECGDDMRKWPTVKHFTSWLTLAPGNKISGGRVLSSRTRRSSNRAAALLRIAAVNIGKTETALGAFYRRLGARIGKAKAVTATARKLAVLLYNALRYGTRYADPGANYYDERYKQRVLSNLHRRARQMGFLLIEAEASPSLGVS

SEQ ID NO: 276000 - protein, 317 aa, unidentified
MDTIYIGVDFHARQQTICYLKTETGELVTCELKHQDKQKVRAFYAQFPGQVIVGLEASGYSPWFERLLEELGCEVWLGHATEIRRRARWRQKNDRRDAELILDLMLHDEFPRLHRPAVQSREVLRMLRYRQKLIKIRTMSKNSLQALALQSGLAKGSRLFTQAGQQELSAAVMSPVMHWQREHWLQLMEPLNQQLLETMGWFKEQSKGDVCIKRLRTHPGIGLLTSLCLVHSLQPVSRFRNTRKVAAYAGFDPVERSSAERKCFLGISKAGSRVLRFLLVEAAHTAIRRDEGAPRSTEGQSSCCQETSHPRFHHVAG

SEQ ID NO: 276001 - protein, 424 aa, unidentified
MKLQSDAEFAAFVGIDWADTKHDICLQVATSEEREFAVVPHRADAIEAWVGSLRHRFEGQPVAVGLELAKGPLVYALQKYDFVVLFPIHPSTLAKYREAFTPSHAKADPTDAELALELLVRHRAKLKALKPQSVAMRMLLRLVEQRRRLVGDKNRISNRLTDALKQYFPDVLEWFADKDTPLFCDFLSRWPTLIHVKHARKATLQSFFHEHHVRSQSRIDERLHAIRSATPLTDDPAVIRPNQLLMLALVEQLRVTLQAIDRFDAEIATVSQTLPDYSLFRALPGAGPAFAPRLLAAFGEQRERYQSAAEVQRYTGIAPVTESSGNKHWVHWRLQCPTFLRQTFVEWAGATIPRSFWAAAYYRQQRDKGSTHQAAVRALAFKWIRILYRCWQTRTPYDESTYLNALKRRGSPLLTSIVGAAKNT

SEQ ID NO: 276002 - protein, 407 aa, unidentified
MFVGIDWAAEEHAVCIEDPAGRVVDRFTIAHSAEGFERLIERLARHAAPGALPVAIERPDGRLVDRLLEAGHPVVPVKTTAIKAWREAEIASGAKSDPGDAKVIADYLRLRQHDLRELRPFSEETRALRAVVRARGDLVDARVAAGNQLAATLAAFWPGAGELFADVWSEISLAFLERYPTPAAAARLGEVRMTGFLRKHGYSGRRSAAELLERLRAAPAGLADGPESEARRDAVLAMIRVVRVLNRSIKDLDRSVVAHLDEHPDAEVFRSLPRAGEVNAAQMLAEWGDCREAYDGPEAVAALSGMAPVTRRSGKHTAVAFRWACNTRFRNAMATFADNSRHASPWAARVYRDAVDRGADHPHAVRVLARAWIRVIFRCWLDRVAYDASRHGGSRRLEAVRQESIAA

SEQ ID NO: 276003 - protein, 322 aa, unidentified
MRYIGIDVSKATFVVAYSSDKGGEIRTFNNTTTGIKQFIGALPKDGSIHCVMEATGNYSALLLYMLNVAGITVSMENPLKVKNFAKALLSTVKTDKSDARLITLYGEKMNPRPFKVQGEAILRLRQKRTVIRQLTKQITAMSNLRGSLACLPVPDKGATHTVDETIKFLEKKRDRLQSELTDLVEVEFSRQLALLTTIKGIGITLATALIITTGGFTYFQNAKQVSRYLGICPTYEQSGTSVNIKGHINRNGDAYTRGLLYIAAWPASRFNAQCKETYTRLRQNGKSGKLAMIAVANKLVRQAFAVVAHDKEYVDGFVSNRP

SEQ ID NO: 276004 - protein, 356 aa, unidentified
MNKRSKLNFSGQAIYLGLDVHKKSWSVSIFTKHGEYKTFSQPPEAETLIQYLQRHFPGARYHSVYEAGYCGFWIHDQLRERGIDNIVANPADIPTQDKERRNKRDRIDCRKLARGLRGGDIKGIYTPPRWKLEDRSLIRTRLSMGRKQARCKNQIKSMLLFYGVTIPEQKEMGHWSRRFIRWIEEIRMERSSGDVALRLHLEELCHLRQIIAKLNRSILALARTEEYRSWVSLLKTIPGISTLTAMIVLTELYEITRFRSIDHLCSYVGLIPDTQGSGEKEHVGGITQRHHSSLRWLLIEASWIAVRKDPVMMEAFNDYCKRMRKTKAIIKIARKLLNRIRYVLKNQAEYVTGVIE

SEQ ID NO: 276005 - protein, 358 aa, unidentified
MADLETTVIGGVDCHLDTHHAVALDTHGRRLGDQSFPTTSHGYHQLLAWLQQFGRVHAVGVESTASYGAGLTRYLVGAGLTVIEVNQPHRQVRRRRGKTDALDAEGAARSVLAGEATAVPKDTTGSVEAIRQLRLARASAVKARTAALTQLGDVLATAPAALRERLSGPASLHARATRCARLRADQARLHLPLEAAKFVLRSLSQRILALDAEIARFDAHLATLVASVAPRTTALLGVGTLTAAQLLITIGQNAARMGDEAAFAHLCGVAPIPASSGKTNRHRLNIGGDRQANAALYLIAVCRLRYCERTRAYAARRTHAGRSKRDTLRCLKRYIAREVFHTLRADLAAFRAAQPAPA

SEQ ID NO: 276006 - protein, 369 aa, unidentified
MWDRITYIGLDVHKADIVVAVAEGGLRGEVRDYGRIVNTPAALERLARKLGHDGVKLRFCYEAGPCGYGIQRQLSALGHECVVVAPSLIPKRAGDRIKTDRRDAASLARLDRAGELTPVWVPDAGHEAMRDLVRARLDAVQALRRARQQLSGFLLRQGCHYGRPAWTKLHRRWLAGLKFEHPAHHIVLEDYIAAVEAAEVRRDRLTAQIEAMLPDWSLAPLVAALQTMRGIALVNAASLIAELGDLSRFANPRQLMAYLGLVPSEHSSGVSIKRGGLTKAGNGAARRLLIEAAWCYRFPARVSRELRLRQEAQPIPIREIAWKGQRRLCARYRKLARTGKPANVVTAAIARELAGFVWAIARQVAIPAG

SEQ ID NO: 276007 - protein, 382 aa, unidentified
MGERVFQHDAAGLAALCDWLVSVAGDTSSVAVAIEVPHGPVVDVLLDRGFAVHAINPKQLDRLRDRFSPAGAKDDRRDARVAAAGLRTDPHLFRPLQVGDPAVIELREWSRLAEELQQERVRLANRIRQQLWRYYPQLLALSDDLTAEWILALWTMAPTPAKAMRLHEATIAKLLSRHRIRRLDAAGVAEMLRQPAITVAAGVTEAAILHLRSLVARLRLANTEFHQAERKLDELCAQLSQNATAAADGPCDAAILRSVPGVGTVILATLLTEAGDPLARRDHTALRTLSGVAPVTKRSGKTCIVVMRYAAQARLRQAVFHWARVAVMHDPTSRSRYEALRARGHSYGRALRSVADRLLGVACVLLQRQVLFDPDHGKSAAA

SEQ ID NO: 276008 - protein, 383 aa, unidentified
MASMTTQGDVIHVAIELSQSSWLVAARLPDAKKSHLFRIAGGEASALLKLLSSLRMRFAAKTRRSAKIICCFEAGRDGFWLHRLLIGHAIESYVLEPTSILVNRRARRAKTDRLDAEGMLRVLATYLAGDHKACSMVRVPTPDEEDAKRPHRERQHLTRERLRIENRIEALLFTQGVRERPSLRSWERDVAGLRTGDGRAIPHRLRAELDRLRRQLVLILSLIREVDAERGLARQAEPQEPIHGKIAALCRIRGIGDNFAAVLAREVFYRSFANRRQLASYVGITPMPYQSGNLDRDRRISRAGNPRARTTMIQLAWLWLRYQPGSDLAEWFRKRVGTMAGRTRRIAIVAMARKLLIALWRYVETGTIPAGVEFGGPAMAATA

SEQ ID NO: 276009 - protein, 427 aa, unidentified
MNCTQNQKINQVTEHTLVVGIDIAKRTHYACFVDDRGRVLRKSFPIFQSKEGFQQLYEAIQEGRKAFGKAQVIVAVEPTGHYWLNLAYFLEENGIPLVMVNPAHVCRSKELDDNLPTKHDAKDALVIARLAKDGRFLVPRLLHEIEADLRVGSTLKEKLRKEPAAVKNAIIRWTDRYFPEFWTVFRDLGKTALAVLEWTPLPADMAGRTAEELLEAYRQSEGLKCPQKAKIQALIDAAKGSIGVTEGTTMARFEIAALVRQYRQFEAEIAALDAELKALVQTTMEYQWLKTVDGLGDATIIDLLAEIGSFAHDRDPRQLVKLAGLTLKENSSGQRKGQKHISKRGRKRLRSVLFRAVIPLIRHNEAFRELHEYYTTRPVNPLTGKQSIVALCRKLLNVLFAICTKKQAFDAERMRQDVLSHVPHRAA

SEQ ID NO: 276010 - protein, 450 aa, unidentified
MSRPQVIDDEEHERVHERVAAVDVAKDSGMVCTRTPHPSRPAARRSTVWTVTARMKAIRGLGRQLKKDGIEIVTLESTSDYWRIWFFVLEACGLAVQLVNAAQARNLPGRPKTDKLDAQWLARLTEMGLLRASFVPPKAIRDLRDYTRARTRLVHERTRCWQRLEKLLESALVKVSSVASKLTTLSAQDMIKAMIAGQRDPKVLAGLARGRMKARHDDLVEALDGMFDDHHGELAGLLLDQIAFLDTPIAALTARAAELTAAMPAAWGVDPDGTTGPGAGTTPGAPVLNAVARLAEIPGISEDLARTIIAETGLDMSRFPAAARLVSWAGLCPSARQSGPRTRAGKKGQGNGYLRGALGQAAIGAARTDTFLGERYHRIARRRGKAKAQVAVARSILIIIWHLLADPAARFTDLGPGYYQARTDKDKKIKNHIRQIEALLGHPITITNAA

SEQ ID NO: 276011 - protein, 380 aa, unidentified
MDEHTTAVGLDVHKESVAIAYAGKAGTDPVWVGKIPNEPEKLAGAIKSLQKRHGHLEVAYEAGPCGYAIYRQLHGMGIPCVVAAPSLIPIKVGDRVKTDRRDALKLARLLRSGDLSAAWVPDEQHEGLRDVTRAREDAVEDLHRARQRLSKLLLRLDLRPPTGVNAWTKRYREWLEQLRIGNPAQDTVLQEYRLAISQAEDRLTRLETAMCEAAVESPHAPVIAALQAMRGIQAVTAITLVAELGDLTRFRSARQLMSYAGLVPCEDSSGGRERRGGITKTGNAHARRVTVEGVWHYRHAPRVGKALKKRQQGLPESVIQIAYRAQVRLHRRYQRLLKAGKPIQKVAVALAREWLGFVWAIGQEMARLQAVEANREQRAA

SEQ ID NO: 276012 - protein, 370 aa, unidentified
MNQNILFIGMDVHKESIEIAISDGNTQETRRYGKIGGTRDAMRKALIKLVAPGKSLHFCYEAGPCGYELYRYLISEGHTCCVVAPSLIPKRPGDKVKTDKRDAAQLSRLFRAGELTPVYVPDREDEAIRDLSRAREDTMLVQKAARQRLKAFLLRHDIRYPGNRSWTEKHLRWLADEVRCPSAAQQVVFQEYTNAVTESQQRLQRLNEQIEIFVKQWRLWPVVEALMSMRGVQMVVAVTVVSELGDLSRFHNPKQLMSFLGLTPSEYSSGGRTSRGRITKTGNGHVRRILIEAAWSYRYPAKVSPEMQKRQEKLPLAIRNIAWKAQLRLSQQYQHMQRKGKPHNVTVVALARQLAGFMWAIANEVTYPVK

SEQ ID NO: 276013 - protein, 376 aa, unidentified
MAAIAREGRGKPESLGTIANKPKEVAKLVERLSREFGGEVLLYCYEAGPCGYVLYRQLVEMGQECHVVAPSKIPKKPGDRIKTDRRDARKLARLLRSGDLTAVWVPGEEQEAMRDLARARNDFKIQERKARQQLSAFMLRHGHSWPKGKTRWTKGHFEWMETRKFPHEWQYVVLQGYIRAVNAAEKRVADITAEMSMALPHWSMAPVVYSLMAFRGIDMVSAMGLLAELGDLTRFDSPKQLMGFLGLVPSIHASGPTKREGEITKTGNSRARRLLVEAAWAYRHPARMTAHLRRKAKNASEEAREISWKAQKRLCGRYRSLVYSGKNKNQTTVAVARELSGFIWDVTRVEMARFETPPASGPVTHRKEVSDKRKRS

SEQ ID NO: 276014 - protein, 350 aa, unidentified
MVTIGVDAHKRTHTFAVVDEVGRELANRTFAATPDGHLAALGWARAWPERTFALEDCRHLTRRLEGDLLRAGERVLRVPPRLMAEARRTGRERGKSDPIDAVAVARAALREPGLPVAQLDGEARRIRLLVDHREDLVAERTRIQCRLRWHLHELFPGLEIPPKGLRRLNVIADLERRLRDVEGPVASIARELLVRTRELTVRANELEREITRLVHPLAPRLLALAGCGALSAAKILGEVAGVSRFRSKAAFARWNGTAPIPVWSGNDTRHRLHRGGNRQVNAALHRIALTQWRGVGPGRDYVLHRIESGDSKTEALRLLRRRLSDEVFRRLRTDETTSAAGATLEGVVAA

SEQ ID NO: 276015 - protein, 339 aa, unidentified
MSNLLKNFVGIDISKTYFDAAVIKADDPCESTHSQFSQCPKGLKQMITWLQQQNVLLNSETLFCMEYTGIYNTALVNFLVEQRAQLWVEMPLRIKKSAGLQRGSDDKISALKIASYAFRYQDTIQLWQPVDSSIEKIKRLITQRDRIMNAIAQLTVPVKELLQCGCRNEAKELEKVQRSSLKALQKTKEAIEQLIAKTVQLNEVITKKVQQVKSIKGIGEVTAITLLAYTKGFTTFCNAKELACYCGVVPFAKRSGTSIRFKPTVSPYANKKLKKLLHLCALSAIKNDVEIQAYFERKVAEGKNKMSVINAVRNKLVHRVFAVIRDDRFYDENYTRKCA

SEQ ID NO: 276016 - protein, 350 aa, unidentified
MMVIVGIDAHKRTHTAVAIDEAGRKLGEKRTTSTTTEANLELLRWADAFGKERRFAVEDCRHLSRRLEADMLAAGEELVRVPPKLMAHARDAARTYGKSDPIDALAVARAAWREPSPPRACLDGPSRDLRLLVDHREDLVRERTSQVNRLRWHLHELDPSWDPAPRSLVRFKHLDALGARLDGLGGTVAWVARDLVARIRELTVAANELERRIVEQVSRLAPALLGLAGVGGLTAAKIVAEVADVRRFHSKDAFARHNGTAPLPVWSGNLVRHRLSRTGNRQLNAAIHRIAVTQMRIHDGAKLYLGRRIAMGNTKTEAIRALKRQLSDVVYRTLMTDAVSTQVARFGEAA

SEQ ID NO: 276017 - protein, 395 aa, unidentified
MFIVGIDVAKRSHEATVITSEGQVVQKAFSIRNNCMGYNLMMEKLRKLTNVKSQIVFAMESTAHYWLALYTRLRKDGYKAIVLNPIQTSAMREMSIRKTKTDSKDSFLIAELIRFGRYAQSNVAQDKLLALKELCRNRYYLVDMASDLKRKAIALIDRIFPEYETQFETIFCKSSIAVLKKYPTPKKLAHANLSKLTEILLDSSNGRFGEWKAQELKSLARDSFGVEDCEGIYSMLLLTMLDEIQSLTEKADELEKRISSLLKEFDSTITSVPGIGPILGACVLSEIGDVTRFRPADKLAAYIGVDPSVNQSGEYISGHAHMSKRGSPYLRRAVWMASIVAVQRDPMFRAYHDKKAAQGLKYMNIIGHVTKKMTAVIFAVLRDNKIYAPVLPDVS

SEQ ID NO: 276018 - protein, 389 aa, unidentified
MKIYVGIDIAKLNHFAAAISSDGEIIIEPFKFTNDADGFQLLVSKLESFDKNSIIIDPPSTAHYGDNLVRYLVAEFYQVCVLNPIKTCQMRKNNVRKTKTDKVDTFVIAKTLMMQDDLRFITFFDLDMMDLKALGRFRQKTIKQRTRLKIQLTTYVDQVFPEIQYFFKSGLHQHAVYALLKEAPSPKEIASMHMTHLANLLKVNSHGHFTKEQAKELRVLAQKSVGANDSAISIQITQTIQQIELLDSQLDKIEAEMTDIMKFNDSVIITIPGIGYINGGMILGEIGDMHRFSNPNKLLAFAGLDPSVYQSGNFQAKTTRMSKRGSRVLRYALVNAAWNVVRNNATFKAYYDAKRAEGRSHYNALGHCAGKLVRVIWKMLTDEVEFNLE

SEQ ID NO: 276019 - protein, 355 aa, unidentified
MKQQAIQYVALDVHQATLVVSVRDAQGAVVMRATVATEAKAIVGLIRGLGGRVHVALEEGTQAQWLHDVLEPHVERVVVCNIRGRGETGNKSDRIDADRLSELLRLGSLKSVYHGASGLLTLKELVRSYVNLVEDGTRVMLRIKALFRARGIKTPGTSVYRQSTRKGWLSQLEGRGARTRAEALFAELDVLQELRPKAKAAMIAEARRQPGWKILRSVPFLGPVRVAEILAIMATPWRFRTKRQAWPYVGLAVVTRSSADQEFTDGSLRRRKRAPLTRGLNRNHHPLLKSVFKGAANAAAAQEGPFKEFYEACVGRGVREEMAKLTLARKIVAIVLRLWKTGEMFDATKLKMQVT

SEQ ID NO: 276020 - protein, 485 aa, unidentified
MAKRRMSTFERLESGRLNRKQRRELGRQVAVADPGLTIVHANAGGIDVGNESHYVAVPPDRDPNPVREFGCWTAALNQIAEWLQSCRIDTVAMQATGGYWIALYDVLEQHGIQVVLANAQHTKNVPGRKTDVQECQWLMKLHTYGLLRDSFRLAQEMESVRTIWRLRDRHVKEAGRAVQHMQKALTKMNIQLANVISDINGLSGQEIIAAILQGERDPWKLADLKHYRVRASREEVARSLEGNWREDVLFELQQAVDSYHFAHRQMQECDRKLEGYLASLPARMLDIPVQPESTQAATPKKKTKKAKRPRGNQPHLDLKTELKRICGVDLTSIDGIDVMTALTIVSEIGTDVSRFQDETHFASWLGLTPAKDITGGKTIGRGKRKVKNRVAVALRTAATTLLKSDSYLGARYRSLRRKLPSFASAVKAMGRYLAILIHRLLTKGEAWVDRGATQFERRHTEQELASLSFKARAKGFKLIPITEAS

SEQ ID NO: 276021 - protein, 346 aa, unidentified
MKIIGCDFHPSWQQICWVDTMTGETEEKKLEHGSGEAAKFYRGLREPALIGMESTGNCQWFVEMATTAGHEVWIGDAAKIRACEVRQQKHDRRDAALILQLLREGRFPRIWTPSGEEKDLRQLLIHRHKLVRVRAQVKTELQHLAMNQGITKKGKLWSQAGEKVLRELALKPWAGRRREDLLKIREMLHGQIERLDQAVMEVAQKNEKARLLMTQPGVGPITSMAFVLTMGDVSRFPRGKQVASYLGLIPREYSSGGHQRFGSISKQGNRFMRMLLVEAAQTAVRCDPQFRNEYWHRCHKKPKGVAKVAAARKLAIRLYWMLRTNRAYPEVVRVESSSRVAVVGAS

SEQ ID NO: 276022 - protein, 348 aa, unidentified
MRFYTEQHKFYCGIDLHARSMYLCILNQEGEILLHRNMPAGPEPFLKAIAPYREDLVVCVECIFTWYWLADLCAREGLPFVLGHALYMKAIYGGKAKNDKIDAQKIAVLLRGGMLPQAYVYPAAMRATRDLLRRRIHLMRKRAELLGHIQQTNSQYNLPDIGKKIAYKANRNGVAERFADPAVQKSIEVDLALIGHYDELLRDIELSILKAAKQHDANTLYLLRTVPGIGEILSLVLLYEIHDIQRFPRVQDFVSYCRLVKCAKESAGKRYGTAGTKIGNAYLKWAFSEAAVLFLRNNPPGQKLLVRLEKKHGKGKALTVLAHKLARAVYYRLTRERAFDMQHFLQSA

SEQ ID NO: 276023 - protein, 412 aa, unidentified
MQDILTCAMGLDVHRDVIVACLARGELGAEPEIEIRSFSTLIPEMQKLRDWVLEVECHHVAMESTGIYWQPIYEMLELCFDGQINILVVNARHMKNVPGRKTDMRDAQWIATLLRAGLLNGSFIPDKTFRELRHLTRYRKSIVHDITAQKNRIDKFLQSSGFRFTAFLSDAFGASGRNIIRHLMEYGDISREALDKCLKTQTRKRIDEILVALNGSLSEHQRSFLRMIFEHLESLERHRHTVEDAISEEIVKHEAALSLLCSIPGIDVTAAASIIAEIGTDMSAFPDSQHICSWAGLSPGNNESAGKRKSAHINKGNPYLKSMLCEVGWVISGKRTLYLSGWYWRVKQRKGAKRATIALARKLLTLIYTMLKTGTPYNEECFEIRRKQSERKRAGRMVNELQKLGYFVVAPD

SEQ ID NO: 276024 - protein, 334 aa, unidentified
MKNSRPAPASQPVQPPLPRPDAGIDVSKAHLDADVWPQRPSAAIHIANDDAGCAALVEHFRRLNVRRVVIEATGGYEWRVVDALRDAGFDVRIVNPKRVRDYARSLGILAKTDALDAAVLARYAGQLDEEAPEIPDDHQRGRDRLVTRRRQLIGMRTMEHNHREHTRDPKLIKQIERAVELFDRQIAEVEKLIDESINDDPIAKAIDARLQTVDGIGAVTSRMLITELPQLGRATRREIASLAGVAPFNDDSGPRRGKKRIQGGRGRLRSALFMPILTATQKNPVISAYYYRLRDAGKGHFTAMIACMRKMIIHLNTLVRETLQKLTLTPSRTP

SEQ ID NO: 276025 - protein, 356 aa, unidentified
MTNAIPMDVIIGVDTHKDVHAAAAISGAGVYLATITVPASSNGYGALEAWAKSMGAVQAFGIEGTGSYGAGLSRFLRERGHTVVEVNRPNRQLRYQQGKSDAVDAESAARAVLAGQAAGQPKSGTGTVEMIRHLKIARDTAVKARTQAMQTLKAIIVCSPDALREQLDQVSGKMTLLRRLAALRPGPLTSTLASAKASLRAIARRWLLLDAEIKQHDAHLETLTAARAPELLEAHGMASGTAAEMLLLVGDNPERIHSEAAFAKLCGACPIPASSGKTIRHRLNRGGNRQANAALYRVVIIRMRGHQPTLDYVRRRAAEGKPKSEIIRCLKRYVAREIFGYLCRKPALADAAATSS

SEQ ID NO: 276026 - protein, 352 aa, unidentified
MQTPQLFIGIDVHKKNWSVSIRTDLFDHKTFNMPSEPETLIKYVNQHFQGYPVECCYEASCCGFFPYRQLSQAGWRVKVLNPSDIPQSAKNKDQKSDRLDCRHLAKQLHSGHLTGIYVPDEQQEQLRSLFRQKDNLTKVVRKLKSQIKAELLYYGIKIPLQYDTPRWTMDLTAWLNSLEWKYSSGHSSMQSKLRHLEFARQEWLALNTELRRYVCANYKEDYYLLMTIPGIGPTIAIGLLAEIGNIRRFKKFDPFASYVGLIPSIYSSGETMQVRGLTYRSKSLLRSYLIESAWVSVRRDPTMQDYYRSHTGKQPNKIIIKVAHKLLRRIWHVIKTGEGYKIALKENSPEVR

SEQ ID NO: 276027 - protein, 348 aa, unidentified
MTMIGGLDVHRQQITFDYVDRDGLVRWGEIRPATRKTLRGWLAEHCLDGDAEFALEGCTGWRYVSEELAAAEVGVHLGDPAEIATLRGPKKRAKTDRADARLLRTLLLEGRFPESWIPPVQVLEIRTLGRLYCTLMDERRAWQQRIHAQLFHQGCPPIRALLSAAGRDALARVELSAAGRQYVDTALRRIDELTAEIGPLRTQLVNFARRQVGCQALQAHYGIGWLCAAIIWAEIGDARRFASSDQLVRFAGLDVTVYSSDGKRSPGHLSRQGSPELRWAAFEAAKCAARRSSPDYAYYHQLAAKRDGHNGKNPTLAVERKILRRCYHTLRELGDAALALPIPEEVAA

SEQ ID NO: 276028 - protein, 426 aa, unidentified
MRVLYDRVAAIDVHKDMVKVAIRVPGAKRGTRKTDVLEFRTFYGVLQAMARELRGRGVTHVVMEASGVYTDPVYYALRELDFAEVMVINPAHAKALKGHKTDARDAIRLLDLYECGLLSGSYIPDPDLREVRDLARYRMKTVQARTSEIQRLQKTLETAGIKLSSVVSDVTGGSATAMIEALISGERRGSVMAGLAQTRLRTAGKMADLSMALTGRFTDHHALMCRLHRDRITIFDDAVQDLDAKIAPLVARYAREAELLKTLPGFGDVIVAGWLGAIGPAPHQHFATASRLASWATICPGNYMSARKSKGGRTGDGGAYIKPLLIQAAWAAVRVPGRLQARFRRLVRKFGGPRNMGAQKRAITAIAHTLLKIAYGVLKTGKPYADLGADFYTRRESPDARQDYLMRQLRKLNPGCVITITPAEAA

SEQ ID NO: 276029 - protein, 376 aa, unidentified
MNKTEIYIGLDVHKETITAAVAEGGRAGEVRQAGTITNDLHALEKLLRRIRGDRERTLHVCYEAGPCGFVIARRLKQFGVSCVVVAPSLIPKKPGDKIKTDRRDAEKLARLLRAGDLSPVYVPDSTDEAIRDLCRARTDAVDDRTRARHRLKSFLLRNGFRYTAKSTWTPAHMRYLRELVLPHPAMKVILEDYLCAIDAANERVNRCEEAMGDLLVSWQLRPAVEALMGFKGFKIVAAMITVSELGDIHRFAHPRQLMAYLGLVPTEATSSDKRKQGGITKCGNPHARWLLVECSQHYDTPPKVSKELSMRQAKLDRRAKEVSWRAQNRLHSRFNRLRGRRLQRNKAMTAVARELTGFIWELLRELSCYTKVANAQ

SEQ ID NO: 276030 - protein, 416 aa, unidentified
MNEPCWFVGIDWASKTHRVCLVDAQGDRVQERDVPHDGAALNELCTWLLQTIGALAGEIAVAIETPRGPLVELLLERGFQVFALNPKQLDRFRDRFTVAGAKDDSRDAYVLGHSLRTDRQAYRRLIIDDPQVIQLREWLRMREELVQERIRLTNRLRDLLWRYYPQAAELATDVADNWFLDLWELIPTPAEAQCVNEKAVVRILKSHRIRRLNAAQVLSVLRKPPLTLAPGTVDAAAAHIRPLVARLRLINQQAKEAEQHLDQLCDAIEAAQTTSGKVCEQRDSAILRSCPGLGRINIATLLTEAGEPLRRRDYQVLRTLSGVAPVTRRSGKSKIVLRRHACNNRLRSALYHWARVAMQHDPVSAKRYQQLRSRGHSHPRALRGVGDRLLQLLCTLLERQTLFDPQRRQAMALNAA

SEQ ID NO: 276031 - protein, 485 aa, unidentified
MKAQRAKAYRRSHRHQSGPIRPAASMPVVNPHAAGIDLGATEHWVCVPEDAVPEGQANVRAFGAFSADLDQLVEWLRACGIKTAAMEATGVYWVALVQKLEQAGIEVVLANARHLKHVPGRKSDVKDCQWIQQLHSYGLLNGSFRPTQDICALRSLLRHRQNLIESCGREVQHMQKALQQMNVHLHHAVSDLVGATGLRILDAILGGERDPQQLVQLRDEQLCTKTTREELEKALAGDWREEHLFVLRQALATYRHLLNQVLECDAQIEQALVQVIIPPPAPLESPIPPNPKAKDGAPAQTKKKRFHRLKTGTSLKRDLTPELKRVCGVDLTQVIGLNVLSVLIIISEIGLDMSRWRSAKAFCAWLGLCPGNKISGGKVLDSRTAHVINRAAILLRTLAPRIGKTDTWLGIFHRRMRARLGPAGANTATARKLACLIYHLLKYKEDYIEVDHLVFLEKIRKQRVVRLRKQAQELGMQLTELQQAA

SEQ ID NO: 276032 - protein, 320 aa, unidentified
MRNTVGLDISKLTFDATAMVGNAEYSAKFDNDSKGLNQFSDRLKSLGCQNLHICMEATGSYYEEVADYFAQYYSVYVVNPLKISKYAESRFKRTKTDKQDAKLIAQYCRSAKESELVKRQKPTDEQYRLSRMTAAYAQIKSECAAMKNRHHAAKDEEAAKAYAEIIKAMNEQLEVLKEKIKEQTEKPNCKEGVKRLETIPAIGRMTAAVLFHHLTSSKFETSNKFAAFAGLSPQQKESGTSVRGKGKLTKFGNRKLRAVLFMPAMVAYRIRAFPDFIKRLEEKKKPKKVIIAALMRKLAVIAYHVHKKGGDYDPSRYKSA

SEQ ID NO: 276033 - protein, 342 aa, unidentified
MVSAVTMGLDLGKSVFQVHGVDAGGAVVVQRRLTRGKLLGFFAKHPACLVGMEACAAAHHWGRELRKLGHAVRLMPPNYVKPYVKRQKNDAADAEAICEAVGRPNMRFVEIKTCEQQGTLVLHRVRLMLMRQRVQLSNAIRGHMAEYGLVAPVGRNGLQRLIAILGNPDDERVPEVARTSLAPLVCQFGLVNEQVLENDRRVRSSARSTELGRRLMEVPGVGPVLASAMVATVPDPTVFKSGRNLAAWIGLVPRQNSSGGKEKLGGITKQGDRYLRQLLVAGALAVIRYAQRHGTKRPWLVRLLARRSPKIAAVALANKMARMIWAMMMTGERYRDPVVAAA

SEQ ID NO: 276034 - protein, 368 aa, unidentified
MNCTQNKKIEQVKETTMIVGIDVGSEKHYFRAFNWRGIELTRKPVAFSNSMEGFNSFYNTIVELMQKSELEEALVGIEPTGHYWFDLGQFMGEKDIKFVMVNPHHVHKTKELDDNSPSKNDRKDPRVIAGLVRDGRYFYSYMPTGAYAELRNASNRRFVLVEEQTRAKNRLQKWIAVYFPEYKGIYTHIDAKGGMLVLKKAPTPEEIVRLGVEGIIKIWKDAKLRGNGHKKAMLILAAAMRSIGLKAGLTEARMEIQDLIEDYELQTKRLERVNDLIKELCQQIRYADKLLEIKGIGITTVAGFIAEVGDITRFDSTKELQKLAGLELVADSSGKHNGKTKISKRGRKRLRYLLFEAAISVVGKNEEF

SEQ ID NO: 276035 - protein, 339 aa, unidentified
MQLYAGLDLHSRNTYIGIMDKEFKRVFNKRVVNKLALILETLKPFQDQLKGIVVESTFNWYWLIDGLMDAGYDCLHLANPAAMKQYEGIKHTDDQHDAFFLAQMLILGILPQGYIYPKEDRPVRDLARKRLFLVRHKTSHILSLQSLIARCSGQRVSANEIRKFTVEDLQQLLEQEYIVLSARANLDTIVFLKQQILLLEKAIQKKVKLSKSFQQLLTVPGIGLILAMTIMLEVGDIGRFSQVGNFASYSRCVSSQRLSDGKSKGHGNRKNGNRYLSWAFTEAAHLSRRYHEPFRSYYNRKVAQANTSLATKALSNKLARICYYIMRDQVPFRTELLSH

SEQ ID NO: 276036 - protein, 406 aa, unidentified
MSIYMGIDWSQDKHDVAFMNAAGAIIARLTIPHQPDGFRKLETTRQRLAVTAADCLVGLETAHNLLLDFLWDHGYQQIYVIPPLVVKSSRGRYGHSGARDDTLDAQLLADLLRTDRVRLHPWRPDSPLTRQIRARVGFLTFLKHAAIRVHNRLQAVLLRYYPQALELFSGLMIPTTLAFIAAYNTPQALAALSYEAFANFAQQQGYWNRQGLLACYARLQQTPLQASPATVTAYQDEARLLAQQLRELILAKLQVQRALNVLFVQHPDKAIFSSLPGVGAFLAPALLAKLGDDRERFPSSATLQALAGTCPVTIASGKRKRVAFRHACDHEFRQIAQQWARCSLRKSVWAVAYWQQIRPRCASDHDAYRRLANRWLAVLWKLWHSRELYNEAYHLQQRRLRSQPLA

SEQ ID NO: 276037 - protein, 386 aa, unidentified
MQKLNDLSRSLTALELDSTLIAVIEMSLSNWLVAGIVPGIERQPLKKLAVDESALLKLLHRWREEAEKAGRRIERTAVAFEAGRDGFWLARWLKAHSIEAHVIHAASVAVSREHRRAKTDRLDSELLKRAFLGWLRGERDHCKMVAIPSIKDEDAKRPNRERESLVGEQSRIVNRMKAALIRLGIRGFNPKLKRAAGRLDGLHTPEGEPIPPNTLAELRRDMERRRLVSNQIRQIEEARLERLEQAPSDGPHAMVRLLARVIGVGIETADMLVQEVLSRNMRDRRAVARYAGLTGSPDESGRKCREKGLARSGNARVRRGMIQLAWRLLMFQKNSALAQWFRARTENARGTRKTMIVALARKLLIALWRLVRQGVVPDGVVLRPAQ

SEQ ID NO: 276038 - protein, 407 aa, unidentified
MRLYIGIDWSQSKHDICFLNPAGSTLAQLVIPHTQEGFWQLEEIRQKLGGTVENCLLGLETTHNILLDFLWDRGYTQLYILHPRKVKSSRGRFRQSAARNDPSDALLIADILRTDHPRMHPWQPDHLLTRQIRAKIGFVSFLTRRIVGLTNRQRTLLLRYFPAATELFTTLKAPIAQYFIQAFPSPQAAASLDLEQFQAFVRQHHYVHYHKLPGILATLQQPYPQAAPEIILACQQEAQMLAAILLQMIAAKKTMLREIKSLFAQHPDREIYASLPGTGDYLQPALLSKFGDDRNRFPTPSRVQALAGTCPVTISSGKRKRVQFRKSCDHEFRHIVQQWARISLRHSVWANAYYARIRPHCDTESHAFRCLANRWMAVLWRLWQDQIPYDESYHLSQRALRSQPRAA

SEQ ID NO: 276039 - protein, 367 aa, unidentified
MKKISTAVAKQIRNCSEQKLTIGFDLGDRTSWYCVLDESGAVLLEQKLSTTAKAMREVFGAMPRCRIALETGMHSPWVSRQLSELGHEVIVAHARNVRLIGESRKKDDRLDARTLARLARIDPQLLCPVKHRSAKAQADLTVIRARAGLVRSRTALINTARGLTKSYGERLRGCNPRNMNPEKAEGLSPELQAALEPLLAAIESLSERIYEYNQQIAKIAKESYPQVARLEQVKGVGTLIALTFLLTLEDPHRFRKSRDVGCYVGLQPGRRNSGQSEPQMHISKEGDPYLRTLLVQGAHHILGPFGADSDLRRWGLKLAERGGKNGKKRAVIATARKLAVLLHRLWVSGEAYEPLRNSHPITMPAAA

SEQ ID NO: 276040 - protein, 340 aa, unidentified
MDATTYGLDVAKRVFQMYWVEAETGEILNRRFVRDELIRFLAQRPPGRVALEACGSAHWWARKIKALGHEVVLLHAKFIRPFVQTNKTDAADARAIWTAVQQPGMRTVAAKTEDQQAMLSLHRMRALLVKFRTMQVNQLRGLLYEFGATFRAGRAAGLAEIRARTAELEDSLPGTMMCCLQDQLRRIEELQRDLDLLEKRIGVWQKQDAACHAITAVPGIGRLTATALVATMGDPKAFRSGREFAAFLGLVPRQSGTGGKVRLGPMSKRGDPYLRTLLIHGARSVMYHAKVPTPWQTDIQARRPANVAAVALASKIARTAWAILARGQEYQRNYVSVRPA

SEQ ID NO: 276041 - protein, 318 aa, unidentified
MNIIGLDISKDTIDATLHKTNGSIHYIKFKNNDDGLKQFRLWIKGNRIRKVYIGMEATGIYYEKAADMLSSYYTVYVINPLKINDYGKSRFNRTKTDKADSNLIADYIKRHQDTLIPYQIPKNKALQKLINLKNQLHQHQKQIKNRLHSTEEDFIRNIHQDLIDTIQDKMEQVKIAISEQIKKQTDNNHYRNLQTIPSIGKDTASVLYAQLTEKHFKTANQFVSYAGLNPAIIQSGTSVRGRGRLSRYGNRRLKSTLYMPALCAYRFNAFPKLINNLKKAGKPKMVIIVAIMRKLAKLAYYIVKTGQPYDAERHRLNQ

SEQ ID NO: 276042 - protein, 356 aa, unidentified
MAIVANTYAYVIGVDAHARTHTFVAVASRTAAVLATSTFPATAAGIRRALAWVGRRTGGDLATLVVIEGIGSYGAKAARAATEAGYAVAEPGPVAPALRRGAGKSDELDAELIAKSVLGVEAALLRWPRREEGIRAAVRVLVVARDELNVERTRAINALTALVRTVDLGVDARGPLSKKQIATIAAWRARREELATATARREAIRLARRIGTCDEELQDNRRELTALVEASEAAHLLKEPGIGAINAAVVLTAWSHRGRIHSEAAFAAITGTCPIPASSGNTTRHRLNRGGDRRLNRALSSIALTRMSHDPATRHYVTRRRAEGRTTKEIRRSLKRYIARQLYRRLTSPPAQASRA

SEQ ID NO: 276043 - protein, 417 aa, unidentified
MRRVVMEAIYPCVAGLDVHQKVIVACRRRLIDQGQVESEVERFGTTTRELQRLAAWLTDWSVRQVAMESTGVLWQPVWNVLCEQFELLLVNAQHLKKVPGRKTDVTDAEWIGQCLQCGLLRGSFVPSEQIRQWRDLTRQRTKLLDQRTSVINRIHKTLEGCNIKLSTVASDVMGVSGRAMLRALSEGEQDAGKLADLARGTLKNKYAELVESLEGRVSEHHQWMLQHLLKQVVFLEEEIAAYDRRLEELMRPFEAALERLDTIDGVGRRTAEVLLAELGPEMAQFPDADHLASWAGMSPGNHESAGKRKPVRTPGGNKWLRRALIEAAHAGGRKKDSYLAAQMNRLTIRRGKKRAAVAVGRTILIAAYHILKEEVEYKDLGGEYFARRDAENTKRRLIKQLEQIGYQVELKPLAPAA

SEQ ID NO: 276044 - protein, 363 aa, unidentified
MSATTANTSPAAAAPGLILALDLGKYKSVACLYDPATAQARFDTLTTSRDELRKLCARHRPAVVVIEACALAGWVHDLCAALGLPCRVANTASEAWKFKHTKRKTDKDDALRLAQLQALGQLPTVVLPPKQTREWRALIACRQALVGRRCAAQNRARAVLVGQGLPAPRGAKAWSAAGLEGIARHAKPLAECAPDELRRGLLESALTEYRQARELIEQAEAKLDALAKADAGVRLLETIPGVGPRTAETVVAYLGDAGRFANGKQVSAYGGLVPRQYQSGDTDHKGRITRRGPALLRKLLVECAWVMLRYNPWARAVYARLSQGKARKKQAIVALARKLVVRCWAMLRDQAPWRDSVPAAAPA

SEQ ID NO: 276045 - protein, 424 aa, unidentified
MKEEELEKPIRAWIGIDWADEKHDVSLYEVATGKQERSTIRQSPEGLQEWLGQLRSRYESGYVAVVLEQGRGGLLNALMGCEFLVLYIINPKSLSSFREAFYGSGATSDPVDAELMRDMVRQNPSRFRAWRPDDVLTRSLRLLTEGRRNLVNQSTALTNQLTALLKGYYPQALAWIGTLDTAMACDFLEQWPTLQSLQVSSRRQILRFYEKHPRASLDLDEQLKEIQDARALTRDEAVLESSALMVQALVSQLRPLLLSIAAFDRKIALIFRKHPDRPIFESFPGAGAALAPRLTAAFGTDRDRFQAAKEMQQLAGIAPVTEKSGKKRFVHWRYACPKFMRQTFQEFADHSRRWCRWAKAHYELLRSHGKGHNAAVRVLAYKWIRILFRCWKDRQPYRDDVYTKSLLNHGSPLASRLAESVENP

SEQ ID NO: 276046 - protein, 351 aa, unidentified
MPRSSAVHAVTTLGIDMGKNTLHMIGLDTRGGIVLREKVSRGRITSRLANLPPCLIGIEAGMATHYVARELAALGHDVKQVPPTYAKPFRQGHKNDFRDAHAVAEAVQRPTTRFVPAKTNEQLDLQALHRVRSRLVSERTAVINQIRGFLLERGIIVRQGLRFLRQALPDILAKRTDVLSPRMVRMVADLASDWRQLDERIEAVTDEIKTLAKSDDSCRRVMTVPGIGPIISSAMVAAIGNGAAFARGRDFSAWIGLVPKQMSTGDRTILGRISKRGNSYLRTLFMQAARVILLRQASWPKHGFGIWLARAAQRLHPNVLAAALANKLARIAWTVLAQERSYEARIMKAAA

SEQ ID NO: 276047 - protein, 357 aa, unidentified
MEKQLKQSLGIDVSKLNLSLSLGFLSERLVKEFKSHPDVSNEEPGYRELLKWLKKSVDSTVDLLIVMEATGVYHQGIAHYLHGKGYAVCVMQSGRVKRYAQSLDQRSKTDALDSRMLSMLGLERSIRLWQPPSKELQQLKALSRERSSLLKDRTIETNRQGAISSSVYSNAKALKRHKNRLKLLECQIALIEKEMQELISKNEVLKQKIGFLMSIPGISFISAATVIGETLGFESIVNAKQLASYAGYDIVLRESGNFKGKTRISKRGNSHIRAALHMPSMTCVRCNPTLKHFYNRLKPNKAKPLVALIAVQRKLLILMYTLWKNEEVYDAGFETKKQQKNETLAARDNSLINQPIS

SEQ ID NO: 276048 - protein, 409 aa, unidentified
MNINPSPPHLQVAVDIGSREHYVAIGLSEGKILDEFSITHTPTGFDDFFRRIELQKHLYNLPVDVAMEGYNGWARPLDAQVQMHGYQLYNVNNLKLARFKEIFPAPAKSDLIDAHKMLELFQLQDHLPLAKGVLQAVVLVPDANRRLKRLSRRRRRQLTNEKIALQNRIQPDLQAICPTLLDITGSVDNLWFLHFLTCRDDLVKLIRLQTKSLLAIQGIGKRYLNPIRDWQKQAVFSNEVDEVGPMIQEDARRLLALMTSIKAIDTKIDQQIQQSADAQHIDSIPGFGRVCSAELAGEIGTLERFAKQSSFSIYIGMAPLDNQSGAYQGTKSPKHVNTRARKAMMTAVCRHMVCVPESRAYYDKKRFEGQTHNKAIRALGRHMSRVIWSMLRHDRDYELPAQVQLKEVA

SEQ ID NO: 276049 - protein, 352 aa, unidentified
MNAMTVAVDLAKDVFEVAVANRAGRIVERKRLTRRHFAHFIDALPAGTTVVMEACGTAHYWGRRCLAHQLSVRLLPPQYVRPYVRRNKTDRSDVEGMLEANRCGGIHPVAVKTVEQQTLQALHRMRAQWQATRTARLNAMRGVLREYGVPLAAGARTALKRIPLVLADPTLGLPAEVSAILALLLEDVRSLEARVAAIDQQLARVAREHPIAQRLQQVPGVGLITATAFVGAVGHIHSFRRGREFASWLGLTPRESSTGNRRRLGRISKRGDVYLRCLLTHGSRAMLLGAQRAVRTTPDRATAFQHWAVALMTRRGHNKAAIAIANKLARVIWAVWHRDVDFDPQAPCRAVA

SEQ ID NO: 276050 - protein, 341 aa, unidentified
MSIKRILVNTIDTDLEYEVIGIDLAKNCVSAILLTTDGEIFGIDRLDYQELEKSAQELSPTIFAMEPCTEMNYMVQKLEDWGHHCIVISGKNVKDYVESHFSNQKTDLNDAQALAFLTKDTQLRTVKAKDPEQLKYASLTTLREQYVKQYRQTMVSLKGICQVWGLSISKGISGKARLKDMIENHAAFPAELRTALVGMVAHAQAVQKDLKSVTKILEELAKKDKACQLIQTVPGLGTICSCRLRATVGDIQRFKHPKDFPAYYGLVPRSMATGHNEKKGKITHRRDKTMRSLMVQRAGIVINQATKGNLNSKQLTKWILKKQKEKMPWGKLVCAVTAKLL

SEQ ID NO: 276051 - protein, 339 aa, unidentified
MLYVGIDIAKNKHDVTALNVPGKTVLKPLTFSNNKAGFELLDLSLRQLNQDCLIALEDTGHYAFNLLNFLHEQGYKVYTYTPLLIKEFAKSLSLRKTKTNKKDAHGIALKLLSDPNREQFQHDNRQVELKILARHIHRLKKKQSDWKVQYTRCLDIIFPELDKIVEKHSEYTYQLLTCYPNPQKRLEAGFDKLIEIKRLTASKIQDILSVAPRSIGTTSPAREFEIIKHYKRLIDKAETCVNDLMAEFNSVITTVTGIGNRLEAVILAEIRNIHAFDNPAQLQAFAGLDSSIYQSGQIDLAGRMIKRGSPHLRWALIQAAKACPRFSPAFKAYLKTKLE

SEQ ID NO: 276052 - protein, 350 aa, unidentified
MIIIGCDYHPGVQQIAWVDTETGEFQETRLQHREAAEQFYRELAMRGVQVRLGMEASGQARWFERLLAEWQMELWIGDAAEIRARRVRKKKTDREDARHILRLLVEDRFTRIWVPSWENRDVRQLLWHRHRMVQMRTRIMNQLQAVALNEGLRCKKRLWGEKGRQQLESFPLATWGSRRRGDLLELLDRLNPTIAELTRAIEAEVAKYPAAQRLMTHPGVGALTALAFVLIIGEAERFQCGKQIAAYLGLVPEEKSSGESRRLGHISKQGNGLMRFLLVEAAQVTVRSDGEWRSKYFHLAMRRGRKIANVAMARRLAVRLFWMWRKQWDYEQLKKFGPHAGQPGMSEGVK

SEQ ID NO: 276053 - protein, 333 aa, unidentified
MEKKWFIGIDISKKTLDVVIYVPTKKHADETNYERFLNKEEGYKSLLCWLKKKNMAKKRLVISMENTGIYSFDLCLFLEAASIDYCSFNPLHLKRSLGLVRGKNDRVDAERIAYFAYLQRDELSYSKLSGSSIIRLRDFAAERKRFVKQQAEYKGFLTDRKDCEMTSTIERAAHMVKILDEEIASVEEEMLQIINSDPSILRNYELLNSIKGIGTINAMNTIIHTNNFQAFETARQYACYLGIAPFEHSSGTSIKGKTRVYPTGAKLLKADLSQAANSAIVWDKEMKEYYERKRKEGKAYGVVLNAVKFKLVGRMFAVVKRGTPFVELMTYKK

SEQ ID NO: 276054 - protein, 365 aa, unidentified
MDQTARGEIIRVGVDLAKRVIQVHAVDSLGRVIVAKALTRERFTAWCAQLPPKVLVAMESCGGAHHWARKLAAMGLQPRLIAGHFVSPYRMEGKRGKNDANDAAAVCEAASRPSMRFVPIKTVDQQALLAVHRLREGYKEERTACVNRIRGLLTEFGFVFAQSPDALRLALPEVMEDAINELPAIARLALQRAQLQWLELDGHIAWCDERIAVHVRNDEQARVAVKLCGIGPVTASALVATVGDFRQFKTGAQFGSWLGLVPTQNSSGGKVSLGCITKRGDNYLRTLLIQGGKSAVMTAHKRQDRTSRWLVQLLARVGWQKAAVAMANKNARILWAVLAKGRRFDPDHISIKPEGPAMVVPTMAG

SEQ ID NO: 276055 - protein, 589 aa, unidentified
MPVTCAAPLDRIGVGIDTARYGHRVSFLRPDRQPAAKPLTVLENHDGYQALQLRLEQLHQQHPQAHFQVRIDAAGQYAANLEHFLRGLALPLTISIGEPKRNKDYQKAHFPKRTTDDTESQAMARFAVVEQPGATLPVPPPLGLLREVVARLQAQVKQTTQAVNRLHNLMARAFPELATVADDFSARWVLELLDRYPTAQRLAAAHRRSIEQIPYLPGEQAQPLHQAAKESVASLRGDVAEALVQEAVTQVRHSLCHEEKLRKLLEDAFAELPPSGHVQVPTIPGVGTATAAVLVAKIIDIERFMTPEHLVGYFGVFPEEDTSGVDKHGQPLPSGTMRMSHKGNDLARAYLWNAARSASQHNPAVRALYRRLRAKGKRGDVALGHCMRKLLHLVFAVWKTNRPFDAKHFPWEPTSNRPPATPTPTPPPAAADAAEAASNNKAVGHKQAAPAQTVVTTASAKVEEAAMPVNPPPPVPPRPQVDFAFLRKQITMEQVLRHLGLLEGLRGRGQQLRGCCPVHAPARTKEQTFSVHLGKNAFQCFQAECGAKGNVLDLWAALRHLPLYEAALDLAATFHLRVNREEEPVGGTR

SEQ ID NO: 276056 - protein, 344 aa, unidentified
MTYYTGIDVSLRSVSICVVNDKGEVCFEAKVAAEIATIVECLHRFDRDVKSVGFEAGTLTQYLTYGLQAAGFEVVCLEARQVSVTLAAMRNKTDRNDARRIAQILRTGWYSHVHVKSLHSHQVRALLASRKVILKKCVDLENELRGLLKVFGIRLPSRVGHGAFDTELRETVSGDEMLACALVPLMDARTVLYKTYLKLDNAVKGLVCADPICRRLMSIPGVGPVTALTFKAAVDDPSCFKSSRTVAAHFGLTPRRFQSGEIDNPGHISRAGDADVRSALYVAAHSLLTRNAQWSSLKSWGVRLAKTRGHRRAVIAVARKLAVILHRMWLDGSEFRWGSVPTQA

SEQ ID NO: 276057 - protein, 354 aa, unidentified
MKITTIGIDLAKNVLQVHGVDAHGKVVLRKQFKRAQVAEYFVKLTPCLVGMEACGSAHHWARLLQGLGHTVKLMAPQFVKPYVKTNKHDVADAEAICEAVGRPTMRFVPIKTAEQQAILTVHRARQGFVKARTAQANQIRGLLAEFGVVLPQGIRQVLQHLPGVLDRTLPALPGSLCELLKRLHQHLQELDRQAGQLEQEIGRWHKQSESSQRLAALPGLGPLSASALVASVGDAHSFGNGRQVAAWLGVVPRQASTGGKIKLLGMSKRGDCYLRTLLIHGARSVVRQATLHPERADPWLRKLLGRRPKNVVAVALANKNARIAWALLAHGREYQRGFRSTPPPQVTAATPTAA

SEQ ID NO: 276058 - protein, 364 aa, unidentified
MLIIGCDYHPGFQQIALVDTGTGELSERRLEHREQAEKFYRELKQKNPAVRVGMESSGHSRWFERLLHELGFELWIGDPAEIRTKRVRKQKTDRQDAQLILQLMLENRFPRIWVPDAENRDLRQLLWHRHRMVQMRTRVMNQLHVVPLNEGLRRKKALWRPAGRAELESIALAPWASRRRQDLLDLLDQLTPKIQELTRALEEEVEKRPVTRLLMTHPGVGPLTALAYELVIGTPERFPCGKQLASYIGLVPEEKSSGDRRRLGHISKQGNVLLRFLLVEAAQVTVRSQQEWRNKFFHLAMRRGRKIAKVAMARKLAVHLYWMWRQGRDYGQTQKLGSHAGEPGNPDGVQSITDVMIGHPAPSK

SEQ ID NO: 276059 - protein, 338 aa, unidentified
MENIFVRCAGLDVHKESVEACVRRIEPNGCVHSETRHWGTMTRDLLEMADWLAAKGVTNVAMESTGVFWKPIFNILEIRFTVLLVNARHLKQVPGRKSDIRDCQWIAQLLQCGLLKGSFIPPRAQRELRDLTRHRTQLVEEKTRTINRIQKVLEDANIKLASVASDVIEEHTRPFAAEIEHLDTIPGVDHRVAEVLLAEVGPDMKPFPSDEHLSSWAGMCPGNEESAGKRRRRRITPGNRWLKQTLAQAAWAASHAKNTYLAAQYRRLASHRGKKRALIAVGHSILVIFYHMIRSGASYADLGADFFDRLEPERLTHYYVKRLERLGYTVTLESSAAA

SEQ ID NO: 276060 - protein, 370 aa, unidentified
MLDTTTFVGLDVHARSIKAVSLDVMTGEVRCATFGYDAGAVAEWVRSVDPKAKCVYESGVTGFDLQKRLSGLGVDCVVGAVSKMIKPSADRRRKNDRNDAEFLARMLSVGNVVEVWVPDDECEAARDLTRALEDARDDLSRSKQRLSKFLLRHGLVFDERTPTGRRKGNWTRAHWSWIESIRFAEGADNDVLAYYVDAVRRAAEEKARLEGLVEAEARKPRWRRRVDSLRCLKGVDTATAADLVFEAGEFSRFRNARSFAAWVGLTPSEHSSGENDRRGAITKAGNKHLRKALVEAAWHYLTCSARPKDPARGQAPDPGARRHAAKGVRRLAERREALLARGVHGNKANVATARELACWVWAVGLMAEEA

SEQ ID NO: 276061 - protein, 309 aa, unidentified
MTANQKFSRFIGIDVSKAKLDIYDDATGEFLTVENTAKAIEKYVSALSPDPELLIVVDLTGGYEALCVNTFYNRGFTVHRAEGRRVKAFMRSYGEHAKTDRIDAYALALFGRKLHETLRMYTPLPLNLKPVTERISDLKTMLLQEKNRSTAPSLPADMKKEIVRHIAYLEKEIERLYQKCLDIIKNDPPLAEAFYKIIAIKGIAEKYAVLLLTTLPELGCANRRQIAAIAGVAPYAKDSGTLSGYRRIRHGRTTAKSALFIVTLVAIRHNAQIKEFYERLLKKGKSKMTAIIACARKLLIIVNATLKTC

SEQ ID NO: 276062 - protein, 372 aa, unidentified
MNYNTVYVGMDVHKESFTLCAYTIDAEKGSHFQRTEADYKNVLKYLEFLRTVYGNDANFICGYEAGCLGYTLYHQLTEHHVNCVILAPTTMLEQRSKRRIKTDRRDAEIIGKCLAQHNYSPVHIPTATDEETKEFLRMRDDHKLALKKVKQQILAFCLRHNYRYDGNSHWTAAHIKWLKSLNPEALYKEILDEYLLTYTTLSDKVERLDKRIEELASKDEYRESVKKLCCFIGIKTHTALSVLVEVGDFQRFASAQNFASYLGLVPGEDSSGDGQTRLGITKAGNRHVRMLLTEASQCYARGQIGFKSKELKSRQAGNSPQVIAYADKANERLRRRYYKMVLGKSKKHNVAKTAIARELACFMWGMMTEHIA

SEQ ID NO: 276063 - protein, 485 aa, unidentified
MALVFAVVLGLLILEVARSRRKPNPTSPDPASLALLHTLHPHAAGIDVGAAELWVCVPPGAVSIPRPPTVLPAHVRRFGVFTADLQAIAAWLHQCGVTTVAMESTGVYWIPLYDLLEQAGFEVLLVDPRQVQRAPNRPKTDVHDCPWIQRLHSLGLLTAAFRPEEPIRVWRSYQRHRASLIEDAGRHLQRMEKALEQMNVKLPEVVSDLTGLTGMRIVRAIVRGERDPKALAKLRDHRCKASAETIARALQGTWQPEHLFALQQSLALYDYYHEQIRDCDRVIEAHLMGMALPEVPPLEPKRRSRRRKDNEATFDARQRLHHVAGVDLTAIEGIEESTALVVLSEVGTDMSRWPSEKHFGSWLGLAPNPKKSGGKMKSSATRPGVNRAAQALRLAAKNLQRSHSALGAFFRRIAARRGLAKAITATAYKLARIIYAMLKHGMAYVAQGLEAYETAYRERVVRQVKRKAVALGLVVVERDAGVQPS

SEQ ID NO: 276064 - protein, 346 aa, unidentified
MMIIGCDYHPSWQQICWMDTVTGETGEKKLEHASGEAEKFYRGLSVPALIGMESTGNCQWFVEMSTTAGHDVWIGDAARIRASDSRQQKHDRRDAALILKLLLEGRFPRIWTPSGEEKDLRQLLIHRYKLVRIRAQVKNELQHLAMNQGITKKRRLWSKAGEKVLRELPLKPWASRRREDLIKVREMLSTQIGLLDQAVVEVAEKNEKARLLMTQPGVGPITSMAFVLTMGDVNRFQRGKQVASYLGLIPREYSSGGHQRFGSISKQGNRFMRMLLVEAAQVAVRCDPGMRSEYLHRCHRKAKGVAKVAAARKLAIRLYWMLRTNTGYPGVVRVEGSPRVPLVSVS

SEQ ID NO: 276065 - protein, 357 aa, unidentified
MGTISLGVDLAKCTFSVCEMEGDTGRVLRRREFRRDAFAAWLAQLPAGTVVAMEACSGAHHWARRCREYGLVPRLMAAQFVRPFRKNPLAKNDPNDAEAIATAARQGNMRFVPVKDIDQQARLSWHRVREGYKAEHLAIGNRLRGLLAEFGVVVPHRDAALHRVLGDLDAYVELPGEFKELLRSLAEHWGQVRAAMAACDARIERHACQDDRCLRLRAVVGVGPLTADAMVASIGNAREFKNGRQLAAWLGLVPTQHSSGGHARLGAISCRGDGYLRTLLILGARSSLERAKRVGVDKATPEQAWIRSLACRMAFGKVIVAIANKHARQLWAMLAHDLDYDPQVGLKHPMQQQRTAA

SEQ ID NO: 276066 - protein, 422 aa, unidentified
MPMKVVYQTCCGVDVHKSFLVATIIKTTSGVQPSYQKKRFSTFNNSILEFKKWLLDNSCRDICMESTGKYWIPVFNLLEDEINVTIANPKWVKAVKGNKDDTKDSKWIGDLFRLGLVPGSYIPCKEIRILREFTRYRYKLTSCRSSEKNRFQNALTVCNVALDSVVSDIFGKSATSVIDYLLEQSDNSINHEEISSRLLRSLKKKSESVIESIEGYQMTDSQKYRMRLVHAHMDYITSTISDIDSMINSLVEPYDNAVKLLCTIPGVDRNSAITIISEIGTDMTQFSNSKRLCCWAGLTPGNNESAGKKKSVRITRAGVYLKPALVQVAHAAVKSDKSPYYKAKYERIMKRRGKKRAIIAIARMILTAAYQMLSTGEVWNPIDLYKIDMPASLREKQKEKAIKQAKKLLIAEGIVTEEQLAS

SEQ ID NO: 276067 - protein, 334 aa, unidentified
MQNITLIGIDLGKHSFHIHCQDKSGKALLRKKFTRTKLMQFLATCPPSVVVMEACAGAHFMARCISDFGHETKLISPQFVRPFVKSNKNDFVDAEAICEAASRPSMRFVQPRTETQQAMRALHRVRESLIRDKVKTTNQIHGFLLEFGISLPIGDAVIKRLSLVLAEHEIPEYLSRLLVRLHTHYLYLVEQIAELESELSQSINADDTAQRIMTIPSVGPITASLLSSQLGDGKQFSCSRDFAASTGLVPRQYSTGGKSTLLGISKRGDKNLRRLLVQCARSFIMRLERKHGKLAEWVREQLNKKHSNVVTCALANKLARIAWAITTQKKEYQA

SEQ ID NO: 276068 - protein, 453 aa, unidentified
MLKTSSSMPQNLTRMNPGAAAIDIGSTMHMAAVNPDCAELPIRSFGTFTHDLHDLAAWFRSCGVTSVAMESTGVYWIPAYEILEQHGFEVILVNARYAKNVPGRKTDVSDAAWLRQLHSYGLLRGSFRPNAQVATLRAYLRQRERLVEYAAAHIQHMQKALMEMNLQLHHVVSDITGVTGMKIIRAIVSGERDPDVLASLRDVRCHSSVETIRASLIGNDRDEHVFALSQSLELYDFYQAKMLECDRKLEVSIASMTVDREAPLPPLPKVRTKTKQTNAPSFDVRAALYGLTRTDLTQIHGLGSSLALKLIGECGTDLRAWPSAKHFTSWLCLAPGNKISGGKVLSSRTRRSSSRAAALLRLAATTIGRSDTALGAFYRRLAGRIGKQKAVTATARKIAVLFYNALRFGMVYRDPGAAAYDERHRGRVLANLQRRARSMGYELAPITAGDCVS

SEQ ID NO: 276069 - protein, 370 aa, unidentified
MLDTTTFVGLDVHARSIKAVSLDVMTGEVRAATFGYDAGAVAEWVRSVDPGARCVYESGVTGFDLQKRLSGLGVDCAVGAVSKMIKPSADRRRKNDRNDAEFLARMLSVGNVVEVWVPDDECEAARDLTRALEDARDDLSRSKQRLSKFLLRHGLVFDERTPTGRRKGNWTRAHWSWIESIRFAEGADNDALAYYVDAVRRAAEEKARLEGLVEAEARKPRWRKRVDSLRCLKGVDTASAADLVFEAGEFSRFRNARSFAAWVGLTPSEHSSGESDRRGAITKAGNKHLRKTLVEAAWHYLTCSGRPKDLAKGQAPDRGARRHAAKGVRRLVERREALLARGVHGNKANVATARELACWVWAVGLMAEEA

SEQ ID NO: 276070 - protein, 317 aa, unidentified
MTVVGIDVAKASLAVALRTPTGRVRQKQCPNTPAGHAELLRWLRRQTDDAVHVGLEATGGYQDAVALALHDAGHTVSVLNPAALEAYSRSQLRRAKTDPTDAALIADYVRTQVPPGWSPPPTEMRQLQALVRRLDALLGMRTQERNRLEPAAAIVRPSIEATLTHLEAAITGIKAQIAAHIDQWPTLRQSRDLIVSIPGIGATTAAIILGELLQVTRFASARQLAAFSGLVPHVRHSGTSVRGRGTLSKLGAGRLRKALFFPALVAMRYNPVLRPFAARLRAAGKPPMVIVAAVMRKLVHQIYGILRSGRAYDPAHA

SEQ ID NO: 276071 - protein, 350 aa, unidentified
MIIIGVDFHPGSQQIASVDSDTGEFEEKRLAHREEAEKFYRDLGSRGAQIRVGMEASGYARWFERLLAELQIELWIGDASEIERKRARKQKTDREDAQHILQLMLQDDFPKIWVASWENRDLRQLLWHRHRLVHARTRIMNQLQAVALNEGLQCKKRLWRASGRQQLESFRLGPWASRRRRDLLELLDRLSPTIAELSQAIEQEAEKCPEAQRLMTHPGVGPLTALGFVLIIGQAERFQCGKQVASYLGLVPLEKSSGKRRRLGHITKQGSSIVRFLLVEAAQAAVRGDPQWRSKYLRLLMRRGRKTAKVAMARRLAIRLYWMWRERQDYQQSRSFGSHAGQPGNRDGVH

SEQ ID NO: 276072 - protein, 366 aa, unidentified
MQVVHEVCCGLDVHKKTVTACVVWATGRRRQTREFGTFTRELLELSDWLRASGVTHVALESTGVYWKPVWNLLEGQFEVLLVNAQHIKAVPGRKTDQKDSEWIADLLQHGLLRASFVPPTPTRELRDLTRYRASLTQEINRIANRIQKVLEDANIKLASVATDTLGASGRAMLEAIVNGEQDSQRLAEMSRGLLRNKIPQLQQALEGRVTAHHRFLLRELLDHHYFVESKMKRIEQEVAERLGPFQSEVARLCTIPGVDRVTAWGLLAEIGLNMKQFPDAQHLASWAGLCPGSHESAGKRKSGKIRKGSLWLRRCLCQGAWAVSTKKNNYLSALYRRLERQGERKSPRRRLEQDSDESEEHISPPA

SEQ ID NO: 276073 - protein, 362 aa, unidentified
MNKHIFVGIDLGDKNSVARIGVDLEKSERFGFVNTNAGRARLILEVKRRSEQMGAAVVVMAYEASSCGFVLRDQAQAAGIDCKVLAPTKMEKSVEQKRNKNDDRDADDVLEKLRGHVLAGNRLPTVWVPELETRDDREVLRTRLTLSERQTQIKTQIQMLLKRHGLEKPSDLGSTRSKQYRHWLESLSQWESLGWGTRQSLASLLRQLSGIEAEMENLEKLIRQLGSQPRHKPIVEALMKEKGVGLLAALVYRTEIGQARRFHRGRHVGKFVGLTPTSHESGQQKDRKGHISRQGPPRLRKVLCQASWVHVRHDPNSREVYQRLVAKNPKKKKIALVAMMRRLAVRLWHRMREAESLQQTSS

SEQ ID NO: 276074 - protein, 402 aa, unidentified
MSKVLYVGLDVHKDSIVVATAIAGDKPAETYGKIGGTLDALDKMIKKLTKPDLEVRFVYEAGPCGYVIYRHLTKREYHCKVIAPSLIPTKASDRVKTDRRDAQQLARLFRAGELTAIYVPDEEDEAVRDLVRARDRAMMDQCKARLRLKAFLLRLGHRYLGKGHWSDAHLRYLSSLKFAHAGQQIAYQEYLEAVTVATERLARLGKAMEAALPSWKREPVVRALMSLRGMAVITGMTLVAEAGDMTRFDSPSQLMSYFGLTPSEYSSGEKRHQGGITKAGNGACRRALVEAAHHYRVAPRVTPAIQKRQEGQSREVRAIALKAQQRLNGRFRLLTGRRKKSVVIIAALARELCGFVWAIACQVSAPERLQAQAPARLAAAPGKAARGNKRVYVLDSRKNYKN

SEQ ID NO: 276075 - protein, 421 aa, unidentified
MSENQRVVGFDCGEDEHSVVLLDAAGEFGERFSVANEKSQVQELFAKLLLAIPQDERLVVVVESKRSHGRVVSDVAVELGCDLRQVNTVALNHYRDLEGQPRKDDEWDAYLAARMVFLRMGGCREATEVTEEERALSRLTRMHKRVVDERRKHIARLRAVLLELAPEMLHSSWEGPQPGRKAMLYLLERWPGFEGLERAQLRSIEKILLQCRYGSRATRVAKLIREMARGISIAGEERQAFTLELDLLVRQIRFCDESRDRLRTEIVQRVEHHPIGKKLLEMDGNGPVIVGVLISELLPVARASTEAKSATYAGVTPLARKSGKSLDKDRLTQGVNKRVLHALYTSAVVAIKHSAVDRAYYNKKLRDYAGHPKPHVAAFIALSRQRHKLVYKLMTTETSYDKEVLIAAHLARLELNQTAAA

SEQ ID NO: 276076 - protein, 347 aa, unidentified
MVLLGIDPHKDTHTVVAVDQAGRQLDQTTVPARTPGHGQLVSWARTRWPERTWAVEDCRHVTGRLERDLLAAGERVVRVPPRLMAGARQAVRALGKSDPIDALAVARAALREPNLPTAGHDQTSWEVKLLVDHREHLVAERTRQINRLRWHLHQLDPDLEHTTRRLPGPGLGRITAWLAQATPGVQVGICRNQVTAISSLTNQIGELDRQLRQRVARLAPTLLSLPGCGPLTAAKLIAETAGVGRFRSEACFAMHAGVAPVPASSGRTDRHRLSRGGNRQLNAALHRIAITQLRLPGPGQAYYQRRRAQGDGTGEAVRALKRRIARAVYQRLRAAQLPATTFHTAAA

SEQ ID NO: 276077 - protein, 390 aa, unidentified
MDVITNKCCGIDVHQKKITITTLIGDPAEKPKKLTQTFGTTTPDLKICGQWLADQAIEMVLMESTGQYWRPVWQILETFGFKMILCNPRIIKNIPGKKTDQLDSEWIAELARFGLVAASFIPPRPIQELRESTRTHKSLTQAGTQIKNQIHNILQRSNTKLTSFISDIFQGSGLKLLNLLINGEVITTESVSKCMHPRLQASPQELVAALDGSLSANDRVLLDIQLDLLKHNQLAIARLEASIEEQLEPFQELYLRLQEIPGVSQHIATIIIAEVGPDVSPFPDAAHLASWAGVCPGNYESAGISKSSHVRSGNVYLKTALVTAALGVKKQTDSGLKDFFFRLRTKMGAQKALVALAHKLIRIIYAMLSNNCSFRDYNRDQQMQYLLASN

SEQ ID NO: 276078 - protein, 387 aa, unidentified
MQKPHDNSKASPAAFMQDNTLIAVIELSLSSWLVAGLIPGVSREPLKKLEPNPEDLLKLLHGWRDEAIKAGRLITRIAVAYETGRDSFWLARWLRERGIDAHVIHANSVAVSREHRRAKTDRLDTAMLKRGFLGWLRGERGHCTMAIVPTMEEEDAKRPHREREGLVHEQTRVVNRMKSALIQFGVRNFNPKLRKASVKLETVRTPEGKSLPPNTIAALRRDMERLKIIKQQIKAIEQARLQQIEQKPEALANRMIYLLVRIYGLGLETADLLVHELLSRTLRDRKAVARYAGLTGSPDESGSKRREKGLSRSGNARVRKIMIQLAWRMVKFQPDSALVQWFKQRTENAKRSRKPMIVALARKLIIALWHYANDGVIPEGFRLHSAA

SEQ ID NO: 276079 - protein, 409 aa, unidentified
MRYYLGVDWADQEHAVWGIDEVGEKITARTVPHTAEGLSEWGRELDEWRAQGIELWAAIERPEGRVVDFLLDHGVIVYPINPKALDRARDRFRQSGAKSDPFDARVAAEFLRTDHAHLTALQPSSEAAQELKYLTEDCQRLIRQQTRLVNQLTASLKAYYPRALDVAELTTTLARDFLRAYPTPEALTRVTERQWQRWARAHHLSDTRTAELWAVLSRPHLPVPAHVVRAKARLMLTLVAALSPVVEAVATYRKAIDDFFGRLPAATWARTLPVGERGITVPTLWARLGDAPERWTSFRHLQAQAGTVPVTKRSGKQQLVTFRFACDKPLRFVVDQVAFLSLQRSEWARAYYDQQRARGHRHRHALRALGAKWLKIIFVMWQQQVPYDESHHLATMARQALRHPEKKIA

SEQ ID NO: 276080 - protein, 329 aa, unidentified
MEQYIGVDLHKQFFQACSITSTGARAWEMRFPRTEGGLALFCARCGPQTAVAVEACGPTWAFVDAIAPTGTTVCVVDPRKTRLKAGFAAKTDRLDARRLADALRRDSVVSVYVPPPAIRELREVCRGRHQVIRLRTRLAQMIRALLLRSGGPDVPVRRVFSPRGLAWLEEVQLPPDAAASLTRLRHVLTAIHAEAAAAESVVAARAAADPIARALDTMVGIGPVLALTLRAEIGDGLRFPRGAALASYAGLVPRVDASADRYWSGRITREGSPWLRWALVEVAMHAMRRQDPVGRWARQLAIRKGAYKARVALARRLCDEIVQAWRHVG

SEQ ID NO: 276081 - protein, 326 aa, unidentified
MSVPLIPLGIDISKAEFHVALLKSAKRSKYEHFSNDADGFEQLGQWLEQQGVGPIHACLEATSIYGHALALDLHQQGHQVCIVNPLRVKGYSKSQLSRTKSDRADAKLIAQFCRDLQPASWQPSATEVNQLQGYTRRLDALEHMLTEEKNRLQVTPQDLEADIVAHIQFLQEQMETVKKRLREHIQAHESLQSQQRLLTSIVGVGESTAARVLAEIGAIYHFSSARQLAAFAGLTPQEHTSGSSVQGKTRLCKIGNRRLRKALYFPALTWWRRCPQARAFGERLLATGKAKMQVIGALMHKLIRVIYGILKSRQPFDPDKLLPRST

SEQ ID NO: 276082 - protein, 413 aa, unidentified
MFKIFRKNCCGLDVHKTWIFACIGITDTNGLTEYKQARFSSFSKGLKGLSDWLAKYSCIEVCMESSGKYWIPVFNILEKNCFVTLAHPKYTKPQKGNKTDRKDAKWICDLFMCDMIKPSFIPSPEIRHLRDLIRYRFKLTNMLTGEKNRAQNCLTVSNLKLDDVFGKSSRSITNYMLDHPGESFDVAPFVDGRCKTPIDEIQAAVDGAISPEQAVKLRECLSHIDELEAHKEKIEHEILLVVNPFALALDLLRTVPGLDSNPMTSISILSEIGPDMSVFPSSKNLISWAGCCPRNDQSASKVKSSRISRAGCYLKPLLVQIANALLKSKKHPEFKERYHRIKTRRGHKKAIIAVCKMLLTAIWNILTKLEPYTPQGFLEHLPVHQSKILTKSQALELLRKRGYIITDSVTVTS

SEQ ID NO: 276083 - protein, 347 aa, unidentified
MNATIVAVDLAKNIFELAVAGEDCRIAQRQRLTRAKFLGFFVQLAPCQVVMEACGSAHYWARRIAGLGHTVRLLPAHYVKAYVRRNKTDQADAAALIEAARCVEIREVPVKTVEAQQIQSLHRLRSQWMSTRQRYVNTLRILREFGFAIPLGVNVAKDRIGAVLADSASEVPQALRATLAEMLQEIRLLEEKMLVVERQLNALTRADACVRQLREIPGIGTLTSTALRAVVGDIQRFPSGRHFASWLGLTPNERSSAEKRRLGKISKQGDTYLRTLLVHGARSALLAAHRAERAGHSLDRLRRWALHCERQRGHNKATVALANRLARIVWATWKHERAFDGNWSAAA

SEQ ID NO: 276084 - protein, 346 aa, unidentified
MIMIGCDFHPGMEEVSLLDTGTGRRWQHQLSHASGMEEVRAFYAALAGPVLVGLEASGYSQWYEEMLEELGIELWVGDPARIRKAAPRKQKTDRNDARLLLQLLEENRFPRIWVPDKATRDLRQLLMHRHKLVSMRSAVSNQLQAIAINRGLRKKGSLWSERGRAELQALDLPPWAAVRRNELLALREQWDGEIAVLDKVLLETAEQHPEARYLMHHQKGVGPVTAMAVVLTLGPVERFASARKVASYVGLIPAEYSSGARQRLGHITKEGNVFLRWVLVEAATVAVRHDPAMKQMYWRLVERRGKSIAKVAMARRLLVRLYWMLRRRKQAIKSRQSNRVAGKLGS

SEQ ID NO: 276085 - protein, 438 aa, unidentified
MSNKVIFNLDDLFISVGIDVGADFSWMSIALPNQQFVGKPYKILHSSIDSLTTAVSKIKEAEELYSLESRIFLESTGIYHYPLFCYLRDKGFNCSVINPIITKNSTNINIRKVHNDRFDSKKAALVGLKPDLKVSLMPSDLALNCRNLCREYYDLMDNRSAYVNKLQGELRMAFPQYLGIFSKVTINTSLTLLETYTSPSAFLEADKQEIINIIKSTARFGLTYAQNKYNAIIQAATDANQFGYIIDSNIKRIRLYISFIRKYDEEINNILESLHELVDANEDADFVKQIHLIETFKGAGFLSAVSIMGEIGDFSAFSKPKQLFAYFGLDPAVKQSGKFEGTKVQMSKRGSAIARRVIHTLTLQSISISRNGEAKNPVLREYYLKKCDSKPKLVAMGAVSHKVCNMIFAILRDNKSFEIITPQEHIKQYNASKCDMAA

SEQ ID NO: 276086 - protein, 351 aa, unidentified
MKIIRVGLDLAKQSIQVHGVDRDDRVVLKRSIKRDAVLKLFATLPPCVIGMEACSGAHEWARQLSRLGHQPKLMAAKHVKPYTQGQKNDANDAAAICEAVSRPTMRFVAVKSVEQHDLQALHRIRSQCVEQRTAKVNLIRGLLAEYGIVVAQQISQLRNALGVLLEDAENGLTGDFRELLVGLQQDLYFLDDRITELTQRIERHVKVHDTTRRLLAIPGIGPISASALFAAVGDGRAFANGRHLAAFLGLTPKQHSTGGKNTLLGIHKQGDSYLRGLLVHGARAVQRMAVKKTDPRSTWLNALGKRRHKNIATVAQANKTARIAWAVLQGATYRPEPARRLTPDAHIELAA

SEQ ID NO: 276087 - protein, 341 aa, unidentified
MGVLVAIGVDTHRDEHVAVALDECGRELGSLTIATQASGYALLWEWASGLGEPLFAVEGTGSYGAGLTAFLVAAGGVVFECERPRRRDRCQGKSDLIDAKAAARRLLSGERLPRPRGGGVRDDLRLLLMERQGAVRARTAALNELQAAIVTGPETLRSRFRGLDGKQVAKAAAKLRERRDETAVAITVLRRIAVRARQLSCEIDEIDEQLETITSELVPDLLQECGVGPVCAAQLVVSSGDPSRMHSEASFAALAGTSPVQASSGQTQRHRLNRGGDRQLNRALHVIALTRIRYHEPTASYYQRLLTAGKTPREARRCVKRQLARYFHQRLQASPNLALTP

SEQ ID NO: 276088 - protein, 343 aa, unidentified
MGEVSTIGLDIAKSVFQVHGVDVDGAVVMRKRISRAKLLEFFASLPACLVGIEACPSAHYWSRRLQALGHRVRLLPPSYVKAYLKRGKNDANDAAAICEAVTRPSMRFVATKSEQQQSGLMLHRSRQLLVCQRTMLSNAIRGHMAELGIISAKGRNGTAELLRIIADEQDDRIPAAARFSLDVLSRQYAAIRAEIVAIEKRIHAWHRSCEESRRLEEIPGVGPIVATALVAEVGDWKEFTSGRSLAAWIGLVPRQHSTGGKERLGRISKQGNRHLRWLLVAGAMAVIRYARQHGTKRLWLAHLMERRPIKVAAVALANKIARMAWAMMVRGERFKEPKLLPAA

SEQ ID NO: 276089 - protein, 342 aa, unidentified
MEISTIGIDLSKTTFHLIGLDARGEIVLRKKLSRKQLLLFTATRKPLLIGMEACGGAHYLARALTEQGHDARLMPAQYVKPYVKTNKNDYLDAEAIAEAVQRPTMRFVPIKTDEQLDLQALHRVRDRWVARRTAVMNQIRGFLLERGIAIRKGPSYLLTQLQIIFTEADSSFSGRLLHLIRELKHEWDELERKIEEASAELARIAKQDDGCHRLMEVPGFGPIVSTALVAAIGNGISFRKGRDLSAWLGLVPRQHSTGGKTRLLGISKLGNEYLRRMMLHGARSVVMQMERTPSALGEWLTSLSARRHRNVTVVALANKMARIAWAILSKGTHYCAPALMAA

SEQ ID NO: 276090 - protein, 350 aa, unidentified
MSTVTSFFVGVDLHKTIIQICVVAGDGSPVCERRFLVRSLPDSDGVFSFLEPYREAGRMAVEALGLNRWFVNMALDRGFDIVVCDPLKLHLKMLGRKTDRRDAQEIARRLQLGDIDRNATTWYADDETYGRRKVLRARHAQMEQRQQVLNQIRALLNSYKVTGFAGDLTGKKMISRLSGLELATEELTAVLQSWVSQLISLGESISFLNQQLRSMDRGGLAELLQRHLEHVGPVTASVLVHELGDVRRFTSSRAVAAYAGLVPRVSQSADTSHHGRLTKRGNRELRHVLGEWAVRLLSSNPQVQAWAKPRLKRSHKNKVRMALARRLLVGVYKMLLTGEMFEMERCLGQI

SEQ ID NO: 276091 - protein, 343 aa, unidentified
MQAVTTIGLDIAKSIFQVHGVDAEGNVIFRRKLKRRYVVAFFQKLPRCLVGIEACASSHHWSRELQAVGHTVRLMPPAYVKPYVKRHKNDAADAEAICEAVTRANMRFVETKTPEQQSCLMLHRTRHLFIRQQTAVINAIRAHLAEFGIVAPVGRNGVEALLNIVADTSDKRVPEIARACLVALGAQLRMLKTQVLEFDRLIMAWHRSNATSKRLDEIPGVGPALATALVASVGDPGAFRSGRDFSAWIGLVPKQNSSGCKEKLGSISKRGDRYLRSLFTTGALAVIRYAKLHGAKHRPWLTALLARRPTKVAAIALANKIARMAWAMMAKGERYKEPIALAA

SEQ ID NO: 276092 - protein, 372 aa, unidentified
MNYNTVYVGMDVHKESFTLCSCKYEDEKASHYQRTPASYKNVLRYLAFLRTIYGEDTRFVCGYEAGCLGYSLYHQLENFNVECVILAPTTMLEQRSKRRIKTDKRDAEIIAKSLAQHNYRPVHIPTKMDNQTKEFIRMRDDHKAELKKIKQQILSFCLRQGYQYDGSGNWTAKHVKWLRSLKPAGLYKEILDEYLLTYTILTDKLNRLDQRIEELASKEEYKESVSKLTCFLGIKIHTALSVIVEVGDFQRFVSARKFAGYLGLVPGQHSSGDDRNGLGITKAGNTHVRRLLVESAQSYTRGKIGYKSRVLRSRQAGNSPQIINYADRANERLRRRYYQMVLKDGKKYNIAKIAVARELACFIWGMMTDNIY

SEQ ID NO: 276093 - protein, 374 aa, unidentified
MKKVRFLGLDVHAETIAVAIAEPEGEVRSLGTIANRAESIRKLVKKLGSPEQLRACYEAGPTGYVLYWQLAELGVACDVIAPTLVPMKAGDRVKTDRRDAERLARSFRAGDLTAVWVPDEGSEALRDLVRAREAAKQDQLRARHRLSKFLLRSGQRPAPGVKAWTQPYLVWVRQLRFKQVAQESTRLDYLHEVEHMGERVKRLEQAIAEAVKLASPALQEVVKDLQALRGIAQISAVTIASELGEISRFASPRQLMGYSGAVPRENSSGQRIQRGSITKTGNAHLRRIAIEAAWSYRLRPGVGPALRKRQEGVPEEIKEIAWKAQHRLHKRYMRLAAAGKDQRKIITAVGRELLGFIWAIGTKAEAATRQRMAA

SEQ ID NO: 276094 - protein, 327 aa, unidentified
MAQKMDVVGIDVSKATLDAYALTSQQGRQFANDPAGHQGLVAWLQELGVGVAVFEASGGYERAAAQSLRRAGLVAHVVDPKRVRHYAQAAGQLAKTDRIDARMIAAFGAAFLLGKPSGVAGGDDPARQDLAELVGTRQVLVDHRTSLQQQADAVTSAIAKKLLLATLKQLDRQIETCDRQIAAAIARHAPFAALARRLDTVPGLGPVSIAALIAWLPELGQLDRRQVAALVGVAPFADDSGKRTGQRHIQGGRMKLRNVLYMATVGAATRHNPVLQARYRRLLENGKKPKVALIACLRTLLTILNAMVAHQQDWNPTKLPATEPVAA

SEQ ID NO: 276095 - protein, 427 aa, unidentified
MDRFLLISQQVVTFSSTRNVRNLNMRRAYTMYIVGIDIAKRKHEAAVIDGEGTVIIKPFSFTNNCSGYNRLLAMLTKAKLPLDEVSFAMEATGHYWLALFTRLQKEGFRVQVINPVQTNSIRNFYIRQAKTDPRDALLIAEVIRFGHFSESTLHPENIYELRELCRGRHAIVSMQADVKRKVVALLDQVFPEYETAFTNMFGDTSMAILQTCPTPKELSEMRLEELCHLIEVSSHKRFRMAKAQELQELARNSFGFAMAGDVFSTMIRLYAKHLDFLKQQVREMDRKIAEIMETLDTPITTITGIGLTLGAYILSEIGDISRFSSAAKLAAYAGIDPTMRQSGEYNGVRNRMSKRGSPYLRHAIWLAASSAVLHDPALKLYFQKKRDEGKPYMASVGHACRKMVSIIYAVMRDNKAYTPCIPNEISV

SEQ ID NO: 276096 - protein, 415 aa, unidentified
MASDWSEAVIFVGIDWAEEHHDVHVMNPDGQPLGRARVPEGIDGIARLHALVADHADDPGEVVVGIETDRGLLVTTLAAAGYQVYGINPRAVDRYRDRHAMSGAKSDGADAKVLADLVRTDRHNHRQVAGDSDLAEAIKVTARAHQNLVWARQRQVNQLRSALREYYPGALATFGTDLAHRDVVAVLVKAPTPELGRRLSTAQIAAALRRAGRVRNVDARAAAIRDGLRAPQLAAPDVVADAYGDTAKALISVIATLTAQIDELESALADRFEQHPDADILRSLPGLAVILGARVLGEFGDDPNRYADAKARKNYAGSSPITKQSGSRKLALARYVRNRRLADAITLWAFSSLQSSPGARMLYDRRRAAGDTHHKALRALSNRWVGILHGCLRHRTPYDEHIAWGHLTDNLPTAA

SEQ ID NO: 276097 - protein, 402 aa, unidentified
MNAVGIDVSKGKSMVAIMRPFGEIVSAPFEIKHTASGINSLVELINSVEGESRIVMEHTGRYYEVLAHQLSEANLFVSAINPKLIKDFDNDSLRKVKSDKADAVKIARYTLDKWQNLKQYNVMDELRNQLKTMNRQFGFYIKHKTAMKNNLIGILDQTYPGVNTYFDSPARSDGSQKWVDFASTYWHVDCVRKMSLNSFIDHYQNWCKRKKYNFSQSKAEEIYGKAKELVPVLPKDDITKLIIKQAVNQLNSASTTVESLRTLMNETASKLPEYPIVMAMKGVGASLGPQLMAEIGDVSRFTHKGAITAFAGVDPGVNESGSYEQKSVPTSKRGSSDLRKTLFQVMDVLIKTHPQDDPVYQFLDKKRAQGKPYYVYMTAGANKFLRIYYGRVKEYLSSLPES

SEQ ID NO: 276098 - protein, 408 aa, unidentified
MTDYTTRYIGLDVHKHYLIALGVDENLEVVLPARRVELSHLEAWMKKTLTRQDAVVLEMTTNTWQLYDELSAHAGSVTVVHPPHVALITRAQVMNDKIAASILARLLAKGLLVGIWVPPQEIREMRGLVAQRQKMTQLATQAKNRLHAVIQRHHLQPPAGNPFSKSQNEWWQALQLGPLEKLNLQTDLETMQFAEKQEARATEEMDKLAAENEPISRLLHVSGFGVVTAVTVWAAIGDICRFADAKHLVGYAGLGARVHDSGLTTRTGRITKAGRRDLRVALVEAAQIAANTHPHWKAELARLEPRLGRNKAIVAIARKLLVATWHILADKTADRFAQPEAVAQKMLRFAYAVGKEYRAGKTAAQFARERLDVLNIGQELTSIPWGAKKPIPLPPSARLKKESAVPNK

SEQ ID NO: 276099 - protein, 317 aa, unidentified
MSNRSIVCAGIDTGKHKLDVALHGRSHDLEVANTAEGHERLLAWLRRHGVKRVGIEASGGYEQTVVWRLRRGGLVVVVFQPAQVRAYGRFHLKLAKNDKIDAALIADCTAAIKTIHAPPDRRLADLGELQTQIDQIAAAMRRFKNYRESCRDARLRQFWDEEIRRFRGLFRQRLKELVAAIRQHPDLAERLELILSVDGIAVRTATAIVVRMPEIGKLSRGQAGALSGLAPYDDDSGEHAGARHIAGGRKRLRRNLYVGAWAASLRWNPQLTALYNRLRAAGKEHKVAVVACARKLLVFANAVVARGTPWESRATAP

SEQ ID NO: 276100 - protein, 352 aa, unidentified
MKTQSTALIPKLYIGIDVHKKSWTFHYQTDLFDGKTITQPANPNTLVEWVQKHYPKHEVTCAYEAGFSGYSAARLFQKQNWNVLVLNAADIPKPQKQNVVKTDQIDCRNICKQLKNDALNSITIPEEQRESFRSLFRERNNLVEGLRHVKLQIKSHLMYYGIVIPEEFDNPNWSKNFIEWIQTQKMSYETGTEKINFLLKRFNFMHYELLNISNQLRAYARKHYKKDYYLLKSVPGIGGIVAVSILAELGDLRKYNRFDDLASSVGFVPGIYSSGDTTIVSGITPRAKGLLRSYIIEASWQAVRFDPVLQEYYRSHYGKKPNKIIVKVARKLLSRIHAVIKTETPYQIGIIK

SEQ ID NO: 276101 - protein, 342 aa, unidentified
MNITTVGVDLAKSVFQVHGVDKRGKVMIQKRLRRSKVLAFFVQLPPCLIGMEACSSAHYWARKLREQGHEVKLMAPQFVKPYVKANKTDAADAEAICEAVTRPTMRFVPIKSIDQHAVLSLHRARSGFVKSRTAQANQIRGLLGEFGIVLPQGIVHVARRLPDIIEDADNELPIVFRELLLRLRSHLLELNRQIQELEGQIDAWHKSNEDSLRLAKIPGVGVLTASALVASIGDARCFNNGRELAAWLGLVPRQHSSGGKPLLLGISKRGDAYLRTLMVHGARSAVRVAANKQTPTDSWTNQLSTRRHMNVVSVARANKNARIAWALLAHKRDYDGEYKLAA

SEQ ID NO: 276102 - protein, 333 aa, unidentified
MRSILRTVGIDISKDWLDAFAAPEGRVSRFPNDSAGFRKLIAWIGSGIDRIAYEPTGAFHRDFEDTLLKAGLPLYAINPFQVRSFARSIGRRAKTDAVDARMLATMASAIEELRPTEARSEGQRELAELQQIRDALVRDRTAITNRSRNLRTPVGKRVTRQRLRQIDRQLKLIDAEIRQRIGEEKEMERRAEILTSIPGISDITAAGLIVHLPELGMLTRSGAASLAGLAPVTRESGHWKGRSFIQGGRHRVRRLLFMPALVAAQHNPDLKRKYEALLAKGKPRKVALTAVMRKLLVLANALVQQDRTWTAQPPREYSCPAFPTPSPAGSVHG

SEQ ID NO: 276103 - protein, 333 aa, unidentified
MKNEPIKEFVGIDVSKLTLDVHLYVKNLHCVFSNDSKGHRLMFSWIRKQCIKNEELRFCFEHTGIYSLELAMFLKKNSQVIYIVSGLAIKRSMGLKRGKSDKTDAKEIAKYLFQNHYAIKPTELASDAIQELQMHLSFRSNLVKKLASFKMHRKEFGKINESKGYDQIEQVTAEIMDALKKGIKVIEKQIQEIIYTDEALKNTFENISSIKGVGPILAATMIVITRNFTSFETSRQLACYAGIVPFEHSSGTSYRGKNRISSLGNRDLKSLLTMAAISSITYNPELKIYYQRRISEGKSKMSTINIVRNKLVSRIFACANRNSKYVEIYKFAA

SEQ ID NO: 276104 - protein, 416 aa, unidentified
MSFALPEALFFTGIDWAAETHAVCVMDAGGKIVAGFTIEHSADGIALLVRRLARYGEAGGMPVAIERPNGRLVDLLLDAGHPVVPVSPNAIKAWRDGEVLSGAKSDAGDAAVIAEYLRLRAHKLTAADPYSDETLALRTVVRTRGDMVEMRVAATNQLSALLDAHWPGAKAIFADVESPISLEFLTRYPTPAAAAHLGEKRMAAFCLKHGYSGRRPAAELLARLRAAPAGTSRESLTEALRDAVLAAIGVITALNASVKNLDRSVAAHLGEHPDGKIFTSLPRSGQVNAAQVLAEWGDCRQAYAGPDSVAALAGCTPVTKESGKHRAVHFRWACNKRFRAAITTFADNSRHASPWAAKVYDDARASGKDHPHAIRILARAWIRVIWRCWLDGVPYDPATHGAAAALAGQSTKQIAA

SEQ ID NO: 276105 - protein, 349 aa, unidentified
MGMLAERVDHVIGVDTHRDSHSAAVCNASGAVTAEITLAADAFGYKRLLRFAREQAPGRRVWAIEGTGSFGAGLTSFLLEQGEWVVEIDRPARPARRDGAKSDALDAGRAAREALSRKHLAQPRQRGAREAIRVLLATREGAVVARTKAIAQLKALIVNAPEQLRHHFRPLTTDEQLARCARLRTSPTQSVEHRATIIALRSAARRALALEAEAADLESQLELLVRELAPALLAEPGVGVISAAQLLSAWSHRGRFRSEAAFASLAGAAPIPASSGQTVRHRLNRGGDRQLNRALHTIILSRLAHHPETKRYAVRRATEGKTPREIKRCLKRHLARRLFRLLESSPTLA

SEQ ID NO: 276106 - protein, 420 aa, unidentified
MPHSNTSNTAYRAVIGIDWADAAHAVCLWDATTNATEQFILPSAPAAIGAWLKEISQRYGREPVAVALEQSRGPLMNQLAQCPHLVIFAVNPATLSRFRQAFAPSLRKSDPSDAMLLMELVRTHGHKLRAHHLLDAATRELETLVEARRSLIELRTALSNRLRQAIKDTFPQALAMVGEELFTTLATDFLQRWPSLAHLQKARPETIRRFFYGHHVRRPDVIESRLASIKGAVAVTSDEAVLAPARLLIVALSGQMKVLQASVRAFEKQIDQAFAAHPDAAIFQSLPGAGATLAPRLAAAFGQDRSRYADASALQRASGIAPVNISSGKMSRTCRRVARSLFLHQTFFEFAAKSLPFCPWAKAFFAAQRAAGKSYGCAIRALAFKWQRIIYACWKNRQPYNEAHYLAQLVRHGSAYAATL

SEQ ID NO: 276107 - protein, 489 aa, unidentified
MGLPSLMEASSGERSGRLSREDFDETASPEVGLGGPTPARVSSREDWSISTVPCLQRGGWFGMRGGPVLGVGIDFAEEFHLVALGRPGDGVIEVTRVDHTPAALATLVARIAALEPDPTEVRVVLETSHGLLVERLLDEGYIVVPINPDLVARRRGPARKKDDAEDARIACLIALDRHTTLRPLIPHGELAAELRAIARDDERTARDERRLLNRLRTDLLETFPAALELAADDLGAPTMLRLLERWPTAADLGTATRDELIAFARSAHHGWPDRFAGRVTTALAGEQFVARPALVRAKADTIRLAARQLLLLGAQRREWERRMGEILLGARRFGRANEPRLDERGEQFPGGEIYLSFPGLGDRLAARVAGEIGDHPEMFATPNGLQCYAGKAPVTRRSGKSELVVSTRLACNGHLRDAVQQWAFCSLNRSGWAREFYDGQIAKGKNHHAALRALGNRWLEVLWHCLIRGCRYDEATHVANRTRALQRAA

SEQ ID NO: 276108 - protein, 361 aa, unidentified
MDLNIGVDLHKTQFTVYFKSIDRFREYATTETGYRSFIADIARIKDVDGRVRIGIESTGNTRFFKNYMERHSIEVTVINTMKFKVINESVKKTDKHDACTIADFLEKDMLPESRICSEYSEEIRRLLKVRTTLVRASVTVKNQIHGLLVGQGIEDKKATLQSKRGRQKVLNTLAKMANGLAVQPLFDILDNLAEQVKKIEKELEKITAGDEAIELLLTIPGCGPITAWTIRAYTDDIKDFKESKKYSSYAGLTPWVQCSNTTERYGKITKRGPEELRTALVQLVMGMNRTKSIADYRIMLQYKNMKKYKGSGKSIIATARKLSKIIWHMLTYSKPFNPCLMYDNDLNKIANDMRILSIKSA

SEQ ID NO: 276109 - protein, 350 aa, unidentified
MLIIGCDYHPSFQQIAFVDTETGEFQEQRLSHREEAERFYRDLAAQGRKGRVGMEASGHARWFERLLAELKVELWRGDAAKIQAKRVRKKKTDREDARHILQLMLKHDFPQIWVPSWDNRDLRQLLWHRHRMVQMRTRIMNQLQAVALNEGLRCKKRLWGERGRQQLESIGLAPWASRRRRDLLELLDRLTPTIAELTKQIEQEVEKYPAAQRLMTHPGVGALTALAYVLIIGEPERFECSKQIAAYLGLVPEEDSSGERRRLGHISKQGSGLMRFLLVEAAQVTVRSDPEWRSKFFHLALRRGRKIAKVAMARRLAVRMYWMWRQQWDYEQLKKFGPHAGQPGTAHGVK

SEQ ID NO: 276110 - protein, 343 aa, unidentified
MSNDTRIAVDVAKAVFELAISDRPGHVARRERLPRAQFLPFMSLQPAATVFMEACGSAHYWAREIQKLGHHVVLLPPHHVRPYIRRNKTDRTDAKGILEASRNDDIRPVPVKTVNQQILTSLHRLRSGWMLERTARLNALRGLLRELGVFIPVGSREVVPAAWALIEDADSSLPEALRPIFAEACREIREIEARVKLVERQLDALATQLPAVEHLQTIPGVGLLTSTALVGFIGDIRRFPTGRHFASYLGLTPREYSSGLKRNLGRISKRGDGYLRTLLIHGARSVLVHARKQQPDRLREWANALAKTHVHNKAAVAVANKLARIVWAVWKSERPFALMAKAA

SEQ ID NO: 276111 - protein, 353 aa, unidentified
MTAFSKEPVVTMGIDLAKNSMHVYGVEARGHKVLSKTVSRGKLSAFMANRPPCLVAMEACGSAHHWARVFRGFGHEVRLIAPQFVKPFVKSNKNDAVDAEAICEAVQRPNMRFVAIKTVEQQDIQAIHRMRSLNVERRTAQVNQVRGLLLEYGIEIPQGRAALMRRLPEILEEAENGLSERFRAELNRLLEELRHLDEQVAHYDTQIQVIAHSDETVQRLMTIPGIGALIATALMAAVGEDVSLFRNGRGLAAWLGLVPRQHSTGGRERLLGISKRGDVYLRQLIIHGARAVMRWVERKEDATSRWATALKARRHTNVAVVAMANKIARVAYAVMVSGKPYDPAAGKPLQATV

SEQ ID NO: 276112 - protein, 370 aa, unidentified
MTASGLALTLERVCEVLPLTAVVPGSVKVGIEAAGHYHRPLLTPTAWPSGWEVLELNPAHVSEQRRCQGRRRVKTDAIDLEAITELVLAGRGIPVTGQEQVIGELSAWSTHRLRRVATRTATKNQLLGQLDRCFPGLTLALPDVLGTKVGRMVAAHFADPQRLVALGPARFIRFAAHRGLQVHRPVADRILAAARNALPTTDADVARQVLAADLALLADLEDQVAAAETKMAALLPSSPFATLTSVKGWGVVRASNYGAAVGDPHRWPSYRQLYRASGLSPMQYESAGKRRDGSISREGSVELRRALIDLGIGLWLNDPTAKTYAQSLRARGKKGGVIACAMANRANRIAYALVRDHTAYDPARWTPKED

SEQ ID NO: 276113 - protein, 282 aa, unidentified
MVIIGCDFHSGFQQIAIFDNQTGEFQERKLLHPEEAAKFYRSQQEPMRVGIEAGAPCQWFRRLLEECGHQLWVGDAAKIRAAEPRKQKTDRRDAELILKLLVEERFPRIWMPSEQERDVRQLLMDRHHRVRARTQVKNQLQSLALNQGLQKGKKLWSEAGREQLRELPMMEHAARRLMTHPGVGPQTALATVLTLGEVSRFESAKQVASYLGLIPGEYSSGNKQRLGHISKQGSSLMRFLLVEAGQTAARNDAQLRRAYARLVAKKCRAVAKVMGKRGVMAV

SEQ ID NO: 276114 - protein, 338 aa, unidentified
MEQEDVTVGLDLAKNVFQVHAIGADGAVLIRRKLRRTEVIRFFAELPRCLVGMEACASAHHWARESMAIGHEVRLMPPAYVKPYVKRGKTDAADAEAICEAVTRPTMRFVAVKSVEQQAVLMLHKSRDLMVRQRTMLINALRGHLAEYGIVTGLGGAGVVASLKALHEEQDRFPAHARSALHGIAAQLRALASEIERLEAQILDWHRNDETSRRLATIPGIGPITASAIAAAVPAASLFRSGRQFAAWLGLTPRANSSGGKERLGGITKQGDGYLRRLLVVGSTAVMRMTRKSPARQPWMAGLLERKPTKIATVALANKTARIAWAVMTRKEVYAPAA

SEQ ID NO: 276115 - protein, 457 aa, unidentified
MVDKTQAQAIDWNSLPPLNVNAAGLDIGATEIYVCVPTGRDPQSVRRFGTFTVDLHSLAAWLTTCHIDTVAMEATGVYWIPVYEILEAAGFEVYLVNARHIKNVAARKSDVSDCQWIQRLHTYGLLRASFRPPEEIAALRALVRHRETLIQYRAAHIQHMQKALQLMNVKLTHVISDITGVTGMTIIRAIVAGERNPKVLAQYRDPACKKSQVEIAKALEGHYKAEHVFVLRQALELYDFYDQQIQACDREIERRYQASEPRDPDGQPPTTAPQPTQRKPRKGQAHFDLASSLYRMVGVDLTRIDGIDALTAQTLISEIGLDMSKWRTVKHFTSWLGLAPNPKKSGGKVLTNHAPRAQNRAAQSLRIAAQTLARSQSALGAFYRRIRAKHGAAQAVVATAHKLARIVYHMLKYREDYHDLGTDYYEQQYKERVLRTLTRKAADLGFRLEPVLTPQVS

SEQ ID NO: 276116 - protein, 408 aa, unidentified
MEVLHGKCAGLDVHKDSVVACIRIQEGPQASYWIQTFGTTTRELLQLSEWLVEYSVTHVAMEATGVYWKPVWHILDGEFELVLANAMHIKNVPGRKTDVKDAQWIADLLAHGLIRSSFVPPTAIQDMRMLMRTRKQLVRERSQHVQRIQKTLEDANIKIASVVSDITGVSGQAILRAIVDGQTDPDQLVAVTTGRLKASPATLREALRGRIRKPHRLLLKLHLDQIGGIEKSIADVDREVGALLDPFRAKSKRLITIPGVSDVVAQVILSEIGTDMSRFPTAAHLISWAGLCPRNDESAGRRRSNRLRSGARWLKTTLIQAGWAAARGKAGYLPAQFRRIQSRRGPRKAVVAVAASILTAAYYILRDDVDYRDLGATHFDSADREKLAARLIKRLATLGVNVQILEAA

SEQ ID NO: 276117 - protein, 436 aa, unidentified
MKSKGGDTVKNRMKFDHLSTLCVGLDIGSRSNFITALNFDSDRLINMRPVPNAASGVEAMESMILAVLEANPQFRYLLVALESTSFYGVHVANYLSTSDKLKPYGVKVFCLNPKTIANYRKSFTGLGKNDGIDSFIVADYVRAGRIDIEPWRGAQYLALQRLTRQRRHISEAIAREKNYVLNNVFLKFSEFAHLSGEECPVSDKFSATAEAILTEYKTTEDIANAPLEELVDFISASGHGRFSDPDQVASLLQKAARNSYRLDKALYEPITTSIACSFNCIRAFEKEQKALDKAIAATVAGLNPTEYQILKSIPGIGPVYAAGILAEIGSVRCFNSNNALAKYSGIIWRDNQSGEFDSEDTPMMKAGNRYLRYYLIQAAGSVVRYCPEYTDYYNKKFAEVPKHQHKRALALTARKLIRLIFGLLDKNQLYSPAKSR

SEQ ID NO: 276118 - protein, 339 aa, unidentified
MVIVGCDFHPGWQQVAVFDSGTGEIRELQLRNSEGEAERFYGSLPSPALVGFEACGNTHWFEDMLDRLGHEVWIGDAAEIRASYVRKQKTDKRDAAHILKLLMEGRFPRLWRPSKADRDLRQLLIHRDRLVGVRTRVKNGLHHLMLNKGVQLKRKLWSKAGQKILHELPLEGWAAQRRTDLLQLLSTLDPQIEELDVAVERAAYANERARLLMTQPGVGPITSLAFVITMGDVTRFPSGKQVSSYLGLIPSEHSSSKRRRLGAISKQGSPFLRMLLVESVQTVCRLDEGFRKQYNHRCHRMKKGIAKLAAARKLAVRLYWMLRTNTAYPEIAHIEGSPR

SEQ ID NO: 276119 - protein, 391 aa, unidentified
MICVGIDVAKDKHDCFILNSEGVVLADVFTIPNSLEGFNILLDKLRACSTPQDSIKVGLEATGHYSYNILGFLLDNGLATYVLNPLRTNLYRKSLSLRKTKTDRVDARTIAAMLLSDTGLKPYTDTAYHNEELKSLTRYRFDKVKERAKLKQSVSRLVCILFPELEKLVSTLHMASVYALLSEFPGAKQIAAAHLTRLKTLLADSSRGRYGRDMAVEIRDAARCSIGSRMPAKSLELQHTIRLIRELDAEIEEIETAIQAIMDELHSPITTIPGIGCRMGAMILAEVGDFSRFDSPDKVLAYAGMSPSTYQSGQLKNCYPHMEKRGSRYLRYALYNAAKYVCHWDPAFAAYLTKKRAEGKHYNVALSHAAKKLVRLIFALEKSGQPYCPVI

SEQ ID NO: 276120 - protein, 309 aa, unidentified
MESITVGIDVGKDRLDVAVRPGGEVFTVERNAAGLEALCDKLVPLSPRIVALEATGGFETVAAAALAAAGLPVVVVNPAQIRAFAKAIGQRAKTDPIDAAVIAHFAEATKIEPRPLPDEATRLLADLVARRRQIIDMIGAEAQREKRATPRLKKSIARLLTALKKELSSVDTDIDDAVRGSPAWREKENLLASVPGIGSIIARTLIAELPELGTLDRKKIAALAGLAPFTRQSGQWRGKSFIGGGRKAVRTALFMGAMVAKRHNPVLKAFFDRLIDSGKPKMVATIAVARKLLTILNAILRDSRPWQSA

SEQ ID NO: 276121 - protein, 329 aa, unidentified
MDVLYQSCAGIDVHQANIVVCILHGPLTSTRPKREMATFDTTTKGLRACHDFLSQFHVEAVGMESTGVYWRPVWHALCDDFELILAQPAHMKAIPGQKTDKKDAHWIAKLTRIGLLPRSFVPDETIQELRELTRQRKHYVESRNRETNRIHKFLQSGGIKLTTYIEDIMGLSGRNLLQLLVDGTPITPRIVHQSVYTSLKKKVPQLLEALDGYFSDHHRFMLKQSLEIYDFYQKQIELLEERITVYLSQYENHVETLDSIPGIDVITASVIISEVGVDMSQFPTSGHLASWAGLCPGNNESAGKKRSTKIRHGNSYLKKCLCSTSQRSG

SEQ ID NO: 276122 - protein, 327 aa, unidentified
MMFIGIDISKEKIDLSWLRDQLTNKIKTKVFKNKHQDFLAIEKWLLNTTKSAANELVITLEPTGVYHEALMYFLHEQGFNIILANPGKAKKYADALNIIHKTDKSDATMLAHYGCAKHAVVSYWQPDALEVRELKALIRRLDALESNRQREANRLEASEFSNVSARVCQSIKVTIAFLDDEIKQLKSDIDNHIDNEPDLKRNRKLLESIPGIGPVLSRELTYLFAAKKFNKAKEAAAYCGLIPRHNESGKLKGRTSISKLGPARIRCKLYMAAIVAGQWNKTIKRHKLTLINNGKTPMQVVCANMRKLIHICFGVIKNQEAFKLQES

SEQ ID NO: 276123 - protein, 411 aa, unidentified
MKKTVEYEQVFERGCGMDIHKDSVYATVMGEGINTETRVFKTTTRGLRELGAWLTELDVKAAAMESTGIYWKPIFHVLSEFPINLMVVNASHIKNVPGRKTDKADSQWICKLLISGLLKGSFIPPADIQKIRDLYRYKKKLVHYISSERNRIIRALEDANVKLSSVISDTSGVMATHIIEGLLAGRKDLKNLVMERYHHRVKASPEEIVEAIDGKITPHIRFLINCIQKHISALHQQIAEVDAEIDKYVKAYETQIELLESIPGVGREGAISIISEIGVNMDFFPSEHHLASYGGMCPGNNESAGKKKSSRTRKGNQHLNTYLVELAWSAVKTKNTYYKAKYEILVKRRGKKRALIAIGRKILCAIYHMLKNNESFKELGSNYLAEKTQKNRIEYLKRELRQYGYKIERVA

SEQ ID NO: 276124 - protein, 343 aa, unidentified
MNEVITIGVDLAKNVFQIHGVDAEGGVVFRRQLRRGQMLPFFKKQPACLVGMEACATSHHWGREIESLGHRVRLMPPSYVKPYVKRNKNDMADAEAICEAVRRPTMRFVEIKTPQQQSVLMLHRTRHLFVRQRTTLINALRAHLAEFGIVAGVGRNGLERLLKVIEDGEDDRVPAAARDCLLALRDQLEMVKGQVLDADRHILAWHRSSEVSQRLDDIPGVGPLIATALVASVPDPHVFKSGRDLAAWIGLVPKQNSTGGKDRLGHISKAGNRYLRMLLVVGALSVIRRAKQVGYTRRPWLTKLLQRRSTKIAAIALANKIARTAWAMMAHGTFYQEPQSEVV

SEQ ID NO: 276125 - protein, 426 aa, unidentified
MRITQKLHEIKSNQVLDVAVDVHKDTLNLFFTLDGKEYRDECPNHTRSIEKRLLKYHGIAQEQGITRLRLICEPTGEYQNKLLRTARRQGHLTCLVNTESVCNFRVIESNDTNKTDIKDPKVIATLGRLNKVIRHRVLSEDYQVLRKLGRIYHELDSDITALRCKIDRLLIEFFCDFSFTKDFLYGNSGAVLIDRFGCNPYRIIETGFETFAATMKQAIPRIRKDTITRLWQDSESSVLNELLPGYRDVLEEQFRDLIARFRDRECRKEQIVEQMKIIFRRLRDDDPRIPPPTAGVISEKYLALLIAETGPMADFRSWRQLMRFAGLNIRMRQSGKYMGKNKISKKGSPLLRKVLNHIVLPLVRTGWLYGDYYHKKRETEKMAGTKAMTIVSRHFLRKFHGWYKSGAAFDEKRFFACEAEYLKKAA

SEQ ID NO: 276126 - protein, 324 aa, unidentified
MQGKEASEQETKAKSSVGIDVSKCWLDIHVLPSNERLRVTNDCAGIRQLKRWLARFDIALAAIEATGKWHRHVQRSLVASGIPTAAVDPFRVRMFAKAQGILAKTDRLDARVLALFAAVMDPSVRAPAPQIMAELAELVVARAVEAQVALKNQVCTADGKFLKRQLERRLGRASKDIAELESEILKRIKTDNSLAKRYTILTSIPSFGFAVAATLLACLAEIGSTTAKQIAMLAGLAPIADQSGERDGLRVIWGGRPIVRRILYLAALSATRFNADMKSFYKRLREHGKPPKVALIAVARKLVVLANTLITEDRNWQPRSPKHA

SEQ ID NO: 276127 - protein, 350 aa, unidentified
MVMLGIDVHKDTHTAVGVDQVGVQEAVRTVRATDAGHRQLVRWARTHWPEERTWAVQDCRHVSVRLERALLAAGERVVRVPPKLMAGARTSARTRGKSDPIDALAIARAALREPDLPVAEHDEVSRELKLLVDHREDLVAERTRMQNRLRWHLHELDPELDVPARGLDRLVVLERLTGWLGGQPAGVVTRLATELLVDISALTVRINALERDIGERVAQLAPALLALPGCGALTAAKIVGETANVGRFRSEACFAMHAGVAPIPASSGRTQRYRLARGGNRQLNAALHRIAVTQIRLPDSLGQVYYQRRRARGDTTMEALRVLKRRLARVVFTLLQPTATTATGDLPAAA

SEQ ID NO: 276128 - protein, 319 aa, unidentified
MTQNDLAVVGIDVSKDKVDVCIRALALQQTYPSSAQGHRKLVGWLGKHQVSKAVMEASGGYERDWARVLRKSGIEVRIVDPKRVRSFAQSAGRLAKNDAIDAEMIAWFAETFSAAPSQAHDAAREELVELVKARIALVDLKRRLQSQSEHIAPGAVQKAHDRILKNLAAEVVKLETAIAATIEAVPYLAERAEIIESVPGLAGTTSATIVAGMPELGQVSDEIAAALLGAAPYDDDSGKRHGGRHIKGGRRWVRNALYMPCVGAATLNNPVLKAFYDRLIAKGKKPKVALIACMRKLIIILNTMIARRQKWDPSRYALN

SEQ ID NO: 276129 - protein, 310 aa, unidentified
MDIIAVGIDVSKDRLDVAVHPGGEAFVVERNGAGLEQLTARLKQLAPTIVALEATGGFETIAAAAVGGAGLPVVVVNPAQVRAFAKALGQRAKTDPIDASVIAHFAAATRPEPRPLPDEATRFLSDLVTRRRQIVDMIGAERQREKRATSQHLRKSITRLIKALEKELVSVDTDIDDAVRSSPAWREAEDLLASVPGVGPIIARTLMAELPELGRLNRKQIAALAGLAPYTRQSGQWRGKSFIGGGRQAVRTVLFMGAMTARRHNPVLKAFFGRLVANGKPKLVALIAVARKLLTILNVMIRTKTPWQPA

SEQ ID NO: 276130 - protein, 339 aa, unidentified
MASVPVFVGLDYHDEQVQVCVLDASGKIKANRSVANDAAQIDRLVRRHGEVVGAAIEACCGAADLAEGLATQQQWPIKMAHPGYVARLKQSPDKTDFGDARLLADLERVGYVPKVWLAPEATRQLRRLVRYRQQLVDRRTKTKLRMRALLRENRLRPTLECNAWTKAWLGWLAATTELGEDDRWIMNQHLAELKHLLDQVRQTEKRLKQHAENDPLVVQLMQLAGVGLITAMTLRAEIGRFDRFANGKQLARFCGVTPRNASSGARQADAGLIKAGNPGLRRVLIELAHRLINRVKGRWFSLAHKLLRRGKPRNVVVAAIANRWVRWLYHEMCPQGLLT

SEQ ID NO: 276131 - protein, 366 aa, unidentified
MKKTITVQASKSEIFKEQKLTIGLDLGDRWSFYCVLDEAGQVILEQKLPTTPEAMKQTFGKIPRSLIALETGTHSPWVSRLLAELGHEVIVAHAQKVQLITKSNRKDDRHDARTLARLARIDPELLGPVRHRSAKAQLHLTVIRARAELVSARTALVNAARGLVKSYGERLPKCGTYQVSRELAAALSTELRDVLEPLLQEIESLNERIKEYDERMEKIAKEVYPQVSLLKQVKGVGTQIALTYVLTIEDPYRFLKSREVGCFLGLRPGRRNSGQSEPQKGISKEGDRYLRTMMVQGAHYILGPFGEDSDLRRWGRKLAERGGKNAKKRAVVAVARKLAILLHRLWVSGEVYEPLRNSQKAMRAVA

SEQ ID NO: 276132 - protein, 348 aa, unidentified
MTTLARSVTGGVDTHLEFHVAAALDERGGLLGIERFETTTRGYKKLLAWLEDFGPVAMVGVEGTSSYGAGLTRHLHAEGIAVVEVDRPNRQRRRRQGKSDPKDAVSAARAALSGDADGAAKTQDGNVEAIRVLRVARTSARSARTQALNQMRSLVSTAPEPIRGELRGLSVHRLLARASTYRPGAGRDVVSLTKLTLRNLARRSIELEEEIKSYDAILEPLVTETAPELVDRLGVGPDSAGALLVAAGDNPERLRSEAAFAHLCGAAPLDASSGKQQRHRLDRGGDRQANSALWHIVITRMSYDPRTTAYIERRMNDDQLTKKEAVRCLKRYIAREVFNLLPMDRLTA

SEQ ID NO: 276133 - protein, 356 aa, unidentified
MNYIAFDSHKRYTLASVESSTGQRLQEKRIEHTPGALHEFLSQFEKGSPVAVETIGNWYWIVDEIEQAGMVPKLVNAGKAKKMMGSVNKTDKLDARGLNKLQRVGVLPTVWIPPAELRDMRDLPRTRMVFTQERTKLKNRIHANLTKYRLELIGVSDTFGVKSMDELNKRISKLPIHTRYATERLLEELRRVETEIGLFEKRIKEVFKDSVELKRIMSLPGVGYILGVVILLELGNVQRFPGAPQLASYCGCTPRVHSSGDKVRFGKLRVDVNHYLKWAFTEAANVISTHKSHWPHRHSVRLYNRISERKNHQKAIGAVARHLAEATYWMMRKEEDYKEPKSIGEVIIGEISAVPV

SEQ ID NO: 276134 - protein, 436 aa, unidentified
MRGCRCSMIMGFTKPIEHFNLQRKKVITMNTLYVGIDVSSKSNVVYLMLPNGDKHSNFSVANSHEGSTLLVKKIYSALTSHSLDTVLIGLEATSVYGDNLVYFLREDATLAPFNRKIHVLNPKQVKKFHDTYNDLPKNDYVDSFVIADCLRFGRINKEVYMGDYRYKALQNLTRARFFAVQNLVKEKQRFMNVLFKKYSTMTQEKVFSDDFSTTALAVYDEFESAEALANMDLHELTDFIIEKGKNRFPDPDAVAKAIQKAARSSYRLPKTVNDSVNQVLSISITSMKALESQIKEFDKAIIALMELLPNVLISIPGIGPVYSAGIMAEIGDINRFDNQASLAKYAGLAWKQHQSGGFEAEVTRLIPSGNRFLKYYLCEAAFSLVRCDKEYSDFYHLKYKEVNRCQHKRALALTARKFVRLVFRLLKDNRLYCPAK

SEQ ID NO: 276135 - protein, 344 aa, unidentified
MFVSINEVGEKTPATRVNHSREEFQAYLKTLPPNSLIAVETIGSWYWMVDEMEKAGHKPRLTHAGKAKKMAGQLNKTDKLDAHGLATLLKAGTLPSVWIPPGELRDKRELPRTRMVLSHIRTKLKNRLHATLAKYNLQIEEVSDLFGKQGRVLLEQSLIKLPPETKRAAQEQLKLLDQVEKQLEEMEKRIQEVVKETEEMKLLTTIPGVGSILSIVMALEIGDVSRFPSPAHLASYAGTVPRIHSSGGRTYHGRVRPDVNRYLKWALVEAANVIVLNQTRMASRHVAQLYKRIRMKKGHPKAVVAVARHLAESSYCMLKNNEPYKEPAGKKNCFVQPRVSATLA

SEQ ID NO: 276136 - protein, 311 aa, unidentified
MENYVGIDISKRYFDLHILPEDKQHHFENDHKGIRHCLKMLTDLRPKLIVMESTGGYEFALATELYVAGLAVAVVNPRQIRDFAKAIGQIAKTDKIDAKVIARFASTIEPPAREVMDSKAMRLKSLVARRDQLTQMHVAESNRMEHAVDRSIAHSIKAILKVIERQIADIDKQIVEHINHDEQLRRKADIVDSAPGIGDTTAFMLVTKLPEIGTLNRRQIAALVGVAPINRDSGAFRGKRMTGGGRSSVRSGLFMPTLVAIKHNPVIREFYQRLLSVGKTKMTAVIAAMRKLLTILNVMVAKNEFWNPKVT

SEQ ID NO: 276137 - protein, 342 aa, unidentified
MKIVMIGIDLGKNLCSVAGLDASGAVVLRRRMKRESVALFTAPLEQCTVAMEACCGAHHLGRRIAEQGHTVRLMSAEYVRPYVKAQKNDERDAEAIAEAATRPTMRFVELKSEAQLEVQSLHRVRGRLVAERTAVINQLRALLLERGITAPQGRRKIERLLPEILGDDGNGLGPRLRRLIADMREEWRDIDRRISAFDDELAERARAEEMTCRLMRIPGIGVLTATALMAAVGDARRFTRGRDLAAWLGLVPRQATTGGKPKLLGISKRGNAYLRTLLIHGARTALPGLAKSDTPLGRWLKGLLERAHRNVVIVALANKLSRIAWAVLAHDRHYVTIQVAAD

SEQ ID NO: 276138 - protein, 334 aa, unidentified
MKKRYFMGIDVAKATFDFCLLSRSGACLWRGQFSNDARAIERFVHQLRAHGWKLEQIHFALEATGVYGQKLIAALHQAGLAVSVLNPAQVKYFALSLLRRTKNDTVDAEIIARFCRERKPLATQPLRPIETQLQLLVRERESRVVEQTRERNRAKKDPYQIELPKLISRQRHQRLAQLKKELAQLDAEIDSLIASDQRLKTQSQLLCSIPAIAKLTAAKLLAELAGKEFQSARQLGAYAGLTPAESRSGYTLYGKTRISKIGNAFLRKALYMPAAVARRWCKPFQLWIAMLQSRKLHHLAIRGAIMRKLLHIVFGVLKHHQPFNPMLASIPKTV

SEQ ID NO: 276139 - protein, 497 aa, unidentified
MPNKSTIYSRCNPQLLKLFETAGHPAKVLCVALDYAKAQHTVLFCNGLGELVKPSFALDNTAQGAATLLREVRACLKSRKLRPEHVFFGGEDYPSFAENFLRHLRQEKFLVVRVNAWEAKQQRDNFQASSDSLDLLGIARCCLNRRGESVRDLPTAYPNLRIATRDRDKLVRMRTAVSNRIHSYVDRLFPGFLSEGKSALEPFSQTSLELMEDRFSPAQLRRRPRQALIQWLGRRGVTQPRDTADQLKRLAKTVLEPAPEQTLLLQQTLAQLVGLYRGLEQSIARIDREVAHWLARTPGAWLTSIPGFGITLSAGWTAELGPPSQWRSVRQLCSYSGVVPKTKQTGGPQKEPVVGAVQARCNKRLKNVVLQAVQKVIRHGPAELRTTAQALAARGAHTEFALAKRLVRLGKYLAVTGTVYRPKALMDPATPKATLAAHYQTVWEKLLPKWRDKADLREVFAPAQPLGQWRQMVQKLYALELRLPQQKTGQKSSALAP

SEQ ID NO: 276140 - protein, 337 aa, unidentified
MALYCGIDLHANNSVLAVMDDQDKALYEKRLPNDLSQIIGALQPYQQDLAGCVVESTYNWYWLVDGLMDAGFPVHLAHTGAVPQYAGIKYTNDESDARHLAHLLRLGILPEGHIQPKAQRALRDLLRRRLLLVRQKTLHHLSLQSLIARYTGQRLSANEIKQLDRDAIAELLEEPIALGGQITCLARRWLEDAIEVLEHEIHKQLKPRLEYQLLTTVPGIGQALGSTIALETGDIGRFPGPGHYASYARCVKTEKISNNKLKGRGNAKNGNKYLAWAFMEAAHYAAIWSPAIKRYYQRKQARSHILVAKKAVANKLARACYYMLSRQEAFDVNRAFG

SEQ ID NO: 276141 - protein, 321 aa, unidentified
MNVIALDISKDTADCHLSGNGKEDTLKIDNSISGSLQLLGWIKQHKIRKCVISMEATGIYYETLANHLSQYHQVYVINPLKIKNYSKAFFNRTKTDKADARLIAEYTKRHLDKLDGYHAPEADQYRLHKLIAAKEQIMLQSRQAKNRLHAAGNDEFVKTIYQTIVRQLAEHQEHIEAEIKALVAADERLAEQCGNLATIAGIGEKSAVIILHHLNGRTFATANKFTAYAGLSPKIEQSGISVNKRQVLSNFGNRRLKAAFFLPALNAYRMNLFPQLVRNLEAAKKPKMVIIVAIMRKLAKICYYMHKSGKPFDVRRYQSAP

SEQ ID NO: 276142 - protein, 419 aa, unidentified
MSFKILKNNCCGLDVHKTWIYACIGITDSLKRTEYKEARFSSFTKGLNELCDWLSKYNCTDVCMESTGKYWIPVFNVLEKNNIRVTLSHPKYTKPQKGNKTDRKDAKWICDLYMCGMVKPSFIPPADIRELRDLVRYRFKLTCMITGEKNRAHNCLTVSNLKLDDVFSDIFGKSSRSITEQILQHPGETFDVAPFVDGRCKTPVEEIQAAVDGAISKEQAVKLRQCLNHIDELEMHKAEIEREIFRLSDKYESVLSLIRTVPGFDKTPMTAIQVLSKIGGDMSVFPTAKNLVSWAGCCPRNDQSNHKIKSTRISRAGSYFKPVLVQIANALIKSKKHPEFTTRYRRIKARRGHKKAIIAICRMILTAIWHILTDLKPYTPEGFLESRPVNKEKVLTISQALNLIKQRGYIIKDDVGPVT

SEQ ID NO: 276143 - protein, 390 aa, unidentified
MDVLYQSCAGIDVHQANIVVSILHGPLTSTRPNREMATFDTTTKGLRACHDFLSQFHVEAVGMESTGVYWRPVWHALCDDFELILAQPAHMKAIPGQKTDKKDAHWIAKLTRIGLLPRSFVPDEIIQELRELTRQRKHYVESRNRETNRIHKILQSGGIKLTTYIEDIMGLSGRNLLQLLVDGTPITPRIVRQSVYTSLKKKVPQLLEALDGYFSDHHRFMLKQSLEIYDFYQKQIELLEERMNVYLSQYEKHVEILDSIPGIDVITASVIISEVGVDMSQFPTAGHLASWAGLCPGNNESAGKKRSTKIRHGNSYLKKCLCQAAFAVKKQKGSPLADRFYQIQSRRGSQKATIALAHQLLKIAYILLKEQITYPEFLAQKKTTRDELVA

SEQ ID NO: 276144 - protein, 405 aa, unidentified
MRIIGLDIHRVFAEAVALEAGRLIRLGRIEMRRDRLAEFARSLTHDDHVVIEATGNATVVAEVLRPHAGRVVIANPQQVRLIAYAKIKTDRIDASVLARLYASGFLPEVWVPDERTQALRRQVTRRNQLVRQRTRLKNMVQSVLHAQLIPPCPTADLFGPKGRAWLVEQILPADERSAVERHMREYDRLGEDLDAVERDLARGALADEQTKRLMTIPGIHMVVAVGIMAAIGHIERFANPQQLVSYFGLNPSVHQSGNGPVHRGRITKRGRGHARGMLVEAAWVAARVPGPLRAFFLRIRARRGQHVAAVATARKLAVLIWHMLRRNEDYAWLRSALHARKIRDIELAAGHPARRGQRGAAYAYNLSTVRQRERRRVEQAYERLVKGWTQHGPKVRTGAATEARQ

SEQ ID NO: 276145 - protein, 363 aa, unidentified
MKIAPNTSVEVNVTLGVDTHKDNHVAVALDRLGRHLGTLSVPTTTAGYRKLLGWARELGTIEQAGVEGTGSFGAGLTRFLKAEGIQVREVSRPKRRDQYRSGKSDPIDAEAAARAVLAGTATGEPKGADGTVEMIRSLRATRRSAVKARTQASNQLKGMLLTAPQELREELRSLSTAKLVRRASRFRLSGSPNTVESATKFALRSVARRYQHLCEEIKELDEQLNRLVEQAAPELVAVDGVSTDTAAALLIAAGDNPERLKSEAAFAHLCGVAPIPASSGKIVRHRLNIRGNRDANRALYVVAFGRMSRDERTKAYVARRTAEGKSKKEIIRCLKRYIARELYRILISPVRSPLRASPTLSAT

SEQ ID NO: 276146 - protein, 317 aa, unidentified
MKTNQSAIHIGVDVGKHQLDFFCHESGQHFTTTNTARGIAQAFKQLSPFSIGLLVMEATGRHEQALAIAAQRRTIPVVIAQPIVVRRFAGALGILAKTDKLDSQVIAQYAATIKPPARDLPDKTTRQLKDLCVRRKQVINMMTMEKNRLQVMPAFLRADIRRSIATLQRQLSKLDERIHQLSLSVAAWRKKREVMQSMPAVAPVLATTLISDLPELGALNQKQIAALVGVAPMNRDSGKMRGKRRIRGGRAHVRTVLFMATMCAVQHNPVIRAFYQRLLANGKHKKVALVACMRKMLILLNAMVRDETCWGEMKSAA

SEQ ID NO: 276147 - protein, 354 aa, unidentified
MRIVCALDVHRRQITYAVVDVVSGEMSRGRITPATRESVREWLARFEGLDEVHFALEGTTGWRFVVEEIARAGHRAHLADPAETAAKRGRKRRAKTDRADCDLLLKLLSARELPESWIPPAQILELRTRVRLRKRLVDERTAWQQRLQAQLFHQGVPAGLRPRTRAGREALASVDLSPAGRELLALALRMIDVIDHELAPLDRTLSLFARRQPGCRELIARLYGIGPVTATAILAELGDARRFGCSDDAVRHCGLDVTVHQSDNKRAPGHLSHEGPELLRWALFEAAQQACRPASPDHDYYRQVARRIDHNRACLSVARKLCRRAHHILRELGDEALAPVEPAPTREEVIAAAA

SEQ ID NO: 276148 - protein, 359 aa, unidentified
MQEITRVGVDLAKRVIQVLAVNAAGMRVTGRALPREKFLAWCAQLPAGCLVAMEASSSTHHWARKLIAMGLDARIIAAHLVSPYRMQGKGGKNDANDAAAICEAASRPQMHFVAVKSVEQQSMLSIHRLREGFKTERTACINRIRGLLAEFGLVFPQKPAVLRQALPETLEDASNELAGLARLALQRALQQWQELDEHLDWCDQRIAAHLKANEQVRQAQQLMGVGPITASAVVATVGDFRQFKDGAQFGAWLGLTPRQNSSGGKNCLGKITKRGDMYLRTLLIQGAKSIVQTAQKRDDPISKWVLKIREKSGWQKAVVALANKNARILWAVFVRGKAFDVNHVSVKPGSLAQAGAVPT

SEQ ID NO: 276149 - protein, 343 aa, unidentified
MKLIRVGVDLAKAVFQLHGVDRKGQVTLRRKLTRANWVKVLLDAVEPGCVIGMEACGGAHHWARALQAHGIAVKLIAPQFVKPYVKSHKNDANDAEAICEAMSRPNMRFVAVKTIEQQDIQAVHRVRFELSNQRKAKGNQIRGLVAEYGLVAPKELWHLRAAIPVWLEDAENGLSARFRHLLSGLWQDLLVLDQRMTELDREIALIANADPVAKRLQQLRGVGPMIATALVATVGDAKQFANGRQMAASIGLTPRQNSSGGKERLLGISKRGDTYLRTLLIHGARSIVRTAKGKDDRLSQWVTRIAETRHYNVAAVALANKTTRIAWAMMKHGTEYRADQTAA

SEQ ID NO: 276150 - protein, 388 aa, unidentified
MEARTVNNLPPAASHDETVRCLLAIELSKKSWITAVNTPLSDKISRHRLQGCDWKGLLELIERIRARVARELNRPVEVISCYEAGYDGFWLHRLLEAHGVRNLVIDPASLQVDRRARRAKTDKIDAERLLRSLMAYLRGEPKVWSVVRVPSVAEEDDRRLHRERDRLINERVQHVNRIKGLCAVHGIYDYEPLRSNRLARLKQLRTGDGRELPQRLKAEVVRELQRLELVLKMIKTIEAERDAIAASKISTHTHAKKIQDLVKLKSIGPEIATALVGEVFYRRFNGRHQVASYVGLTPSPFQSGSLNHDQGISKAGNPKARTIMIELAWLWLRHQRKSPLSVWFRERVGTARGRIRRITIVAVARKLLIALWRYLETGMVPTDAVLKG

SEQ ID NO: 276151 - protein, 318 aa, unidentified
MTGQTSSYVGIDVSKGRLDVAIGEQGEFWNVANDEQGIAKLVERMKEVQPELIVLESTGGLEMPVMAELYASQIPVALVNPGRVREFARSIGVLAKTDKLDARLLARFAEAVQPPVTRLPDEQEQHLIALVTRRRQLIEMLVAEQNRLNTVRHSLRANLQQHITWLRQALADLDQEIQQFIHQSPVWKDKGDLLQSVPGVGPVTACTLLAELPELGRLDRKKIAALVGVAPFNDDSGHRRGKRRVKGGRSSVRRVLYMAALSASKFNPVLSLFYQRLIQHGKEKKVALTACMRKLLTFLNAIIRDQQRWNPSLKHFAS

SEQ ID NO: 276152 - protein, 309 aa, unidentified
MKADRHQVERLLKWAIDFPERRWAVESANGLGFLLAQQLVAAGEDVVDVPPTLAARVRVLGSGKTQKNDPNDALSTAIAAMRAKRLRSVVAENHGGVLRLLVDHHHDLGSLRTQAVCRLHALVRCLVPGGTPLRLSAARAGVVLRSVRPTTAVDAERKRMALGHVADIRRLDAEIAASKARIVTAVAASGTTVTELYGVGPVVAAFLIGHSGDMARFANRDHYASYNATAPIEASSGPRVRHRLNPRGNRRLNHAIHVIAICQIRHPTDGRKYFDRKVAEGKTTKEALRALKRQISNGVYRQLVIDSGR

SEQ ID NO: 276153 - protein, 409 aa, unidentified
MTRVIGLDIHRVFAEAVVLDTGKIVPLCKIGMTRQHLRAFAHTLTHDDHVVIEATGNAAAVSEVLAPHVGRVVIANPRQVRLIAEARIKTDTIDATVLARLYASGFLPEVWIPDERTLALRRQVTRRNQIVRQRARLKTMLQSILHAHLVPPCPFADLLGPKGRAWLLSQPLPPDETDAVTRHVREHDRLSEDLRAVERELARDALASPDTKRLMTIPGIDMVVAIGLLAAVGPIRRFEGPDKLVSYLGLNPSVHQSGESRPRHGRITKQGRTHARTMLVEAAWQAVRGPGPLRAFYERIARRRGNHIAAVAVARKLAVIAWHMLRHNEDYAWVRPALHAKKLRDLQLRSGQPKRRGQRGTAYSYNLSRVRREERRRAELAETAYRRQTEGWTRRPRKVPTGAAKEERR

SEQ ID NO: 276154 - protein, 367 aa, unidentified
MEQYDVGLDVHSRQSPYVIEDGAGQVIARGEVPTTPAALDTLRTTHHLPPGTPVALETGTVAFFVARQLAALGLTPQVIDAHEVRLKAHRPTQKSDRRDAFELCEGLRGGIYRAIVHVPRPEVSRVRETLARRRHFVRLQGAQVTAVKALLRAAGLGRLSRSLGSEVGWAKVLATLAEHGELRAYVEQHRALWRCAREQIATLEATLAQQQTTFADASRRLQTIPGVGPIVAVTAIAVFSDIARFPDAKHAASYAGLVPATYQSGDRAAHGRITKRGAAELRAMLCEAAHHASRPTHPLHPYFAQLCARRGHKMAVVAVAHRLARIIFAMLRDGSDFDIGKLAVERGPFARQVVRLYRRKPVARAQR

SEQ ID NO: 276155 - protein, 401 aa, unidentified
MTKMADEGCRVTVGIDTHAEVHVAAALDERGRLLGVESFPTTAKGHDRLERWARAFGVIEAVGIEGTGAWGAGVSRYFAAAGYRVVEVDRPDRKTRRQRGKSDPIDAEAAARAVQSGTAAGTPKTRSGRVEAIRALRVARRSGMKARSQAAHQLHCLVSTAPDQLRDQLRTLRLAELVEAAARFRPGDPADPLQATKIALRAIARRYQRLDAEINDLDALLDPLVAATAPNLVALNGVGTDVAGQLLVTAGDNPDRLRSQAAFSHLCGASPIPASSGRTTRHRLNRGGDRAANAALYRIVLCRLRWDDRTRAYVERRTKEGLTKPEIIRCLKRYIAREIHRELTRLPLDNPYEHLPGGRSVGQELLCDRSATPEAGLGYWPTQAAEAAVRARRHRSEARRQ

SEQ ID NO: 276156 - protein, 357 aa, unidentified
MSKMPCLLVEVILGVDTHRDTHAVVLIDLLGRLVAADTFPTTRAGIRALIAWAKQHGTIRRAGVEGTGSYGASLTRALRLEGIDVIEVTRTARVGARHRGKNDTRDAEAAARNVLCGQATAIPKTRDGIVESIRVLRNTRAGAVKARSQAIVHLKSLVLTAPDELREPLRDLSTKQLLSRCARMQRTGRLDTLHATRHALRTLARRHRALSDEIAELDALLADLTAKAAPRLLRQPGIGPEIAARLLIVAGDNPTRLRNDAALAALCGASPIEASTGQSTRHRLNRGGDRQANSALWLIATNRMTHDPKTRAYVTRRTTDGKSTKEIRRCLMRHIARGIYPLLIADLHDAQTHPTLT

SEQ ID NO: 276157 - protein, 365 aa, unidentified
MFTERTSVGLDVHARSVAAAAIDAVTGELVRAKLTPSHEHIRSWLGGLPGPVAVAYEAGPTGFGLCRALRANGIRCEVIAASKVTRPAGDRVKTDAKDAMLLARLLRVDELTSVSVPTAEQEAARDLVRAREDCRTDLMRARNRLSKLLLRHGIVYSDGAAWTDKHERWLRRDAFGQLTGTATRTVFDADYETVLVVTARRARLDTQIEAMAADSEFAPLVRRLCCLRGIATLTGFALAVEIGDWTRFTGASIGSFIGLVPTEHSSGASRAQGRITKTGNGHVRRLLVEAAWHHRTRYVIGKTMQDRWNLAPAAARARGDAGNRRLHQRWVKFIDRKKQANTANTAIARELAGWCWSLAVLDEVS

SEQ ID NO: 276158 - protein, 382 aa, unidentified
MSTNSITFVGMDVHKKAINVAMLRPDARQPVEWLVANEPAAIRRLGKKLVREAAGEVRCCYEAGPCGYALQRELEAVGGIVCEVVAPSLTPVKPGERIKTDRRDARKLAELLRANLLTVVHAPTVDEESVRDLSRCREDAQEDLSRARHRMGKFLLRRALIYRMGKRAWGKVHRQWLRGLCFDHAADAAVYGDYLLAIEQLEERVRTLQAQLTEVAQQDPYREPVGWLRCFRGIDTVTAITLVAELHDFRRFQSARELMAYLGLVPSEYSSGDSRHRGSITKSGNRHARRALVESSWHYRHRVKSGESLRQRRQGQPARVIALADRAQERLSRRYRHLIERGKPPQKAVVAIARELVGFLWAALVPITVVECPDRQAQHQDS

SEQ ID NO: 276159 - protein, 426 aa, unidentified
MLAVGIDWAEEFHDVALGRPCDGVFDEIHVDHTPAAIDALIARIAALEPDAAEVRVVIETRHGLLVERLVDAGFTVLPVNPDLVARRRGPAKKKDDAEDARIACLIALDQFLDLRKLVPHGELAGELRAIARDDLRAQRDERRLLNRLRADLLAAFPAAKNIAGEDMSAPTFLKLLERWPTADALAAASRDDIEAFARSNKHGWPDRFADRVETALAAEHFAAKPYLVRAKADTIRLAAAQLLLIRSQRRVWEKRMGALLLGAPREGRSNQPGDDRGPAVPGGEIYLSFPGLGDRLAARIAGEIGDITTFTTANALQCYAGKAPVTRRSGKSELTIANRLACNRFLADAVQQWAFTSLLRSGWAREFYDAKIAIGNNHHKALRALGNRWLEVLWHCLANDLAYNEEIHVANRNRATGRPQEPSKAA

SEQ ID NO: 276160 - protein, 374 aa, unidentified
MSRTPRIPEPSHLPTSSPDIASAQVVEEAVLGVDTHKDVHVAAVISGLGVLLGTRSFPTTASGYRQLLDWAGGFGTIRRAGVECTGSYGAALARHLSANHIEVIEVNQPDKASRRRRGKTDTVDAEAAARAVLSGRARATAKAGDGPVEMLRIFKLAKTSAIKSRTQAINQLKAVLVSADPQLRESLSGLRNPTLIRRCAQLDTSPPHDAPTVAAYTLALLARRILELTTEIDDLNQQITAILTRHAPTLLQRNGVGPDTAAALLIAAGDNPERLHSEASFAALCGVSPVEASSGKTHRRRLNRGGDRRANSALHTIVLSRLRWDRPTRAYLARRLTEGKTRREAIRCLKRYVARELYRLIAPPTEPQRQTPAA

SEQ ID NO: 276161 - protein, 359 aa, unidentified
MKYIGCDFHPSFQQIAVLDLETGELVERRLEHGNGEAKAFYESLSGRVVVGLEASGNTYWLERLLAGLGHELWMGDAAQIRKQDSRKQKHDRRDARLILKLMEENRFPRIWIPTVAERDLRQLLIHRRHLVRMRARIKNQLQHIALNQGVQKQGKLWSKAGLELLRKLELEPWTRQRRDTLLEMLEQFDIRIQPLDDAVKQAAETQPRAQRLQTHPGVGPVISLATVLTMGEVSRFPDSRSWVSYLGLNPSEDSSGVRRRLGGISKQGNPFLRYLLVEGAASAAKGDQDLGRMYARLKARRHHGVAKIAVARKLAVRLYWMERTGKRYPEVVRMQGSQSHLVADGMAVRLNRPPASPQP

SEQ ID NO: 276162 - protein, 379 aa, unidentified
MDFSTVARLPAGEKPATLFVALELSKATWLVALHSPAADKISLHRLAGGDTQGLLTLIERKRDQAQTALARPVHVISCYEAGYDGFWLHRLLCASGIDNRVLEAASILVDRRSRRAKTDRLDAAALLRTLMALERREPWVCRVVRVPSPEHEDTRRRSRERARLVNERTQHTSRIKGLLMTQGIRDFAPTRRDWRERLDRLRTADGHALLPCLKAEIARECRRLWQVIDMIAEVEAEQHQVAAETTTGASQLSRLRGIGLTIASVLGNEVFFRNFQNRREIAGYLGLASSPWNSGSVSRDQGIQRSGNPRGRQTAIELAWLWLRHQPESGLARWFQERVGTSKGRIRRTMIVALARKLMIALWRYVTQGLMPEGAVIKA

SEQ ID NO: 276163 - protein, 385 aa, unidentified
MRYTSFSSPLATPRERLLFIGMDVHKDTHAAVGATAYGEKLFEMSIGNSRGDFNDLIEQSRSVAATRGLDLVFGLEDSTAYGLRLAKHLFANNLLVKTVPPIYVDRERKYETHPEKNDVLDAYAAAKVLIQRIDTLPTYRITEQNELGKEMKELTLDREFLVKEQSRIKSHLHRLLHRAWNSEYKTKFKDPFAVKGLKYWLAHPLPTGAAKDDILGTPTILKNQIKRKVKRLIDIREELKDIGVELQSLIDQTGQKITTLNGCGVTLGSKVLAEIKDISKFSSASALTKYAGLCPREKSSGKTFRHVKSKSGNRQLNTAIHRIALSQISRSGNKHAKEYFQRKITEGKTKAQALCCLKRRLVDIIYMMLKHKQPYQEELHVSPKT

SEQ ID NO: 276164 - protein, 350 aa, unidentified
MLAEQVDYVVGVDTHRDQHALAIVDAHTGAVIAQTTTAASARGYADAVRFADQHAPGDRLWAIEGSGHYGAGLVRHLQHQGGEQVHEVDRTSRSERRLRGKDDQLDAVRAARSPLAHEHRARPRAGEHQEALRLLLLARRTAVDTRRVALVQLRSVIVTAPDALRDQLRRLPLGELLKRCSRFRRSSSRTPAQLATILVLRTLARRIQTATAEAETLEHEILSHVRALVPELLNEPGIGPIVAAQLIVTWSHHDRIDSEACFARLAGVAPLPASSGQTTRHRLSRGGDRQLNRALHTIVLHRRQHDPATRDYIARRISDGKTSRDATRLLKRYLARHLYRVMQNSTPLTT

SEQ ID NO: 276165 - protein, 325 aa, unidentified
MFYLGIDVSKNKLDLALIQDGSGLQTPKRKVLANGQEGFSKLLVWLHRRTEGQVHACMEATGTYYEDLATFLVNSGVEVSVVNPACIANYARSSSVRNKTDSVDALVIADYCRAKHPKPWTPPSPEAKELRELVRRLSTLEQTKQDEENRLSSGISSPAVVRSVERTIRFISDQIKELERLIEQHINSHPNLKEDRDLLVTIPGIGDKTAAIILGELPNASNFDNAKQAAAYAGLSPREYRSGSSVRGRTRLCKVGNSRLRRALYFPAVVACIHNPIVKDLYQRLLRAGKSKMCALGAAMRKLLHIAFGVLRRRQPFAALGENLA

SEQ ID NO: 276166 - protein, 341 aa, unidentified
MSEVRVVGLDIAKSVFQAHGVDGAGATVLQKRLTRVRLLPFFEKLPPCLIGIEACATSHFWARELTKLGHEVRLMPPQYVKPYLKRQKNDMADAEAIAEAVTRPSMRYVASKSPDEQSAMMLHKVRLMLTRQLVMITNATRAHMAEFGIIAPVGRGGIDRLLAIIDDETDARIPTEARRCLQMLVAQLRLVKLQILENDRQVLALARSTELGRRLMEIPGIGPLVASALVACVPDPSMFRCGRNMAAWMGLVPKQNSSGGKERLGSVTKAGNRYLRQMLFAGAMAVIRRAMQGTRRTWLIRLLERRKPKVAAMALANKNARIAWAMMMSGEGYREPVTVTE

SEQ ID NO: 276167 - protein, 492 aa, unidentified
MIGHSIGIDLSITGAHDCTILDATGQIVQRFTFDSSSAGLQKLNQQIRDLDASRGASVVVMEPTGLAWFLPCLSLRAQHPDVKIVRIKTSKVAALRRYLQQDAKSDRLDSLTLAKMPLVDPEKLYAVDLPPAALQGLDRMTRQRARLVESIIGRKNRLQALVGGYFPGLMAVVGKPWERACRAMLTVALNPVTLAGQGTTALRKALQDTHSRKPLPEDLLPRLRTVCEQLARLYRPILEAGLLTETFFDDVRNELARELHLMDMEEQEVKELEAAIECRYQEVVPEDHLGTVKGLGAVTAPTILAAVGTPERFKNQAAFRGWTGVVAHASQSADSDAKGLPMTKAGPKRVKLALYQAAEIARLWDPQLAKIYYDQMVHKGKPHTKAIGAVMSHLASRIHAVLTEQRDYVLRDVDGREITAREARTIIQTQYQVPAEVRAERRARNKRRKRDVSTDVHRGSAKRSSQRSSSSSQMHSTRFRKVHQTATAAIAR

SEQ ID NO: 276168 - protein, 318 aa, unidentified
MNIEMNQNINVGVDTGKFQLDIYIRPLDIYFTVTNDDKGISDAIKEIKKHKPERIVIEATGRLEMPFIIACAKANLPFVIANPIHIKRFAGAIGQRAKTDKLDAQLIAHYAEAIKPKLSSLKPDTMQSMSDLVARRNQLLVMQTMEKNRMQILPKNLAMTIKPVLTVFKNQIDKIENKIVSLIESCSDYQAKNIILQSMKGIGKIASASIISNLPELGYISSKQASALVGVAPMNRESGRYKGHRKIQGGRHQVRTVLYMAMMSAIQSNPVFKDTYQRLVAAGKPKKVAIIACIRKMVVILNSMLRDGVMWEAPKAIN

SEQ ID NO: 276169 - protein, 339 aa, unidentified
MWYSGIDQHKAYCVITTYGPDGPRVKQVRVASTPLAVQQYFAAFPGPHKAVVESTGAWYWLADTLAGVGVELVLAHATRVQAIAAGKVKTDKVDSNILALLLRADLIPAAHMIAPAHRAPRDLMRTRLRLVAKAVSAQNSIDRLLEKFNARDVDELDKLYQLQANCHAAQMQLLEDQIGTLERALHPHLLPNAEVQRLLWVPGLGKVNAFTIYTEIDGIARFPSERQFFSYCRLVPGADNSGGHTRHRSGSKAGNRYLKLAFSHAGIRAVQYYPEIRSFFKAKARKKPIRIARTLVALELARIVYHVLTKQEDFNGRLKHRPLSRHKHAQWPRRASPPA

SEQ ID NO: 276170 - protein, 409 aa, unidentified
MQIAFGRVAGLDVHRDSVMACVRIPGKGERREIVQGFGTMTRDLLSLRDWLKAHEVEVVSMEATGVLWKPVYYLLEADFKLQLVNPAHIKNVPGRKTDVKDAQWIAQLTECGLLRASFVPPPEIRELRDLTRYRTELGHEWNREVQRLHKVLQDAGIKLSSVATDIMGKSGRAMIEALIGGSKDPEVLAELAKGPLRRKLGKLREALDGKFEARHAFLAKELLAHLDYLGGVDDRVTLQIEECLRPFVPQVTILKTIPGVADKTASRIVAEVGVNMGQFPSAQHLASWAGLCPGNRESAGLHKPCGTRKGNGWIKTALVEAAWAAVHNRKSALSGQFFRLRARLGAKQAIVAVAHSMIVIIYECLSKNVPYHEFGADHFDRIEKSRVKDRLVKKLKGMGYEVTLKESAA

SEQ ID NO: 276171 - protein, 382 aa, unidentified
MKTVSGLDVHKDSIFMCILDEQSKIIEEKFGVTTREINRLREVMKSHYVTEVCMESTGIYWMPIWRLLEDDFHLRLVNPQFLKQLPGRKSDVKDAQWIATVLLKELVRDSFVPDGNIQSLRQYGRRINEINKDLVRSEQRIDMILQRCNIRLSNCVSRTKNKSYRKVVDALIAGETSADVLVNLIHGRTVNRHGRSAVHDALEGFIKHSDRDLLKQYTQMLDAFEVQKQECIDSMVQMCQELYPKAFSFLLSFPGIKFISAAIIISEIGDNMKLFATAAALVSWAGLRPRNDESAGKIKSRKITHGNKYLRKAMMECAWGAARTKGSVFYSRFWHLRGMKKHHNAVIVAIARQLLTIIWTLLTKQENFDPEYNLKNNTCSYN

SEQ ID NO: 276172 - protein, 342 aa, unidentified
MEEVSIIGVDLAKNVFQLHGAASDGSVVFRKKLSRPQFARFMADHPACEVAMEACPSAHHWARELTGHGHRVRLIAPHYVKPFLKRQKNDAADAEAIAEAATRPTMRFVEPKTVEQQARAVAFRAREQLVKQRTEAINALRAYLYEFGHVAPEGIGYLPKLAQVVDDPGSSLPDLARDICRMAVEQVQLLTARLAAVTAKIAAASKAATMPKQLQTMPGIGPIGALAIETFAPPMNQFRRGRDFAAWLGLVPRQHSSGGKQRLGKTSKMGQRDIRRLLVTGAMSVIRWALRKGAPRNPWLERLLERKPPMVAAFALANKMARGIWAMLTRGEDYRDPKPVGA

SEQ ID NO: 276173 - protein, 398 aa, unidentified
MTESSDYESVQVFIGVDVGKDTHHAVAINRSGKRLFDKALPNDENKLRSLISDLKQHGQILLVVDQPATIGALPVAVARSEGVLVGYLPGLAMRRIADLHAGEAKTDARDAAIIAEAARTLPHALRTLKLADEQIAELSMLCGFDDDLAAQTTQASNRIRGLLTQIHPALERVLGPRLEHPAVLDLLQRYPSPEKLASLGEKKLAAQLCKLAPRLGKRLAADIAQALAEQTVVVPGTNAAAVVLPRLALQLITLRKQRDEVALEVELRVLAHPLYPVLTSMPGVGVRTAARLLTEVACRAFASAAHLAAYAGLAPVTRRSGSSIRGEHPSRRGNKALKRALFLSAFAALRDPLSRAYYTRKMSQGKRHNQALIALARRRCDVLFAMMRDGTFYTPQGS

SEQ ID NO: 276174 - protein, 427 aa, unidentified
MNYTQNSKIRSITESTLIIGVDIAKHVQYARAFDYRGIELGKIKSFENTAEGFLMFQQWAKAIATENNKNSLIVGMEPTGHYWFNLAYFLKDMDIRVVLVNPSHVKKSKELDDNSQTKNDRKDAKTIAKLVIDGRYSVPYAPEGIYSEIRTAMNMRDDISNALVRIKNKIAQWNDKYFPEFNEVFCNWEGKAALITLKNFPTPEKIIAKGSVQIAMEWKKEIKRGVGLSRATKLVEAAKVSVGIKEGLRLAEKELKLILDQYDLYMNQYKELELEITELTLQVPGAREMLTINGVGIMTVAGFIGEIGDITRFNHPSQIQKLAGLNLIETSSGKHKGKTSISKRGRSKLRSLLFRVTIPLVSKNNEFKLLHKYYTSRIENPLKKKQSLILLSCKLIRIFYAILTKKIKYNPEKLIKDANIVDLPNAA

SEQ ID NO: 276175 - protein, 371 aa, unidentified
MAKGTKYIGLDVHKETVAVAVAEGERGGEVRFYGTISNEDDAVRGLVKRLGGSGTTLSWCYEAGPCGYGLQRLLTKLAQPCIVIAPSMMPRRPGDQVKTDRRDAMTLARLLRAGELDPIWVPDEEHEAIRDLVRARRSAQEAATSAKQMVRSFLLRHDRRYCGKTAWTKAYWRWLSEQRFDFPHQQLAFEEAKHRVLEAQARVERLEAALAEAVEGWRFAALVRSLQALRGVRLIVAATLIAEVGDLTRFQNPKQLMAYLGLVPSEYSSGSRVHRGRITRAGNAHARTMLVEAGWTYRLPAREERRYRDRVAGLPEDIQAIGWKAQVRLCQRFRRLSATGKPQPKVNTAIARELVGFAWDIARRVQPEVTV

SEQ ID NO: 276176 - protein, 439 aa, unidentified
MRIASSVPMPNEVPIEQEIVAYVGLDWADQQHVICWQAAGSARVQSAVVQQRPEELQAWVAELRQRFPQGLVAIALEQSRGAVIAALMHFDFLRLYPINPKSLARYREAFASSGAKDDPDDAGLLLELLVKHRDRLTPWVPDDALSRELALRVEHRRQLVNLQTKLIQQLRSHLKVYFPQALDWVGELDSLQACDFLQRWPTLAAVQKARPSQLEKFYHQHHCRRPQLIQQRLEQIRQAQPLTQDPAIVQAYSQMVLALVAQLRVLILTLQQWQQQISQLFAQHPDAALFASFPTAGPVFAPRLQAAFGSRRDRFGSAAEVLQFSGVAPVTKRSGKSRQVQRRWARPKFLHQSFVEFTGLSIPHCCWARALYQQLRARGHRHWAAIRVVAYKWIRILFRCWQDRVPYDEQKYLKSLERRNPTLWAAIQQLPAHPSRKEV

SEQ ID NO: 276177 - protein, 395 aa, unidentified
MFIVGIDIAKRSHEAIIIAEDGQVVRKAFSFRNNCTGYNLLLEQVRRLTLVKSQIVFAMESTAHYWLALYARLLKDGYAVMVLNPIQSHSLRELYIRKAKTDARDSLIIADLVRFGRCKASNVPQDKILALRELCRSRAYLVDMAADLKRKLIALLDRIFPEYESLFDSVFSKASIAVLRKYSTPQKVKNAHLGKLTDLLMESSNGHFGEWKAHQLKEAACSSFGIDDSDGVYSMLLGMFLEQILSLTAQADSLEKQISVFFQEFNNPLTSIPGVGTVLAATILSEIGDITRFSSADKLLAYAGLDPSVKQSGEFKSNQNRMSKRGSPYLRRAIWLASTVAVHRDPMFQTYYEKKISEGLHYMNVIGHVSRKMTAVIFAVLRDGQPYQPILQSAD

SEQ ID NO: 276178 - protein, 343 aa, unidentified
MDHFAGLDVSVKDTSVCIVDDTGRIVREVKVASEPDALLAVLTNPSYHFKRIGLEAGPLSQWLFSALAEASLPVICVETRHMRAVLKAQINKTDRNDARGIAQMMRVGLYRPVHVKTLRSQKLRVLLTHRKLLQSKAIAVDNDLRATLRNFGLKVGVVGTAKFEARIKELVENLPDLAILVEPLLIVRRAIREQIGVLHRRVLAVVRDDDVCRRLMTVPGVGPVVALTYRVTVDVPARFRKSKSVGAVFGLTCAKHQSGENDRPGAISRCGDEMMRMMLYEAAQILLVRSTKWSWLKAWAMKIARHRGMKKAIVALARRLAVIMHRIWVDGTEFRWTREAAAV

SEQ ID NO: 276179 - protein, 341 aa, unidentified
MDKELYFGVDVSKKTLDLAYYDGETIDWKNAHIKVSNDDAGFKKIGSWVAKVGKDFDTFLFCMEYTGLYNQNFRLWLESKEYIYGMVEPRKMHRFEPDLDDDQRSLYRIKTDELDAFRIAIYCEQNHKKILRNPSKLPSPVYFKLKRLLAERKQNTKQSVLYKQQLHDICAYDTDLSVERKKLLLKNMQENQKAIDKEIDSYMNEDASISKNYNLLTSIPGIGRIIALETIVLTENFTAINNPRKYACYIGIAPFKKESGTSVRKKTGVSKKGFSEAKADLSIAVLSAIKNNPSIRDYWIHKRKDKCGGIVLNAIKFKLVLRMFAVIKRGTPYVETDAYKN

SEQ ID NO: 276180 - protein, 339 aa, unidentified
MVHVGVDLHKRTSRPAVLMPAGEITQQRLENDLRQLEQFFTQLPPGARVAIEASGTWWWLVDLVERLGHHAVLSNPKQTKAIAAARLKNDRVDAERLALLLRGDLLPTVWIPPAGLREARELVRHRVSLVWVRTEIKNRLLALLSRRNLQPTSSTRWLTGRGRRELEALPLGAIPSTVREDCLALLRMLDEQIRHLDRELVQRWGDDPRVQRLRTIPVVGPFTAIVLILELGEIQRFPSAKHLASYVGLTPRVRASANRVRMGHISKEGNRLLRWALVVAATRAARQPGPLRAWFRTVQRRKGMKIARVALARRLAEIVYQIWKQDVDFVTLIRGGVRR

SEQ ID NO: 276181 - protein, 354 aa, unidentified
MSQQLSTTIAVIGVDIGKNSFHIVGLDQRGAIVLRQKWSRGQVEPRFANMPPCLIGMEACVGAHHLSRKLKGLGHDARLMPAKYVRPYSKGQKNDFRDAEAIAEAVQRPTMKFVATKTADQLDLQALHRVRERLVSQRTGIINQIRAFLLERGIAVRQGQRFLRAELPRILAAPPDVLSPRMVHVIEDLAGDWRRLDERIEGLSGEIEAIARRDAGCERLMSVPGIGPIISSAMVAAIGNGDAFAKGRDFAAWLGLVPKQISTGDRTILGKISKRGNRYLRVLFVQAAWVVLIKPKSWERHGLKPWLEAAKKRLHHNVLAIALANKLARIAWSVLARGRSFQARMTNEANAQPA

SEQ ID NO: 276182 - protein, 316 aa, unidentified
MEQAVLGIDVAKKKLDAALIFNDKVLVKKFDNAVKGFELLQGWLMSLHLERVHTCLEATGAYSEAVAEFLHERGHRVSVVNPLRIKGFAKSDLKRNKTDTADARTIAEFCLAKDPDPWHPLPPEIKQLQALTRRIESLQGILNSEQNRLELAAPKVRSSLKRIIRTLEKEIELVQALIKEHIDHHPNLKDQRDLLQSIPGIGEKTAAVLLGELEFAAFPSARSLAAHSGVTPAQFQSGTSVDRTRLSKLGNGRIRKALYFPAITALKYNEIVKTFAIRLTQKGKTPMQVICAAMRKLIHIAFGVIKHNRPFDPNLA

SEQ ID NO: 276183 - protein, 354 aa, unidentified
MELYYVGLDYHLHTSTIVMLDSNGKQVAQQTIRGHWSKMAQWLKEQGKPMAICFEASAGYGALHDQLVPFAQRVVVAHPGRLRLIYQSKRKNDRIDAQKLAKLLFLGEAPAVHVPGIDTRAWREMIRFRSAQVEARTRVKNHLRSLLRSYGIAVPREHRNLWTAKGLAWLKELEWPTPTAAFRCELLLDQLSQLEAAVKKATAQLDKIAAKHAGVKLLKTISGVGPRTAEAFVAHVDDPHRFARINRIGSYFGLVPGQDSSAGVNRLGHITKNGPAVARKLLTEAAWQSVRKSPQMKAFFERITAGKKERRRIAVIAVAHKLARIMLAMLRTGETWDPQRHPVEDKDAALQAAA

SEQ ID NO: 276184 - protein, 370 aa, unidentified
MGNRSMFVGLDVHKETIDISITEGQREGEVRHYGVIRSDLEPLDKVVRALRAPDRRLHFVYEAGPCGFGIHRHLTACGEDCVVVSPSMIPKRAGDRVKTDRRDSQMLARLHRAGELRAIYVPDATDEAMRDLVRARADAVDVGTQAKYRLKAFLLRQGRRYPGREGWTLPYRRWLTDLSFPSAAQHITLQEYRDAIDETERRIDRLTEQLRQLAPTWRWAPVVDALQALRGVSFLTAVSLVAELGDLTRFGHPRELMAYLGLVPSEHSSGPTVRRGAITKAGNPHARHLLAEAAWAYQGIPRIGRQHAYRQEALPKVVCDIAWKAQLRLTTRFRRLVAKGKAKPKVATAIARELTGFVWAIAQEVSPAPQ

SEQ ID NO: 276185 - protein, 400 aa, unidentified
MKGFLHMKLIGIDIGKNKHFFCVMDQQTGEIISQPVSFSNDKEGFDFLVQKIKSYPKDSILIGMEDTGHYHFALLKYLLNLQYTVALINPKTTDFNRKMQGGITKNDKLDTINICDVLDTPERKKQYRITKVNSFDLYEQKQLTRHHHNLKEEENVYKNRLQKCIDIVFPEFNNLFNSKYGIVYMNILKMFGSAENIANTDIRTIRKCFEIEGRGNRISLTPERLKECAGSSIGISSSAEVIQIKHLTAQIELIEEQLTEIDKKIEEFSIQNNSPILSIPGISHFSGTSILAELGDISNYSKPSQIIKFAGVAPLHYESSQFNAQHTSITKKGSKYLRKTLYQIILPVIRHNPVFNKYYQLKISQGKGHRCAQGHCVRKLLRIIYHLLKTNQQFDPQLLR

SEQ ID NO: 276186 - protein, 421 aa, unidentified
MRAVGLDIHRDFCEVAILEGGELRSGSRVETSPPALELFAASLGREDWVALEVSGNAAEIARILERHVARVVVVSPSDTGIRQARAKTDRLDARTLARLLAAGSLDGVWMPDERTRVMRRRLARRAQLVTARSRSKNEIHAVLIRRLVVAPNVSDLFGVAGRRWLATLELPVEERESVDSSLRQIMFLERELADVDRLVALDAIGSPEIKRLMSVPGVNVICAASFLAAVGDIRRFKDSRKLVGYLGLDPKVRQSGPGPGTSGRISKQGSASARWALVEASWSAVRQPGPLRAFYQRVRARRGHQIAIVAAARKLACLFWCLLTRDEDYAYQQPSLTKKKLRRLEITAGAPKRQGRSGIFSTNDAMREAERALAEQAEHAYNNTVRDWQAAQAKKVGASATKGRASNKPSKGKAARQTTSP

SEQ ID NO: 276187 - protein, 283 aa, unidentified
MKEVYFVGLDVAKNIFQVFLADEKGRELGNKKMKRTAMKEFFVRLVPCTIGIEACGTAHDWSRRLTEMGHEVKLIQPQRVKAFLGHNSKTDAADAKAICEALMHPGTRFVRAKTVEQQDTDHLLSRRERLIMIRTQIVNQTRSFLAERGIVVSQGRCQFDKAIPFICAEHWEEFSGDFQAILTDNFAEYGDLTVKIKALDELIKARTAKLEPCQRLMKISGIGPLTATALVAHVGDAKQFKNGRQMAAYLGMTPKEHSSGGKQRLLGISKRGNVRLIPFLNQI

SEQ ID NO: 276188 - protein, 367 aa, unidentified
MYIGVDTHKQDHVLVAIDDLGRRCGIQHSANTPEGWTQALAWARDRGQEGTTCWGIENSGGLGKGFAQFLLAQGEADVREVSPHRTAQYRRRGRTQDKTDETDALAIARLLLAEGADLPRVQVDDLSTELRVLSDHRDSLLRERTRLINQLHAQMLQLDPTYKEKSGTLTSSRGLTYCRDLTSAGVDRLTATRLLVVGQLATQALSLDSMIAALTAELERRVAESQTPLLALKGVGTIGAARLLADLGTTPRIPAAKALAALSGVSPVAVSSGGHTGYRLNRGGNRQLNRVIHTMALVQRRYEPRARAYYEKKRAEGKTNRAAMRCLKRRLVDVLYRTLQHSGPTPASLTGAPEVSPLSPASDGAAA

SEQ ID NO: 276189 - protein, 319 aa, unidentified
MHCIGVDVSKQDLVAYDGQQQHVFPNDRGLTDFRRFVRQTKNAFIVFEPTSTYSRRLESFCRMAQIPCCQLNPRVVPHLRQVGKGRSKTDSTDAELLYRYGVERGHRETTQLTRDALADSIHAWLGMYRVTQKSRVAYQNMREALSHDPGIPASLLKELDEEIHALKAKEKAKIREAEKLITDHEDARRSFENLLSVPGIGPITALTLLVVFRRYPGTNRNRIVALVGFDPIQFQSGTSVHRNSRISKRGNREVRRRLFEATLAAARYNPGVRAIYKRLKAQGKPDKVARIAAARKLLLIAHAIFKSGDPFRTAAQLEG

SEQ ID NO: 276190 - protein, 347 aa, unidentified
MNHYAGIDVSLEFSSVCVVEGSGKIVREGKVASEPEALIAWFGSLGLSLDRIGLEAGPLSQWLYAKLKQAGFAVELLETRHVRDAFKAMPVKSDRNDARGIAQLMRLGWFRPVHCKSMEAQEVRAVLTARKLVQRKLRDVENNLRGVLRGFGLKVGKTTAITFAERIKELVVGQTSLERITDALLAVRAVLRRELSAFDRQVRSMARADTKARLLMSTPAVGPIVALTYGSAIDDPARFTSSKQAGPHFGLTPKKYQSGETDWSGRISKIGDAAVREALYESAHLILTRPIKGCPELKSWAMRIAKRAGMSKAKVALARKLAVILHRMLADNVPFNPSAKAAKVATI

SEQ ID NO: 276191 - protein, 370 aa, unidentified
MGEYSGAFVGFDTSKTKHAVAIAEGGRGGEVRFLGEIASSPVRVERLVGKLASRYDKLHFCYEAGPTGYGLYRQIRELGHDCTVVAPSLIPKRPGERIKTNRRDAVTLARLLRAGELTAVWVPDAVHEAVRDLVRARAAAAQDLRGKRQQLLSFLLRHGRIFSGRQHWTLAHRRWLAEQSFAHPAQQVVFQDAVEAIAEALARLQRLEQQLVAIVPSWSMAPVVEAYQAMRGASFLVAVTFAAEIGDVRRFDNPRQLMAFLGLVPGERSTGETIRRAGLTLAGNRHARRVLVEAAWSYRHPARVSPTLRARLEGLPKPVRDTAWKAQVRLCARYRRLSAAGKKLPVVIAAIAREMAAFLWAIARHVAPAV

SEQ ID NO: 276192 - protein, 345 aa, unidentified
MAKKVIASDIPAYAGIDVGKKELVLALRLDGREEDGGSFVNDPKGVRALVRKLKGLKRPVFACMEPTGNYHERAARELYKVPGFCVMVANARVIKDYARAMNHRSKTDEVDARVIALYADKGDFKAWKPAPDNYYRLRDISRYIDKLTRTAAAERNRLHALRAGGDCHDEVKGEIQEHIEFLDRSIARLRKKALEIIKADGVLRSRYQIILSVKGAGMISAVQLLAETCTIPEGLDASQWVAHAGLDPMRRESGTSIRKPGRISRAGNANLRRALFFPAMVAARFDPHVRAFYEKLLQKGKKKLQAYVAIMRKLLHAIWGMFKTSTTFDGAILFPNLLPNPLTRQ

SEQ ID NO: 276193 - protein, 411 aa, unidentified
MEVVHERCCGLDIHKKLIVACSIVPGSGGQPRKQVRSFGTMSDDLQQLSDWLAEQGVTHVAMESTASYWKPVFNVLEESFELLLVNAQHLKAVPGRKTDVKDAEWIADLLRHGLLKASYVPDRQQRELRELVRYRTSLIQERTAAANRQQKVLEGANVKLASVASDVLGRSGREMLEALVAGRTDVAAMAELARGRLREKRATLERALAGRFGAHQRFLVAEILGHIDFLDETLERLSAEIAERERPFEVVLDRLDTIPGVGRRIAEIIVAEVGPDVQRFPSPGHLASWVGVCPGQNESAGKRHSGKTRQGNRWLRSALVEAASAATRTKTYLAAQCRRLTTRRGYKKAIVAVAHSIIRIVYHLLIDQHPYQDLGETYFDNRQREQVSRRLTRRLQRLGYRVQLEPLSSAV

SEQ ID NO: 276194 - protein, 430 aa, unidentified
MGLVVQTALHPEQDEHGMFYEWFVGIDWGSQQHQVCVLDRDRRRVGERSVDHDGASLARLADWLWTVAAGQSQQVAVAIEVPRGAIVEGLLERGFHVFAMNPKQLDRFRDRHSVAGAKDDRRDAFVLADSLRTDQPSFHRLQLDAPQLLLLRELSRAEEALLEDFRRSANRLRDQLHRFYPQMLELCAAADASWLWDLIDLAPTPAHAALLSEEHVQRVLKAHRIRRLTAKEVLACLQAPALPVAPGAAEAAQAHCGFLLPCLRVLAAQLQACSQRVSALLHTLAQEPGEGEGPSDVAIVQSLPGVGRKITAWLFAEAAQALAERDYQVVRTHGGVAPVTRQSGKRRQVVMRRGCNPRLRHALYHMARVAMQRDAHFSQVYAALRAKGHRHGQALRTIGDRLLRILMAMLRDRLCYDVSRIRREPVVQMR

SEQ ID NO: 276195 - protein, 356 aa, unidentified
MQTQVTKKIDFKDKDLFIGLDVHKKSWSVTIVIDGMEHRTFTQPPDPGALNNYLQRMFPGGNYNSAYEAGFCGYGIHRELKSLGINNIVINAADTPTSQKDKLHKRDPTDSRKIARELEKGSLRGINIFDRDLEELRSLNRTRFYLMRDLRRSKNRIKSFLMYYGVPIPAEFDNNQWTLKYISWLKQVKMKTAGGQDAFSHLIESYEHYRQQLLILSRIVRLRISHYDRELYSLLNTISGIGPLTSSALITEIGDINRFTHINHLGSYVGLIPRVRESGETTYTGGITFRCNTFLRTLLIESSWQAIRMDPALMQYYHKHVINSKGHKVIIKVARKLLNRIKYVMKNRQPYVTGVA

SEQ ID NO: 276196 - protein, 343 aa, unidentified
MDYYVGLDVSLKQTSICVVNQAGSIVHEGVADSDPEAIASFVRSKAPGTLRIGIETGPTTTWLWTELKRLGLPVICIDARHAKAVLKMQINKSDRNDAAGIARIMQTGWFKEVRVKDLDSHAVKALLASRALLVKIKRDLENQIRGLLKNLGLVIGRAKFNVFAVRAEELIEDRPELVAAVRPLLDARKAIERQVGDLDRKVHKLARHDVQVRRFMTVPGVGPITALCFKATIDDPTRFRRSRSVGAYVGLTTRRHASGEVDWSGRISKCGDAMLRMYLFKAAGVLLTRVPKWSGLKAWGAKLTKRNGLRKAKVAVARKLAVILHRMWIDGTEFDWSTKKAAA

SEQ ID NO: 276197 - protein, 342 aa, unidentified
MQITTIGLDIAKNVFQVHGIDGNETVVVRKQLRRGKLIAFFESLAPCLVGIEACATAHHWARELTRLGHQVRLMPAKDVKAYVKRNKNDAADAAAICEAVRRPTMRFVRIKSTDQQCQLMQHRTRDLMMRQRTQLINALRAHLAELGIVAAMGDKGVTELLMIVADEDDGRLPVEARASLALLAAQLNALQMLIGSLEKQIKMQHRVNPASQRLETIPGIGIIGATAIAATVADPTVFRSGRDFAAWIGLVPRQESSGGKHKLGSISKRGNRYLRRILVVGAHSVLRRAMEKPGKYPWLTQLMARRPFKVVAVALANKMARMAWALLTYGGTYRAPRLSIVP

SEQ ID NO: 276198 - protein, 509 aa, unidentified
MALIPLGRLQTSPIPLLARGTFLTTRIRQLEASMAVPNEDSKKPAKSKKPTNPNRARERSLAVPVPASAAPLTVVNPDAAGIDVHSNMHMVCVPADRDANPVRQFGAYTADLHEIVTWLHKCGVKTVALESTGVYWIPLFELLESEGFEVNLAEPGQLSRCGARPKTDVLDAQWIQRLHSYGLLRGSFRPPESVLALRAYFRQRQMLVRYAASHVQHMQKALEQMNVKLPEVVTDITGLTGMSIIRAILDGERNPVKLAKLRDARCHHSEEQIALALQGTWRPEHLFELRQAYELYQFHHRQISQCDQQLETELGRFPNRAGEKTRTVKPRGRGRKSNDVRFEAKGPLFQALGVDLTMIEGIDVGTVLAIAAEIGPDVSRFPSEKHFASWLRLSPPQNQSNKTNKRRDHRKSTSRVTIALRLAARSVGKTKTPLGMFYRRIRSRIGGLGAVKATAHKLACLVYRMLKYGQEYVTQSMEEYKAKMETSVLNALKRKAAAMGYQLNPLPAK

SEQ ID NO: 276199 - protein, 349 aa, unidentified
MNKNLFVGIDFSKETFDAAILKVSEESSIDLKIIGNEQFKNDVPGCKRFVKWLNKTCALSGDYSSVLVGGEDTGNYSITLPKQLYVLGIDCSLQNAYSIKCGSGKIVRDKTDKIDAEKIAYYFYRFRDQVRLYKPLSKDMESLERLYSYRYGQVRESARLQCQIKEYEHILKSEPNDETLKFMIQRLEEQERFLKEEIKTIEAKMVEMIEADEELNEIHECLLSIPGVGKITSLLLIVVTRGFTRFDNPKQLACFLGVSPHPNQSGTSVQNGNHRSWFADPYFASLLHMTALTASIHNPKFKAYDERLKSKGKPKLLIMNNIKNKLLTVAFTIATRRTKFYSDYDAKRA

SEQ ID NO: 276200 - protein, 383 aa, unidentified
MARSKPKASRTVPPAPALPPQLAAANLHAAGIDVGAEAHFVAVPPSDDPQPVRGFGAFTADLEALAAWLVACAITTVALASTGVYWIPLFALLEARGFEVLLVDPQQVQKIKGRPTSDVHDCQGIQRLHTFGLLARAFRPTDQVCVLRSYLRQRAMLLTYAAQHIQHMQKALTQMNIKLQHVVSDITGVTGLAIIRAILAGERAPGTLAQLRNAHCKHDETTIARALQGNWRDEPLFAVAQAMALYEVSHQKIAECDRHIEASLQTFADRSEGQPLPPAPRPRKRGRNQPAFAVRDPLYRITGGDLPQIEGIDETTSLVILSEMGLERSRWPTVQHFTSWLGLCPHHRVSGGKVLSRRTKPCANRAATALRLAAACLHHRPSA

SEQ ID NO: 276201 - protein, 346 aa, unidentified
MTIVKEARPVTGGVDTHAGTHVAAALDSVGGLLGVREFPATAAGYARLLGWLGGFGTVALVGVEGTGSYGAGLVRHLAGCGVRVVEVDRADRQDRRRAGKSDPLDAVSAARAALSGRARGAPKGRDGAVEAIRTLMVARRSARTGRTQAINQARALILTGPGDLRARFAGHTAAALVAGIAALRPRPGDVPGYATRIALRELGRRARFLDGQLGRLDELIVPLAAARAPGLLALHGIGPATAALLLIAAGDHPQRLRSEAAWAHLCGVAPIPASSGKVTRRRLNPGGDRQANHALWQIVITRMSSHPPTRAYVARRTAEGLSKKEIIRCLKRYVAREVYPHLRGGT

SEQ ID NO: 276202 - protein, 352 aa, unidentified
MNSPITVGIDLAKEVFAICVLDELGAVRERRVLRRAAFERWAAQVSEGTIAMESCSSAHHWGRWFAARGHTVHLIAPEFVAPFRKGGKNDAADAEAIAVAARQPTMRFVTVKTVEQQAILSWHRARLGWIEERTALINRLRGLLAEFGIALSRSRTTFQAALPRLADDERLPAAIRALLLEAREQFVALEARVTRCDAEIAAHLAGNGPARRLRELLGIGPLTASALVATVSNASSFKNGRQFGAWLGLTPQQHSSGGKSRLGKVTRHGDGYLRSLLVQGARSALQSALRCPPDKLSRLGRWIVDLFHRKGYHKTLVAIANKHARMLWAMLAHDEPYDPLAWQRYRAPAATV

SEQ ID NO: 276203 - protein, 393 aa, unidentified
MFYIGIDIAKHNHEASIIDSDGSLLCESISFSNSQKGCEKLIALLERFSVNPDNCIVGMEATGHYWLSIYSYLFELGFDLKVINPIQSDAFRKMYIRQTKNDSKDSFVIAQIMRFGQFSSSSLSDENIMALRQLSRYRFCLVDDCSDLKRKVICLLDQVFPEYSSLFSDIFGVTSKELLLKYPTPEDMLSVSATKLSNFISKCSRGRYGRSKAEEIQSAAKSSFGIKFASNAFSFQIKQMIEQIKFIENHLKELEKEITELLIQTNQVITTIPGIGNVLGGVIIGEIGDISRFESAPKLVAYAGLDVRVSQSGQFTGTQMKISKRGSSYLRRAIWMAATVAAFSDPVLSEYYQSLRARGKHHLTAIGAVSRKLCNIIFAVLRDDKPYEPMPKR

SEQ ID NO: 276204 - protein, 376 aa, unidentified
MRAKLRFLGLDVHAETIAVAVAEPDGEVRSLGTIANREDSIRKFIKKLGPPEQLRACYEAGPTGFVLYWQLAQLGVECEVVAPSLVPKKPGDRVKTDRRDALKLARSHRSGDLTAVWVPDEDSEALRDLVRQREAAKQDQLRARHRLTKFLLRTGQRPSLGLKPWTERYMRWLAQIRYTQPAQEVTLRDCLNEFEHMSARVKRLEEAILEVVKLAPHPMQEVIRGLQALRGVAHISAVTIAAELGNISTRFESARKLMGYCGVFPSEDSSGKRIRKGGITKAGNAHLRRIVVESAWCYRHWPRVGAKLRKRQQGIPAEITEIAWKAQNRLHKRYIKLMNAGKDQRKVMTAVGRELLGFIWAIAIKAEQSFQQPIAA

SEQ ID NO: 276205 - protein, 368 aa, unidentified
MYTIGLDVHARKIAVCILDQNGKRFKEMTLTSDVEKLARELERLKKPCRICYEASCGYGHLFDQLTRLPRVKRIAVAHPGRLRLIFLSKRKNDRVDAHKLATLLFLDQVPEVYIPDIDVRAWRAAIEFRRKLVDRQTAVKNELRALLRSYGIATPYRQRLWTRKGLTWLAELELPTPLARLQRQCLLDELDGCRLRLKELERDLDRIGNAYPGVQLLRTIPGVGPRTSEAVMAYIADPKRFQRGKQVGCYFGLVPCQDQSAGANRLGHITREGPATVRKLLTEVTWQGIQRSPEIRAFFERVQRQDPGRKKIALVATAHWLVRVMWSMLRSGEESRFTRLTRKQEEAARSQAAPAASTKKRSKAPSAA

SEQ ID NO: 276206 - protein, 340 aa, unidentified
MVIVHEERNFMKLNHVGIDVSAKTFTTIIDHEGERTEAFDLPNDPKGFKKLIRMITKKGFSAQVVLEATGNYSLDLALALHRAKRIEVMVANPRAISQFAGAYLRRSKTDALDANVIVEFSMRMPFEAWKPPEAHCFNLRAISRRIEALTKTATQEKNRLHAATTFDEMSDVVRNDIEVNIRHLERRIERLREQAREHIAEHPELERSFLHITSVKGIAQAAGIQILAELSTLPSDMDVRQWVAHAGIDPMQFQSGTSVDKPSRISRRGNAHLRRALFLPALVAVQHEPHVTAFYEKLLERGKTKMQANVAVMRKLLHAIYGMLKHDRDFDGEKFYVLGA

SEQ ID NO: 276207 - protein, 390 aa, unidentified
MIDCYNQKLGEITFPNRPAAFPKLVTKVKKCNTDGKEVVYGLENAYGYGRALAVWLIDKGYLVKDVNTAISHRQAKHRGAMYRKSDSDDAKAIALATLNMLDKLPDACPNDAYWSLGQLVHRRDNIMKQRTRLVNQLHEQLCIAYPSYKQFFNDISRPTALYFWEHYPSRKYLKGKSVEDLRAELVPVSHNKCSTKTCEKILDAVASDKVKNNAYQDARDMVTLSIVSDLQHYDSQLTEVDKMLEQMYKMLGCTLTTIPGVNVITAVKILAEIGDIKRFSNANKLAQFAGIAPLHLSSSGKGKDVATKQGNRRLQATIYFLAIQMVQLSSKGTPRNPVVRAYYEKRKAEGKTSQQALICISRRLISIIYGMLKNGTEYRMPVVENAGEKL

SEQ ID NO: 276208 - protein, 411 aa, unidentified
MYYVGIDIAKNFHVACVINQDNKVIKKSLKFNNDESGFDKLLLLLNSIDEVSTFTIGMEATGIFFENLYLYLIEKGFNVILLNPYQTNRFREMDSMKKVKNDNIDALMIAALIKSGRYSKAYVSQDMYQSIKSLYRHKNNLLEEMKKHKRQISTLLAVVFPEMEQVIRDPFNVTGLALLQKYPTAKHYHHASVERILKTFRGIKGNNFNEQKAQKLLELAHHSVYQGNGIDERAYVIKSHIRVIKLLQEELKELESEMLKLFNEQVSLDKDEEQEIMDIIDNLRTIPGVSDKTIFALISECGDLSRFKNNSHLIGYLGLYPTLEQSGNKQSFGPIAKRGAKLAKKALYQAAIAAIRHNNELNKLFRDKISQGRAKKEAVVIVARKLAHIILAIYKNNVAYNPQRVFQAAVS

SEQ ID NO: 276209 - protein, 388 aa, unidentified
MPQQRKPNDLGRSLISLAMDTTLIAVVELSLSSWLVAGIVPGVERQPLKKLKTDENALLALLNRWRDEAVRSGHKISRIAVAFEAGRDGFWLARWLKARDIEAHVIHASSIAVSREHRRAKTDRLDTELMKRAFVGWLRGERDHCKTASVPSLWEEDAKRPSRERESLVGEQSRLINRMKATLIRLGIRGFNPKLRHAEQRLETLRTPEGEPIPPNTLAELKRDMQRRRFICDQIQSIEQDRLERLERTPDTEPHAMVRLLARITGIGIETADLLVHELLLRNMRDRRAVARYGGLTGSPDRSGGTNREKGMARSGNARVRRGMIQLAWRFLLFQKNSALAQWYRRRTEHAPKARKTMIVALARKLLIALWRLVREGVVPEGVAMRPA

SEQ ID NO: 276210 - protein, 331 aa, unidentified
MKINETIGIDISKETIDVCTHSKQVHSVFENSNKGIKQMSKWALKNSPFPKEEILFIFEHTGIYSHEISIGLSSLGLHFLPVPGLAIKRSLGIARGKDDKIDAAKIALYGYRLRDELIPYEMPGENIISLKRLLSLRERLVKQRAGYKTSLKEQGRVLSKKDNKVLLGAQQKMIAYLTKQIEKVEKEMESLIKEDGELDKTYKLILSIKGIGAQTARFMMAYTEAFTKFENSRKFASYCGIAPFPNSSGTSLRGKTKVSHLANKKIKSLFDLCAKSALQHSPEIKAFYERRLQEGKTKMSTINIIRNKLLARIFAVVKRGTPYVDTMKYAA

SEQ ID NO: 276211 - protein, 407 aa, unidentified
MYYCGIDIAKYRHELSVLDEAGDSVLSLHFANSQKGLEKLLAALASLKVESENVLFCMEATGHYWLALFCQLKELGYQLHVINPIQSDALRNLYVRKAKTDKKDALLLADLVRLGRAPVTQIASETTLKLQTLSRLRLEFVHQVGGLKNRVLGILDRIFPEYPECFSNVFIRTSRELLKSYPEPELLAEADLSELTAFLNQHSRGRLHRDRAEQIQALAKGTFGIRLALDAFTLELKLLVEQIEFIEEQVGILEEAIEQVLEEFRTDPEQPYRHVLETIPGIGTVLAAAIIGEIGDISRFPNAKALVAYAGLDATVKASGQFEGTRNRISKRGSPTLRNSLWLAAVTARRFNPELKAFYDAKRAQGKHSGVATGAVARRLVHLIYSIWKDNRPFEPDYKWSPPGGND

SEQ ID NO: 276212 - protein, 350 aa, unidentified
MYYVGLDVHQRKSSVHILDEFGKKVKEFTVRGGFDQLLAELGQLPRPMAVCFEASTGCGWLCDQVRPLAQRIEVAHPGQVRLIFRAKKKNDRIDAQKLATLLFLGQVPKAYIPEACVRAWRGLVEFRRATVDKRTRAKNALRALLRNCGIQNLHPRKGLWAQKGLAVLRELQLPVAQDRLRRDLLLDEVDQYNLQVKRVEKELDRMAADHAGVALLQSIPGVGPRTAEAVLAYIDDARRFRRNKQVGAYFGVVPCQDASSDVNRLGHITRQGPPTVRKLLIEAAWQGIRRSPALGAYYQRIGQGKKERRKIALVATGHHLLRVMHAMLKTGELWREAAGEETAAAARRSA

SEQ ID NO: 276213 - protein, 351 aa, unidentified
MSLKVNSAITVIGIDIGKNSFHVVGHDKRGAIMLRQKWSRGQVEARLANLPPCLIGMEACVGAHHLSRKLQILGHDARLMPAKYVRPYSKGQKNDFRDAEAIAEAVQRPTMKFVATKTAEQLDLQALHRVRERLVGQRTGLINQIRAFLLERGVAVRQGLRFLRAELPRILAAPCDALSPRILRVIEGLAGDWRRLDERIEGLSSEIEALARQDKGCERLMTVPGIGPIISSAMVAAVGTGDAFSKGRDFGAWLGLVPKQISTGDRTILGSISKRGNRYLRALFVQAAWVVLVRVGPKHWERYGLKSWIEAAKKRLHHNVLAIALANKLARIAWSVLAHGRTFEASKIQVA

SEQ ID NO: 276214 - protein, 418 aa, unidentified
MSADGNTRAGIRYIALDIHKHYCVVAGVEREGRVVLQPVRVEHADLEGWLKKKLQTSDQIVIESTTNAWHVHDLLEPLVEQVLVANPIKVKQIACARVKTDIRDTLILARLLAANLVPVVWVPPLHVRQLRQLLSQRRQLVETHTQIVNRMHSVAHRHHLSHPAGKRFNEKNTGWQKDKILSPVEQFQLGLEMENRAYIEKQINRIGKEIAKMSHQKPWAGHMTYLIQLPGFGVITAMTVLAAIGEIGRFETPKKLGSYSGLTPGVEQSGTKHRGKGITKEGRRELRWAMVEVAQRAVKSDPLWKRRFQELQHRMHRNQAIVAIAHRLLELVWYVLTRRQPYRHFTHERIAYKYLTWGWQMDEEARDGLTRQQFARYYLMRLGIGHDLTRVALNPKYPRKLASEAELMLLRPELQKIE

SEQ ID NO: 276215 - protein, 411 aa, unidentified
MMTSKTRRVTGGVDTHGDVHVAVAVDSASHRRLGVEAFPATTAGYSELHAWLCSFGELDPVGIESTGSYGAGLARFLTRYGITIVEVNCPDRKARRFNGKDDPTDAEAAARAVLAGTATAIPKSTDGPAEAIRALEITYHSASKDRTRAINQFKALLVSAPAGLRERLQQHSFHRQLQLARRFQDCYHDDLVEQELRWAFKELARRIGFLDDQLARLDTRIKTLAAETAPALIGLPGVGPHVAAQLLAAAGDNPDRMHSDAAFAKLCGACPIPASSGKTNRHRLNPYGDRRANNALFTIVLVRMRHHAPTRAYVARRTAEGLTRKDIMRCLKRFVAREVFHALTNPSDDLPAGHQLRDMRTARGLTLTHVSTQLGVAQTTLSRLERGIAHDTPLARRTRDWLLDQPVELAT

SEQ ID NO: 276216 - protein, 422 aa, unidentified
MKKLLSLQEPKKIIPAALSMPDKVLLCGIDLAKDKHVARVLRGNTVSLKERLVFSSDDSDLNLFVDWILSLKRDYNADHLFIGMEPTADFWGKVYNFLICNLPDTGTWLVHPHSVSLIRKLGNSNFSKTDDIDALAIAKLVGQNDCFRPIQHSATSSLLKEQFKFLDFTEYVLSTSRRKLIKLVGQFAPDLIRNLSERKFDSILSLLDPDFSFNALLSCNQHDWVELHLKKGHSRKLLLQIHKELVSYYHILSDSPDLCNLFKHEFDFWLNAKINRNKIVLDITSIVQKHPLFPFLSSIPGIGVMTAGAFIASVGDVDQFCYANQIIKLFGFDLRRHQSGKMDVSPHISKRGVVLPRKYFYMAALSASRIYPFKIWYDRKVELRGGKGKRAVVIALAAKLIRISFQLTKNKELFDFNKSIKI

SEQ ID NO: 276217 - protein, 345 aa, unidentified
MDTIGIDLHKRESQLCIGHEDGTITEQRIVTSRERFTAVLGPRPRARMLLEASTESEWVAQHLEALGHEVIVADPNYAPMYATRTRRVKTDQRDARTLMEACRAGTYRLAHRLSAARRHVRAELAVREAVVRTRTRYVALAKALVRRDGLRVPSSAAERVAVHLQALPLGPTLAAELAPLLTLLPALNTVIAAADHELAVLEQTDPSVALLMTAPGIGAVTASALVATIDDVTRFGSAHQFEAYLGLVPGERSSGEVRRIGPITKAGNARARWLLVEAAWRILRSKEPAGAPLRAWARPIAARRGSRIAVVAVARRLAGILYAMWRDGVPYDPGKIRRPRLTRAG

SEQ ID NO: 276218 - protein, 350 aa, unidentified
MIIIGADYHPGFQQIAFVDTDTGELQERRLEHREEAETFYRGLAQPGRTVRVGMEASGHARWFERLLAELQFELWIGDAAEIRTKRVRKQKTDRQDAQLILQLLLEERFPRIWVPSGENRDLRQLLWHRHRMVQARTRIMNQLQAVALNEGLRCKKRLWRDSGREQLESFLLAPWASRRRHDLLELLDRLSPTIAELTQAIEQEVEKCPEAQRLRTHPGVGALTALAFVLIIGRTDRFRCGKQIACYLGLVPMEESSGERRRLGHITKRGNSLLRFLLVEAAQVTVRSDQEWRSKFFHLALRRGRKIAKVAMARKLAVRLYWMWRKGWDYEQLKKFGSHAGQPGHRHGVH

SEQ ID NO: 276219 - protein, 364 aa, unidentified
MVVVGTDAHKYSHTFVATDEVGRQLGEKTVKATTAGHATAIMWAREQFGLELIWGIEDCRNMSARLERDLLAAGQQVVRVPTKLMAQTRKSARSRGKSDPIDALAVARAVMRETDLPLATHDETSRELKLLTDRRDVLVAQRTSAINRLRWLVHELDPERAPAARSLDAAKHQQALRTWLDTQPGLVAELARAELTDIIRLTGEINTLAQRISARVHQVAPALLEIPGCAELTAAKIVGEAAGVTRFKSEAAFACHAAVAPIPVWSGNTAGQMRLSRSGNRQLNAALHRIALTQIRMTDSRGQAYYQRLQDAGKTKRAALRCLKRRLARTVFQALRTVHQPSSEHTQPAAACHRSYCSRSCLSG

SEQ ID NO: 276220 - protein, 411 aa, unidentified
MDEIYRCCAGLDVHKQSVEACVRRIDANDRMQAQTRHWGTMTRDLLALTDWMAAQGVTHVAMESTGVYWKPIYNILESRFTVLLVNARHLKQVPGRKSDVRDCQWIAQLLQHGLLKGSFIPPRPQRELRDLTRMRVQLVEEKTRTVNRIHKELEDANIKLASVATDILGVSGRAMLEALIEGRKDPAQMADLAQRQLRGKIPELEKALEGQVTGHHRFMLQLLWQHLAQQEELIAQLDTRIEEQTRPFADKIERLDAVPGVDRCAAAVVLAEVGADMTPFPSHHHLASWAGICPGNEESAGKRRKQCITPGNRWLKRTLVQGAWGVSRTKNTYLASQYRRLAGRRGKKRALIAVGHSMLVIFYQMLKNGTTYADLGGDFFDRLEPKRLTRYYVKRLESLGHKVTLESSVAA

SEQ ID NO: 276221 - protein, 411 aa, unidentified
MRTSTASKQAADKNSTFKEICFLRGERIDVGVDVHKRTYTVTFWSERREFVVLRWTQPADPGALIRSLTPYKRRIDRVVYEAGPTGYTLVRALRDAGFRADVIAPSRTPKATGQEAKSDRLDSRKLAMWSAKGLLRPVAVPTLEEEGDRQVFRTRDDAVNKRRRVKQQIKSFLLQHGIAEPEGLRCWARRGVRALRKLELSGQLRFALDLLLEDLDHSESQVRRGNAALGTLAKTPRHKESAEALQTVPGVGVVTTIAVRTEIIAPERFSDGRQVAAMTGLAPLVSRTGETTRQGPLMKCGNTRLRKILIEAAWRWVAKDPWAGETYGRMARNTGDKKKAIAALARRLGIILWRISVTGEPYRPRPCEEPESGSAKRKTKRRQHGLPDKNGQRKRTPSSEQRRPLSVQSPR

SEQ ID NO: 276222 - protein, 322 aa, unidentified
MRSKVDSEPTYVGIDVSKERLDLAVHPRHEIRRFANTPTGINNIVQHIRDLGPVLVVMEATGGYEISLAAALGEDGIPTAIVNPRQARDYARSTGRLAKTDAIDARILSDFAAAVRPEPRVLADIQTLELREILARRSQLNEMITAEKNRLHHARGPIREHISAHIAWLGRSLAEMDSELKRFIEESPIWREKDNLLRSVPGIGPVLSSTLVASLPELGTLDRKQIAALVGVAPFNRDSGKMRGKRSCWGGRANVRAALYMATLVATKHNPVIRTFYERLCAAGKAKKAAITACMRKLLTIVNAMIKHHTTWHYSPEAAAIS

SEQ ID NO: 276223 - protein, 373 aa, unidentified
MIQLRCNGLPPPEQSGIMKFFQKPNWLNTRGEVQMKLSTIGIDLAKNIIQVRTSTINGQHKSNKALKRSDFLEYMNQQPNSLIGMESCGSSHYWARKLEQLGHTVKLMQPRYVKPFVMGQKNDKNDADACHTAVRQPDMRFVPIKTIEQQDIQMILRVKERLEKQQTALANQLRGLLREYGVFIPVGIDKLFSKLPDILEDAENELTGYSRTIFCLLGEELRANRKLIKRIEQEINRLVSNNKWCQLLIQEIKGIDPMTALSFVNSIQDGSHFKNGRHVSAWIGLVPRQYSSGGKTKLGKISKQGSSSLRRLLFLGARSVMRVCQNKEDKMSQWIQSLLARHPHRKVAIAVANKMARMAWAVLNRYRIEGLPA

SEQ ID NO: 276224 - protein, 357 aa, unidentified
MKSKIKQLDFTGETIFTALDVHKKNWRVTIGSKEFELEHYTQNPNAKDLARHLKKNYPGAKYMVAYEAGFCGFGIQRSLKGEGINCIVVNAADIPTSNKEKRRKQDKIDSRKIYKRLAAGDLEAIYVPQTEMEHARSLVRERSRIVNDQTRCKNRIWSLLMFSSLSVDTDKPKQYWSRKFVESLKQLDCGSKSLREALDLVIEEYILVRQLLTKATKKVRELSNDKLFAEIQELLRSIPGIGLINAMVIHTEIQFICRFKTLDHLCSYAGIVPDSDSSGDKEKITGITHRSNNYLREAIIESSWTIVRKDPAMLMLYKRYCARMDENKAIIKIARHLLNRIRFVWEKQTKYEIGIAA

SEQ ID NO: 276225 - protein, 406 aa, unidentified
MPGQLVAGIDTHKNTHHVAIVDHLGRPIADHQFTATGRGYRQVIDFLRAHGQVDRVGVEGTGSYGAGIARELTVAGFTVVEIIRQNRQARRLRGKSDPIDAHQAALAVLSGADTVPKTADGQVESLRILITERRSAAKAKSQTMNQIHALLVTAPEPVRDTYRAMGSTKLVKTLARTRPTGSGFDPDLVTRQTLKRLAARYLILQDEIDEIENQLDPLVRAVNPTLLSLSGIGLVTAAALLVAAGDNPDRLTTRATFAALAGVAPQPASSGQRTRHRLSRGGNRQANAALHRIVLLRRRHQEPRTMADFTRRRAEGLTDRDIMRCLKRHIANEVYAALLNPATENPAGRQLRTERQRIGIPISVLASSLDVPYQRLRRLEIGIRADPELEQRATLALAQLEHPEAA

SEQ ID NO: 276226 - protein, 354 aa, unidentified
MSVKYIGLDVHQATTVAAVRDADGKLVMESILETKASTLLDFVRGLRGELHVTLEEGSWAAWLHDVLEPHVHRLLVCDARKNALLKQGNKSDKIDARKLADLLRAGLLSPVYHGENGLGLLRELARSYLTLTEDTTRVMNRIKAVYRGRGIACASSKIYSPRHREEWLQQLREPGLRRRAQRLYQQLDQLQPLRLEVRREMLRESRRHPASRCLQQIPYVGSIRAALLIALLQTPHRFRTKRQLWAYSGLAVTVHSSADYRFVDGHLQRTHNTSTVRGLNDNRNPQLKNVFKGMALGASGRPGLWRDYYLTLLHKGMKPAMARLTLARKMAAITLTVWKKGERFDPTKLNLQVA

SEQ ID NO: 276227 - protein, 423 aa, unidentified
MYSPTLSVGADVHLDKIVLRAVDKLGGHEVIERFRVTNNLPGAQSAAATVAEVATRLGYTRVEIGWEATGMLWIPFHRHLTTSPLLQPFELELICFNPKLVANFKNGIVLRGPKSDDRDSYDVAARVRFGELPVSYVPDDFWQGLRRLTRYRFQLSRNLSREKMRFQSYAFLKCSDWKRVKAFSDVFGATSIALLTEFTAAELREMTHDQLVDLIAHRGHGRFHDPTGTARAVRQTLRTSYPIDPQMDEMVTATLATGWDHIRFIKRSMKHLDKLIARYIDPIPNPIITVKGLGAVITAGILAEIVDISRFPEHKHLAQYIGLTWERRSTGNFVSQNTRMTKVGNVYARYYFIQGADKLRRFNLEYKAYYRRKYTQVSKYQHKRALVLTARKLVRLVHALLTKNVPYVRPRMPVDFQEDNELQ

SEQ ID NO: 276228 - protein, 331 aa, unidentified
MLHAGLDLSRRRLDVCLLDDEGLTVEERTAPPDRDGLRSLVRTVGRDHGDQQVLAVVESMNGARFVHDTLELCGWSVEVADAKKVKGLAPLACKTDRIDARVLAELSRRDLVPTIWLPGPETRQERELARWRLHLVKHRTALKNRIHASLLAFGHPCPVSDLFGLEGRLLLDRLSFEEPWKGDIEGAVRLIDSITFQIEELEEELTMDGADHRYVPLLCTVPGIGHVLAYTIAAEIGDITRFATPTKLVGCSGLCPRVYQSGESDHRGSLTKNGPKYLRWALLEAATHAARHRAYAERYQRTSARLGARARSGRECPFHARARLLAPEDSA

SEQ ID NO: 276229 - protein, 440 aa, unidentified
MPRQCSQKTSSKRNAAKKKTPPLPATTTPCPYAAFVGLDWADREHEVARLDGETVYRHTLPQTPEDIEAWAGTLRDQFGGRPVALCIEQSQNGLMCALQKYPHLVLFPINPAQADAYRKAFAHSGAKSDIADAELLARYVREHHSRLRAWRPDTAETRQLARTVELRRDLVEERKQTMQRITALLKLYFPLALVIADEFSEKVMLALLARWATHDEWKRANPRTLKQIVSPFLKDEERCHELVQRIRAATPLTTDPAVIKPNALYLQTQLAKLPGLNQAIAEFEQQIAQLFNNHPDAPIFRSLYGAGEALAPRLLVALGTDRDRFQTADDLQSYSGIAPVTVQSGKSRDVRSRFACNKFLRQSFHEFADHARKHCDWAKAFYQHKRAHGQHHHAAVRALAFKWIRIIFRCWKNHSTYDDAQYTAQLRRKNVNYLPPLQTA

SEQ ID NO: 276230 - protein, 404 aa, unidentified
MYNAVGIDVSKGKSTVAVLQPGGTVIRKPFDVSHTSQNLNELADYLSSLDGTTKIVMECTGRYHEPMVKALSEAGLFISIVNPHLIKNFGNNSLRKVKSDPADARKIARYTLDNWTELRQYSGMDNTRTQLKTLNSQFSFFMKQKVAAKANLIALLDNTYPGVNKLFDSPTREDGSEKWVDYAYSFWHADCVRKIGLKAFTERYMSFCKMHHYIFQQDRPEKLFNASKELVAVFPKEKTYKLLIQQSIQQLNLASEHVERLRREMNELASTLPEYSTVMGIYGVGKTYGPQLIAEIGDVSRFTHREALTAFAGVDPGVDESGQHKSKSNRASKVGSARLRKTLFQIMTTLLQNAPEADPVYRFLDKKRSQGKPYYVYMTAGANKFLRIYYGKVKECLQNLEQTE

SEQ ID NO: 276231 - protein, 398 aa, unidentified
MNAVGIDVSKGKSTVAVIQPFGVVIAEPFDVSHTESDLNKLVQLIKSLSGETKVVMEYTGAYYEPIANALHNQVIFVSVVNPLLIDDYGTKRVRKVKTDKQDSLKIASFAIDKWLDLREYIPANDIRKTLKILNRQYVQYNKILVMQKNNLISLLDSCFPNANTLFTSPRRESDGHEKWVDFVLKFPHIHSISKLSLSAFKVKYQSWCRKNNYNYSDKKVADIHSYCKTQISVLPMTDSVIKIITEAAVMLNSTLETLCMFRDEMDRLSSTLPEYNAVMGIYGVGKVLCSQLIAEIGDVRKLNNSKSLVAMAGIDPPPNQSGKVDTKSRSISKRGSPVLRKTLFQIMTIIIQNKPVDDPVYQFLNKKRSEGKPYRVYMIAAAHKFLRIYYARVMQALN

SEQ ID NO: 276232 - protein, 322 aa, unidentified
MNPKNYGGIDVAKKNFVIGIYGQDKTKTEANTPKGHAKAVEYLQKHNVDLVVLESTGGLEVPLANALHAADIRVVIANPQRTHQYAASFSLGKTDHLDAKMLADYAQALDSRKMADDMCYAPPSEEALALEALVKRRSQLVEMRKMEKNRLEQTHTSQKASVVAMIKHLGELIAALDKEIDQSNRGGFNGKGEILSEMKGVGRITCATLLSMLPELGKVPHKRAALLVGVVPPPRQSGEKEKKSGCVGGRMVVRNALYMAALTATRSEPKIKAFYEKLMSRGKAFKVALNACMHKLLRILNARMRDYLASLKETEESEPQSA

SEQ ID NO: 276233 - protein, 354 aa, unidentified
MNIKYIGMDVHKETISIAVMNGEGKVVMESIIETKASTILQCIQGIHGDLHVTLEEGTWAAWLYDLLKPHVTELVVCDPRKNALMKEGNKSDKIDACKLADLLRGGYLRSVYHGENGLRTLKELARSYLTISKDLTRVMNRVKALYRSWGILCGGQQVYAPRHRTEWLNKIGEAGVRRRAEFFYQQLDALRELRQAVRKDLLAESRKQSATKLLRQVPSIGPIRAALLIALIQTPHRFRTKRQLWTYSGLAIETHDSAQYHYVGGQLQRSKKPQQLRGLNQNHNHDMKAIFKSAATMASSREGAFQAFYQGLLMKGMAPAMARLTLARKIAAITLIVWKKGAHFDAKQLKPQAA

SEQ ID NO: 276234 - protein, 345 aa, unidentified
MEPMYYIGLDVHKRKISYCMKDSGGKVYSEGSLSATRLDLDVWMKTLPQPWSAAMEATMFTGWIYDHLKPHAAALKVAHPLMLRAIAAAKKKNDRIDANKICDCLRCDFLPECYMAPTAIRERRRTLRYRNLLVRQMVQMKIKISSLLMEAGVSYNKQRLHKAGYFRELLATNPDIDEGLRSLLRLCRETVVRLQKTESALVRSLESDSLLMDRVERLMTIPAVGPITALTWALEVGDVQRFSSIKKAISYCGLCGAEKSSGNTVQRTPLSKQRNKHLQTTLIEAAKMAPRNSPELAMLYDKEKQKGNANRATLAVARKLVAYLVAVDRRQKEFLTVERENRTAA

SEQ ID NO: 276235 - protein, 330 aa, unidentified
MLFHKPVLMNKYKETYGVDISKGVFDVHGSNKGHNQYKNDETGFKKYLKELPEGSLVVMEATGYYHYRLAQFLYKKGVTVSVVNPLSIKRFIQMKLAKVKTDKSDARAICDYALINEVPLYNALTDTQSECLQLFRLLDTYLKQRTATKNKIHGEAVLGVPSKFVYRSLVRNKKQLDKEVEAIESKILSLVKEDQQEQLTLLTSIPGIGQKTALFLIVVTDGFSKFETASQLCSYVGITPTVRESGSSVRGRARISKVGNRKLRNLLFLCAFNACTHNKACRAVYERIVNKGKSKKLALIAVANKLLKQSFAIAKSRRPYDETYVSILPR

SEQ ID NO: 276236 - protein, 386 aa, unidentified
MQKLNDLSRSLTALEPDGTLIAVIEMSLSSWLVAGIVPGVERQPLKKLAVDESALLKLLHRWREEAEKAGCRIERIAVAFEAGRDGFWLARWLKARGIEAYVIHASSVAVSREHRRAKTDRLDTELLKRSFLGWLRGERDHCKMVEIPTMKDEDAKRPNREHDSLIGERSRIVNRMKAALVRLGIRGFNPKLKRATTRLDGLRTPEGEPIPPNALAELRRDMERRRLVNNQIRQIEEERLERIEQAPCDGPHVMVRLLARVMGIGIETADMLVHEVLSRNMRDRRAVARYAGLTGSPDESGRKRREKGLARSGNVRVRRGMIQLAWRFLLHQKNSALTKWFRSRTENARGTRKPMIVALARKLLIALWRLVREGIVPDGVVLRAAQ

SEQ ID NO: 276237 - protein, 395 aa, unidentified
MKLIGIDIGKNKHFFCVMDQQTGEIISQPVSFSNDKEGFDFLVQKIKSYPKDSILIGMEDTGHSHFALLKYLLDLQYTVALINPKTTDFNRKMQGGITKNDKLDTINICDVLDTPERKKQYRITKVNSFDLYEQKQLTRHHHNLKEEENVYKNRLQKCIDIVFPEFNKLFNSKYGIVYMNILKMFGSAENIANTDIRTIRKCFEIEGRGNRISLTPERLKECARSSIGISSSAEVIQIKHLTAQIELIEEQLTEIDKKIEEFSIQNNSPILSIPGISHFSGTSILAELGDISNYSKPSQIIKFAGVAPLHYESSQFNAQHTAITKKGSKYLRKTLYQIILPVIRHNPVFNKYYQLKISQGKGHRCAQGHCVRKLLRIIYHLLKTNQQLKVSFCGI

SEQ ID NO: 276238 - protein, 311 aa, unidentified
MSDKTTVGIDVSKFALDVFIDTCERLIHVDNSASGIMQLLTELEDLHVSGVIMEATSRYHSLAESMLISAGLSVAVINPRQIKNFARAMGKVAKSDSIDARIICEYGRRMKPEFRPAKEKELQDLALLLTRRRQLVQNRVMEANRLQEKNGAYIEMGIAEHIALLNSQIDTLDQEIKYQLNQNTALSTKRKMLEKVKGIGPVTQAAILSQLPELGALTRRQISALVGVCPYDRDSGQLRGKRAIWGGRAGQRATLYMAMLSAVRYNPQIKDFYTSLIARGKVKKVAITACIRKFITILNAMFRDQKDWVYS

SEQ ID NO: 276239 - protein, 343 aa, unidentified
MSQTPFVAESIVSVGLDVHQYVVQVCVLNRVGQVLSNRRVANDVTAIVAAIRGHGGVHGVALECSTGTAALADALIQRTGWDVHLCHPGYVRRLRQNPDKTDLSDAHLLADLVRVGYLPRVWLAPPAIRDLRTVVRYRQQVVDALRNTKLRIRALLREHRVPDVPQYLWTRRGLLWLRNLKTLPALAGWVLESHLAEVDSELARLARVTARLREVAGQDALISALWAQAGIGLVTACVLRAEIGHFRRFRTGKQLSRFCGVSPCKASSGARQADAGLIRGCSRLLRDTLIEAAHRLGRCAPHWQAFRAQLRARGKAGSLIAAAVANRWMRRLFHELCALEWAA

SEQ ID NO: 276240 - protein, 354 aa, unidentified
MKRSTKHVALDVHQATTLASVREDSGRVIARSILPTEEPAIVEFFRGMRGTIHVAFEEGTQAQWLHDLLTPLVDRVIVCDRRGETRQGNHGDQHDADALSEQLRRGGLRAVYHGSGPGAGLKELTRSYQNLVADATRVMLRLKALFRARAIRTPGKSVYAPTRRAQWLAQLPDGGARVRAAALYAELDVLRTLRPQAKAAMLAAAQQDPGWTVLRTIPCFGPVRVALLLATMQTPWRFRTKRNLWAYAGLAVVTHSTADYELVAGRPQRRCRAPLTRGLNRNHNRVLKQVFKGAATAAKARPGPLQDWYDGLVARGMREELARVTLARKLAAITLRLWKKGERYDPTQLTTPAR

SEQ ID NO: 276241 - protein, 391 aa, unidentified
MILVGVDVAKDKHDCYIMTSEGEVLFKSFTIANNMEGFNQLYEKILSVIDNFDNVKIGLEATGHYSYNILGYLLDKGLTPYVINPLHSNLYRKSLSLRKTKTDKVDSHIIASMLMSDVSLKPYSNTLYHNEELKSLTRYRFTKVQERAKLKISISRLVTILFPELEKLVPTLQMNSIYALLYEFPSAHAISKAHLTRLTNLLNTTSKGHYTKDKAVLIREAAKNSIGSNMPAKSLELKHTIKLIKELTSEINEIEEEIKIIMNKINSPILTIPGIGLSTGAQILAEIGDFKNFSSPDKLLAFAGLSPSTYQSGNMYSSNAKMEKRGSKYLRFALFNAAIYVSYWEPTFSQYLKKKRVESKHYYVAISHVVKKLVRLIFHLEKTNERYSTVV

SEQ ID NO: 276242 - protein, 310 aa, unidentified
MGQVFAGIDVAKAAVEVCVRPTGEAWAVPRDEVGLADLVERLTALGPALVVLEATGGYEASVAAALADGGLAVVVVNPRQARDFARSTGKLAKTDRVDARLLAHFAEAVRPPVRPLPTAAAEELGALVARRRQLVDMIRAEKTRAQQARSREVQGRITAHLQWLERELADLDDDTRRLIRSTPVWRETDDLVRSAPGIGDVTASTLIADLPELGHLDRRRIAALVGVAPMNRDSGAWRGHRMITGGRAQIRQHLYMATLTAITHNAAIRVFYHRLVAAGRPKKVALVAAMRKFLTILNAMVRDRRPWKNA

SEQ ID NO: 276243 - protein, 317 aa, unidentified
MEEVSFRQVVSRGCGIDVHQKVAVATIGGEALRTQTREFGTTTSSLTEMKEWLLGNGITHVAMESTGVYWKPVYNILEPSGIKVWIVNARHIKYVPGHKTDKKDSAWICKLLLAGLLKPSYVPPKAQRNLRDLTRYRNKLVQNVASEKNRIIRILEDCNIKLSSVMSSTSGVTATKLIDKLCDGKVVTREDIDEVYHGKLQCSKDDLYEACQGFITDHHIFLLQTINRDIESTESLISELDSRIKESLSEYDNAMEVLRGIPGLNRKTVEDLIAEIGLDMSVFPTEKHLASWAGMCPGNNESAGKKKAEESPTGTNR

SEQ ID NO: 276244 - protein, 373 aa, unidentified
MKKVRFLGLDVHADTIAVAVAEPDGEVRSLGIIPNREESVRKLVKKLGPAEQLQACYEAGPTGYVLYWQLTALGVKCEVVAPSLVPVKAGDRVKTDRRDATKLARSYRAGDLTAVWVPNQEHEALRDLVRARETAKQDQLRARHRLSKFLLRHGRRVPLGIKVWTQKYQDWVKEQVHFEQPAQEYTLLDYLHEVEHVGDRIRRLDQAIAEAVKLAPPRMQEVMQSLQALRGIAQISAVTIVAELGKISRFDRARQLMGYSGAVSSEHSSGKRMQRGQITKTGNAHLRRIAMEAAWAYRHRPAIGPRLRKRQEGLSEEVKEIAWKAQHRLHKRYRNLSAAGKEKQKVVTAIGRELLGFIWAIGVQVERNSKQVA

SEQ ID NO: 276245 - protein, 424 aa, unidentified
MKVTYLTCCGVDVHKSFLVATIVKTNGGIEPSYQKKRFSTFNHSILEFKQWLLENDCHDVCMESTGKYWVPAFNLLEDEINVTIANPKWVKAVKGNKDDTKDSKWIGDLFRLGLVKGSYIPCKKIRILREYTRYRYKLVSCRSSEKNRYQNALTVCNVALDSVVSDIFGKSSTSIIDYLLEQADNSINHEEIASKLLRRLKSKEDAVIESIEGYQMTDSQKYRMRLVRAHMDYITAEINDVDSMIESMISSDPDYENAIQFLMTIPGVKRDSAITIISETGIDMSQFCSSKRLCCWAGLVPGSNESGGKKKSVRIARAGVYLKPALVQCAHAAVKSEKSPYYKKKYESLMKRRGKKRAIVAIARMILTAIYQMLSTGEAWNPSDLYKIDMPEALLEKQKTKAIKQAMKLLQREGLYPPPEPIAS

SEQ ID NO: 276246 - protein, 363 aa, unidentified
MDVHKESFTLCSCKYEDEKASHYQRTPASYKNVLRYLAFLRTIYGEYTRFVCGYEAGCLGYSLYHQLENFNVECVILAPTTMLEQRSKRRIKTDKRDAEIIARSLAQHNYSPVHIPTETDNQTKEFIRMRDDHKAELKKIKQQILSFCLRQGYQYDGSGNWTAKHVKWLRSLKPTGLYKEILDEYLLTYTILTDKLNRLDQRIEELASKEEYKESVSKLTCFLGIKIHTALSVIVEVGDFQRFVSARKFAGYLGLVPGQHSSGDDRNGLGITKAGNTHVRRLLVESAQSYTRGKIGYKSRVLRSRQAGNSPQIINYADRANERLRRRYYQMVLKDGKKYNIAKIAVARELACFIWGMMTDNIY

SEQ ID NO: 276247 - protein, 347 aa, unidentified
MDATTVAVDLAKNVFEVVAANEQWKVIERARLTRGQFERWFQNRCVRLVVMEACATAHYWARTLGARGIEVRLLPAKYVRAYVRRNKTDAADALALLEAARSIDITPVAPKSVEQQALQALHRLRSGWMSTRTRRINALRGLCREFGMEVSAGAARGLAQITRLLADEHSAIPAMLRTPMRLALEEVRLMEARIDALERELAALARRSEACRALASVPGIGLLTSTAMLAAVGDPRSFDSGRRYASFFGLTPREHSSGQTRHLGRISKRGNRYVRTLLTHGARSVLRAAAAARRAGRNVDRLRSWALEVQARTNHNKATCALANKLARIAWAVWVKHERYQGSMTSR

SEQ ID NO: 276248 - protein, 343 aa, unidentified
MHYIGIDVSVKESALCILDGKGKIVRETKVPTDPEIISCFIGDTGLAIERIGLESGCTAAWLFAGLQRHGWPVICIDARHAAAALQAGFRNKNDRNDARGIADLMRVNKYRPVWVKSPQAQRQGRLLTARATLQSQLVALENTIRGLLRQEGIGLTDRRTAFEAAVREVIADDRLLQAAVLPLLETRTAVLQHRAALDRQILRIVRVDPVCRLLMTAPGVGAFVSLAFRVAVDDPRRFSRSRNVGAHFGLTPREYSSGQVSYRGRISKMGDREVRRLLYVAASRILRRDAALWCPLKVWAVRLAQRLGIRRARVALARKLAVVLHAMWSDGQVFQWRRSATLA

SEQ ID NO: 276249 - protein, 461 aa, unidentified
MPKSGPKSGRREHASPTTLLRVNPNAAGIDVGGASHYVAVPADRDDQPVREFAAFTGDLYRMADRLKACGIATVAMESTGVYWIPIFQVLEERGFEVRLVDARQLKRVPGRKTDVADCQWLQQLHTFGLLAGAFRPDDQVCVLRSYMRQRAMLASYASQHVQHMQKALVQMNLQLQHVIDDITGATGMRIIRAVLEGERDPDRLAALRDGRCKSSAATIAKALRGDWREEHLFALTQAVELVEAYQAKITACDARIQAHLQTFADRSDGRPLPPGPPPRADRHDLSFDATAELYRLTGVDLTAISGLQAHTILKVLSETGLDMTRWPTSKHFGSWLGLAPNNRVSGGKVLSRHTTPNANRAAGALRVAAQTLHHSKSALGAFLRRKAAQLGMPKAITATAYKLARIIYTMLTEGAAFVERGQDYYERSYQQRVLKNLTRRANELGYCLIQREQAVPHPASG

SEQ ID NO: 276250 - protein, 385 aa, unidentified
MQKLNDLSRSLTPLKPDGTLIAVIEMSLSNWLVAGIVPGVERQPLKKLEADESSLLKLLNRWREEAKKSGHRIERIAVAFEAGRDGFWLARWLRARDIEAHVIHASSVAVSREHRRAKTDRLDTELLKRAFLGWLRGERDHCKMVAIPTIKDEDAKRPNREHESLVGEQSRIVNRMKAALIRLGIRGFNPKLKKAAERLDGLRTPEGEPIPPNTLAELRRDMVRRRLVRDQIRQIEDARLERLQQAPSDGPHAMVRLLARVIGVGVETADMLVQEVLLRSMRDRRAIARYAGLTGAPDESGRKRREKGLTRSGNARVRRGMIELAWRFLKFQKDSVLAQWFRARTESARGTRKTMIVALARKLLIALWRLVRDGVVPDGVVLRPA

SEQ ID NO: 276251 - protein, 365 aa, unidentified
MTRKRYYIGMDVHKDSVQIAVYEETGLEPISERRLTSDPSLLLKEAKKFNAKGPTEVAYEAGCMGYIIHRVMMKGGIPCYVLPANKVAKKREDRIKTDKRDARLIARELRSKSIRPISVPDETDEATRDLLRCREDVNCDLRRSKQRLLKFLLRHGYTRNGEGESHWTVKHWKWMDSIEFSQEHLRVVYEEYRSQIRSFEERLCRLEKQVVETAESNRYKAEVSKLRAFKGIDYIIALALICEIGDFKRFGSAKAFMSYLGLVPSENSSGGKRNQGEITKAGNGHLRRLLIEAAWHYTRNTRPGRRLEQRRLSSPVSVIDAADRALHRLHKKYFRLLLGGKHKNKAVTAIARELAGFIWAVQVAA

SEQ ID NO: 276252 - protein, 442 aa, unidentified
MGKKKIKRELQVLYPHAAGIDIGSSSHYVAVPVDSGEESVREFGSCTSALEALAAWLSECGVDTVAMESTGVYWIALYELLESRGFRVYLVNARHVKNVSGRKSDVIDCQWLQQLMSFGLLAGAFRPGEDVCALRAVSRQRDSLINDQARHVQRLQKILTQMNVQLTNVLSDIVGTTGQAILRAIVGGERDPVKLAGLRNYRVRASQAEIAESLRGNWREEHVFCLAQTLALYDAYAGLIAQTDAQLATMLGRLQRVAGELAPVSGKGRGKHAPGFDTRQALYHWVGVDLTRIGGIDVSTALKVLVEIGWDLSKFKSAKHFASWLGLCPGTRITGGKKVSGASKRIPNRVAQALKLAAQGLHRSHCALGGYYRRMAARLGTGKAITATAHKLARLVYAMLTHGGEYVERSEADYEAQYRDRTLKNLQRKAAAFGLRLEPIAV

SEQ ID NO: 276253 - protein, 297 aa, unidentified
MNACAAGIDVGKSFCDVGMAPSGHNFRVPNAPKGVAVVIGRLRRSRVRRVVLEAIGPYGAALIAALRTSGFEVGVVNPRRIKAFRDAEGHRAKTDRLDAGLIARFALTMTDIIRPLPSAEQLTLKALATRRRQIVEIVAMEKTRLKQAVEPLILDSHRAAIAALTLERRKIERELEQRIARDPAMSRRKEILISIPGIGPQVATVLLTELPELGGIDRRAIASLAGLAPHPHQSGAFRGRPQITGGRPCVRTALYMAALASCRANPLARENYLAMRQAGKPAKVAIIAAARKLLIVA

SEQ ID NO: 276254 - protein, 343 aa, unidentified
MGEVSTIGIDIAKSVFQVHGVDDAGAVVMRKRVGRSKVLQFFGSLSPCLVGIEACPSAHYWSRELQALGYTVKLMPPSYVKAYLKRSKNDANDAAAICEAVTRPSMRFVPIKTQEQQTGLMLHRTRQLLVRQRTMLSNAIRGHMAELGIISAKGRNGTAELLQIIGDAANDLIPPVARFCLDLLARQYLNLSAEVASVDKRIQAWHRSCEESRRLEEIPGIGPIVATALVAEIGDWGAFRSGRSLAAWIGLVPKQHSTGGKERLGRITKQGNRYLRWLLVAGAMAVIRYARQHGTKRAWLTRIMDRRPAKVAAVALANKIARMAWAIMVHGERYREPKLLLAA

SEQ ID NO: 276255 - protein, 351 aa, unidentified
MYAIGADIDMVKAVLYALDYKGEPVKEFNKLFRRTRLTEDGLRDVREWLLESGQEYCILVENSTKTHHMAWMMESLGIIFIVGHSTDLRQITKSDSKTDDIDAEKLASYMLARLHGANQFHVSYYCDKETMRRRTLCRMAKKTVTSKGACKRRIRMYAHMFGLTIPSGDLEHTSVRKSVRDIGDLELDMMLDELEQLIERSKMQKKRIETEFRGRPIYERIQEIPGFGPITSAYLDALICDIGRFPNAKAFQASLGVVPRVFQSGEKDRNGKITKKGEPHARWLLYQAVSAHVREFQDSPVTRFFNRLNDGSIEERKARHEKVLMKRDAMIAASRKMAAIIYTLLSKDRHW

SEQ ID NO: 276256 - protein, 321 aa, unidentified
MNHPNLAKDNSIYIGIDISKPELEIHTYEASLKLPSATPNTKSSILKLIKKFAKDKRIHCVFEATGGYEKSLLSLLQSEGVKASRITPSLARNFAKAQGILSKTDAIDAKVLTDYGFKFSPRETAPLDPVIEEIHALVKYRRHLNDELLRERQQLEHTPPKSIETMIKSRIKTLTKQVEKITKLMIDLKSKSPEIDEAVEILTSTKGVGDNSALSLLAAMPELGKLTNNQASSLAGLAPFNRDSGKFRGRRMIYGGRKDIRQALYMAALSASRYNPTLKEFYQRLLANGKPKKLALIAVMRKLLSYLNLLMKRHLQEIEAK

SEQ ID NO: 276257 - protein, 354 aa, unidentified
MLAEFLDAVVGVDTHRDTHQVEIALPNGAPIASTTISNDATGYAELLAWIVDHAPGPRLAISIEGTRSYGVGLARAAAAAGLVVLECEQPHRKARRGKGKSDPIDAHLAVLAALRLDADRLPTPRADGDREALRILLGARQELTTASTAQTNRLRALLLGGDDTDRTLARGALTEARLASLARRRPPREASREQAVRHAEIRRLALALREAARALKANRAQLQTIVNDVVPRLIERPGIGPVSAAQAIVSFSHPGRCRNDAAFAALGGASPLPASSGRTVRHRLNRGGDRALNRALHTIAATRMRSCPTTQAYVARRTAEGKNPREIRRCLKRYIARQLYRTLATAMTPAAETS

SEQ ID NO: 276258 - protein, 430 aa, unidentified
MKSNTQNAKIEAITEKTLVLGIDVGSETHYARAFDYRGIEYSKKPFKFSNTEVGFATFKEWILDLKERHEKDKVVPGMEPTGHYWFNLGKFLQDNEMKPMLVNPHHVKKSKELDDNNPTKNDRKDPKVIAGLVREGRYMIPYLPDGVYADLRTASNIRFQLQAELTRIQNRISRWFNIYFPEYKTVYGKPDAKSGMLILKAAPLPEDILTLGIDGVNQIWRDAKLRAVGKARAKTLIEAAEHSIGSKEGTMSARMEIRMLLEDYESKNMRLQEVMVLIEELVKEIPMAEKLLEIKGVGIRTVSGFLAEVGDISRFNNPKELQKLAGLALVENSSGKHKGETTISRRGRKRLRYLLFEVAMSLVAKNPEFRELHNYYTTRRLNPLKKMQSLMAIAAKLIRVFYAMLTKGVDYDPKKMVSDIKRPAVYLQAA

SEQ ID NO: 276259 - protein, 427 aa, unidentified
MPYRIAGIDVHKKMLAVVVSDVEVADEYNFERCRFSSSPASLRLLSQWLIEREVQEVVMESTAQYWKPVWDALERYWRPAYKKAEHSRAKSGTIHLAQAKSNRGPRGRKRDFPDAERLVKRLVANELRLSFVPDPEQRLWRTVTRRRYQLTRNHVRLQNQLEALLEECHIKLSSLVSDLLGVSARRMLKALAEGKTDPAALAALAHGCLRATPAQLTDALGASKELNTVYRRLLKMILEELQLIEEQIKELDQEMAMLLKEHQDAVQRLAEVPGLGVNSAHQIIAEVGATAAVFPSDKHLASWVGACPGDEESAGESKSHRCPKGNRSMRRVLNQCANAAVKLKGSIFQILYRRLSPRLGHNQTIGVIAHKLCRLIWMILHQGIRYEERGPAVSERSRTKRVQLMIRILRKHGYQVELQTLQPTHSA

SEQ ID NO: 276260 - protein, 421 aa, unidentified
MKKNQRIVGFDCAEDEHSVVLLDASGEFGERFSVINSREQIQEILAELVLAVGPEAELVVVVESKRSHGRIVTDVAIEIGCEVWQVNTVALNHFRDLEGQPRKDDEWDAYLGARMVFLRMGGCREVIETTEEERTLSRLTRTHSRLVEDRKKHVTRLRAVLLELAPEMLHSSWKGPRPGSKALLYLLERWPGFEGLENAQLRTIEKILRRCRYGSKASGVAKLIRDMARRISITGEERSALTLELDLLAHQIRFCNESVDQVYAKIARRVERHPIGRKLLEMHGNGPVIVGVLISELYPVARASTEPKCATYAGVTPLARKSGKSLDTDKLAQGVNKRILHALYTSAVVAVKNSAIDRAYHQKKLRDYAGHPKPHVAAFIALARQRHKLVYKLMTTEARYDKEILVATHLARLEQARQEAA

SEQ ID NO: 276261 - protein, 330 aa, unidentified
MDAFVGIDVGKETLVIVLLRGTEVLRATMDNHPEGHTKLLTWLAKHHRRLAAEQVHACLEATGNYGDEGALRLHQAGYRVSVVNPARIKAFADSRLSRNKTDEADAWLIAEFCRTQTPPAWSPPAAEVLTLRRLARHLDDLKTMHQQEANRLAAPQPDLAIRQRLEAHIAFLDAQIAAVWQDIHDHIDQHPDLKRQRDLLDSIPGIGDISACLLLAELPDIAVFERAEQLAAYAGVTPKQHTSGKSVRGPTRMARQGNPTLRCRLYFPAVSAKTHNPLIRPLAQRMKDQGHCPLSIIVAAMRKLLHQIFGILKSGKPFDPDFLTKRLATA

SEQ ID NO: 276262 - protein, 353 aa, unidentified
MLKEQRLTIGMDLGDHWSCYCVLDEAGNIILEQKVAMTPEAMKQTFSKIPPSLIALETGTHSPWVSRLLTELGYKVIVAHAQKVQLITKSNRKDDRHDARTLARLARIDSELLGPVRHRSAQAQIHLTVIRARAELVRARTALVNAARGLVKSYGQRLPKCGTQQVNRELAAGLHAELREVLEPLLQEVESLNERIQEYEVRMEKIAKESYPHVELLKQVKGVGTQIALTYVLTLDDPHRFPKSREVGGFLGLCPGRRDSGESQPQMNISKEGDRYLRTMLVQGAHYILGPFGEDSDLRRWGLKLAARGGKSAKKRAVVAVARKLAVLLHRLWVSGEVYEPLRNSNKAMRAAA

SEQ ID NO: 276263 - protein, 341 aa, unidentified
MNIVTVGIDLAKNVFALHAVDQYGKAIFIKPKVARGQLLEMVAQLPPCLIGMEACSGAHHWAREFSRVGHTVKLMAPKFVVPYRMSGKRGKNDAADAAAICEAVTRPNMRFVPVKDVDQQAILCLHRTRQGFVEERTALYNRLRGLISEFGIVLPQKVERLRREIGAHLEALPGWANRCVGDLLAHADRLNEHIDEYDKAIALAAKQDQRSRQLMQLPGIGPTTASALVASLGGGHDFKNGRQLAAWVGLVPGQYSSGGKARLGRITKAGDAYLRSLLVMGGRSVLAGLGDKQDRFSRWARNLVERRGYWKAAVAIAAKNLRLAWAVMHYGEEFRRIEDLA

SEQ ID NO: 276264 - protein, 347 aa, unidentified
MLHAGLDLSRKKLDVCLLSDDGEHLDQLAVPPDVDSLRTLARRIDEVHREPVCAVIESMTGARIVHDTLEACGWSVEIADAQKVKGLAPLACKTDRIDSMVLAVLSHRDLVPAIWLPDPRVREERELARFRLHLVKHKSALKCRIHSTLINFGRACPVTDLFGVEGRRLLERLEVPEPWRSNVTASVELIDDLEHQIAEINRRLREGHADHPYIPLLMSVPGIRWVLAFTIAGEIGEIERFSSPEKLAGYTGLCPRVNQSGEKDRRGPLTKHGPTYLRWALLEATMHALKHPAYSERYQRNKRRLGKQRGAKVAQIDIARRLAHAIWHMLTRNQPFAPRGAAFRLAA

SEQ ID NO: 276265 - protein, 455 aa, unidentified
MAKKNPATRQSKGKVRQNILERINLHAAGIDIGANFHFVAVGEECAEENVRKFDAFTSDLHRMADWLSEHHIQTVVMESTGVYWIPAFQILEQRGLEVKLVNAAHVKNLPGRKSDVSDCQWLQQLHSFGLLNGSFRPKDEVCVLRSFLRLRDTLVKDSSSHILRMQKALTQMNIQVHRVITDITGYSGMAIIRAILDGERNALKLAQMKHPLVKAPTEVIVEALQGDYRTEHLFELQTALDLYDVYQRKILECEAQVEQHLQQWEPKVDFEQALAQTGALQTRSASVRLELHRQAQLVSVCGVDLTRVPGLSTLAVRTIIGETGLDMNCWKSEKHFCSWLKLCPDNRISGGKVLSSRARRTRNRATAMFRLAAQSAMRSQTAIGAFIRRIKARLGAPIAINAGAHKLAQLFYRMLKFGETYVERGQTYYETKYKERLLRNLNRRAKEFGLQLAPL

SEQ ID NO: 276266 - protein, 354 aa, unidentified
MTAGLDLGDKHSYLCLIDSESGEVIEEGRLRTTPEAFRRRFVSEQPLRIAIEAGTHSPWASRVLKECGHEVLVANARKLRLIYANKRKTDEIDAENLARLARLDPRLLYPLKHRGESSQAHLAIVRARQALVGARTQLVNHVRGAVKSFGSRLPKCPARTFHKRASEHIPEALLPALGPVLEQICSLTGRIRDYDRKLVAISEEHYPETELLRQVEGIGPLTALTFVLTVEDPHRFEKSRAVGAYLGLVPATDRSGDSDPQKRISKEGDEMLRKLLVGSAHYVLGPFGSDSDLRRHGEKIASRGGKNAKKRAVVAVARKLAVLLHRLWVTGEVYEPLYNTHRSQKQQEEEEEAA

SEQ ID NO: 276267 - protein, 470 aa, unidentified
MSKGSGTTRGDRRRNARRERLRQVLPRDGAVIGIDLAEDKQAIAVIDHDLRVLARKTVRVKAFRLGEALDWAVAQARAKGFASVTVACEPTGPRWLQVHRLCGERGLPLVCIQPLMSHIAREQQDYTTHKTDEADCVLIARLAVELHCYLPEQLEETWAHLRHLGRRRAQLITAATASAQRIQDFMSVAWPTVTETCARPLESNTWLAAVQLVTSRCGGQPGKLAVMGPEAFTTLVRGAVPGWGGKKAWGTICGRIFAALTDTEGVVVSSRRGLLRRCADELGDLQRTRAQRRAVEADMVAVLDELGLSRLADIPALTAVGAAAILAEAGDPRRYDSSSSLVKHAGMSPSDNASGAFYGEAHISRRGRPGLRLTVWRAVWPMLRFNPVMAAKYAAMTSAAADAAQAAASQADAGSRQVTAAAAAARTRRAKARVACAASLLRWIYSMVIHDSSWDPAVASGPASCPAEAA

SEQ ID NO: 276268 - protein, 325 aa, unidentified
MRQPQSQLKPLTQVGLDVSSQTLDAHIRVDGKAFSVPNTDAGFDQLCEMLSAYDVSMILMEATGGYEDSAACYLQLQGYDVVVINPRHARRFAQSMGRLAKTDRIDAAILAHMAFMIDSGPDRERYIKPVTDEQRKQLSRMSSRRRQIVDLITIEKQRLTHADDYARESINDIISLLNARLKRIDSDILRYVKKNFSELASRLLSIPGVGSQAMTVLIADLAELGHVNRRRISALLGVAPFNHDSGKFKGQRRIRDGRSSVRNVLYMGVISATRFNPVIRAFYDSLLLRGKPRKVAIIACMHKLIRIINAMMRTGKPFDMSLHGV

SEQ ID NO: 276269 - protein, 411 aa, unidentified
MKKTVEYEQVFERGCGMDIHKDSVYATVMGEGINTETRVFKTTTRGLRELGAWLTELDVKAAAMESTGIYWKPIFHVLSEFPIELMVVNASHIKNVPGRKTDKADSQWICKLLISGLLKGSFIPPADIQKIRDLYRYKKKLVHYISSERNRIIRALEDANVKLSSVISDTSGVMATHIIEGLLAGRKDLKNLVMERYHHRVKASPEEIVEAIDGKITPHIRFLINCIQKHISALHQQIAEVDAEIDKYVKAYETQIELLESIPGVGREGAISIISEIGVNMDFFPSEHHLASYGGMCPGNNESAGKKKSSRTRKGNQHLNTYLVELAWSAVKTKNTYYKAKYEILVKRRGKKRALIAIGRKILCAIYHMLKNNESFKELGSNYLAEKTQKNRIEYLKRELRQYGYKIERVA

SEQ ID NO: 276270 - protein, 427 aa, unidentified
MPYRIAGVDVHKRMLAVALADVEVDGEWRFERRQFGTSQSQLEMLAAWLVERDVEEVVMESTAQYWRPVWDALERDWQSVRRRRSGAAPTAGALHLAQAQSNTGPRGRKKDFPDAERLVKRLVAQELTLSFVPDVTQRLWRTVTRRKFQLTCNRVQLRNRLEGLLEEMHLKVSSLVSDLLGLSARRMLRAVGNGATDPATVAALGSPRLHATPDELRDALGACPDLHPVYRRLLTLTLDELDGLEAHIRQLDAELAQLLREHQAAVERLAAVPGLGVDSAQQIIAEVGPTAAPFATAKRLASWVGACPGHDESAGVNHSRRSPNGNRQMRRLLNQAANAAVKTKGSIFELVYRRLVVRLGHAQAIGAIAHRLCRLVWKMLHDGLTYEERGPAVTKARAQSRAAKMIRDLRKLGYRVERVSAPASTLA

SEQ ID NO: 276271 - protein, 344 aa, unidentified
MEHYAGIDVSLERSSVCVVDALGRIVKEAKISSEPAVLVAFFEALGFAVKRIGLEAGPMSQWLHAGLKRAGFEAVLLETRHVKAALSAMTVKTDRKDARGLAQLIRMGWFRPVHAKSIRSQEVRALLVARKQLLGRLIDVELSIRGILRGFGLKVGPVTRKGFDARIRELVTGQATLERIAGAMLSARVALKAEYEKLHKIVLAIVRDDAVCRRLMTVPSVGPVVAITYKSAIDDPNRITKSKAAGALFGLTPRKYQSGEKDVTGGITRAGDEMVRTALYEAANVLLARITRFSKLKRWAMDVAKRRGSKRAKVALARKIAVILHRMWVDGSTYRWTETQPIAA

SEQ ID NO: 276272 - protein, 339 aa, unidentified
MQVTTVGLDLAKNIFQVHGIAADGTVAFNKSLRRAQLLQFFEALEPCLIGMEACGSSHHWARQFRKLGHEVRLMPAMYVKAYVKRGKSDAIDAEAICEAVTRPTMRFVAIKTEEQQGVLFLHRARDLVVRQRTQLSNMLRGLLGEFGIVIAQGIGSAVKFAKAVLDGDRPSIPEVAIDVLTNLCNQMVALHLRILWYDKRILLEGRRDPKVMLLRTIPGVGPVTASAIVATAGDGHQFRNGREFAAWLGLTPINRSSGGKERLGRISKMGDRYLRRLLVTGMTARLNQMKVNPDRVDPWAMSLRERKSPRVATVAMANKTARIIWAVLTRNERYRPHTA

SEQ ID NO: 276273 - protein, 344 aa, unidentified
MQSMYYIGLDVHKRTISYCVKDGSGTIHDEGTIPATRFDLDRWMKTLPQPWTAAMEATVFTGWIYDHLQPHAAALKVAHPLMLRAIAAAKKKNDRIDANKICDCLRCDFLPECYMASTAIRERRRTLRYRNLLVRQMVQMKNKISGLLMEAGVSYNKQKLHKAGYFRELLATNPDIDEGLCSLLRLCRETVVRLGKTESALVRSLERDSLLIDRVERLMSIPAVGPITALTWALEIGDLQRFPSIKKAISYCGLCGAEKSSANTVQRTPLSKQRNKHLQTTLIEAAKMAPRNSPELAMLYAKEKQKGNANRATLAVARKLVAYLMAVDRGQRNFQVVQTNCIAA

SEQ ID NO: 276274 - protein, 403 aa, unidentified
MTVILALDVSKGESYKVLYHGTHCLSEGKFQHNQVGFQQLLQEINALSETPEIVFEATGVYSRPLEKFCQDNQLSYCLLNPLEAKKQMEEGSLCSWKTDKIDAHKLAQTHQKNQREVKQHQQVPYLKLRDLSRFYQEIEGKISQVRMDLHNGLQSTFPELELFFSSRITPYALSLIELFPHPVFVLASSRTKIKNRLMKTTRKRISENRAWQKADQILDYATNSYPAVEADSIHCQKVAYYAKLLQDLLEQKEQIMAQMIEVAQSLEAFELFQSIPGIGAPTAALLLEELGDIRRFSTSNKLNAFVGIDIRRFQSGKYRGKDHINKRGNPKGRKILYFTIRNMIRQQHAASNHIVDYYYKLKKQPLPKKEKVATVACINKLLKCMHSMVRNHTRYAYTVSNDQ

SEQ ID NO: 276275 - protein, 330 aa, unidentified
MKNWNVILGVDVSKLTLDISCAERNLHIKIDNCSKGFDEFKKWCKTNGIDLKETLVVMEYTGGYEYRFIQFCDSKFIPFCRLPGLEIKQSMGMVRGKNDKADSFRIGRYGEEKRDKLVPSKPLDNNILNLKQMLSFRKRLVREKAGLQSTVKERKHMYEPKKTDTITCIMQVKIKADEKYINQVEQEIRELIKSNEEFFQNYRIITSIKGIGEINGWMTIAYTENFTSFKDARTYGVYVGVIPFGHTSGTSIKGRKRVSHLANKELKSELNQAAKTAIAHDKEMRTYAERKLKDKDYALVLNNVKFKLILRMFSLVKRGVMYVDNYKRSA

SEQ ID NO: 276276 - protein, 310 aa, unidentified
MDIIAVGIDVSKDRLDVAVHPGGEAFVVERNGAGLEQLTARLKQLAPSIVALEATGGFETVAAAAVGSAGLPVVIVNPAQVRAFARALGQRAKTDPIDAAVIAHFAAATRPDPRPLPDEATRLLSDLVTRRRQIVDMIGAERQREKRATSQHLRKSIARLIKALEQELNSVDTDIDDAVRSSPAWREAEDLLASVPGVGPIIARTLMAELPELGRLNRRQIAALAGLAPYTRQSGQWRGKSFIGGGRQAVRNVLFMGAMTARRHNPTLKAFFDRLVANGKPKLVALIALARKLLTILNAMLRTKTPWQPA

SEQ ID NO: 276277 - protein, 344 aa, unidentified
MDKFDVAGVEVSAKILVVALKVNGQLRTHEFANTAASHQQLIGFLLKHSRRVRVCLESTGLYGLDVALALHAEPEIEVRVANPRSVRHFAQAMMQRSKNDPLDALLLAEYAQRMPFQAWQPPSLPGRQLCALTRSIHQLTEMCTMQKNRLHAAAATATTPKFLIRELQRSLAQLQKSVQRLTQKALQLVRSHAQLRQQLELLDSLPGVGELSALYLLGELVLLSPDFSVREWVAYAGLDPRQYKSGDSVEKKIRISKVGNTHLRRALYMPVLVAARHDPHFRAHYRHLLAKGKLGMVALVALMRKLLHGIFGVLKSLQPYDGSKLFTLPLILDSKPTMKEKIAC

SEQ ID NO: 276278 - protein, 407 aa, unidentified
MIYGGIDVAKHSHEVCLVNDSGDIVLRMHLDNNHKGMNKLLQALERLGLKPDDVKFCLEATGHYWLPIYCYLTNQGFELHVINPIQSDALRNLYVRKAKTDQKDALLLADLLRLGRAPATRLPSETTLKLQSLSRLRFEFVRQVGGLKNRVLGILDRIFPEYPDCFSDVFIRTSRELLKSYPEPEELAEVDLSELSAFLKEHSRGRFGEERAKKIQSLAKGTFGITMALDAFTLQLRLLIEQIEFIEEQIKVIEDAINEVMEELRPSKETPYRHVIETIPGIGSILAAAIIGEIGDISRFPNPRALVAYAGLDATVRASGLFEGTRNRMSKRGSPVLRNSLWLAAISARRFNPELRAYYELKRSQGKHSNVATGAVARKLVHLIYSLWKDNRPYDADYQWSPPGKNA

SEQ ID NO: 276279 - protein, 430 aa, unidentified
MGLIVPTAMHPEREDQPMPYEWFVGIDWGSQRPQVCVLDRDRRRVGERAIDHDGASLAQLAAWFWTVSAGPPQRVAVAIEVPRGAIVEGLLARGFHVFALNPKQLDRFRDRHSVAGAKDDRRDAFVLADAVRTDQPSFRRLQLDAPQLLRLRELSRAEETLLEDFRRSANRLQDQLHRLYPQMLKLCSAAEASWLWDLIDLAPPPAHAALLSEENVQGGLKAHRIRRVTAQEVLACLQTPALPVAPGAAEAAPAHCGCLLPCLRVLAEQLQACSQQVSVLLRTLAEEPGEGEGPSHVAMVLSLPGVGRKITAWLFAEAAQPVAARDSQVLRTPGGVAPITKHSGKRRVVVMRRGCNPRLRHALYHMARVAMQREAHFRRVYAALRAKGQRHGQALRNIGDRLLRILMAMWRHRTCYDASRIRREPVVQMG

SEQ ID NO: 276280 - protein, 342 aa, unidentified
MTITIGIDPHKASHTAVAIDNTEHVLDEVRVRACAAQTERLRVWATPFPDRVWAIESARGLGYLLAQQLVAAGETVVDVPAVLSTRTRLLGSGKAQKNDPNDARSVAIAALRTDGLARVSVDEHAQVLKLLAKRHRDLGRLRGQAACRLHALLMELEPGGMAKRMNVTRANVLLDRVVVDTEMVAHRVGVAREFVADLAHYEAQMKASKARLRHAVAATSTSLTHIRGIGVVTAAMIIGHVGDVARFKSAAHFASYNGTAPIEASSGERRRHRLNPRGNRQLNYAIHVVAVTQLRYPCEGRQYYDRKRAEGKSNKEAMRALKRQISNVVYRALVADARRSSN

SEQ ID NO: 276281 - protein, 413 aa, unidentified
MRTVCRKVNHFSYEGYNETLWKKFREILGSYSPDNLVFAVETACDLWKTVVDYLSREGYTVLLVNPLTTYHSRPLMNNDYSKTDPKDALLVATNAHNGNYIEYRKFSPEINRLHRLSITYDKIQKDRQAVILRMRAFMDEVFPEYLKCLSVEIDTSLYLLDKYFLPEHFQELDIDKHEWPVRRMSNGNHKAKTLQKIKEHAQNSIGRKVEGEQESLRLILDGWIAEMRQLNKSIKAIKQAMIELAEKTGYFEILISVPGISELTAARFIAECRDLNLYNHYKQIEKMAGSNLRLCDSGKYAGTRRLSCMGNKRLLKLIYIMTGHTAKFAPEVRIKFLKRQLKRKNYRKNIFASSSILLRLLMALIKEKRKYEFRDDKVMELARLELKYDPEGRKNKKKKMKRENQKSVGKKAA

SEQ ID NO: 276282 - protein, 319 aa, unidentified
MEALQVSFKQVVSRGCGLDVHKKVVVATIDGEGIKKQTQEFSTVTSSLKEMRDWLLEHKVTHVAMESTGVFWKPVYNILEPSGLTVWIVNAAHVKYVPGHKTDKKDSAWLCKLLLAGLLKPSYIPAKEQRELRDLTRYRTTLIQSNASNKNRIIRILEDANIKLSSVLSSTSGAVGTKLINKLCDGMEVTMQDIDEVYHKKLEATKEELYEACQGFITEHHVYMLQLIRKEINDTEQTIDSLNKRIKEVLSSYENALELLKKVPGISAKSVEDLVAEIGLDMSVFPTEKHLASWAGMAPGNNESAGKKKADEQPRETSR

SEQ ID NO: 276283 - protein, 333 aa, unidentified
MERMRFLDAIRECCAGLDVHQANVVACVLQGPLDQKPQMFMREFSTVLFGLLELSDWLAELGCTEIAMESTGVYWKPVFNVLEATCTVTLANAAHIKNLPGRKTDQKDAQWIAELHRCGLVSNSFVAPREIRELRDLTRYRRKLKGYETSERNRILKVLEDANIKISTFMSDVFGKSGRLMLDALVNGETIDPEQVAELAKGRLRAKIPDLVQALNGRVTLHHRRIIQRSLEHLEFLERSIADLETDMEQYFAPYQQQVELLQTIPGVGPNVAKVILAEIGTDMSVFPSASHLSSWAGLSPGNHESAGKKTGKNDAGQPSAEVCPPGSCLGGR

SEQ ID NO: 276284 - protein, 447 aa, unidentified
MLEPNAAGIDVGAREMFVAVPPGADEHPVRVFTTFTEDLHRLADWLAQCGVTTVAMEATGVYWIPLYEILEQRGIRPCLVNARHMKNVPGRRTDWHECQWLQFLHSVGLLRAAFRPEEDICAVRTVLRHRSELVMAATQHVQHMHKALTQMNLQIHHVISDITGATGIAIVDAILAGQRDPAELAKLRDVRIKADPETIRKSLVGNWRPEHLFTLRQSRELYRIYQQQIVECDVQVETMLGKFEPRVDPAERPLPPDRKRNRTGKKRRKKMGHPNPGFDLRTEAYKLFGVDVTQIPGLEENTLPLFSEVGRDMSRWPTAAHFVSWLALCPDNDISGGKLLWRGMRVVKNRAGHLFRLAAYSLHHSPTPLGNYLRRMKAKLDPRAATTATAHKIAVIFYTMVKNQVEYDETIWAARDAARERRLEAKLKRQAKQLGYQLVPIEQKPAA

SEQ ID NO: 276285 - protein, 341 aa, unidentified
MSKISYFIGVDIAADTFTASIYQSPDKPLQTKDSIANNACGFNVFVEWLTHHGITATNSLICMEATGVYSEAIAYYLSAKGYSIAVEPPLKVKRTFDPVGHKTDSIDSKQIAEYTYRYQDELRLWQPKDEIIEKIKHLLVAREQFTKQKVTSKNALVSYERHVVQVPMIIKAHQKLIKQLQKQIADIDKELDKYIDQNPDIFRNIHILKSLVGFGTLLSSQLIVATGCFETIKNHKKLAAFIGICPYKKQSGKSLFKPDQSRQYGPSAMRKLLRLAAQSVSMHDEQYRKYYLHKIAEGKAKALVLNNIANKLVKVAFAMIKNNKCYIKNYQSIHPMYLKLA

SEQ ID NO: 276286 - protein, 387 aa, unidentified
MARKRILSTLDTSITYDALGLDIAKEDVALAAFGDDHDEPYFVDKLTFDGLYALLADMAPTLVAMEPCSGAHQIAEHIEALGHQVMMISGKHVQAWVKDHCNGQKTDLNDAFAILNLAYDRWLTPIRGKTREECRLLALQASYRQLQGQRTKTLVHVKATLHAWGYPIRTGSFNQKALHELIEANRDLFGDEVAETLHLMINRVRDLDHDIAKVLKLLTEATKRDPRASLLRSIPGFGVLTTSRWCAVMGDIARFESPKQAMAFIGLVPNNRITGHHTETSSGREARGQGKMSKRGDKMLRSLCILGAASLCLMVRNNRLPDCPFVAGIKERLASPRPWVKVLVYVAAKLVRIATALLKYGETFSFKKAGISKAVLKQWELEQAKAA

SEQ ID NO: 276287 - protein, 399 aa, unidentified
MAIDLAKGSFQVCGVKGDGAVVFNKSVSRRRLSQLLSEQKRCIVAMEACATSHHWGRVAQSYGHEARLIPAAYVKLFVKRQKNDRADAEAIAEAAYRPGMRFVAVKTVENQGRAVAFRTHQCVVRQRTQLINALRGHLAEFGVVAPKGPASLKLLEQALTDLENDLPDPVCEMGALYLRQICELTEVVEQLADDLESASKTDEELRRLRTVPGIGPVTAGAIAAFAPELETFESGRNFAAWLGLVPRQRSTGGKARLGAVSKMGQCDIRKLLIVGAMSVIRWVVRKGGSANCWLANLVAREPRMVAAVALANKMARMIWAMTTKGENYRMACPLSATTGETAWPQGRGKVIDRRSKRHGLQSSRRGHPVPRLERHSSLNRCGPCLPNSIPARGVRHATL

SEQ ID NO: 276288 - protein, 357 aa, unidentified
MLSSNVKYIGLDVHKEAVAIAVLNGAGKLVMESIVETKANTLLDFLHGLRGELHVTLEEGTWAAWLYDVLKPHVAELVVCNPRRNALLKEGSKSDKVDARKLAELLRSGMLRAVYHGEHGLGTLRELARGYLTIGKDQRRAMNRLKALYRSWGILCSGKQVYTPRHRQQWLNKITQPGVRRRAELMYQQMDGLSVVRHTVRGELLAESRKHQAVNILRQVPLIGPLRAALLLALMQTPHRFRSKRQLWTYSGLAVETHDSAQHRYVDGQLQRSKKPQQVRGLNQNHNHEMKEIFKSTAMSASRCAGPLQDFYAGLLAKGMKPDMARLTLARKIAAITLTLWKKGEHFDAEHLKSQAA

SEQ ID NO: 276289 - protein, 418 aa, unidentified
MKPNKTEKVTSINKKTLIAAMDIGKKVHYGYFRDSSGHDIQPFGFHNTREGFDKFWTRLCTFKEKQMLEDIIVGFESTGPYAEPICHYLRKKSVNLVQVNPMHTKRIKELTGNSPNKTDKKDPRVIADVMSLGHSLTVIVPEGAAAHLRRLTQARERAMERRTAMNNQLQHLVFLIFPEFVNIIKPSTKTGMYLIKHYVDPKKLLFAGIDKLNTIIKKVSRGRLGTDRAKKLHEAAKRTVGIKEGKESIQVEADYLVSKIEAEDHYIKDLERQMGAYLKKIPYSHIILSIKGIGPVTTAGLIGEVGDFQKFKTISEILKLAGLDLYEISSGSHQGCRRISKRGRVLMRKLLYFAAINTTRKNGILHSTYQRHLAKGMPRIKALIAIARKLLGIIFALVRDHSNYIADYSNQLKLKQAA

SEQ ID NO: 276290 - protein, 435 aa, unidentified
MEEVTDEPLYRDRVCGIDIGKAGLVATIRVPSEKDPARRAAGTRSFGTTKREVLALADWLRSWQVPAVVMEATGDYWKGPFYRLEAEGFECVLADAKQVKNLPGRPKRDPADSRWLAACFERGAVTACFVATPEFRVIRLHTRYRRDLTEERTREKQRAEKLLESAAIKLSSVLTDLHGVTGRDIMDHLIGGEWNPKVLAQLARAAARRKISQLEQALEGAEFFTAEHAALLAKVLERIDRLSADIGDLSQVIERLLAPHEEQLQQAESMPGWGRRAAQDTLAETGPDMSRFPSGAHLASWAGRAPLDHQSGKRAGRSTAKKGNRYLGAVTGETAVAAGRTQTREGARHRRLARRRGKAKACVATGNTQLKVYHKLLSSPGMRYQDLGPDYYERQRDARRQVAHHVGKLGALGFEVTLCRIPEPEPDPTGPAQAA

SEQ ID NO: 276291 - protein, 347 aa, unidentified
MQSIANLPVIGLDLAKSVFQLHIVDAETGEIERRQIKRARLTEFFAKCVPSLVAMEACGASHYWARTIRQLGHEVRLLPAQHVKAFLLRDKTDAMDAQAIWVAAQQPHIQSVPVKTERQQACMALHGMRRQLMKMRVMQTNALRGILAEFGIAMPVGHKQLLKTIQGELARAQQLDLLPADLVISVQEQIKRIDALQSDIDSIAQRLLLMIREDRQMQAIRQIPGVGELGPSALVAAVGDFSAFKSGRQFASWLGLTPRQVGTGGKTQQLGISKRGDSYLRTLLIAGARAVITRSAKSKWIELLLERRHYNVVVVALANKIARTAWAVLTRGAAFDQAKWNPAECGA

SEQ ID NO: 276292 - protein, 427 aa, unidentified
MDATESNRVAEFRQFKKRIRGSTEDLVVGLDIGKRKHHAFFGNGNGKTILKGLIVENSAEGFHHLLSQVDFYMQRDGFKSVAFGLEPTSVYHKPLAEHLIEQGHLVIYATNEAIKKNRSLIDGRWDKHDTKDSANVADLVAQGKCHYYDLPELRLRDLRSLLLLRKRLKKQEHSCRVRIRNNLVAQYFPELDGFWNHAAAENLAIVRGYLDPARIRQLSLEEFIAKVATHNGGLRQQRRLREIWEAAGSSIGCRPGAAMQLEAELLVDPLQSIKQQLAQVEQAIQKLAAGFPEYAYLKSIPGFGPYVSAMTLAAIGNPHRFERRAQLIRLAGFDLCASRSGEKSHTAVPVISKKGKADLRYALYQAALVASSLTRHFRSHYNRLLEGRQREKGIRTKMLVKIAAKMLVIAWTLMKRKECFNPACIQA

SEQ ID NO: 276293 - protein, 421 aa, unidentified
METREAKRWVGLDWGDARHAVCVLDDSGKEVESFEAPHTAAGLEELVARLRRCGEIGGVAVETTRHLVVHKLLQEGFAVYPINPKLSKCWRDGESVSEAKDDPRDAFVLAEGLRQRHERLRALKPDEPLLRELRLLCADECRLIQDRTALVNRLKATLKEYYPEALEWFDDWTKPTSWDFVLAFPDAEALAAAGRKKLYGFLKSHRIGLHPIWQERVEGRAKRTPWPSDPPTVAAKSFLAISLAKGLRTLQASLDEYRERIEKLYGDQPDSGLFSSLPGAGPKLAPRLLTHFGTDRQRFDSSADLELLSGAVPVMRQSGKSRRVHMRHACRKDFRTALHHLAFLSMERSAWARAFYEQARRAGQSFALALRNLARKWLRILYRMWQDRRPYDEGRYLAALIRRRSPLVHEIQNLQPLTTSG

SEQ ID NO: 276294 - protein, 358 aa, unidentified
MSNLKYSLGIDVSKKDFHCCLSVIDTEQSVKVKSSHKFSNSTDGFKLLVEWIKRSRKENLPVSCLMEATGVYHEQLAWYLYGNNFSISILLPNKAKKYLQANGAKSKNDKIDARGLSQIGAEKKLELWIPPSRKLHDLRSCTRQHQNLSEMHSTVNNQLEAITHSQFQSKEIIKQMKKMMHLLEGQIKEMDKVIEKIVKEDEILNTHYKNISEIKGIGMLSFAVIAAETNGFVLFKDAASLVSFAGYDVVENQSGNHVGRTKISKKGNLRIRRILHMPALCAVREDQPQFKNLYERVYKRTGIKMKGYVAVQKKLLVMIYHLWRKNEHYQASFNYSEKIIATAKAEATHDKVPEGTFH

SEQ ID NO: 276295 - protein, 355 aa, unidentified
MKGQIQNKKVLVRGKEVFIGVDVHKESWHVTARTEGEEVFHGGIPSQYHALQRLVDHFKDCKIKVAYEAGPCGFWLYDKLTEDGIEAIVVPPSLIPIESGNKVKTDKRDSRKLAKLLEGNMLKRVYVLKEEDRVDRELLRTRRQIVEHRNDVARQIKSKLLFYGIRSPFAPRYGWGRNYLQWLKGLDLPREGLRACFESLIELYEYLSDQLMKMNQRVKELSQSSKYRQRLKLLCSVPGIGTLIGMEILVELQEVGRFKRADELASYIGLTPSEFSTGQYVRQGRITRCGNKRVRTCLVESSWILITKDPLMRLKYNKLKAMKGAKRAIIAIARKLIIRIRRILLNNEPYVVGGC

SEQ ID NO: 276296 - protein, 416 aa, unidentified
MNAVGIDVSSRKSTVAVLRPLGEVVCLPFDVTHDIAGLASLVEKLKAIDGETRVVMEHTGRYYEAVAKALHEAGLFVCAVNPLLIKEYGANSLRRVKTDKADAIKIARYALDNWADLRDFTPMDAIRYDLKTLNRQFQLASKQRTASANNLIALLEQSFPGIRKCFDSPVRSDGTQKWVDFAHSFWHVDCVRKQPFPAFCERYRKWCKLHTYFFKLRNAEKVYALAKRAVVLTPKAKVVKVLVQEAANQLSSISRSVEVYRAEMDRLAAMLPEYPVVMAMYGVGKSYGPQLMAEIGDVRRFERKQALVAFAGIDPMPNQSGDKNVRSNKSSKRGSPYLRKTLFNVIRTYLQCAPQDEPVFQFLNRKQAEGKPFYVYMLAAANKFLRRYYAKLRDYFASLDTLQSVDPIPTTLKASL

SEQ ID NO: 276297 - protein, 340 aa, unidentified
MKTKIVRIGLDIAKNVFQVHAVDEQGKKVHNKAIKRNSLLAYFVQSEPCSVGIEACASAHYWAREIGKLGHEVRLIAAQFVIPYRKSGKNDANDAEAICEALSRPSMRFVPVKTVEQQAILSVHRTRSLLITERTALVNQLRGLLAEFGLIISKGIARVRREMPSLLEDAENELPDMARDIIADGYQRLCQIDKHVLAYDVRIKQIATNSESAQRIMQIEGIGPITATAITASIGNGRVFGSSRQFSAWLGLTPRQHSSGGKARLGKISKRGDVYLRTLLIHGARSALLKTALKDDKKSRWVESLKKRSHQNVAAVALAAKNARIIWSMLVNGTDYKVAV

SEQ ID NO: 276298 - protein, 352 aa, unidentified
MEIIAMDSHKRYSQVCVQDSKGRFLCEQRINHGKGNILNFLSKWEKGDSVAVETIGNWYWIVDEIEAAGMQPELVHAHKAKLMLGAVNKTDKLDARGLNKLQFAGTLPTVWIPPADVRDMRELPRTRMVFANLRTKLKNRIHSVIDKYGWQNDFSDISDIFGGKGREQMSLTIKKLPTETAYTLKCLLKELDEVCEQIERIEKRMKKTFGETEEVKRLMTLPGIGFILAVVIASELGDIGRFTSPERLASYAGMTPRVHSSGGKTRYGQLRSDVNHYLKWAYSEAGNSTAVNYKRLPDRHVSKLYSRIRSRVGHAKAVGAVGRHLAEASFWILTKKVDYKEPNLKSFSTTAV

SEQ ID NO: 276299 - protein, 337 aa, unidentified
MEYFAGLDISMDETHVCVLDREGTLVHEEKTLTTPQAIARSLAKAPACRRVVFETGRMAPMLYHGLLERHVPILCIESRHAYQALKSLATHKTDRNDARGLAHLARTGFFKLVHVKSLSAHAIRGLIIARKKLVGQRVMLENQIRGLAIVFGVRLPRALSSGFVKQALKASEGIIGLSAAMRGLVSARSAVLSAITAIDRDMKQLAKGSEACRRLMTIPGVGYLTALAFTAAVDDPERFRRSREIGAYLGLVPRRYQSGEVDYTGSISKCGDRRVRTLLYEAANVMLTRYKKPLKLKDWALAIGQRSTMRKARIALARRLAIIMHAMLRNGTDFKAA

SEQ ID NO: 276300 - protein, 349 aa, unidentified
MKNFSIGIDVSKEKFDLTVKKVYYGTKQPEFLHYDVYENNPTGFRKMIKTLEKVTGRADKSEWLFCLETTGAYELHLCNYLYAKGYDVWRESALQIKLSNGITKSKNDQVDSDRIADYAIRYMDKMVIYEPEDEKLRTLKSLFLFRERLVKEKRSKQTSSQEIKCTHVMNDEMRWMQTRSQQDIARLNKEIKECEDHIRKLIASCEEIEKNYQHVMSIKGMGIVTTTALIVYTHNFERITSARKASSYCGLAPFYAQSGSSIYYEKNVSNYSNPQLKGYLTQAAFIATRYNEDIANYYNRLRISGKPIGICINNVRNKLLRITFSLVQNDCDYEENHEWKRSQKLKQAG

SEQ ID NO: 276301 - protein, 387 aa, unidentified
MTKNKGRVVGLDVHPDSFAGAVVQGRDPASAMVLRTSTRVELERLEEWARRHTCTEDTLVLEASGNAFAVAARLRAIDREVEILDSHHAGKVGKVYCANDRVDAVKIARIYLSALSPIVWQPDQKTLERREIFSAYQAVVKESTRAKQQLRSMLNEHCVRLEKGFRLCHPYAIGRLLKVREWTPARRMLLQQLHGSLLAARARRTMLRRHMAQEIVAEEALLRLSRLCGINLITLYGVVAAVGDVRRFTHSKKLVAYLGLNPSVSQSGNFQGSGALKRHGRGALRALLIQSGKKLLEVNNPLQKWGLAVAARRGRNKAAVAVARKLCVALWHLMMGHAIGTLERLDTLQTKLSKFATEIGPAALTAFGYNNRADFVQKKLYVLRSYP

SEQ ID NO: 276302 - protein, 318 aa, unidentified
MIKEPRFVGIDVSKARLDAAVRPSGERWSVANEEAGVGQLVEYLRKLSPNLVVLEATGGLQDLVVAALAEARLPVVVVNPRQVRDFAKAAGRLAKTDALDASVLAHFAEAIRPEVRPIAEEQAQNLSALLTRRRQVVQMLVAERNRLITARPPVKERLRTHIAYLQQELKDLDDELGERIRQSPLWRELDQLLRGVPGVGPVLSLTLLAELPELGTLNRHKIAALVGVAPFNDDSGKHQGKRVIWGGRAEVRAALYMGTLSASRHNPVISPVYGRMCSAGKEKKVALVACMRKLLTILNSMAKHNAPWDETIHQGSLA

SEQ ID NO: 276303 - protein, 362 aa, unidentified
MFRPHTLYIRIRIVRKVFEPAFAMKDQDVSDVVRTKKRTAMRYIGIDVSKATFVVAYSSDKGGEIRTFNNTTAGIRQFIGTLPKDGSIHCVMEATGNYSALLLYMLNVAGITVSMENPLKVKNFAKAMLSTIKTDKSDARLITLYGEKMNPRPFKVQGEAILRLRQKRTVIRQLTKQITAMSNLRGSLACLPVPDKGTTHTVDETIKFLEKKRDRLQSELTDLVEVEFSRQLALLTTIKGIGITLATALIITTGGFTYFQNAKQVSRYLGICPTYEQSGTSVNIRGHINRNGDAYTRGLLYVAAWTASRFNTKCGETYTRLRQNGKPGKLAMIAVANKLVRQAFAVVTHDKEYVDGFVSNRP

SEQ ID NO: 276304 - protein, 458 aa, unidentified
MVNHYYLGIDVSKGYSDFILLNSAKQCVEENFQLDDTFDGHQKLYNILSMFCTHHAKAQIYAAVESTGGYENNWFDALVKFQSALPLNTARLNPCGVHNNSKAGLDRNITDKISAENVAKYMIEHPEKVLYQQQDPLTSLRKQWSFIKMLTKQKTQLLNQLESNLYTANPEILAYCKHSTPNWVLSLLSRYPTAVKLARARKSSVALIPYVTPKKAKELVETAKRSVASANDQITEQIIKATVKQIRLISKSIEAQTKMMADKCDVPEVKLLKTFTGISDFSAIGLILEIGSVERFASAKKLASFFGLHPVYKQSGDGAWGFHMSKKGRTVPRQILYMVAMVAIQSNPLIREIYLKHTEKGMEKMAALGLCMHKILRIIYGMLKYNKPFDPEIDRKNRAKTTQGKTNNHRDKSRRFQGFDAKAPISRRQTQKRTERKLSQSDNNAKCGIKAPVPSCLT

SEQ ID NO: 276305 - protein, 355 aa, unidentified
MDSKKYIGMDVHKESISIAVINGAGKIVMECVIETKASMILQFIDGLRGDLHVTFEEGTWAAWLYDLLKPHVTRIVVCDPRKNTSMKEGNKSDKIDARRLAELLRLNHLNPVYHGEHGLRSLKELVRSYLTITKDLGRVMSRVKAIYRSWGIACTGKQVYAPQHRAEWLAKITEPGVRRRAEFYYQQLDALRGLRQQVRRDLLAESKKHPAWKRLCQIPSIGPIRAAVLLGILQTPHRFRTKRPLWKYSGFAIETRSSADHRSVHGQLQRSSKQISVRGLNPDCNHDLKNLFKGAAIVASSKPGPFQEFYTALLAKGIRPEMARLTLARKIATIVLIVWKKGVSFDAQHLKPQTA

SEQ ID NO: 276306 - protein, 429 aa, unidentified
MDVRDSIRVEEFRQLRKEIRGSERHLIAGIDIAKDKHNAFFGTATGHSLLKRLVFENNIEGFEKLLTFSESLKVRNGLEEEVFGLEPTANYHKPLGEYLVERNFKVVLVSGKAVANNREMLDNRWDKNDTKDSANIADLISQGKFMYYDHPALPLRDLRNLLSLKRRLKKQEHGLKVRIRNHLLAQYFPELDRYYGQWERGGLSIVKWCLSPSAIAEMGYEQFKQLISPGSQMNVSRQERLKTIWNKATESIGCEVGEIPGFEAQIMVEGLTQVRDAIGLTDKKIKEVCLHFPEYSYLRTIPGFGPDISSKVLAAIGNPFRFNSEKQVLKMAGYDLSASRSGKTSKRAVPVISKRGKASLRYALYQAAFVASTKNQYFVMYYTNKLCGREKEKGIKTKMRVKLAAKLLVIAWTLMKREEPFNPDYLNIE

SEQ ID NO: 276307 - protein, 325 aa, unidentified
METKKLCCGIDVSHTKLDVCYENNLGELFHLQVGNNNQGFAKLLEHTGVAYHFVMEATGVYYIRLAFYLYAKGCKLSVVNALSVKRYIQMHLERNKTDKKDAAWICRYAIEQRPAYWEMPDSAYFESKQLYNTIREYTEQIKRFHNQLHSLGLLPVPSKDTIKSIEKVIVCMKKEIKLLEQKLQLLLEQWQPDQLKNVSSIKGIGKRAAAMLIVFTQGFKHTENHRQLISFAGLAPTQYSSGSRIQGKPRIYKRGGKNLRDVLYMCSMNAMKTNNACKALYERLRANGKTGKQALVAVMNKLLKQVFAVVKNNSLYQPNYCSAKP

SEQ ID NO: 276308 - protein, 427 aa, unidentified
MNGNEFNSIDRFRQFKKEIRGSKEHLIVGLDIAKRKHHGFFGDANGRTLLKGLIVDNSAEGFRHLLTQARFYMDREGLSRVVFGLEPTSVYHKPLAEHLIEQGHLVVYATNEAIKKNRSLIDGRWDKNDTKDSANVADLVAQGKCHYYDLPDLRLRDLRSLLSFRKRLKKQVHSCRVRIRNNLVAQYFPELDRFWNNAAAENLAIVRWFLDPGSIRQLSCEQFIAKVTTHNGGLRQQRRLQHIWEAAGQSIGCRPGPAMALEAEVVVEMLQSVQAQLSRVERAIQKIAEGFEEYDYLKSIPGFGPYVSAVALAAIGNPHRFENRAQLIRLAGFDLSANRSGEKSKTAVPVISKKGKADLRYALYQAALVASSLTSNFRAYYSRLLDGRQREKGIRTKMLVKIAAKMLVIAWTLMKRKESFNPAHIQA

SEQ ID NO: 276309 - protein, 346 aa, unidentified
MKRTTIGLDLAKRIFQVHSVDPDSGEISRQTLKRSQVLRYFANRAASVVAMEACGSSHYWARELVKLGHEVRLISAQFVRPFVKTNKTDAADAEAIWEAAQRPGMRFVALKSEEQQAALGLHRLREQRVGMRSALVNQVHGLMAEFGIALPRGWREMLHQAGELLAEECAVPELLRGALREQIEQIRALSEQIKALERQISSWQRRAEDCQRIGEIPGVGLLTATATVATIGDARSFRSGREFAAFVGLVPRQSGTGGKIRLLGISKRGDRYLRTLLIHVARAVLRWQSRPGRELDPWLKSLLSRRARNVVIVALANKMARMIWALLAHGRTYQRGYGGPIAATVA

SEQ ID NO: 276310 - protein, 429 aa, unidentified
MSEAEFVKQEPQFAAFLAIDWADKKHVWCLQGAGLEKRESGELEHSPEAVEAWVGQLCQRFAHRPIAVALEQSRGALVFMLSKYEALHLFPVASTMAASMRQALYPSGAKDDPRDADLLLDLLLKHRDKLRRLVPDTEATRRVQNLVEERRKLVDEKTEQTNRLTSNLKIYFPQILDWFEQLDTELVCALLLRWPTLEELQKVPPAQLRRFFRKHHCRDQELIERRIVAIRQAIPAIRDRAVIEAKSTVVKVIVRLIRSLLEGIADLEEKIEEAAAGHPDFFIFDSLPGAGAVLAPRLLAAFGSQRERYGSAGEVQVYSGIAPVMEKSGKKKWVHCRIACPKFLRQSFHEWAGHSIAHSVWARSYYQQLRSRGKEHHPAVRALAFKWIRIVFRCWKDGVAYDESRYLATLARRGSPLAIVNVSIVRKAL

SEQ ID NO: 276311 - protein, 320 aa, unidentified
MATIIGVDVSKNDFYACLEEAGTPVQFENSKAGIKKFADHLNKQGCSIKDVIIGVESTGIYHLPLSYHMTLSGFTVKVINPLVTSKATKATIRKVKNDRKDSEIIRHCTANGAGNRFIDTKETLELKTLVRQRDSLAFIRATLNTKQRNVEYKHKHLGIAIEPIYQKIANKIEREIEQSELRLKTYRRAEQRLLESIPGVGPITAVSFISEINDINRFGNAQKLVAYIGLDSRVYQSGTSVNGKGYISKRGNKILRTRLFNAASVAVLRPNMFKTFFDRKRAEGKPYRVALVAVMNKMTHVIYAVWKRGIPFEDRAKTPQ

SEQ ID NO: 276312 - protein, 333 aa, unidentified
MVEGTKGSHHKEGSTKMSRHTMICAGIDTSKCKLDVALDQGPDRLQVGNAGEGHAELSAWLRKHRVKRVGIEASGGYEQAVVSALRRNGYLVIVFQPAQVRAYAKYQLQRAKNDKIDAALIAACTAEAKKIHPPPDPRLAPFAELLTVIEQLTDDIARLKTRRETSRDEHSRRFWTEEIARLKRLLSQRLKQLVAAIREHRDLADRLDLIASVDGVGLRTAVAILVRMPEIGRITREQVAALVGVAPYDADSGGHVGLRHIEGGRERLRESLYAAALPAAFHWNPELIGIYKRLSAAGKPHKLALIACARKLIIFVNTVVARGTPWVPRDALT

SEQ ID NO: 276313 - protein, 387 aa, unidentified
MAQVNDLSRSLTAFDSISTLVVVLEMSKASWLVSGAVPGVERQPLKKLEPDATALLRLIERWRNEAVRAGRPISRIALAYEAGRDGFWLARWLIARGIEVHVIHSASVAVSRESKRAKTDRLDAAMLMRVFLGWLRGERGHCGMVAIPTMEEEDARRPSRERESLINERSRITNRMKSALARLGVRGFKPHLRKAPERLVGLRTAEGTGLPANIMEEFRRDMARLALVREQINSIEKPRAERLKRAPDTGPHAMVRLLARVIGIGIETADMLVREILSRKLRDRRAVARYAGLTGSPDESGLKRREKGLPKTGNARVRRGLIQLAWRFLTFQKHSVLARWYRTRTEGPSGGRKTTMIVALARKLLIALWRLVTTGEVPDGVELRPVG

SEQ ID NO: 276314 - protein, 409 aa, unidentified
MQSMITRCAGIDVHQATIVVTVRVPDEAGGRCHVTQTFGTMTGDLLAARAWLQAYGVTHVAMESTGVYWRPLYYLLEEELTLLLVNMQHLKQVPGRKSDVRDSEWLAQLLEWGLLSSSLVPPAPMRDLRELTRYRKRQIEDRAQEVNRLYRVLEDAGLKLASVMTDVMGRSGRAILDAILGGTTDATALAALARGRLRQKLPALRLALVSQFRPNHAFLVTQILGKIDFLEEQIATLTEEIDRQLVPFEPVIANLTTIPAVGRRNAVTLLVETGGDMTRFSTAAHLCSWGAMCPGQNESAGKRRSGKTREGNRYLRGALIESGLAATRAKGTALQARYYRVKRHRGHKKAIVAVGHQILEIAYFIMRDGVTYQELGADYFDRRDRDRTTRRHVKQLEALGYRVTLDTAA

SEQ ID NO: 276315 - protein, 347 aa, unidentified
MKFYTQQHPHYCGIDLHARTMYLCILNQEGAIVLHRNMKTEPEALLTAIAPFRENIAIAVECIFTWYWLADLCAKEGIAFVLGHALYMKAIHGGKAKNDKIDAHKIAVLLRGGMIPQAYVYPAEMRSTRDLLRRRMHLMRQRAELLGHVQLTNQQYNLPDIGKKIAYRSNREGVAERFADPSVAANVSFDLKRITFYDDLLNQIELEIVRHAKQHDANTFHLLDSVPGIGKILGLVILYEVHDISRLPTVQDFASYCRLVKSKKESAGKVYGTSGNKIGNAHLKWAFSEAAVGFLRHNPQGQAYLARLEKKHGKAKALTALAHKLGRAVYHMLRRKEAFDMKRFVNR

SEQ ID NO: 276316 - protein, 324 aa, unidentified
MAKRTTICAGIDTGKRKLDVAIDGSSKELQIDNTVEGHKTLLDWLRRHRVKRIGIEASGGYEQVVVAELRRKRFVVVVFQPAQVRAYAKFQLQRAKNDKIDAALIATCTAAVKKIHAPPDARLLPFAEQLTMMDQIKEDIARFKNRLETCRNPRLRQIWQEDIARLEKREKIELKALVAAIREHRDLAERLDLIYSVGGIGMPTAVAILIRMPEIGQLTREQAAALGGLAPYDDDSGEYAGARHIDGGRKRLRRALYAAALPASFRWNPQLIALYNRLIAAGKEHKRALVACARKLLIFANTVVARGTPWQNQPPPRAAMTTTG

SEQ ID NO: 276317 - protein, 340 aa, unidentified
MVHVGVDLHKRVSQIAVLTEEGELLQHRFPNDPRQLEQFFGKLPPKSPIAIEATGTWWWRVDLLERLGHQPVLSHPKATKAIAAARLKNDKVDAQRLALLLRGELLPTVWIPPAALREARELARHRITLVWLRSAVRNRLLSMLARRNLQPTRVKNWLTQGGQRELRALALSPSPGTIRDDCLTLLPLLDAQIRRLEAELIQRWGDDPRVQRLTTIPGIGPFIAIVLVLELGDIRRFPSAKHVASYIGLTPRVRASADRVRSGHITREGNRLLRWVLVLAATQASRRPGPLRTWFRMVQQRTGQKRARVALARRLAELVYHCWKDEVDYWTILRRGAVRG

SEQ ID NO: 276318 - protein, 347 aa, unidentified
MKYVGVDISKWRCRAAVMDPEGTVIDEFAFNNDAEGIRDLASRLTTEDRVVMESTGSVWTNLYDVLDERKVPVVLANPLKTRAIASARIRTDKVDARILAHLLRGDLVAECYVPPRELREIRALVRHRASLVRARITVKNRVHALLDGHGLRCEYSDLFGKRSLEWLRFLDLGALDRLMLDNHLGQVESLNRQIRRVDEMIRSRSSLDEDVRLLLSLTGVDVYTALLIRSEIGCIDRFPDYKRLVSWAGLTPSLQQSGTVEYSGGITRQGSRMLKWAMVEAARVAVRHDERMRVFYERVKRRRGDGKALVAVACKMLKIIWFMLTRRELYQSRNEGRYGRKLKSLDR

SEQ ID NO: 276319 - protein, 347 aa, unidentified
MKSMHYVGLDVHKKNIAYCIKDAQGKLVAQGEVAATRAALTPWLATLKRPWEGALEATLFTGWIYDFLKPHAAALKVAHPAMLKAIVCAKKKNDRVDAQKIGDLLRVDLLPECYMAPAPIRELRRLLRYRNLVVRQAVLMKNKIAGLLMEVGAPYNKKKLHGKKYFSELLECGLEEVPESVKEMLKISRNQLDIFDSIQRRLLSGLEKHPLLKERVARLMTADGAGPITALTWALEVGEPQRFSSLRRAISYCGLCSAQKQSAGKDQRGPISKIRNAHLQTILIEAAKLAPRFYPRLAALRERELARGHKNRATLAVARRIVAYLLAVDKRGTDFERRTEAAGVKAA

SEQ ID NO: 276320 - protein, 736 aa, unidentified
MRVETPSIHAEQITAHLGLVHPAAGVEQGGEERAGAKLGDGELDLAGGGGHRLEALAVAPVGALRRALVALRADHGGGLGVDQVLQPGLEQAPEDLVVSKIGVGQDFPDQRGHGRLVTGHRGCTPCESWSKNRAPTMPAALTGRRTPRRRGPAGIATTLRDAPSRMVDPRVVADLARSLDPRRTRRGDSIESSPPRPPPAHGAAGRGVERAGPHPGGTTGLEGAHLASRWSWVVVPAQGRLPRAEVVGSPYSMAPGARPARPAGRAPGTSSGQSGEQPPGPGHHGPVRSRSAWNRPHPGPGLAQPPSHIAPVDGPVPLLSRPQSASVPPSGLTQTIEHAPERWISRTSRSSSAPGVGKTHHWATALTKGGKKVFDKALPNDEARLRALYEKLAAHGHLLVVVDQPATIGALAVAVARDMGITVGYLPGLSMRRIADLTPGSAKTDAKDAAVIAGAARTMPHTLRAISTSDEDAAALSMLTGFDLDLARQVNQTANRIRGLYTQIHPALETILGPRLKHDAVLEVIAAWPTPTALRKAGRARIDAKLKKHGARRHAAWAGKIVSALGRQTVTVTGTEAAGTVLPHLARQLIALHSQRADVAARVETLVRAHPLHEVLTSMPGVGVGTAAVFLAETLGKTFDTGAQLASYAGLTPVTRRSGSSIRGERVCRTGNKRLEHAMFLSAFASLTDPVSRAYYQRKRDQGKRLGPGPARPGPPPHPHPARHDPQPATKLPTAA

SEQ ID NO: 276321 - protein, 401 aa, unidentified
MAPTAGIDWASEAHEVCVSDEGQVAERFSVTHDERGIAELTGRLMELGVCRVAIERPDGILVERLLAAGLEVLAIHPNQVKAARARFAVAHGKSDRFDAYVLAELARTDAHRFRALVPDRDETKALRALTRAREDLVGARVELANQLRAQLQAFWPGALIFAEVDSPISLAFLGRYPSPADAQGLGVKRMAAFLARSSYSGRTDPVELVARMKAAPVGTVAQAEGRARRAVVAGLVAALGPIVAEIAALDAQIRERLAAHPDAAIFVPLFRDRKTTICPATLVAEIGDCRQRYPSEAALAADAGMSPVALESGKLRIATFRRACDKRLRFAVSTLADSTRHWHPWAKEVYRRARARGQDHPHAIRTLGRAWIRVLWRCWHDRVPYDPTRHGNFNRLQTAGG

SEQ ID NO: 276322 - protein, 339 aa, unidentified
MNATMIGLDIAKTVFQIYGEDATGQPVLRKRLGRGSVEAFFAKLPAATVGIEACGGAHHWARRLQALGHTVRLVPAAYVRPFVKRNKTDAHDAAAICEAMQRPGMRFVPVKSIEQQAARSLETARELLVRQRTQLMNAMRGLAAEFGLVTAQGARGGAELRARIAAADPTLPVPLLAALRRLRRQWQALDAAIAALTARLEARAKADPVMRRLMQVPGIGPLAAHAIVAAIGSGRQFGSARDFAAWAGLTPREQQSANKRRRGHISRQGDAGLRRLLTLGASAVLRQLRRRPERASQWLHGILARRPVKVAVVAQAAKTARIVWAMLRSGEAYRIAAAT

SEQ ID NO: 276323 - protein, 343 aa, unidentified
MDHFAGLDVSVKETSVCIVDDTGRIVREVKVASEPEALLQVLRNPIYRFKRIGLEAGPLSQWLFSALAEAGLPVICVETRHMRAVLQAQINKTDRNDARGMAQMMRAGLYRPVHVKTLRSQKLRMLLTHRKLLQPKAIAIDNDLRGTLRNFGLKVGIVGTVKFEARVRELVENLPDLAVLVQPLLMVRRVLREQFAILHRRLLAVVRNDEVCRRLMTVPGVGPVVALTYRATVDVPARFRNSKAVGAVFGLTPSRYQSGEINRTGAISKCGDEMMRVMLYEAAHIMLVRLAKWSWLKAWAVKIARHRGMKKAIVALARRLAVIMHRIWVDGTEFRWTHEVTTG

SEQ ID NO: 276324 - protein, 426 aa, unidentified
MHRTSESSRFHAVPRVLDACFDVGGDELHLLTDIRGERIRRCVRNRTEEIGVLLTWLSRRAKLEGYSNVRVVVEPTGVFHELLFRIARMRGIETCMVSAEPASKIRVVIFGDNGKTDKRDPIAIADLASRGHVLRHRDLSDTFTAMRSAGVLYARAEKNGIIAKNRIHRAMRRVFPDFDFSPSFLFGRSGRAVHQCTGFDPIRIVRSGEVRLTRRLKRIVPRIRNQSIDRLLKTAKMSARSAPPPATHKVNLMDLDQAWRDLFAAEQRKQDARVLLENLFDHARELDPSLPVPEKGLASKLSLARLVAETGPFSDFGSWRELLKYLGLNLCERQSGHFRGKTRISKKGRSLARHVVAQMVVPLVRRTRLLGSYYHYKRDVEKKPGPVAITAAARKLIKILWGWSKSGEKFDPARVFTCHGDLKAAA

SEQ ID NO: 276325 - protein, 354 aa, unidentified
MNTTQNSTKSKIVKVIGVDLAKDHCDVIGYDENGKICLRLDGCSYAKLREILSNLPQAVVLMEACKGSMFHARSIADLGHEVRLVKGADVKALRNVNHKNDLRDAAYIAKLYFVPGTTYVYIKSQQQQSLQFLQNEYKSLQELRIQAGNQIHAGLEEFGCPVRKSSKFIKTRMVAHLEKHAELIPEDVMASFKRRREIWLNLRQQEEEAKRRLEQVAATDANAKRIMTVPCVGPQTAVGLLVHVGVDFGRFKNSRQFAASLGLVPKQNSTGGNNTLNHITKCGPKRLRSNLVQCAQLVLMYAEKWKGNFGDWVRKMRDSGKKHGVIVCAIAAKLARIIYRLMKDKVDYTPVLSC

SEQ ID NO: 276326 - protein, 411 aa, unidentified
MDKIYDKCCGIDVHKKLIVACFRCGKKQEVREFGATTRELLELADWLKDGGCEMVAMESTASYWKPLYNILESSDLNAIVVNARHMKAVPGRKTDVKDAEWIADLLQHGLLQPSYIPDKDQRELRELVRYRKSLVRERTRELNRLQKMLEGANIKLSGTVSDINGKSARSILEYLLTGKSMDGSKYDEMYEQKIIAHNLKATKEQIVDDLNGVMSPLQRRMMKELLVHLDELNIHIKNLDDEIDNFMKPEEKQASQAIQDVTGIGNTSAQAIISVIGSDMSRFPTDRHISSWAGLCPGDNESAKKRKSGKTRKGNSLLRTTLITCAHAAVKNKKSYFYAQYMRISAHRGPKRAYVAVAHSMLISIYHILKDGVVFKDLGADYYNQFNKERKINAYLKKLKALGWEAPIVAA

SEQ ID NO: 276327 - protein, 452 aa, unidentified
MKKENSIAMPVINEHVAGIDVGSKSHYVAVGQSEEDVRKFNVYSKDNDALVAHLKDKGIKTVAMESTGSYWQTLYSCLQAAGFEVVLSNNYIKDPQRKTDTKDARWLQRLHSLGLLKGAFIPSLDIERIRTYHRQREKIVALAASCQLKMQKALRLMNIRLDIALSDITGLSGMRMLEAIVQGERSGQKLASLAHSTVKKSREEIADALQGQWKDEQLFILADELEAYKIYQTRIAAYDKKIEELLKDAVSQLPVAAEKSSKKPSKRKPRKNMPAYNVEKLSMQYFGVDLLKVEGVGQSTVMTFISEVGTDINKFPTKKHFTSWLRLAPNNKKTGDKTFSTRTPKGKSIMANAFRLAANTISQRRRGVLKNTFVRIAIKKGRAAAITALARKLAEIFWIMTVKKVSYIPPDEHEYALKIKENTIRNICSKMKRLNIGTEDLVFNGIATPSLS

SEQ ID NO: 276328 - protein, 344 aa, unidentified
MSEVSIIGLDIAKHVFHAHGADERGRAIFSRRISRGKLLDFFAAQPSCTVALEACGGAHHWARQLTQLGHEVRLIPPAYVKAFVKRQKNDAIDAEAICEAAQRPSMRFVAVKSEQQQAAGLVFRTRDLLVRQRTQLINAIRGHLTEYGWIAPKGPSHVAMLADLLEEEEMANSLPEAARAMFRLMLGLLAGLDGKISDLDKEIARRAREDEVSRRLMTVPGIGPISATAIAALAPPAETFAKGRDFAAWLGLTPLQRSTGGKRKLGATSKMGERTLRRLLIIGSSAVVQQASKRGAPKGSWLEQMLARKPRMLVTVALANKMARIVWALLVKQENYRAPVAAKA

SEQ ID NO: 276329 - protein, 347 aa, unidentified
MNYYAGIDVSLECSSVCVVDGAGKIVRESKVASEPEALIGWFRKLELSLTRIGLEAGPLSQWLYAALRRAGLAVELLETRHVRNALKTMPVKTDRNDARGIAQLMRLGWFRPVHCKSMEAQETRALLTARRLVKSKLHDIEMSLRGILRGFGLKVGRIGKTSFEARIKELVAGHPTLQAIAEPLLAVRGVMRRELAGFEKQVRTLARSDLRARLLMTTPGVGAVVSLTYACAIDDPARFTSSKIVGAFFGMTPRRYQSGETDFSGRISKIGDASVRAVLFEGAHVILTKPVKGCTALKSWAMRIADRAGMKKAKVALARKLAVIMHRMLVDGTPFIDAAEAAAAAAA

SEQ ID NO: 276330 - protein, 368 aa, unidentified
MDKCIISFVGLDVHKDSTAIGAAEAGRETPRFIGTVGPELGQLLKALQGLGKPETMLVVYEAGPCGYGLARQLRLRGYNCEVVAASKIARRPGERIKTDRRDALMLARLARSGDLVKVLVPDERDEAMRDLSRTREDAVRARLKARQQLKALLLRHGHRYGGKSSWTLAHERYLATLSFAHPAQDIAFAEYRQAVREGHERVERVTEALRTQTEQWRLKPLVAALTSLRGIDFVAAVTLAAEIGDFRRFAHPCELMGFLGLVPSEYSTGNTRRQGAITKTGNSHARRVLVEAAWNYRFPARISRILQVRQEGQPKAVREIAWRAQLRLAHRYRRLSSRKLHPNKICVAIARELTGFLWDIARQVPVAA

SEQ ID NO: 276331 - protein, 343 aa, unidentified
MVINLLGIDIAKNMFQLHGVDCNGKAVLKKRLSRDALAEYIANTPPCTIVMESCGGANYWARVFQRYGHIVKLISPQFVKPFVKTNKNDANDAEAITEAASRPSMHFVPIKQVEQQDIQSLHRIRSRLVKNRTALINEIRGLNLEYGITIPTGAAKVKTKLCLIISNENNELTVASREFMNDLYNELVEVEGKLKNLGKKVKQICRQNEDCRRIMNIPGVGELTATALISAVPNPDVFKNGRHMSAWLGLVPRQHSSGDKQILLGISKRGDRYLRTLLIHGARSALSKCKNLDNEYGRWLTEKKCTLSFNKAAVALANKNARIIWSILSTGKEFDFNNQKVAA

SEQ ID NO: 276332 - protein, 430 aa, unidentified
MHNKNYISVGIDVGSAFSFMTILAPDETVILKPFKITHNNKDSLERAVSEIKKAEELYSLESRIFLESTGIYHFPLFCYLVDCGFNASIINPIITHSTKNGNIRKVKNDKIDSKGIAKLGLSKDIPVSQFPAKLVLELRSLTRKYYDLTDERSAHINKLKGDLHTVFPQYLDVFCDVTGKTSTMILRQYGTPDKILRGHKKTMIEKISKASRKGLAKASERYEKLCAAANAAKTFGCQIDSIYFNIFLTLDLVEKLDSALDSILNRIRQLITFNKNEKFIQQIKLLNTIPGVGFLTAVTIVAEIVDFSAFRNPKQLFAYFGLDPEVNESGKFVGTQLHMSKRGSRIARRAIFAVALASIRTKRNGEGINPYLRKYYELKSGQKPKMVAIGAVMHKVCNIVFAVLRDEKAFELRSPEEHCKQYQRPALAAA

SEQ ID NO: 276333 - protein, 347 aa, unidentified
MPVVHCVGLDIAKNVFHVHGVDRGGRTIFSRRLRRAELLRFFANLPQCVIGMEACATAHHWARELGKLGHDCKLIPARYVKAYLKTNKNDARDAEAICEAAQRPSMHFVAVKSVDQQAVLTLHRSRELLVTQRTQLGNSIRAQLAEFGLYLRVGSWTLTRQVAELFRSDTDLVPIMVRSLIELLVEQWKGVQARITHLERQIAQWHRNSEQSKRLAEIPGIGPITASAMVATIGDAKAFRSSRHFAAWLGLIPRQQSTGGKPKLGPISKRGDGYLRRLLVHGAQSVMRWHRAHPNDRRPWLDELLRRRPVNVAAVAVANKNARTIWALLTRGERFVGYRSGETITAG

SEQ ID NO: 276334 - protein, 344 aa, unidentified
MKITTVGIDLAKNVFQVHGVDEHGKAVLRKQIKRDQMASFFVNLPTCLIGMEACGSAHYWARKLQAMGHTVRLMAPQFVKPYVKSNKNDAADAEAICEAVGRPSMRFVPIKNIEQQSVLSLHRVRQGFVKARTAQANQIRGLLGEFGLVVPQGIAYISQRVPELIEDATIELPGSFRILIVRLLEHLQLLHRQIDEIEAQIKAWHRSNEASQRLAQVPGVGPITATALVATIGDAQNFNSGRQLAAWLGLVPRQHSSGGKQNLLGMSKRGDAYLRTLLIHGARSVIYRAMQKADPGNWVFNVASRRNKNIAAVALANKTARTIWALLSHNREFKFDYRAVNAAT

SEQ ID NO: 276335 - protein, 312 aa, unidentified
MMEQIYIGVDVAKLWLDIQHPSRAPRRIDSSPSAIRAFTRAVAKEGAWVIFEASGGYDRGLRDALEAAGARFSRVNPRQARDFARAMGVIGKTDKVDARLLAEFGQRLRPAQTPPLSAERQVLLAQVTRRRQLVEMRKQEVTRLQQTADPEARADISSLIGLLERRISKIEKRMIEIVSAAPDLAEIDRRLRTVPGVGQIVSATLLAELPELGTLDRRRIAALAGLAPITRDSGQRASRRTIGGGRPTVRTMLYVAALHASRHSLAFGHFRRHLEAAGKPVKAALTATARQLLTVLNTMIASEADFVETAPS

SEQ ID NO: 276336 - protein, 425 aa, unidentified
MEVIHRRCSGLDVHKETVVACVRLVLDDKITREVRTFETTTSGLLLLLAWLTELGCTHVAMEATGVYWKPVWNILSDGDFELVLANAAHIKNVPGRKTDVSDAAWIADLLAHGLIRSSFVPEQEFQELRELLRTRKQLGRQQSSHIRRLQKTLECANVKLDSVITDIVGKSGRAMLQALIAGETDPVKLAALADRRIKASAQELREALRGRVTDHHRFLLHLHLQHIDFADSAIQDIDRNVTALIARMDQEVEAGQTRATFQSLILLLMTIPGIDVLSARIILSEIGRDMSRFPTAGHLLSWAGLCPRNDESAGKRRSTRLRKGDPWLKTLLVQCAWAARRKKGSYFNAQFLRLRGRRGPKKAACAVAASLLTTIYHMLKDGTQFQDLGADHFDRRSKDVRAKRLVAQLANLGFNAKLTPLAQAA

SEQ ID NO: 276337 - protein, 362 aa, unidentified
MHVVYAHCCGLDVHKKTITACLLVSGTRGKGQHEIRRFGTMTRDLLELADWLQGHHVTHVAMESTGVYWKPVWNILDGQFEVVLVNAQHIKAVPGRKTDTKDCQWIAELLQHGLVRGSFLPPTPIRQLRDLTRMRASLRQDHTAVANRMQKVLEDANIKLAAVASDWLGVSGRAILAQLRAGEEDAEKLAQLSRGRLRSKLPAMQLALAGHMTAHHRWMLRVLQEQLVFLEAQIAKLEAKIQDQVRADREALELCTTIPGVEEVAAANLIAEIGVNMDQFPSAQHLASWAGICPGNHESAGKRLSGKPRKGSTGLRRSLCQAAWAASHTKETYLAARFRRLAARKGKQRAIVAVAHTILGSL

SEQ ID NO: 276338 - protein, 328 aa, unidentified
MEYKHYIGVDVSKHTLDFTLLNGGDFLLHERIKNSKADIRLLLKKMMTTYRAGGKRTLFCVECTGTYATVLIDELVRRKVPLWLESPLQIRLSLGLQRGKSDKLDSLRIAQYAYTYRNNRKLWNQPRLIIEHLKQLRSLRERLLVTYYQLRSETKETKGYIHQAITSSVLQHCQASLDAITSDLANVNKTVLGVITADERLNQLYQWITSVGGVGNVLATELLITTNEFKNFTSPKKFACHCGIAPFRYTSGTSTQSKARVSKRANKRMKYLLHMAAMAAIRYEGDYKRYYERRTKQGLNRMSVLNAVRNKIVRRVFACVREQRFYIK

SEQ ID NO: 276339 - protein, 425 aa, unidentified
MNYKQNEKINQVKESTLVVGIDIGSTTQYARAFDWRGIELGKIFTFSNSREGFESFKAWMQHLQDKYKKLDAIVGIEPTGHYWFDLGAYLEDEGILLVMVNPYAVKQTKELDDNSQSKNDRKDPKVIAKLVTEGRYSAPYTPDGVYADLRIMVTNRKRLIREMTQIKNRFARWFAIYFPEYTDVFGDYEAQSSMLLLKKVCTPEAIVELGAEKINQIWRDAKLRAVGMKRATTLCETAKRSIGLKKGSSAARYEMKLLLEDYEYKKAQLDAVMEEIEKLCRKIPESEQMLAIKGIGVITVAGFLAEVGDVRRFESPRQIQKLAGLSLRENSSGKHKGQTTISKRGRSKLRAVLFNAAIPLIAKNPEFKSLHEYYTTRANNPLKKKQSVIAISCKLIRVFYAILANGVTYDAQKMLSDIHRQPQAA

SEQ ID NO: 276340 - protein, 341 aa, unidentified
MLYSGIDLHKRSLVIHTLDADGTTTREAQLKSDRGAVLAYFGTLAGPHRAVVECVQSWYWLRDLLGPTGVDLRLAHAKYVKAISYAKVKTDRVDARMLAQLLRTGLVPEAHMIGAEHRETRDLLRSRLQLVTRAVRCRHAVGSLLEKYNVPTPEELPELARMQAALQEEQRTLIRTHVRRVEAVLKTRLLPTADVQRLVWIPGIGKLSAYALVLEIDTISRFPTVRHFHSYCRLVPGADNSAGKVRHKRSRDGNRYLKQVFHTAAIRAAQYHPEIRQEYRRLSRRKGKIVARALIAKELASSVYWVLRKQEAFNGKFRGHVLTAKPAVWPRLASPESLTDA

SEQ ID NO: 276341 - protein, 388 aa, unidentified
MQAAVDRPEALSAIRTDLGAIFISLELSRSSWLVTSLSPGSGEKMSKYAVRGSDVAGLLERFAQLKEKARARTGRIFSFVVIQEAGLDGFWIDRVLQNEGVESHVVDPASIATSRRRRRAKTDRIDGETLVRVLLAYKRGEPRVCAMVKAPTPEEEDNRRLCRERKVLTAERVLHVNRIKGLLFCQGISGYEPLRRDRRERLEELQTGDGRPLPQHLKAQVDRELDRLELLLKQIKTVEGERDALLAAAQTAMPAPAAMLLDIKGIGSEFAAVLWSEGLFRHFDNRRQVAAYAGLAPTPWQSGAVDREQGVSKAGNPRLRTTLIQLAWLWLRNQPQSALTIWFHERVRRNAGRLRKTTIVALARKLLVALWKYVTTGVVIEGATMKAA

SEQ ID NO: 276342 - protein, 433 aa, unidentified
MHEVEDEPLFAERAAGIDIAKAGIEVTVRVPSDTRAGRRQQETRSFATTRRELLSLADWLRAWGVTKVGMEATGDYWKPVYFVLESQGLGCVLYHAAQVKALPGRPKTDRADSVWLARITERGSLPSSFVPPAPIRALRTHTRYRRHLTQARTAEKQRVEKLLEDGHLKLSAVISDIHGVSGRAMLEAIIAGERNPAALAQLARGTMRGKIARLEQALDCSFLTEEHVAILAMMLAAIDSFTTQIDKLTARIEILAEPYWRQIQQLDAVHGAGVTSAQDVIAEIGVDMTVFPTAAHLVSWAKWCPQVSQSGGKRKGSNAAGRGNPYLSAALGEVSMSAARTQSFLGAKYRRLVKRMPKKKALVATGNSVLTIFHALLSDPAATYHDLGPDYYEQRASTRHQARNHVRSLERLGYHVTIQAINPDTGELLIATD

SEQ ID NO: 276343 - protein, 1382 aa, unidentified
MSPKTILSPAQRMAIFDPPTDRETIERIYTLGPDDLTQVMKRRGGANRIGYAVQICYMRHPGRGLLPSEVPAIAMLALLCEHCGCHPDDFPAYAARATTLREHRAEIEVWLGLRPFSRADVRTMLSLGLEIAASTDRGETIVAGMVDRLRLDRIVLPAASTLERLALIARTQARKAANIGLIRDCSAEQEAALEQLVTSDDHGRTPLGWIRDWSESPSASNLKALVARLDTVRAIGITADRARRIHAARYAVIARTAGIVTAQHLRRLERSRRLAMLTAFAIEMEAALTDAALVMVEKMVGSLFRRADRTRSDRLLGQAKLLKDTARVHVQLGRLLLNAYADGGDAFAAIEDRMGWDELVRSVRCAEDLTRAGDDGLEEVVERYPAARKFAPTFLAAFTFRASRAGDPLLSAVETLKKMYRDGRSVLPKQVPTSFIKPRWRKVVQSEGGTIDRRAYEIAVIVHLRERIGSGSIWVDGSRAYRTLDDYLLPVPAFENMRADNTLNLAVVPDFTAWIDERRTLQTKRMSEVERAAEADELTDVTIERGQLLISPFRRIVSDDAETLKARLYAMLPRVRITDLLVEVAAWSGFSDHFVHARSGAPASDQSALMAAILADATNLGLGRMAESSRGLTLARLRWTAEWHVRDETYLSALAAIVDCHTAHPLASVWGPGDTSSSDGQFFRAGGRGEARADHNARYGSEPGVLFYTHVTDRFTPFHTKVIAANAGEAAHVLDGLLDHESELVIREHATDTAGAVDHVFGLCHLLGFRFAPRIRDLNERRLYGLSPLDPWPTLRALVAGPINVRAIEENWDETLRLAASIRAGTVSASAMLRKLSGYPRQNPVARALREIGRIERTLFMLDWFDDPEQRRRTGSILNKGEARNALARAIFFNRLGELRDRTFENQRHRASGLTLATAAVTLWNTVYLDRAIRHLRNNGIEVPDELVTHVAPWAGSILASPATISGAKSTNPVIGSDPCASNQHGASLRPNDRHSPRASRQVGRKLSLSGRRMTMSISKFVGLDVHKETIAVALADDGRAGEIRFYGTIPNTQDSIRRLVARLSSPDVALHFCYEAGGCGYGIHRQLVDLGAECSVIAPSVMPRKPADRIKTDRRDAMTLARLLRSGELTAIWVPDEAHEAIRDLIRGRRQAKHDLVAGRQMLLSFLLRHGRKFAGRSNWTKAHWRWLGEQAFDAPHQQFVFGESIRRIEEAQQRCDRLDAMLVEALPYWSLAPLVQALQALRGVGLIVAATLVAEIGDLGRFDTPKQLMGWLGLVPSEASSGARTRRGTITKTGNREARAMLVEAAWSYRLPAREERRYRARVEGLPDEVKSIAWKAQVRLCQRYRMLAASGKPLPKVITAIARELVGFVWDIGRRMQPA

SEQ ID NO: 276344 - protein, 342 aa, unidentified
MYYIGLDVHKKTISYCVKDASGRICQEGKVGATRWELDLWVKTLPQPWTVAMEATIFTGWIYDHLKPHAAAAKVAHPLMLRAIAAAKKKNDSIDAAKIADCLRCDFLPECYMAPTEIRERRRTLRYRHLLVRQMVQMKNRVSGLLMETGVSHNKQRLHKVGYFPELLANADAVSASIRPLLQLSRESITRLQRTEGAIIRSLQRDPLLAERVRRLQTIPAVGKVTALSWALEMGDISRFRSIRQAISYCGLCGDEKRSADKIARTPISKQRNKHIQRVLVEAAKLAPRRNPDLALVYENARQKGNANCATLAVARKLVAYLMVVDREQRDFEPVRGLAGIAA

SEQ ID NO: 276345 - protein, 417 aa, unidentified
MKKHSNSLKQSEAPAKRRKLGVVVERKPQEVMAELVVKLAGQLDVEIVPAVEGKKDGRDAVRPNLDRLTVGVDLGDQWSNYCILGLGGETLVEGQFRTRKQEVAEFFQALAMSRVVVEVGTHSAWVREIIAGFGHEVLVANPRLMEGSKRRRRKSDRIDAEKLARLGRMDPKSLHPIEHRSTEVREDLVILRARDALVKSRTELINSVRGQVKSMGGRVTGCSSVAFSQKAIAEIPEEVHETLQPLLRLIATLSEEIKTFDQRIEKLAAEKYMQTQLLRQVSGVGPVTALAFVLTLETPLRFARSGDVGPYLGLVPKQEDSGDIQPQLGISKAGDRMLRKLLVGSAHYILGPFGPDTDLRRFGMRLCERGGKNAKKRAAVAVARKLAVLLHRLWASGEVYEPLGHGSVTRPAQAVAA

SEQ ID NO: 276346 - protein, 343 aa, unidentified
MGVYVGLDVSLKRTAVCVLDATGRVEWEGWSDTHPEMIGAVLSRWGAEISLVGLETGSSTPWLARGLEALGLPVVVMDARRAADAIKARVVKTDRSDARALAEMLRAGWYTQVHVKTEESHRIKALLSSRDQLVRNKRSFFGQIRGMLRPFGIRLAARQGGRAFDEAARAACRHDDLLYRCVEALLAALAAIESQIAVLDKQVRMYLQRSKPCWHLTSVPCVGPITALAFLAAVEDPGRFRRSRDIGAYLGLTPKRYQSGERDITGAISKQGDAMARHYLYEAANCLLTTWSGRSPLKSWGLALVKRSGAKKARVAVARKLACLLLRLWKQETHYDEADLKTA

SEQ ID NO: 276347 - protein, 344 aa, unidentified
MTTFDYIGFDIHKKTLSFCAKAQDGKILDEATIPARRDTLLAWAKARPRPWIGAMEATLFTGWIYDFLKPLAQELKVAHPAMLKAIAASKKKNDKVDARTIADLLRCNLLPECYMAPSAIRDLRRVLRYRNLVVRQATRMKNRIAGLLMETGTPYNKGRLHGKAYFSELLGSLREVPRSVVELLKLSRGQLEFFTTIQRRLLKGLGEQPDLSERVARLQTIPGVGEIMALSWALEVGEVDRLASIAQAASYCGLTSAQHNSGGKEQRGPISKQRNKHLQTILIEAAKLAPRHNPQLAVVHERELQRGNRNQATLAVARKLVAYLMAVDKSGKPFEMRANREEAA

SEQ ID NO: 276348 - protein, 403 aa, unidentified
MRTIGLDVHKNFAEVAILEPGHALTRQRIATDPAALRSFAATLGSDDQVVLEATMNTWAIAELLAAHAGRLVVSNPLRTKAIADAKIKTDKVDAEVLARLLAADFIPEVWVPDEPTRRLRRQVAQRAALVRQRTQLRNRIHAILLRNLVTAPVSDLFGIGGLRWLAGVVLPAEERAQLDAVLRLLVPIAAEIAGCDAALAAVALAEPRALRLLTLPGIGAATALAIVAVTGDIGRFPRPNKLVSYLGLDPKVRQSGDQPAHTGHISRQGQAHARGLLIEAAHAAVGTPGPLHAFFVRVRARRGSQVAIVAVARKLTVLAWHLLSSETEYRWARPTLIAQKRRALERATGAPRTRGGRRGLGPTLAERRAAERAVAEEAEATYRTFVRSRSKKVDAAAANGARR

SEQ ID NO: 276349 - protein, 428 aa, unidentified
MNIEDTIRRQQFSQFKSEIGGSDDYLVVGIDVAKDNHHAFMGTATGKALLRKLVFENNLDGFGKLLEQTEAIKIQHALSKVVFGLEPTGNYHKPLAAHLIRCGCHVVLVTGKAVKNNREQLDGRWDKNDDKDAANVADLVSRGRCLYYDLPSSDLGQLRQVLSLRRRLKKEEHRLRMNIRNNLLAQYFPELDGFYSACEAETLAIVSRCLNPNQIAGMEFDEFFTQVTTKRRGIAQKLRLQKIHRAAIQSVGCTMGPVAQLEAQLLVNKLALVRSQLKEAQEWMEDIACEFAEYSYLLTIPGFGPYVACTVMAAIGNPWRFDSAGQVLKLAGYDLSASRSGKNSDRAIAVISKRGNSQLRYALYQAARVASSRSRDFINYFTCLLSGRERERGIKTKMCVKLAAKMLRIAWALMKKKQVFNPDYLFME

SEQ ID NO: 276350 - protein, 404 aa, unidentified
MLYFGIDWSQSHHNLCIQNEAGATISELELKHTLEGFEQLDRERHKLGVPAADCLVAIETSHNLLVDYLLDRGYVVYLIPPQATGAYRSRQRSSGARTDETDAVVLAKALRTDRDAHRRLRPNLPLTQQILANVRLAEALRRSIHRQASQLRAVLLRIYPQALGLFGKLTAQINLHFLMAYPTPQEALALTRAEFEAFCRDHRYSRADLISRRYAHLQAPAPAANPAAVQAYQGQVRILAELLLPQVRRRSQVLSHLSQLFPQHADADIFDSLPGAGELLAPALLAKFGDHRDLFPTAASVQSLAGTCPVTKESGRRKIVVFRRGCDKEFRRITQQFARASTFKSGWALAYWRDVRPHCASDSDAYRRLANRWLAIIWKMWQDRKPYDETYHLQQRAKRRRPRT

SEQ ID NO: 276351 - protein, 319 aa, unidentified
MNIINNQNEINVGVDTGKTQLDIYIRPLDIYFTVSNDEKGINKAVKEIKKHKPTRIVIEATGRLEQAFIIACANEKLPFVVANPVRIKKFAGSVGQLAKTDKLDAKLIAYYSDAIKPELSTLKPETLRKMSDLLSRRCQLMEMRTMEKNRLQSLPKSLESTITPMLTVINNQLTKIDNKMAKLIEQCDEYKVKNDIIQSVPGVGNVVAFSLLSNMPELGYISNKEAAALVGVAPINRESGTFKGKRMIRGGRHQIRTAMFMSMMSAMQCNPVFKATYQRLVAAGKPKKIAIIACVRKVIVILNSMVRDGVYWDPKMNNN

SEQ ID NO: 276352 - protein, 318 aa, unidentified
MTEETATPGPVVGIDVSKARLDGYLTGQDTTFAFANDEAGLSALITFLQPVQPALVVLEATGGLERALVAHLLAAALPVAVVNPRQVRDFARATGRLAKTDQLDARVLAHFGGAVKPVQRVLPDTASQDFADQLARRRQLVEMLAMEKNRLKATPNKIVRKDITKHIDWLQHHLRATEEGLRRSVEASPAWQAKRDLLSEVKGIGDVTAMTLIACLPELGQLDRKAVAALVGVAPFSRDSGTLRGRRRVWGGRANVRVVLYMATLSAVRCNPAIRTFYQRLRAAGKMPKVALVACMRKLLTILNAMLRDQTHWRAQLA

SEQ ID NO: 276353 - protein, 417 aa, unidentified
MTGDVHWLVGIDWASQKHQVCLLDLDGRVVGEREFDHEGTGLSQLCNWLIEQTKALPGQIAVAIETSHGPIVEMLLERGFQVYSINPKQLDRFRDRFTVAGAKDDSRDAHVLADALRTDRRAFRRLSVENPLLIELREWSRMLEDLKQERNRLSNRMRAQLWRYYPQALEIADDLAANWFLDLWQQVPTPAKAARVKQAKIESILKANRVRRFDAAEVLRVLRQKPLWVAPGTTEAACAHIRTLTARIRLVNQQIAEANRQLDELCDKLEAEADNAPGQQCEQRDVTILRSCPGLGRINVATLLAEAPEPLRRRDYHALRALCGAAPVTRRSGKQHIVVRRFACNKRLQNAVYHWARVASQHDPISQRRYAALRGRGHSHGRALRGVADRLLSVICTLLRRQTQFDPNYASSQMASA

SEQ ID NO: 276354 - protein, 368 aa, unidentified
MKKETITSGGISGASLVNDVNRVLNLGLDMHYRQVTVAMQEDGGRIKAAGKMGHLDFLNWVPKKLEEGWEIYSCYEAGASGYWLHRELEKLGVKNLVVVPKAMGQGGKKQKTDQRDAGELCDSLDRYLRGQKKALSEVAVPTEEQEEKRALIRYHRQIMADRGRCEARGKGLLCAQGIQVRGRWWRGESWLELTSDPRLKDWMKEQLVGWRNKILSTDEEQSALRERIAALAPAILPKGVGAYSAAVLHYELRGFEHFKNRRQVGSITGLCPGVHLSDGRGKEGSINRCGIGIVRWTLVEMVWRLMIWQPQYPPVRRLAAGLVKSKRARKRLVVQAARRLAIDLWRLSTGQTTPEKLGLVMQSNATGN

SEQ ID NO: 276355 - protein, 342 aa, unidentified
MQQSIFVGLDLGSSHCHQTVINADGTIIRSRSVPTSEQHLRNSFADLQGDVHVHAEASELSDWVRSIINPLVTRFVISHPRSLAWIAKDSVKDDAVDARKLAELLRFNLVHEVYYEDRADRRSFKQLVVHHEQLSREQARLKSKIKARLRTLGIIRKDARLFSESGQSELFASITDLLIEQMFHQSFAVLNQMLISLMDAKTAMIEFSRRLPEVRLLQTAPGVGVITACRFVAYIQTPQRFSNKQKLWRYARLGITRRESNGKRLSHPHLDPAGCGSLKDVSRKIFEAARRTKTDNSFKRLYEQSLANTKNAVHARLSTQRKILATLRAMWQANQPYRNDGG

SEQ ID NO: 276356 - protein, 352 aa, unidentified
MIVIGADVHKSTHALAAVDANTGQLLGEKEIPAREQGHLDALRWAHELDTEIVWAIEDCRDLSHHLENALISAGERVIRVAPKLMGASRRGEREPGKSDQIDARAIARAVLREGIERFPAAFLDEDAVKIRLLCDHREVLVNERTRLINRLRINLVILDPELEATIPARKLDYPGQLQRVTRRLRATPQTARVRIAREQTKRIGALTRDAEQLKRDLRDLVRVHRPEMLAETGCGPLTAAILIGQTAGAQRFKSDAHFARLAGVAPIPVSSGRTDRHRLNRGGNRQLNRALHIIAITRGRLDPGTRAYLQRKEAEGKTRIEAMRCLKRHLARRYYRLLSEGSRDEGYEILTA

SEQ ID NO: 276357 - protein, 405 aa, unidentified
MDITPIHRRVIGLDVHQNKITACALIEQADGSVAVEQGEFGGFKRDRRALAAWVHGLAPDIVVMESTGIYWKSPYAALEKVGIAAWVVNARHVKNVPGRKTDISDAQWLATLARAGLVRASFIPPAEIRHLRLIARQRQKLGGMLAAEKNRLHKVLADAGIRLNVLLSDLHGQSARAMVKALLADEPIHAILERAGRLRASREDLFEALQPEELSAKHRFVLNEIMAHIEYLEATMARFEQQLLVGLAPWEPQMSLLETVPGIDRLGAAMLLVEIGTDMDSFGSAERLASWVGICPGNNESAGKRKSGRTRKGNAWVRRLLCEFAQAASRTRCALKGKFSALAIRKGHKRSIVALAHKMLRIVYAMLANTTPYQDRTVDYEALMVGRNAPRWLKMLAKHGYIATA

SEQ ID NO: 276358 - protein, 281 aa, unidentified
MNKDKNYFGIDISKSLFDVYNPQKGHLQFENNSKGFRLFARILSSNSHCVMEATGYYHYSLSHFLFENNIKVSVENPLKIKRFIQSKLTKVKTDKSDAKLIYAYSLKNELSDFQPSNMEVKQLLSLLDMYQKQSTQLKNKIHGEEALGKPSKMVLKSLNTILNNALFLIVITSGFQNFETASQLCSFTGLTPVIRRSGTSVKGRERISKIGNPKLRNLLFLCSFNACKCNKSCKELYERLVLKGKSKKLALIAVCNKLIKQAFAIAKSGLCYDENFVSKLK

SEQ ID NO: 276359 - protein, 369 aa, unidentified
MNYSAQYNRSCPCLKQIVGIDVDKNYLVVCLGRLTQQGQQELYAEKSFANGPKGFKALVGWVNGRTNPAVGITYAMEATGVYYESLAYYLSDHGARLSVIKPNKIDAYAKSLSAKQSNDVLSSQAIARYGLQTTLSPWKAPEPVYRQLRALSRERDQLLSESTVAKNQLHAYRNQGQPPSGTIARLEQRLELLERQQHQVTQQMQAIGEQSPELAQQLGYITSIPGIGMITAATILAETQGFNQITSRRQLTSYAGLDVVQKTSGTSVWTKPKISKKGNKYLRKALYMPSLSSVKYAPEQQRLYSRLLSRCGIPKKASVAIQRKILELAFTLVKNKTYYDPEYHQKKQAENAFKASSAQASDAALMPPK

SEQ ID NO: 276360 - protein, 347 aa, unidentified
MEQIIRIGMDTSKHIFQLHGVDAAERPVLSKRLGRRQMAAFFADLPPTAIGIEACGAAHYWARVLGGLGHEVKLIAPQHVKPYVKRNKNDRRDAEGLCEAMSRPTMRFVPVKTAEQQAALMLAGLREQMVARRTQLSNAIRGYAAEFGVTAAKGLDKIESLLAQIAQDESVPAMARELFEIQGREYAQLQVELKAIEAKLRAWHRAHADSRRLATIPGIGPVGATSLVMKAPDPRAFPSGRHFAAWIGLTPKDHSTAGKTRLGKITRAGDERLRSVLVAGATAVIQQARRGRGRSSPPWLLALLARKPPKLAAVALANKNARIAWKLMTTGESYDGARMPGVSALAA

SEQ ID NO: 276361 - protein, 334 aa, unidentified
MEKVTTLGIDLAKSVFSLHGVGGAGQVVLRRTVRRDQLVKVVAGIAPCVIGMEACSGAHEWGRRFQELGHTVRLMAPKFVAPYRKSGKNDGNDAEAICEAVTRPSMRFVPVKSLEQQALLAMHRVRQGFVVERTATINRLRGLLCEFGVVLPLRSVTVRRQAAQAAENLPDLARRAIGDLLDELRSLDEHVGGYDREIEAQAKLCEPAQRLMKIRGIGPTTALAIVATVGNAREFKNGRQFAAWIGLTPSQYSTGGKPRLGHISKRGDAYLRNLLVQGARSVLNSAGMHPDRMSRWILELQPRRGYYRTLVAIANKNARIAWALLAKNESMRLA

SEQ ID NO: 276362 - protein, 408 aa, unidentified
MEILYPRCAGLDVHKDMVMARVRCVSEPAVDETRSFATTTGALIELQEWLSSHAVTHVAMEATGVYWKPVWHLLEEHFELILANAQHIKNVPGRKSDVNDAAWISDLLAHGLISASFVPPKPIQELRDLTRTRKQLVREASQHSLRIQKTLEDANIKLGSVLSDVLGRSGRAILNALIAGETDPERLADLARGNARKKRTELIQALHGRISAHHRRLLKLHLGLIDSLQQALATVDADVGKTLAPIQECARLLTTMPEVSELTAHVLVAEIGVDMARFPTAGHLLSWATMCPRNDESAGKRRSTRTRKGAPWLKPALVTAAWAAVRVKGSYLQAQFFRLKARRGAKKAILAVAASMLTAAWHMLKDRVEYKDLGADHFARRDRSKAIQRLLRRLDDLGCKVQLTTEVA

SEQ ID NO: 276363 - protein, 373 aa, unidentified
MRSGPKQLERLLVWAAQFPERTWAIENATGLGYLLAQQLIAAGERVLDVQPKLAARVRLLATESTDKNDAHDAQSVAIAALRAKTPREVGAEDHATVMKLWSKRQRDLSQERNRVACRLHAVLCELIAGGVPDEIYAEKAACLLAGVTATTAVAAARVELAEELVDDLRRLDAQIKASRKRLEEVVVASGTTTTEVFGVGPVVAATVVGITGDIRRFASRDRFAAFNGTAPIEVSSGDRKVWRLRRRGNRSVNHAIHMAAVTQIRHRRSDGRAFYERKLAEGKTGKEALRALKRRISDALYVRMVADARRANAEKAGPGGQAGNDSVASAAGSHPDTPALRPSHSRTRSKATSTTTSARRSGARTPTAARRTA

SEQ ID NO: 276364 - protein, 376 aa, unidentified
MDRATTAPADRLFCAVELSKTSWLLGIQFPDHQKASVYPIKGGDSEGLMAKLVAARDRWAKVSGKKPSIILCYEAGYDAFWLARFLKGHGIDCLVVDSASMQVNRRSRRAKTDRIDLGKLLRALIAWCGGERHVWSVVRIPSVDEEDLRRSHRERSRLITERTAHINRIKGLLFAQGIRGINVKARYKTLQIDKLMTGEGRPLPPRLAQEITREIERLGLVQQQIAAIEHERDESPTTCKQTEKKRAQLLLLKGIGPTGSAVMAREVYYRQFSNRRQVAGFLGLATSPYDSGQTERSQGISRAGSGPVRATMIQMAWLWIKHQPKSAIAQWFVQRTEGQNGRIKRIMIVAVARKLAIALWRYLEQGLVPQGATLTR

SEQ ID NO: 276365 - protein, 353 aa, unidentified
MSDDKYIAFDVHQVTTVISVLNSAGREVKTAILPTQAQALLGFLEGLRGTLHLTLEEGTYAAWLYDLLQGRVAKLIVCDPRHNALLKEGNKTDAGDARKLAELLRAGMLRGVYHGSRGLRALQELAHAYESLRVDTTRVMNRIKAFYRGRGIDCAGRGVYRPGQRARWLERLPAGASRLRAELLHEELDKVGSLRRKARRALLAESRKHTVAARLRQIPGMGPLRVALLMAHVQTPHRFRSRRNFWTYVGLGVVYRGSSEYRLVGGRAVRRAQALQPRGLNPNHRPELKEIFKSAALTAIRRPGPFKNYYEPRAQQGVDPAILRVTVARKLAALTWSLWKKGGHYRGEGPQQA

SEQ ID NO: 276366 - protein, 344 aa, unidentified
MEYFVGLDVSLRSCALCIVDGRGKVCMERELPCEVDEIANFLNAFGAPIVRIGFEAGALSQHLFFGLQNMGFEIVCMEARQVSAALSAMRNKTDKTDAKGIAQILRTGWFSPVHMKSREAHGLRALLSTRKALLKKTMDLANEVRGLLKIFGVRLPRTVKHGSFDGLVRPMIEMDEVLAHAVIPLLDARAVLFQHYLELDRRVKRAASQDEVCMRMMTVPGVGPIAALTFKAAVDDPNRFKRSRTVAAHFGLTPRRYQSGEHDNPGRISKAGDQNVRATLYAAANALLMRTMAGSQIKSWGMRLMRTKGRRRAVVAVARKLAVLLHRMWIDGTEFRQEKVGGQA

SEQ ID NO: 276367 - protein, 346 aa, unidentified
MQNDTLVAVDIAKEVFEVGISDRPGRVARRRRLARYEFLEFFAQLPPATVVMEACGSAHFWARRIEELGYVVVLLPPQYVRPYVVRNKTDRTDVNGLLEAFRNEQIRPVPIKTVTQQVFGTLHRLRSGWLADRTRAINSLRGLLRELGFFIPEGRKHVLPDAWEIIQDPKRGLPDALKPSLSALCQEILSHSTRIEEIEAQLEALAKQVPVVARLRSVPGIGLLTATALYAFIGDVSRFPSGRHMASFLGLTPSEYSSGLRRRLGRISKRGDTYLRMMLIHGARSILWHAKRMKNRDRLRAWALRLECKLGHNKAAVALANKLARITWAVWKHDRSFEPMPELQAA

SEQ ID NO: 276368 - protein, 366 aa, unidentified
MKKISTVAKRGNEIFEEPKLTIGLDLGDRTSHYGILDEAGNVILEHNLPTTPKGIQQVFSRIPRSRIALETGTHSSWVSRQLTELGHEVIMAHARNVRLGGESSRKDDQFDARTLARLARIDPDLLGPVRHRSAKAQIHLTVIRARAGLVSARTALVNTARGLAKSYGERLRKCGTGQVGRALAGGLSAALRDALDPLLQGIESLNERIAEYHRRIEQIAKEVYPEVALLKQVKGVGTLIALTYVLTLDDPHRLRRSRDAGCFLGLRPGRRNSGMSEPQMHISKEGDRYLRTLMVQGAHYILGPFGEDSDLRRWGLKLAERGGKNAKKRAVIAVARKLAVLLHKLWVSGEVYEPLRNNHKVVSAVA

SEQ ID NO: 276369 - protein, 338 aa, unidentified
MGYYVGLDVSLKTTSVCILSKMGKRTLEGEVGTTPEEIHEFLSKSGFAITQIGLESGSLTHYLKEGLLKLGYKVVGMESRKMAAILATLINKTDKNDARGIAEALRVGHFRECVHRSNDAVEMRSLLHLRQTAVEERTHIISSLRGHLKVYGIKFAKKAGKTFREAVEKAVEQLRPRVQKAVRSLLNILDVLNEEIKSMTEEIEALAHEDEDIKLLCSINGVGVITALAFKSEIDDPKRFENSRDVAAYIGLTPRQYSSGEVHRQGNISKKGSKRTRHLLVEAASSLLTRCKTWSKLKAWGMKLMKKKGNRKAIVAVARKLAVIMHEPISHSLTKPTS

SEQ ID NO: 276370 - protein, 324 aa, unidentified
MTYIGIDVSKDTLEGAFPSKEGYRNQTFGNTPKGIRSLIQKLSRDEHHCVMEATGNYSALLIYMLSRAGIVASMENPLKVKNFSRVMLSVTKTDKADARLLALYGEKMNPTPYRLKSDSLLILRQKRTVIRQLRKQLTASRNLLHSLEVLPMVDSASKSAILKVIKSLEKLVGKLEGELTHLAKSEYDRQMKALTSIKGIGASLAAALIISTGGFTYFDNAKQISRFLGLCPTYQQSGTSVNVKGHINRNGDSSLRAQLYVASWSASQHNAACRKCYLRLRERGKSGKVAMIAVANKLIRQAFAVVTQNQLYIDGFESNLIHKS

SEQ ID NO: 276371 - protein, 367 aa, unidentified
MKKISSAAAQKIEKVEGQKLTIGLDVGDRSSWYCVLDEAGDVLLEQKVATTPKAMKEVFGGMPHSRIALETGMHSPWVSRLLSEVGHEVIVAHARTVRLIGESRRKDDRFDARTLARLARIDPDLLGPVQHRSRKAQVDLMVIRARAGLVRARTALINTARGLTKSYGERLRGCSPRKMNRELAEGLSPELQSALQPLLDEIESLSERIREYNERVQQIAEESYPEVARLEQVKGVGTLIALTYVLTLEDSRRFRKSRDVGCYLGLRPGRRNSGQSEPQLHVSKEGDPYLRTMMGQSAQHVLGPFGADSDLRRWGLRLAERGGKNAKKRAVVAVARKLAILLHRLWVSGEIYEPLRNSSQAMLSAAA

SEQ ID NO: 276372 - protein, 347 aa, unidentified
MKKFFVGIDFSKRKMDVSIVEKESPEQVFAYKQFVNNAKGANEMCNWVEHTTNASTKHDGEVLFCCEHTGSYCLEVCDYLSENGKYIWLGNPLDIKRSMGLVRGKDDIIDSRRIATFAAEKHHKAVLYMRPEDSTRVLKYLLSIRNNLIEQKKTLSCQIKENFPKLHDAALFCKLEEKLKQILASIKAEIKKIEKMMIDIILNNKEYKNTFDILTSMKGVALINAAAIIVFTDNFKRFSFNSRKICTYWGVTPFRNESGDSIRRGTHTSRIHNNWLKAILSEAVLCAIRYNERMKAYFLRLLSKGKHRNIALNNTKNKLLKTLVAMVRDGKKYDGAYVPSSPKPSTL

SEQ ID NO: 276373 - protein, 320 aa, unidentified
MGTEKVYVGIDVSKETLDMAVHASDQRWRFANSDEGITETLSCLEELCPTLVVLEATGGFQYPLAAALAVASVPMVVVNPRQVRDFARATGRLAKTDAIDARVLAHFAAAVHPPSRLLLDTQGQELKAILTRRRQLIEMLTAERNRLHSARSKAVKAHIQAHISWLEEEMAHIDHDLGHSIRQSPVWQEKDDLLKSVPGVGPVLSTTLLADLPELGLLNRREIAALVGVAPFNRDSGHTRGQRAVWGGRAVVRSALYMATLVATRYNPIIRDFYRHLLSAGKPKKLALTACMRKLLTILNAMLKHKTPWHYPISGTPQTS

SEQ ID NO: 276374 - protein, 407 aa, unidentified
MIFVGVDWAEAHHDVHVQDEDGKRLAGGRLPEGVEGIARFHEMVGAHAEEPGEVVIGIETDRGLFVGALVAAGYAVFAVNPMSTSRYRDRHSTSGAKSDPGDAKVLADMVRTDRHNHRPVAGDSEAAEAIKVLARAHQSMIWSRGRQTNFLRSTLREFYPVALVAFEDLASGDALEVLRVAPTPALGALLSRSKIASALKRGGRQRRIDQRGAEIQEALRTPQLSGSTLAATAMGMSVGATVAVIVTMNAQIGELAKELEGHFEQHPDAEVVRSLPGLGTILSARVLGEFGDEPNRYATAKCRKNYAGTSPITRASGTKRVVLARYARNMRLADAIYQWSFASLTASPGARAFYDYRRAAGDTHHAALRHLGNRLVGILHGCLIHQTAYDENTAWGHRAEIELARAA

SEQ ID NO: 276375 - protein, 482 aa, unidentified
MKKKAASVRPKTSSARSSKKTRAWQVVHPRAAGIDVGAAEHFVAVPPDSAGADNRPVRKFKAFTAELDALVEWLKACQVDTVALESTGVYWIPLFQKLENAGIEAVLVDARAVKHAPGRKSDVQDCQWLQQLHSYGLLRAAFRPDDAIYRLRTLVRHRRSLISSAAEHIQHMQKALVQMNIHLHQVVSHLKGETGLRILRAIIAGERDPEQLVKLRDPQISRSTPEEMKAALQGDWREEALFVLRQSLSLWDTYQERIGECAGAIKKQLEQIPTPAPATEPAAKPKVDPLASQTLKRKRPQSIKRNEPRIDLRPQLARLCGLDLTAAHGMGVLSVLVILSEVGLDMNKWRSAKAFASWLGLCPNNKISGGRVLSSHTRQVKNRAAAAFRMAAVSLGPTETWLGSFHRRMKGRLGEAGAVTATAHKLAVVIYHLLKHKEAYLERDLVQYEARIYKHNVAYMKKKAKALGMKLVPLTNETSLTE

SEQ ID NO: 276376 - protein, 327 aa, unidentified
MFYLGIDVSKAKLNATLLLQTQPPKFRSKTVPNTTAGVASLLAWSTRQAGCAVADLHVLLEATGIYHELAATACFDAGARVSVLNPAQVKEFARGLAVKSKTDALDSAVLARFGALLQPPPWQPEAREIRELKALLARLDSIETDLRRELNRREKAELTPVPPQVLESIDASIEFLRQQQTALQQRIHDHIDGHPALRQDRVLLKTIPAIGDKTAFRMLALLRSRAFTRASQAAAFVGLNPVEHQSGTSVHQRPRLSKTGNPRLRAALYMAAVVAIRHNPDIRAQYQRLLARGKSKMSAIGAAMRKLVHICFGVLKHQTPYQPMCAN

SEQ ID NO: 276377 - protein, 398 aa, unidentified
MTESSDYESVQVFIGVDVGKDTHHAVAINRSGKRLFDKALPNDENKLRSLISDLKQHGQILLVVDQPATIGALPVAVARSEGVLVGYLPGLAMRRIADLHAGEAKTDARDAAIIAEAARTLPHALRTLKLADEQIAELSMLCGFDDDLAAQTTQASNRIRGLLTQIHPALERVLGPRLDHPAVLDLLQRYPSPEKLASLGEKKLAAQLCKLAPRLGKRLAADIAQALAKQTVVVPGTNAAAVVLPRLALQLITLRKQRDEVALAVEQRVLAHPLYPVLTSMPGVGVRTAARLLTEVACRAFASAAHLAAYAGLAPVTRRSGSSIRGEHPSRRGNKALKRALFLSAFAALRDPLSRAYYTRKMSQGKRHNQALIALARRRCDVLFAMMRDGTFYTPQAS

SEQ ID NO: 276378 - protein, 313 aa, unidentified
MVTPLFVGIDVSKATLDIATYPPGDRWQVANADPDLHTLVQRLRRLHPTRLVLEATGGYERALVAACATVGLPIVVANPRQVRDFARSTGQLAKTDAIDATILALFAARIQPALRPLPEAERQALDALLTRRRQLLEMLTAERNRLEHALPAIRRDLQAHIRWLERRLADVDRDLEATIHASPLWRTQEDLLRTVPGIGPVVSRTLLGALPELGTLSHKQIAALVGLAPLNRDSGTRRGHRMIWGGRAPVRSALWMAAIVASRHNPVIRTFYLRLLAAGKPKKVALTACARKLLTILNAMMRTNTPWRGLVPA

SEQ ID NO: 276379 - protein, 331 aa, unidentified
MADAKRFVGIDVAKAQLDVALGPKGERFAVANDERGISALLKRLEPADVVIIEATGGLEAPVASALATAGIGVAVVNPRQVRDFARATGQLAKTDALDAQVLVRFGEAVKPRVRALPDAQAQALEALVNRRRQLVEMLTAEKNRRANSPKVIHKSIDEHIRWLEKRLAGFDDELAALIRATPIWRERDELLRSVPGVGKVLATTLLAHLPELGALNRKQIAALAGLAPFNRDSGSLRGSRCIWGGRAQVRRVLYMAAVSAVRSNPVIKNFYAQLRARGKYPKSALTACMRKLLVILNAVLHNKTHWHATALTSSSSALYPLADAVSEHGCC

SEQ ID NO: 276380 - protein, 437 aa, unidentified
MLDITKTLRKKTMNETPPFACTIGLDWADQKHDLWICPAASSKSEHLRLDQTPEALHEWVAKLRVRFDNQPVAIGIETSRGPVISGLLAYDFIVLFPVNPKALKDYRAAFSVSGAKDDRTDAMLLEEWVRLHRDKLKALEPDTELTRKLAGLVENRRRLVDERTRIVNQLHSALKTYYPLAESLLEGQMTKPMATEFLIRWPDLEALQKTSTQTLRAFFYKHNSRSAPLIEQRLQAVQQAKALTTDPAIVEPARVLVSALAGMLRPLHKAVSHMDQQIHHAMDQHPDAALVRSWPGAGPALAPRLLVAFGTNRERFGSATEVAQFYGIAPVVQQSGSTKTVHMRHRCPKFGRQTFHENAACALKKEPWAKCFYEEHKKKHDDKHHQACRALAFKLVRIYFRCWKDRKPYQPQQYLQALQKHGSPLHKSLAPQRAGEL

SEQ ID NO: 276381 - protein, 350 aa, unidentified
MMVIGTDPHKRQHTCSAVDAVTGELRSSETVQASGAGHEALLGWGRGLDAQRVWAIEDCRHVSGRLERFLVARGERVVRVAPKLMAGQRRSSRQAGKSDPIDATAVARAALREGVASLPGAYLDERALEIKLLLDHREDLVRERTAIQGRLRWHLHDLWGADGVPVAALDRAKWLDRLARRLARCEQSARVRICREQLTRLRALARRATELEREIGQLVLAHAPELLALRGCGPLTAAKIVAETAGAQRFSTDAKFARHAGIAPIPAASGRNQRVRLHRGGNRQLNCAIHRIAVTQGRVHPPAIEYLARKQAEGKSRIEALRCLKRHLARTVWRTMTTNANAPATTLALT

SEQ ID NO: 276382 - protein, 315 aa, unidentified
MAMPVSVTKPIVGVDVAKNELVIYHAELDVLEAIPNDKAAIKRWLKVLPGPVDVAIESTNIYHLDFADLAYEAGCTIYMVGGYELHHYRKGVKIRAKTDALDAKLLARYLKNEGHELHPWAPPSPLYRQLLSLFRRRAALVQARVALVQSWANEPLLKTAFAEQIAAMQRLETLIEKTIKDHLKNAGLLGQLNRCLKVEGIGFLTGARLLTAFQRGDFKNADAFIAFLGMDLRVSQSGQKDDRRSLSKRGDPEVRRLLHNAAMSASRTSAWKGFYEKLRARGFATTQALVILARKLARIVFALLKGQSEYQPKAA

SEQ ID NO: 276383 - protein, 415 aa, unidentified
MALKIVYQICCGIDVHKTFVVACIASTNKQGVTTYKRHRFSTFTQGLKELLQWLLDNHCKDVCMESTGKYWIPIYNVLEKDCNIVLAHPKYVKAIRGKKTDKKDAKWIADLFKHDLVAGSFMPPADIRQLRDLMHYRFKLTCFMSSEKNRLQNCLTVSNIQLASVVSDTFGKSSQRILDKILENPDDTSFDIEPLIHGSMKKKLPELELAIDGFITPEQAGKLKVIKKHFEDLESRKAELEKLILALASPYQQELDLILTAPSFKNKFTAIGIISEIGVNMEAFPSAKHLCSWAGLTPTNNESAGKKKSVRVSKAGCYIKPLLVQCANSVVKSEKHPEIRNRYLRLRKRRGHKKAIIAIARMLLTALYNMLKNKEPYNAELYRKSDVLPVNREITIEQAILMAQFQGYKIKSAAE

SEQ ID NO: 276384 - protein, 387 aa, unidentified
MSQVGDLSRSLVPFDQNITLTVVVELSEASWLVAGLIPGVDRQPVKKQEPEPVALLRLLERWRVEAVRAGRTIGRIALAFEAGRDGFWLARWLQARDIEVHVVHSTSVAVSREHRRAKTDRLDTAMLMRVFLGWLRGERGHCRMVAIPTLEQEDAKRPSRERESLVGERTRIVNRMKAALARLGIRGFKPTLRKAPQRLDALRTPEEVSIPPNTLDEIRRDMVRLAVVREQIDVIERARLARLEQAPAAGPHAMVRLLARVIGVGLETADMLVQEVLSRNLRDRRAVARYVGLTGSPDESGRRRREKGLAKAGNARVRRGLIQLAWRFLRFQRDSTLAQWYRTRTGGPKGARKTTMIVALARKLLIALWRMVTIGEIPAGVALRQVI

SEQ ID NO: 276385 - protein, 393 aa, unidentified
MICVGIDVAKDKHDCFILSSEGEVLADVFTISNNAEGFDTLLQTIHRCARPEDKIKVGLEATGHYSYNILGFLLDKGLHTFVINPLHTNLYRKSLSLRKTKTDRVDARTIAAMLMSDVDLKPYTDTAYHNEELKSLTRYRFDKVRERAKLKQSVSRLVTILFPELEKLVPSLHLASVYALLIEFPGAKQVAGAHLTHLKAILSDASKGRYGRDMAVTLRDAARCSVGSVMPAKSLELQHTIRLIRKLDAEIEDIETAIQSMMDEMQSPITTIPGIGVRMGAMILAEIGDFSRFDSPDKILAYAGMSPSTYQSGQLSLSGPYSHMEKRGSRYLRYALYNATKYVCLWDPAFAAYLAKKRGEGKHYNVALSHAAKKLVRLICALEKSQQSYRNAA

SEQ ID NO: 276386 - protein, 430 aa, unidentified
MKNRTNQRLDEITTGILIVGIDVAKSEHWARFVDYRGVEVGKALMFRNNRQGFELIVIRLEEISKSKLHRHPFDQVIIGMEPTGHYWKALANYLMNAGYKVVGVNPYHTKKSKELDDNSQTKSDKKDAITIARLVKDGRFFEPYLPQEEYGELRVLTNARVSILKRNSSVKNTITAILDEYFPEIWTVFKYPLKGKASRQVLRSCPFPMYILHMGEEGVLKEIQKAVKKTVGRKKVLQLLSAAETSIGVDYGLKAAKIRLNGLIDELDTIEAKLNEIEQAMKEMIYETSYAEQLLGIKGIGVVTAASFLGEVGDPLRFQNARQIANYAGYNLVEDSSGKSKSGTCISKRGRKQLRSVLYQMAFTMVGSNAEMNSFYRYLVTRNNNPLKKKQALVVISKKIISVIYSLLKKNDVYKPELVLGSVRKEMMAA

SEQ ID NO: 276387 - protein, 396 aa, unidentified
MSEHRNKAGRPKRSVVLQQFCWCSIKREPRMSAIDNVDGSPTGPQDDLRMSRKESNDERCGSDWFGSREVGFQVHGVDAAGQVVVRQRLTRGRLLKFFSRLQPCLIGMEACASSHHWARELIALGHDVKLMPAQYVKPYVKRGKNDAADAEAICEAVTRPTMRFVGIKSPEQQSAMMLHRVRLILTRQRTQLSNAMRAHLAEFGIVAPVGRRGIDQLLAVVADAEDSRVPANARACLDMLAAQLCLVKEQILENDRRIIANARDTEVGRRLMDIPGVGPLLASALVATVSEPILFRSGRNLAAWVGLVPRQNSSGGKERLGGITKAGNRYLRQMLIVGAMAVVRYAERNGTKRPWLVQLLARRTAKIAAVALANKTARIAWAMMTSGERYREPQVA

SEQ ID NO: 276388 - protein, 337 aa, unidentified
MENVALIGIDLGKHSFHIHCQDRFGKALLRKKFNRTKLIESLATFPVCTIVMEACAGAHYMARRLAEFGHESKLISPQFVRPFVKSNKNDFIDAEAICEAACRPSMRFVTPKTESQQTLGALHRVRESFVRDRVKASNQIHSFLLEFGISLPVGHAAIKRLPSVMAEHELPARLITMLERLHAHFKYLEQQIAEIDKELASQLGDDDLGQRLMTIPGVGPITASVLAAELGDGKHYRCSRDFAASVGLVPRQYSTGGRANLKGISKRGDKNLRRLLVQCARAYMQRLERQTGRLADWVRSMLTRRHSNVVACALANKLARTAWALAARHTEFRAMPT

SEQ ID NO: 276389 - protein, 427 aa, unidentified
MSYRIAGIDVHKKMLAVAVADVEVDGDFQFERQKVGTTPIDLRRLADWLVEHEVEEVVMESTAQYWRPVWEALEQHWRPRRRARNSAPRLAGTLHLAQAQSNRGPGGRKRDFPDAERLVKRLVAQELTLSFVPDAEQRLWRTVMRRKYQVTRNRVQLQNRLEALLEEAHIKVSSLVSDLLGISARRMLQALADGETDPAALATLATARLRATPEQLRDAFHACPTLHPVYRRLLKLTLEELRVIEDHLGQLDQQMADLLTAHHDAVQRLAEVPGLGVDSAQQIIAEVGATAATFPSPKHLASWMGACPGNEESAGVNYSHRCPKGNRQMRRVLNQAANAAVKAKGTIFNVVYRRLVPRLGHAQAIGAITHRLCRLIWKMLHQRIRCEERGPAVSVEAKKVRARKMIRELRSLGYRVELLSPPAGSPA

SEQ ID NO: 276390 - protein, 335 aa, unidentified
MSRYVGIDLHRRRSVVVIMDPDGTKVSSTRIENSPMNLAAAVREAGPEPEVVLEATWGWYWAADVIEEAGGRVHLAHPLGVKGFENRRVKNDYKDATLLADLLRMGSLPESWIAPRSLRELRELVRYRHKLSQLRTGLKSQVHSVLGKEGVIPSLTTLWGPHGARFLDETPLGEAYEYRIESLRDLIGRYDREITELDRRVHLQLRDDVGYRAVQQLSGVGRVFAGVFVAEIGDIGRFRDPKRLCSWVGLTPEHRESDVKVFRGSITKQGSALIRWAAVEAVARWRGGAPIRDSYLRIAERRGTNIARVAAARKLITLVFYGLRDGEIRCLQEAA

SEQ ID NO: 276391 - protein, 320 aa, unidentified
MQVYRVTSDGVVSNKAVKRADFLNEFRNTPPALIGMEACGGSQHWAHELQNLGHTVRLMPPKLVKPYVTGLKNDKNDARGIYTALVMGVREVPVKSAAIRDLALLQTMRTKRQREKVAKINHIRGILTEYGLVMGKSVNAFLAKAGSLIVELKERADVSPYIVSELTALFHEVKEAMAKIKELETSIESIAKTLKQYELFRSAPGVGPITAATMLVLLCNPEAFKNGREFAAYIGLAPKKNVVTHIPKKYECNNEVRALLVQCAHAICRGKHKSDWVSSILARKPKKVAIIAVANKLARQLWIMAKKGEKFERRFILAAV

SEQ ID NO: 276392 - protein, 311 aa, unidentified
MSHVFVGIDVAQDHLDVHLLPAGEAFACPNDPTGIASLVGRLQVAQPALIVLEATGGYQGLVAAELTAADLPVAVVNPRQPRDFARALGLLAKTDAIDARVLALFAEKVQPRCQTPRSDREQRLKALVTRRRQLVEMRTAELNRRALATDEVRKSIDKVVKLLNRQIEDLEQDLDGTIRHMPQWREKDDLLQSVPGVGPATSHMLLAALPELGTLGRRQMASLVGLAPFNRDSGKLRGQRTIWGGRADVRCALYMAAVSAIRCNPAIRAFYQRLRNNGKKAKVALTACMRKLLTILNSLLRNHCPWQPQNA

SEQ ID NO: 276393 - protein, 407 aa, unidentified
MIFVGDDWSEDHHDVCLMDQAGKRQASRRLPEGLTGIRQLHELIAEHAEEPDQVVIGIETDRGLWAGALAAAGYQVFAVNPLAVARYRDRHHVSGGKSDASDAKLLADLVRTDRHNHRPIAGDSLDAEAIKVLARAHQSLIWARTRHTNAMRSALREYYPAALLAFEDLAHGDALGVLGRAPTPEQGAHLDLPAIQSALKRGGRKRNIAARARQIRAALRSEQLAAPAPVAAAFGATTRAAVGIIVELNRQIAELEAELATHFEAHPDADIYRSLPGLGVILGARVLGEFGDDPNRYTDAKSRKNYAGTSPLTIASGKKRAVLARHVRNRRRYDAIDARAFCAITHSPAARAHYDQRRAAGDLHHQALRAPGNRLVEILHGCLRHHTKYDEQTAWSHRQNITTADAA

SEQ ID NO: 276394 - protein, 355 aa, unidentified
MNKINSNFAGQTIFVGMDVHKSSWNLGIHLNDMFVKNVHQKPNPTIMANYLKQQYPGANYKAVYEAGKFGFWIQRQLTGLGIECLVVNPADIPKSQKDSLQKTDPRDARNLGMRLQSGVLHSIHIPDEQQEADRVFFRHRKRIWKDLTRCKNRIKGMLAFSGIDIPEQYDNASWSHNFINWLKALDCKQQSRRRALDYMISQMEFLRKELLSISNAIRKMMREQRYNTNYYLLRTIPGIGPLTAASILVEIGDVKRFDTFYHLNSFVGLLPMEHSSGQSENKLCLTVRKHRQLRSDLVESAWTAKRTDPAMALYFQEQIKRKDSKIVIIKIARKLLNRIRFVLINQQPYEFGIVK

SEQ ID NO: 276395 - protein, 423 aa, unidentified
MEIMHERVAGLDVHKAMIVACVRLMSGGKVERECRTFETTTSGLLDLLAWLTASGCTHVAMEATGVYWKPVWNILSDGVFELILANAAHIKNVPGRKTDVNDATWIADLTACGLIKASFVPEQQIQELRSMLRARKQLTREQTRHTQRIQKTLEEANIKLDTVISDIMGVSGRKMIEAMIAGVRNPAKLAALADRRIKATPKQLYDALHGRLTDHHRFMLNLYIEQYDGLGRGIVEIDQAVEAAIAQMDQEVEAGHATFRSLIGLLSTIPGVSTLSASTILAEISTDMDRFPTAGHLLAWAGLCPGQNESAGKRKSTRLRKGAPWLKTTLVQCAWSAIKNKDGYYNAQFNRLRSRRGPKKAICAVAASMLTAIYHMLKDGVEHHDLGAHHFDRRSTDAKAKRLVAQLTKLGFQVELQPLKEAA

SEQ ID NO: 276396 - protein, 314 aa, unidentified
MRRRDGSFARALGRLDVHKDSVVACVRHMADSKVTTVVKTFKTTTQELMGLSNWLSAEGATHIAMEATGVYWKPVWHILSDGEFELVLANAAHVKNVPGRKTDVNDATWLADLMAHGLIRASFVPDEPTQQMRDLLRTRKQMVRERSSHTQRIQKTLEDANIKLDSVVTDLLGLSGRRIIEALIAGQTMPQALATLAHRRIHATSAELEAALRGRVTKHHRFLLKLHLDQIDAIDAAIASIDKEVDGNVEPFRAAIELLSTIPGISALSAQVLVSEIGIDMSRFQTAGHLISWAGLCPKNDESAGKRRRKPVHA

SEQ ID NO: 276397 - protein, 389 aa, unidentified
MYYIDIDVGKFNHCACVISSEGEVLIDPFFFTNNQDGFDSFIKAVKKFKSPRHIVGLEATGHYGDNLINFLITHDFEVALINPLTTDAKRKSKIRKTKNDKKDTFLICSVLFDRDYTRVTQRKLDMKQARELTRYHASIAEDINQKKNQLQRCIDIVIPELNTWFKTKYSKAYMAVLKEFGSSYNLANANLAHLKKVLKPKSSGSRVDIDASSLRSSAKKSIGENNEVIALEIKMLIENIELLTSQLKTVDKKIEELAAKLDSPIFSIPGIGIYTGMSILSEIGDIHNFSSAVKVMGFAGVDPGTYQSGEYSAPRTALSKRGSRYLRKSLYQCILPVCTSNLAFNKYYKLKRSQGKSHRCAQGHSVRKLIRVIYKLLSENIQFDEKLLI

SEQ ID NO: 276398 - protein, 329 aa, unidentified
MVFQAHGADASGGVVFRKTLRRAKVLDFFREQPSCVVAMEACGGAHYWAREISRLGHEVRLIPPAYVKPFVKRQKNDASDAEAICEAAQRPTMRFVAVKSEAAQASAAIFRTRDLLVRQRTQLVNAIRGQLTEYGLVAAKGPANLPKLLELADEAGSALPQAARAMLDVLTDMVATLTIRVTDLDREITRRAKDEDVPARLMTIPGIGPITATAIAALAPPIETFRKGRDFAAWLGLTPVQRSTGGKQKLGATSKMGERTMRRLLIIGAAALVRQTSRREPPAGSWLARMLARKPRMLVITALANKMARMVWALLTRNEVYRAPAVAAA

SEQ ID NO: 276399 - protein, 409 aa, unidentified
MVLQVIYPNCCGIDVHKTFVFACIAITDNKGIPSYYRKRFSTFTHGLRDLAEWLEYYSCFDVCMESTGKYWIPVWNVLETAGIHQTLAHPKYVRAIRGKKTDKKDAKWIADLFRHDLVVGSFMPPALIRQLRDLIRYRWKLGNNMVSEKNRFQNSLTVSNIQLASVVSDTFGVSAQKIIKSILDKKLGDTEQLEDLIHGSLKKKLPELELAVDGAITSDQEAKLRVIMDHYKSLVLARTTIETEVEMGAQPLAQEIALVRTVPGLDKPFTAISVLAETGVDMSQFPDAKHLCSWAGLTPTNNESAGKKHSVRISKAGAYLKPLLVQVANGLIKSDKYPEIKQRYQILKKRRGHKKTIIAIARQLLTAVYHILANHEVYNPKQFVDRPERSMSVREAVEFAKARGFDVLA

SEQ ID NO: 276400 - protein, 343 aa, unidentified
MGDVITIGVDLAKSVFQVHGVDAGGAIIVRRQLRRRQVLPFFEKLSPCLVGMEACATSHHWARAIGQLGHRVRLMPPRYVKAYVKNQKNDAADAEAICEAVSRPTMRFVEIKTTEQQSVLILHRTRQMFVRQRTTLINAIRAHLAEFGIVAQIGRNGVDVLLRIIGEHEDSRLPEVARSCLKALVTQLHLVKRQILEADRRILAWHRSNETSRRLDSIPGVGPLVATALVASVPNPQAFKSGRDLAAWIGLVPKQNSSGGKERLGGISKHGNRYLRMLLTVGALAVIRYAETHGTAHRPWLARLLARRPAKVAAIALANKIARMAWVIMARGERYREPTLQTT

SEQ ID NO: 276401 - protein, 352 aa, unidentified
MKLTKHSYEGKRVFVGLDVHKKKYAISVICENKLVKHWSCEADPEEVAHQLNRYFSGAEILSAYEAGFSGFSLHRILVSAGIKNIVINAASIELAKNDRVKTDKKDALKIAEHLSNGRLRGIYIPTVKEEAARSLSRGREQAVARRTVVANQIKMKLHYLGLKVSGLDTKLSNVLLKKIENLDLDPSHKFALDELISSWRQTTASIGRFDEALKEQANKDVLEKTYRSAPGVGAVTARVLSNELGDMSRFNNERELFSSTGLTPSEHSSGESVRRGHISRQGSSRIRAILIEVSWRAIASDASLREFYLRVSKGRNGKKAIVAVARKLIGRLRSCFASKTVWRDLACATNAG

SEQ ID NO: 276402 - protein, 394 aa, unidentified
MPNIYLGMDVHQRSITLAILPADATAPTAIEQVPNEPGPLRRRLARLTEAGPVQACYEASAAGFVLHRALTSWGHACTVIAPSLIPTKPGVQRKHDRYDAVQLARLFRAGELTAVRVPDPAAEAIRDLVRCRETVQRELLKSKHYLLKFLARRGLVYRAGTLWTLPHLAWLEGLTRPASPLTGDDRTTFEEYWALFQFKRERRLVLDRRLAERATDPALAPAVQRLQCFRGLQVHSAMVLATEIGDWRRFTNPGQLMAYLGLVPREHSSGGREWRGGITKAGNSHCRHVLVQAAWSYRHRPKVAAALRARQRHQPAPVVAHAWKAPQRLHTLFQHLSYRKESRIAAVAVARELVGFLWAVMQDTPTAPAPAGRGTSPEQKGDGGCSGHDLGEPS

SEQ ID NO: 276403 - protein, 377 aa, unidentified
MRKVALDLGTRKTAFCEVREGRVVGRATVAAVDSLASLLGPEQPRAVVAIEACREAWHVHDLLTSWGNEVVLVDTTRSRRLGIGQHGRKTDRIDAEVLALALERGGIPVAHVLSPHRRELRRWLNVRRSLVESRAQMVTTARGIVREHGDGLPRCATAHFARNARKHALDAELRAVLEPLLKLLDTITTELEVVESKLTKLCATEPVVTQLATIPGVGPIVSASFVSVIDEAKRFRSAHHVESYLGLVPNEDTSGGRRRLGAITKKGNKYLRALLVQSAWSILKSADRHDPLRIWADSVAARRGKQVAVVALARRLVGVLWAMWRDGTVYDAASLAHASSKGTRKAAQSVEFRAAALASAAKKLSNGLATKEVTPET

SEQ ID NO: 276404 - protein, 313 aa, unidentified
MNTPITHLGLDIAKLTLDLSPHPSIRSVHFTNDASGHRKLIAQIRRIPGPVHVICEATGGYEHDLLQALHSADIPVSLVNPRQARDFARSKGFLAKTDRLDAWMLSEYGRSNAPKPTQPVSPVQERLAALVSRRQELVGIRTQERLRAEHHHDPFVVRHSRSFLRLLDTQILRVEKELESLQKEDQQLNARVERLGTIQGVGKRTAWSLLAELPELGKMKRGQAAALAGIAPYNHDSGPRRGQRHIAHGRSAARSALYMAAVVAARCNPVLKPLYQRLRTAGKPAKVALVALMRKLVELANLLLKYPSLSLNQ

SEQ ID NO: 276405 - protein, 355 aa, unidentified
MSQEKYIGMDVHQATISVAVLDSKDRLIMECILETKAVTILEFIQGVRGTLAVTFEEGTCAAWLHDLLKPHVSQLVVCDPRKNALLQDGSKSDRIDARKLAELLRGNQLSPVYHGDHGVRTLKELGRSYLTITKDLTRVMSRIKALYRSWAIPCSGTTVYAARHRSEWLAKISQPGVRLRAERFYQQLDMLRALHQEARRDFVVESHRHPAVKLLRQIPSIGPIRAALLVALLQTPQRFRTKRQLWAYSGFAVETHDSGEYRYVRGKLLRNRERISVRGLRDNYNRDLKNLFKSTAISASTRPGPLRDFYLALLAKGMRPTMARLTLARKIAAITLAVWKKGVDFDAKQLDQQAA

SEQ ID NO: 276406 - protein, 480 aa, unidentified
MAKRSKSAFERLGCNRLNRNQRRELSRRIAAGDPGLSIVNPNAGGIDVGNESHFAAVPSDRDPDPVQEFGCWTADLNRMAKWLVACGIDTVAVQATGVYWMALDDVLTKHGVRVVLVNARNTKNVPGRKSDVQECQWLMKLHTYGLLRDSFRLSKEMESVRTIWRLRDRHVAEAGRAVQHMQKALTEMNIQVANALSDITGVSGMKIITAILDGERDPYRLADLRDKRVKASREEVARSLEGNWRKDVLFELRQALDYYRFIHEQMRECDRQLEVYLGKLPSALEIPVAAENPEASRKRKTKKARENQPRIPHLEAELTRICGVNLCSIDGISIITAQTIIAEVGTDMSAFPSEKNFSSWLGLTPGKDISGGKVVGKRRKVKNRVAAALRMAATTLLRSESYLGAKYRYLRRQLPSKKAAVKAMARHLAVLVYRMFTYGQAWVDRGAAHYHQKRTELDMARLESIARAKGFQLIPMAQAN

SEQ ID NO: 276407 - protein, 364 aa, unidentified
MLLMGCDYHPSVQQVAGVNSETGECGERRLTHCAEAERFYRELQQQGTSVCVGIEATGHSRWFERLLAELNFELWIGDPAQIRAKQVRKQRNDRRDAEHILKLMLKDDFPRLWVPTPENRDVRQLVWHRHRLVQMQIRVMNQLQAIAMNEGVRRKRGLWTQQGRAQLEALTLPPWTTRRRQELLELLDRFDPNIDELSQAIEQEAQRRPEVERLQTHPGVGAITALAYVLVLGTPDRFRCGKQVGSYLGLIPCEESSAEHWRLGHISKQDNALLRYLLAQSALSAARVEDEWRRQYAHLAMRRHHGIAKIAMARKLAVRLYWMWRCGWDYQQLREFGSHVGVARVSTWCAVITAQLIAAPRSLS

SEQ ID NO: 276408 - protein, 478 aa, unidentified
MQDRRLVGIDLGITSAHTVRVLAGDGSLVCRRKAIPTVDSLEQVEQAALAGTPAGTRLEVVVEPTGPAWLPIAVFFSARGHTVYRVGSAKAHDLRRVLSRHAKSNGIDADTLARLPLVDPAGLHPLELPDAARAALDRRVRATDRLTRQAAGHKRRIKDLVHQLLPASPLTGELGQADLAVLERWADPHGLVAAGHARLQRVLASASAGQQGAQRAQQWLAAAHAALQLYGDHPAIAFQDLAAEVATEVRLLRATQAELAAHATKREACYRRVDPLALARSLPGLATVGGPALVATMGTASRFPTAATFRSFTGLAPKASETGNTDRKGQPISKAGNRLLRTTLVRAADHARRQDPQLARIYWTQMVQRGKDHLGALCVVAAHLGERAWVVMDRGLPYVLCDTDGTPVTPAQAKAIIADHWTVPEQVRRRRRSRKGKAPQQVLTGHVTGAQGATRRPSPSPASLGRRNALVKPTQPQP

SEQ ID NO: 276409 - protein, 392 aa, unidentified
MNTLRVAVDVGSRFHQVAIGDGSGKLLDEFQIDHGRAGFEQFFARISRHAATDVRVAMEGYNGWARPLDQQVLARGWRLYNVNNLKLARYKEIFPAPAKSDAIDSRRMLELFGFDEQRPLGRDVLQEVTASTTTQRELKYLTRRRRQQVADRTKCLTRLQGDLLAVCPDLLALTRSVNNLWFLRLLTCRDRLTALPRLHEKTITSIRGIGAKTSPRILAWQKTATFGSSIDLADTDIVADAAAIVALNEQIKALETRIEAIALTCPMASRLRTMPGFGVIGTAELSGEIGSLHRFDTEASLALYLGMAPLDHSSGLRHRGKRPKCVNSRCQAALMTSTVRHIACVPESRAYYDRKCAQGKRHNQAVRALGRHLVRVIWRMLQDGRDYRTRDE

SEQ ID NO: 276410 - protein, 503 aa, unidentified
MTAPTARRRPASAPTPGAQQAQAHRQAHNRRKARAKAKSEALHQREVARVEALPVQHPHAAGIDIGSRSHWVCVGFASEAGSCLIQEFPAHTAGLKAIAAFLREHQVTTIALESTGVYWIPLYELLQAEGFEVLLVDPSYSRQLRGRPKTDRRDCQWIYRLHSVGLLAPAFRPDEQTCQLRAYLRQRGNLVRQASRHVQHLQKALEQMNLKLTEILSDITGVTGRAILQAILRGTRAPEKLAKYRDKACKASAAEIAQALTGSYREEHLFELKLAYEAWQFTLGQVAKVDEQIALQLGRMKGDRALPPLKRKARPKRRVNSPRFDVRTALYYVVGLDLTEIEGISELTALTVISEIGPGVSRFATVKQFCSWLGLCPNWKKTGGRIKSSRTRRGVNRAAQALRLAAQSLHHSRGALGGFLRRMKARLGAQAAVTATAHKLARIVYLALKHGMTYVRQSQEEYETQMKEKQIKALRRKARQLGLEVVERTSASVPTATAASAQG

SEQ ID NO: 276411 - protein, 369 aa, unidentified
MDYKIGCDAHKHYSQFAVLDQDGRLLAQHRVEHQPGAIQAFLENLPEGSPVALESVGNWYWIADEIEAAGCVPLLTHAAKAKLMMGNVNKTDKLDAKGLAKLLHLDSLPTVWLPPGEIRDERELHRTRMALSKLRTALKNRIHATLAKYGITTSEHSDIFVGAGRAWLETALSRLPPETGRCVAQELEALDALQHQIAQLEKRIRERVALTPSIQLLKSLPGIGDILAIVIEREIGSIDRFGTAGQLASYAGVVPTVHASGGKTHFGHMRKPSNQYLKWAFIEAANVVVRHRHHPAWRTKYVSRVYNKVCRRKGHAIAVGAVARHLAEASFWVLKRQQPYRPPAVRQVSPKQVQGRAQHVPTEVRELIA

SEQ ID NO: 276412 - protein, 338 aa, unidentified
MNYMGIDHHKQYSHITMLNEKGKKLKSGRVANYRSELERFLDCSGEVKAVIEAGRSSYTMVDLLDELSIDVTIAHPLQVKAIAQAKIKTDKRDSFMLAHLLRTDLIPAVYKRSQENRGYQRILRQRAFYVGSTTRTKNKIRALLAQQGEELRDKVSRKKNLFTGSGIKFLKTLNLPDTDKKLLSALLKTFNHLEERKKETNGLVEKLYQEIPEARLIQTVPGYGVFLSVLTAVEIADIERFSEVSKFHSYAGVIPSTHSSGERTYHGKIIKQGNRWLRWAAVEAVWPSLKADFDMRCFYNKLKKRKGPNPAKVAAARRMLTIIFRILKEKRPYIPYKR

SEQ ID NO: 276413 - protein, 346 aa, unidentified
MEHIGIDVHKRESQICMLRESGERVECRIRTDRERFAQVLGGRAAARIVLEASTESEWVARCLEALGHEVIVADPNFAPMYATRSRRVKTDVRDARALAQACQLGAYRRAHRTSDAQRTVRAQLAVREALVRTRTRYIAVVRALLRGAGIRVPGLGSPRTFTTRVAALAVPAVLARQLAPLVGLLDQLTAAIATADGGFAQHASAEPIVQRLTTVPCVGPITAAAFRAAIDDVTRFRDAHQVAAYFGLVPRERSSGDGHYRGRITKSGNGRVRWLLIEAAWRLRRSTTPDVAPLQAWAARIAARRGHRIATVALARRLAGILFALWRDETFFAAAKLRRPATVQAA

SEQ ID NO: 276414 - protein, 360 aa, unidentified
MLYLGIDVHRKQLTVSVRNEAGEVIVRRQVSTEWPRVRAFFTELTERARPEGGYVAMLEVCGFHDWVLKMLTEYGCRETVVVQPTTRTKKKTDRRDAQALSETLWVNRQRLAAGQPIRGLRRIQPPSAVDAENRQLTTLRARMKQVRTRTINKVHHILLKHNLHQHCPTKGLATKGARAWLTALKLPELDRLEMDLLLAQWKLWNHQLEKVEAQIARRQKQSPTATLIATVPGAGAFGSLALAARMDNIERFPRPGSLANYWGLVPSVRNSGETTDRLGSITKEGSRLARFVLAQMVLHVLRRDPTMKQWYQRIKRRRGSKIARVAVMRRLATILWHMVKHQEPYQVGGLPRRQLSAAAG

SEQ ID NO: 276415 - protein, 311 aa, unidentified
MTKSVVGVDVSKGKLDVGVSDEKRVQTWTNDASGCTGLGEWVVEQGVSLVVVEASGGYEAALVSELVSRGQAVALVNPSRVRAFARAEGIIAKTDKIDAQVIARFGATMKPQVTARRDEAQVALTEQVSRRRQLVLILTGEKNRLQTASPAIQAHIARHITWLQTEIELLEQQISQSIAAHPQWTETVQRVDSVPGIGYITATTLVADLPELGQLNRQKIAALVGVAPFNHDSGKHRGKRRIFGGRTSVRSVLYMATLSAIRYNPVIKEFYQRLLDKGKLKKVALTACMRKLLVILNTMVKSGQDWNPAIS

SEQ ID NO: 276416 - protein, 333 aa, unidentified
MVEGTEGSHHKEGSTKMRQHNMVCAGIDTGKRKLDVAIAGGPHRLQTGNDADGHATLSAWLRRHGVKRVGIEASGGYEQAVVAKLRRDGLVVIVFQPAQVRAYAKFHLQRAKNDQIDAALIAICTAATHTIHAPPDPRLAPFAEHLTLIEQITEDIAQVKTRRETCRDPRIRRLWDSEIARLKQLLRIEFKALVATIRQHSDLAERLDLIASVGGIGLRTAVAILVRMPEIGRVTREQAAALAGLAPYDDDSGDHLGARHIDGGRERLRKSLYTAALPAAFHWNPQLTVIYRRLIAAGKPHKVALVACARKLLIYANTVVERGTPWTKRPAAI

SEQ ID NO: 276417 - protein, 344 aa, unidentified
MTYYAGLDISPRSANICVVDNQGELIAEGKTDTDVANIVAYLDELDVEITEVGLEAGTLTQYLTYGLQFAGYEVVCMEARQVKSALSAMRNKTDKHDARGSAQLLRSGWYSRVHIKSMESHRVRALLTSRKAVLAKCIDLEQEIRGIFKIYGIKLPSRLGHGSFDPHVRPLIEADEVLSLSLLPMLDARLVLYRTFPELDNRTRKLALNNPICQRLMTAPGVGFVTALTFKAGVDDPARFKHSRTVAAHFGLTPRRFQSGELDLEGHISRCGDASVRSTLYTAANAMLTRSSKWSSLKAWGMQLAKTRGHRRAVIAVARKLAVILHRMWIDDTQFRWGTEAARS

SEQ ID NO: 276418 - protein, 363 aa, unidentified
MVGNRTSVGLDVHARSVAACGLDGQTGQLFERRLTPDRTEIAAWVAGLPGPVAVTYEAGPTGFGLARYLLERGIECRVAAPSKLQRPCGDRVKTDVRDARHLARLLHLGEIVAVAVPSVEQEAARDLVRARDDVRGDLMSTRHRLSKLLLRQGIVYYGGKPWTANHDLWLRAQRRGEVLTRPGLALAFDIAYDTMLATVARRDGLDAAIAAMAADSEFTAVVTRLGCLRGVSTLTGFGLAVEIGNWHRLSGRSIGAYLGLVPTESSSGGTRSQGSITKTGNGHARRLLIEAAWHHRKPDRIGADLRRRQDRAGPAARDRGQRANRRLHARWARFDVRGKRPVVANTAIARELAGWCWSLAILD

SEQ ID NO: 276419 - protein, 319 aa, unidentified
MTRNRIGVDLSKDALDVFDPIRGETRIANARAPIARWASRLGPEDFVVFEATSGCDRVLRAGLEAAGRDFVRLNPLHVWHFARSLNLAKTDRIAQNARFQRDARMLARFGAERQPAPDPYGDPVREVLRALSHRRDQLKRMIAQEKNRLGDAGHPLVVRDIRAGIAGLERRLAAFDKAIAEHIARHPALAEDAGLLRSIPGIGPVAATEILAHLPEAGRVDRREAASLAGLAPRAHESGKYQGKRRLGDGRRHLRRAMYMAALSALRHPGFLSDFVARLKADRKPGKVILMAVARRLLVIANAILRSRTPFKTQVSDAA

SEQ ID NO: 276420 - protein, 418 aa, unidentified
MKTYILRDPKTVEPQTSPRPLRPEPDLTALVNVICGPPVPPPPLLAGLVLFIGLDVHNDSIAVSIAPSDSTEVRRYGIIGGEHDDVLKLVKKLQASHPGATLKFCYEAGPRGFALCRCLRLHGLECILVCPSKVPRKPGERVKTDRRDADQLARLYRAGELTGIYVPEPVDEAMRDLIRARFQVGKAQHRARQQLKMYLLRHNLRYGGQTPWNAAHLRYLAKIKMPFAVQQIVFQEMLEVISEATARLERYDQEIERAVPGWRWEPVVRALMSLRGMALLHAATLVAELGDFNRFDHPGQLMSYLGLVPSEHTTGTDRQQGGITKMGNGPARRALVEAAWQYRAPARISPHLKKRQEGLPKAITDIAWEAQRRLHHRYNHLTRVGKKKSQVAVTAVARELSGFVWAIARQVKPHPAKP

SEQ ID NO: 276421 - protein, 337 aa, unidentified
MKYCGIDLHGNNHWVVILDEQDRVLYSRRHANDLSRLLPVLAVHRSELSAIVVESTFNWYWLVDGLQEAGYRVLLANTAAIKQYEGLKHRGDESHARQLAHLLRLGLLAEGYIMPKEMRAVRDLARKRMQLVQQRTSQILSIESSLSRHCGWKLSSNRIKCLRQGELDEMKLDALPLRGIQANVAVLRALQGQIESLEQVLGEYCRDEPGYPLLRTVSGIGTVLATVILLETGCVERFPDAGHYASYCRCVGSAYLSNGKKKGEGNTQNGNRYLAWAFVEAANFAVRHCEPARRFYQRKKAKRNSIVAIKAVAHKLARACYHMLKLQQPFCVERCFA

SEQ ID NO: 276422 - protein, 426 aa, unidentified
MKPNNPPEFTALIGLDWGDKSHAIALEPAGGSTETSTLEHSAETLHQWLDQLEQRFGARQVAIAIETDQGAVVYALLERPWITLYPIHPATSTRHRTMFRPSGAADDLPDALVLLSLLQHHRPRLRPLQLDDETTRTLARLVEARRKAVDRRTLLLNQLVSTLKNYFPQALELVGEDLCTDMALDFLSKWPRLIDVQAAKPATLKSFYHRHNVRRPQLIQKRLDRVRSARLLTRDSAVIEVSVRVVRLLVAELRVLVEHITAFESAIAQDFARHPEKAFFSELPGAGPTLAPRLLAAFGTIREQYPEAASMQRYFGVAPVTEKSGSRAWIHWRWNAPTFTRQTLVEWAGQTIVFCPWAKAYYERQRAKGSAHHAILRALAFKWLRVLWRCWQKRQPYNEEQFLRQLEKRRSPIAARARQLALEMAA

SEQ ID NO: 276423 - protein, 413 aa, unidentified
MPNMPSVCKSQAVTHENLRSWITQPEVIDAWVTGLLQRFQGQPIAIALELNKGPIVEALRKYDGLVLFHINPMMLAKYRQAFPPSRAKDDPTDAELQLELLLRHRDKLKPLAPQSAEMRALAQLVEHRRRVVADRIRITNRLTNTLKHYFPQVLQWFPNKETRLFCDFLSQWPTRKAAQLARRSTLEQFFRQHHVRGEQRINERLEAIKRATPLTTDEGVLIPQTLMAQSLVEQLRATLEAIERFDQAIAERAQNHRDFALFDALPGAGPAFAPRLLVAFGEQRERYGSAAEVQTSVGIAPVMERSGKQSWGHWRYQCPKFFRQTFVEWASESIRFSFWARAYYQQQRDKGAVHQGAVRALAFKWIRIVFRCWQNRTPYDESVSLAALQRRGSSLLSNVAKSSKKGEKEAKKP

SEQ ID NO: 276424 - protein, 443 aa, unidentified
MDDERAEVVELETRVEQVARVAAIDIAKASAVVCTRLPAARNPGRRVQRTWAVKATTGAVLQLADRLVADGVELVVMEATGVFWKPFFFLLEARGLRCWLVNARDVKNVPGRPKTDRLDAIWLAKLAERGMLRPSFVPPKPVRRLRDLTRLRKVLTEERSRYRTRVQDVLEDACLKVSDKTEGASDLFGVSGRAMLDALVAGERDARVLAGLARGRMRHKIPALEQALTGQFEDHHGHQIARLLRLHDNLTAEITGLGAEIEAAIAGLDPTPPPDGDHPHRMPLLDRLDEIPGIGREAAQTILGEIGFDMAVFPTPGHLASWAKLTPRTIQSGAKNTHGPTGKGNRWLKGTLGNAAVNASRTKTFLGARYRRIIKHAPKKKAVVAISRNILEIAWILINDPDTRYTDLGEHWHDRHINTARKTRQAIRDLEHLGYTVTLPPAA

SEQ ID NO: 276425 - protein, 407 aa, unidentified
MFCGIDWASQRHAVCVLDDAGKTITAFQIAHSADGFDQLVSRLRRLGDPAGLPVAIERPDGRLVDRLLEAGHPVVPVQSNAIKAWRDAEVLSGAKSDPGDAAVIAEYLRLRHHRLRPLQPFSPQTRALRTVVRTRDDLIAARVAASNQLLACLEAFWPGAKAVFADVCSPIALDFLTRYPTPESAQQLGERRMTAFCVKHGYSGRRPAAELLARLRAAPAGLAGTVEVDARRDAVLALVGVLRALNTSIKDLDRSVVAHLGEHPDAEIFTSLPRSGRISAAQVLAEWGDCRQAYDGPDAVAALSGIVPVTKASGKHRVVSFRWACNKRFRQAICTLADNSRHASPWAAKVYADAIARGCDHPHAIRVLARAWVRVIWRCWIDQVPYDPAKHGATRKLTEMAASAGQG

SEQ ID NO: 276426 - protein, 372 aa, unidentified
MKVTYQTCCGVDVHKSFLVATIVKTTGGIEPSYQKKRFSTFNNSILEFKQWLLDNHCHDVCMESTGKYWVPVFNLLEDKINVVIANPKWVKAVKGNKDDTKDSKWIGDLFRLGLVKGSYIPCKKVRILREYTRYRYKLVSCRSSEKNRYQNALTVCNVALDSVVSDIFGKSSTSIIDYLLEQSGTSINHEEIASKLLRRLKSKEDAVQFLCTIPGVKRDSAITIISEIGTDMSQFSSSKRLCCWAGLTPGSNESAGKKKSVRITRAGVYLKPALVQCAHAAVKSDKSPYYKKKYESLVKRRGKKRAIIAIARMILTAIYQMLSTGEQWNPSDLYKIDMPVALVEKQKAKAIRQAKKLLQREGTLPPDKPLAS

SEQ ID NO: 276427 - protein, 372 aa, unidentified
MQHDSAIFVGLDTSKMKVSVALAEDGRYGEVRFLGDIENTPEAVRRLVMKLAGKSRRLMFCYEAGPTGYGLHRQITALGHDCAVIAPSLIPKRPGERVKTNRRDAVTLARLHRAGELTRIWVPDPGHEAVRELVRAREAAMEDLREKRQHLQSFLLRHGRVFTGRKPWTRAHARWLSELAFEHSAQHVVLREYRQAIEDAEVRLERLTQHVTEVVSSWSMAPVVEAYQALRGVAFLTAVTFVAEIGDVRRFETPRQLMAYLGLVPSERSTGERVWRGSITKAGNTRARRVLIEGAWTYRFPARLSRLLQERQEGLPRIVREIAWKAQVRLCGRYRRLRAAGKRQTVVTTAVAREMAAFLWAIGQQIEPRLAV

SEQ ID NO: 276428 - protein, 334 aa, unidentified
MKDIIYDHYIAIDWSAINMAIARMTKRSNKITAIDVPSDIKELQFYLKNLKGTKILSIEETTTSQWLYTELKEYVDEVLICDPYRNSLLSEGPKTDKIDATKLVQLLKAGLMKEVFHSTDKFIYLRRLVSGYEDLIKAGVRTKNQRYSLLRICGKNGHEGKDFKLDSREDQFVLEGLDRQIQNNTIEKKNYTKEFQRLAKKYPEIRHQKSIPGIGLINAVKIVARIVTPFRFADKGNYLSYAGLIKHEKISGGRSYGKKNPRFCRMMKSIYKSGVIAAIGGNNFIDDYYEHLIKEKNYPAYNARNKACRRLATISFGVFKSGKKYTPYRTSHVK

SEQ ID NO: 276429 - protein, 388 aa, unidentified
MQTVADRPEAPTAIRTDLGAIFVSLELSRSTWLITSLSPGGGEKMSKQVVRGGDVAGLLERFARLREKARARTGKVFPFVVIQEAGLDGFWIDRALQNEGIESHVVDPASIATSRRRRRAKTDGIDGEALVRALLAYKRGEPRVCAMVKAPTPEEEDRRRLCRERKVLIGERVQHVNRVKGLLFSQGISGYEPLRRDRRERLDTLQTGDGRLLPDHLKAQVCRELDRLELLLEQIKAVEAERDVLLAAQQVAAPAPAAMLLDIKGIGPEFAAILWSEGLFRHFDNRRQVASYAGLAPTPWQSGSVDREQGVSKAGNPRLRTTLIQLAWLWLRHQPHSALALWFEERVRRNGGRLKKTTIVALARKLLVALWKYVTAGVVIEGAVMKRT

SEQ ID NO: 276430 - protein, 348 aa, unidentified
MRFYTKNHKHYCGIDLHTKMMYVCIVDQNANILIHKNIPTNSRTFLKLIEPYREDIVVGVECMFSWYWLADLCEREGVDFILGHALYMRCIHGGKAKNDKIDSEKIANIILGKNFPLAYAYPAELRPIRDLMRRRSHLVRIKSEIQSHISITNYQYNLKPFEKNIVHKANRAEVADHFQNPSVRLNVETDIAVMDGLHDQIRRLENHIIKHARHYDGRMLYRLKSVPGIGDVLALTIMYEVLSVERFPTVQKFCSYSRLVKCASESAGKRNGFSGSKIGNAHLKWAFSEAAILFIRGNDQAKRYVAKLTKKFGKGKALSILAHKLGRAVYFMMKRNDVFDMKYFFRTN

SEQ ID NO: 276431 - protein, 436 aa, unidentified
MRGCRCSMIMGFTKPIEHFNLQRKKVITMNTLYVGIDVSSKSNVVYLMLPNGDKHSNFSVANSREGSTQLVKRILSALTSHSLDTVLIGLEATSVYGDNLVYFLREDATLAPFNRKIHVLNPKQVKKFHDTYNDLPKNDYVDSFVIADCLRFGRINKEVYMGEYRYKALQNLTRARFFAVQNLVKEKQRFMNVLFKKYSTMTQEKVFSDAFSTTALAVYDEFESAEALANMDLHELTDFIIEKGKNRFPDPDAVAKAIQKAARSSYRLPKTVNDSVNQVLSISITSMKALESQIKEFDKAIIALMELLPNVLISIPSIGPVYSAGIMAEIGDINRFDNQASLAKYAGLAWKQHQSGGFEAEVTRLIPSGNRFLKYYLCEAAFSLVRCDKEYSDFYHLKYKEVNRCQHKRALALTARKFVRLVFRLLKDNRLYCPTK

SEQ ID NO: 276432 - protein, 387 aa, unidentified
MPQPNDLSRSLVTLEQDSTLIAVIEMGQSSWLVAGIVPGIERQPLKKLTADQDGLLQLLHRWRKEAAQAGHTIKRIAIAYEAGRDGFWLARWLRAREIEVYVIHPSSVPVSREHRRAKTDRLDTELLKRAFLGWLRGEPKHCSMAAIPTVEDEDAKRPSRERESLVGECTRIVNRVKANLARLGIRGFRPRLAHAPKRLDTLRTPEGTTLPANTLAEMQRDMAHLRFVKQQIKEIETTRTKRLQQASEGGRDAMVRLLARVVGIGIETADLLVQEAFSRKLRDRKAVARYAGLTGAPDESGQKRRERGLAKAGNARVRHAMIELAWGHLLHQPDSALAEWYRRRTVHARSGTRKTMIVALARKLLIALWRLVTTGEAPAGLLLRSAV

SEQ ID NO: 276433 - protein, 335 aa, unidentified
MGYDRTVMSEDDDGVEIARVAGLDLGKAEVVCCVRRADPARAGHMIHEVSTWTTMSHCVTRLADMLVGAGVDLVAMEATSDYWKPVFYRLEAHGLNVIVVNAKHFKHLPGRPKTDKLDSQWLARLAGKGLLRPSFIPPADIRALRDLTRDRADLVDQRTENKNRVEKLLEDACIKLCVVATDIFGVSGRAMMEALIAGHRDPQTLADMALGRLRAKKSALVEALTGLFTNHHGFRLRLLLTRIDALDHDIATLDHRIDHALEPYERHRDQLAGIPGVGRINAAAILGEIGVDMTRFATAGHLASWAKDAPGVHESAGKTTGTSATGKGNKYLARA

SEQ ID NO: 276434 - protein, 372 aa, unidentified
MISVGIDVSKGKSTVCILKPYGEIVSKPFNITHTQKDLSELSSMLFRLNDEVKIVMEATGIYHLPVLTYLQEKGFFVSVINPYLMKSYRNESLRKAKTDKIDSRIIANYGIDHWFKMKEFQTSGEIYEELKLLGQQYRHYMKLHLLSLAELTHLLDLTMPGIKNLLASWNETNRKDKRSDFVERFWHYDVITSMSEQEFTEEYILWAKEKKYVPSQEKAKVIYTLAQESIPTLPSETSSFKMLVTEAVRVLKEVDATLGLILSRMQEIAKTLPEYSVVREMGGVGNTLAPKLIAEIGDVRRFRNGKALVAFAGIDPPPYESGQFVGCNRKISKRGSASLRKVGYETMRSLKMRSRPEDPVYRYVVKKESEGN

SEQ ID NO: 276435 - protein, 328 aa, unidentified
MQALLDICCGLDVHKDTVVACIIKNISPGSSNSKDETEVEIKTYSTMLSDLEMLKGWIVENGCRHVAMESTGVYWCPVFETLETAFDGEITILVANARHMRNVPGRKTDVKDAQWIASLLRAGLLNGSFIPDADVRELRQLTRYRRNIVQDVSQQKNRIEKTLQQAGFKLSSFLSDIFGVSGRGLINVLIKKGRVSPSEIDSETKRLSSSKKEEMKFALNGRLSVHQRNFLKLELEHLDSLLAHQAKIEFAISEKTKAFADAAERLDTIPGIAAISAISIVAEIGTDMGKFPTAGHFCSWAGLSPGNNESAGKKKAHASLLETHISKG

SEQ ID NO: 276436 - protein, 349 aa, unidentified
MKIDEVILGVDTHLNLHVGALISNAGKCLGTLAVTADAAGYLKLIAWARSFGPLHRAGVEGTGTYGAGLARSLRENEVQVMEVNRPDRAARRSRGKSDPTDAENAARAVLSGIATAVPKEQSGAAEAMRSVSVTRRSAVKAKTQAINQLRALLISAPQDVRQRLLRENTSDCVTCCSRLRSLGSTPLLQTLTATLVLLAKRWLALEDEVKTLDAMLENLTTQYAPRLRGRFGVGPQTAAVLVAVAGDNPERLKSEASLAALCGVSPLQASSGKTVRHRLNRGGDRSANNALWTIALVRMRSDPRTRAYVDRRIKEGMTKKEIHRCIKRYLVREVYPLILADLAASAKAS

SEQ ID NO: 276437 - protein, 345 aa, unidentified
MKNSNVIGIDLAKHVIQVCKIDKHGELISNKAISPSKLKELLAKTVPSIVAMEGCGACHYWARLAQRHGHDVRVISPKKVKGFLQGHKTDANDALAIAVASIQLGMKFSQIKTEEQQSLQTLETSRKFLDKELVALNNHIRAYLYEYGITLRRGRKSLRETMAIVLDDLDTRLPACLKNTLGLLWERYKLTVEQLTEAEKYKAALVSQLEPCQRLMDLEGIGKVCASMLYANIGDGSEFKNGRQASVYIGLTPKQHSSGGKTYFTGIDKQGGNKELRAALYQGALSVIYKLPSEPRTVKEAWLIELVKRAGVKRTCIALANKTVRTAWALLSTGKSYEPVLLGRS

SEQ ID NO: 276438 - protein, 351 aa, unidentified
MLIVGCDYHPSVQQIAWLDTESGECGERRLLHSNGEAETFYRKLKEQGVSVRVGIEATGHARWFERLLVELEYELWVGDPAQIKAKRVRKQKYDQEDARLLLKLMMEDRFPRVWVPGVENRDLRQLLWHRHRLVQMRTRVMNQLQAVALNEGVRRKKALWSDAGRSQLESFRLGPWATRRRQDLLQLLDQLNSSIAPLTASVEQQAGQHLEAQRLMTHPGVGALTALAYVLIIGSPQRFRCGKQIGSYLGLIPCEDSSAGRQRLGHISKQGNSLLRFLLVEAAQAAVRSNADWRREFLHLAMRRQRQIAKVAMARKLGVRLYWMWRKGWDYETFLQFGSHVGQPEVGYSVK

SEQ ID NO: 276439 - protein, 385 aa, unidentified
MHERCCGLDVHKKTVVACVLTSTSKETRTFGTMTHELLGFVAWLEQERVTHVAMESTGVYWKPVFNLLEGHDFELLVVNARHTKAVPGRKTDVKDAEWLADLLRHGLLRASFVPDRGQRELRELVRYRRTLIHEKTRLITRVQKVLEGANIKLGDVASNVMGLSGRAMLKELAAGNTDAVAMAELAMSNLRPKRQRLAEALEGTVAAHQRFLLRSQIELIEVMEKQIEAINQEVEERMRPFQAALDLIDQIPGIAQYGAEQIIAEIGVDMSRFPTPAHFASWARVCPGTNESAGTRRKTGTGDGNPWLRSALIEAALGAVRAGRAHPNFFAARYRRLAGRRGPKRAQMAIAHSILLRDGALRGPRTGTLGPAPQEERRPAQHPPP

SEQ ID NO: 276440 - protein, 430 aa, unidentified
MKSNTQNAKIEAITEKTLVLGIDVGSETHYARAFDYRGIEYSKKPFKFSNTEAGFATFKEWILDLKERHEKDKVVPGMEPTGHYWFNLGKFLQDNEMKPVLVNPHHVKKTKELDDNNPTKNDRKDPKVIAGLVREGRYMIPYLPDGVYADLRTASNIRFQLQAELTRIQNRISRWFNIYFPEYKTVYGKPDAKSGMLILKAAPLPEDILTLGIDGVNQIWRDAKLRAVGRARAKTLIEAAEHSVGSKEGAMSARMEIRMLLEDYESRNTRLQEVMVLIEELVRKIPMAEKLLEIKGVGIRTVSGFLAEVGDISRFNNPKELQKLAGLALVENSSGKHKGETTISRRGRKRLRYLLFEVAMSLVSKNQEFRELHNYYTTRRLNPLKKMQSLMAIAAKLIRVFYAMLTKGVDYDPKKMVSDIKRSAVYLQAA

SEQ ID NO: 276441 - protein, 330 aa, unidentified
METNTVKYEHYCGLDWAQSNMAAAVISEGSSRVKVLEGMPDIKRLRKFLKSFKGTKRLVIEETTSTQWLFGELVSSVEELVVCDPYKNKLMTYGPKNDRIDACKLAEYGKDKKINIVYHSTSGIMRLRRMVSGYEDIVKAMVRAKNQLSAIYRGECKSYQKKEKLYWNEDKFVGSLKDKEIVFLEEQKNEYEKTFRSYIRKTAVKNLMGIPGIGLIGAVKIAAVVVDARRFKSKSKFFGYCGLAKHLLISGGRCYGKRNTRYSRVMKCVFKTAAMAAISGDNKFRQHYDELVSSGMPEYSARNAIARRIAVTVLGVMKSGQKYIIKEKAA

SEQ ID NO: 276442 - protein, 339 aa, unidentified
MNYTPVGLDIAKHVIQLHMVDFHTGEMVDKQIKRDALLTYFANREPCLIGMEACGGSQYWARELEKLGHKVRLMPGRFVKAFVMGNKNDVMDARAIWLAVQQPGKSVAVKTEEQQAVLAMHKIRHQMVKYRTAQINGLHGLLLEFGETVRKGRSALDKAMPLVLARLEKRQPAALVEMLREQWERLSRFDEQIDDIEKRLKVWAQQDKACQKILKIPGVGVLIATAAVATMGDCRAFRNGRELAAYLGLVPGQTGTGGRVKLLGISKRGDKYLRTLLVHGARSVMLLANDPGEWAKKIKERRPTNVAVVAQANKLARTIWAIIAHDREWQKDYISVRPY

SEQ ID NO: 276443 - protein, 334 aa, unidentified
MKQVNQVGVDVDSEELVCAMQRAGQRMPLARFANTAPGHQKFIRWATKGGHSARVCLEATGIYSLEFALALDQAKKVEVMVVNPRAIKDFGRACMQRAKTDAVDAGGILDYLERMPFVAWQPPAPEVLELQAISRRIVQLNTELTREKNRRHASAFAGASADAIARDIEVNIHHLERRIERMHDNGLKLVRGVPALATKLAHLVSTKGIAEASAMRLLAELLVLPDDLTAPQWVAHAGLDPRPYESGTSVHRPRRISKVGNRHLRAALYMPALVAIQHDPNVKAFYDKLVAAGKKPMQAVVAVMRKLLHAIWGMLKHDQDFDGEKFFKIAKENA

SEQ ID NO: 276444 - protein, 349 aa, unidentified
MLADEVDYVIGVDTHRDHHTLAVIVAPAGAVLAQTVVDANTRGYGASLRFVDKHAPGVRAWAVEGAGHYGAGLARYLAERGETVLEVGRQSRSERRLRGKDDPLDAIRAARAGLAAEAVTLPRSGERQEALRLLLLARRSAVDVRRVALVQLRSVIVTAPEHLREDLRRLPLTQLIRRCSRFRRSHSRTPDELALVLALRSLARRIEAATAEADELEREIIGHVRALVPELLNESGVGPIVAAQLIVSWSHRDRVRSEAAFARLAGVAPLPASSGQTIRHRLSRGGDRQLNRALHTAVLHRRQHHAATRDYIARRAAEGKTSREATRILKRYLARHLYRVMQNASPMTT

SEQ ID NO: 276445 - protein, 338 aa, unidentified
MDNVAVFVGLDYHQAFVQVCVMDRQGQRLGNRECANDWQAITRYVARFGSRVQAAMESCAGAADLCDELTTRAGWSVDLAHPGFVARMKQNPDKTDFQDAHLLADLERVGYLPRVWLAPQPVRELRQLVRYRQQLVEQRRSTKLRMRALLRDQRCAAPPGVNAWTCAWKTWLEKEADLSAQGRWIMGKHVQELDRLAQAIQEVEKRLREATAEDPEVAHLQELRGIGPVTAWTLRAEIGRFDRFRSGKQLSRFCGLSPRNASSGNRQADAGLMRMANPQLRAVLIEAAHRLARCDEKWRSLALRLRNAGKPGSVTAAAVANRWVRWVFHQMQPIAAVA

SEQ ID NO: 276446 - protein, 456 aa, unidentified
MKKKQISLEVINPNAAGIDIGSRSHWVAVGQNAQDVKEFGVYSQDHQELCEWLKEHGVATIAMESTGTYWQNLFSSLVSYGFDVILVNGRQTKNIKGKKTDIKDCQWIQKLHTLGLLSSSFLPDSTTAIIRTYSRHRQNNLKQTAKTVLKMQKYLRLMNMRLDVVVNDIVGLTGTKIITAFIEGEKSGKKLAVYRHYNCRKSEVEIAKALQYNGREDYFFALSQEWDTYLHLQKQLTAIDKQIKAHLEKTIDGDDNKKQHIALEKPHKRKNKNTIKGVDMNQMSYQYFEGVDLMAIEGVNDATIMAIISEMGLEGIKKFNSSKQFTSWLRLAPNNKISGGRVLSHHLPKGSNRLKIAFRLAANAIGNLKEGHLADFFRRINYKKGRATAVSATARKLAVIIWNMLSRGTPYRPPTEYLFLDQKRKLKLVNRIKRNIAKFEIKPEDVGFGKSLNIST

SEQ ID NO: 276447 - protein, 410 aa, unidentified
MDVVYERCCGLDIHKQLVVACLVVPGTNEQPVKAVRSFGTMTADLLELADWLSGAGCTHVAMESTGVYWKPIYNLLEAQFTLLLVNPKHFRAVPGRKTDVRDAEWLADLLRHGLLRASYVPARGERELRELTRYRTALVRERADEVNRVHKTLEGANLKLGSVATDVMGRSGRRILSALAAGQTDPAVLADLAKDKLRKKLPELERALAGRMGAHQRFLLAQQLQHLEFLEQAIDRVSAEIGERLRPVEAELGRLVTIPGVGRRVAEILVAEIGTDMSRFATAGHLASWAGMCPGQNESAGKRKSGRTRKGSPWLRAVLVEAAHGAARSKDTYLAAQARRLKGRLGWKKAMVAVGHSILVRAYYLLERKTTYEELGGDYFLQRDQHVLERRYVRGLERLGYKVTLESDAA

SEQ ID NO: 276448 - protein, 343 aa, unidentified
MKLTRVGVDLAKQVFQVHGVDRAERPVWCKRLKRSRWIADLERDVEPGAEIGMEACGGAHHWARVLQAKGYRVKLIAPQFVKPYVKTNKTDANDAEAICEAMSRPSMRFVAVKTVDQQDLQAVHRVRSSLIRERTAKANQLRGLVYEYGLVAPREISSLRRAVPQWLEDAENGLTLRFRSLLAGLYRDLQQLDERVRELDREVAAITREHEPVRRLMQINGVGPLIASALYALVGDARQYRNGRDLAVALGLTPRQHSSGGKEKLLGISKRGDKYVRTLLIHGARSALRTAPSRTDRISRWALALAERSHPNVAVTALANKTARVAWAMLRHGANYEPERVAA

SEQ ID NO: 276449 - protein, 341 aa, unidentified
MKKFIRTAIDLGKTYFQVHGLESEGGPSISRKMKRSKMREFYEQIEPCRVGMEACGSGHYWARELVAMGHEVMLIPPAYIKPYIKRGKNDAVDAAAICEAMSRPGMRFVPIKSADQQAVLMLHKTREMFVKQRTMSVNALRGHLAEFGIIVAKGIGRVDELLALAQSDAELPQIAKSAVAGLAQHLEGLDQSIEAVGDEIARAHKQNPTSRLLDEIPGIGVLIASVIASSVPDPSVFKTGRDFAAWLGLTPRQNSSGGKEKLGSITKQGNRYIRKMLVVGATSVMRVAGKRKGALADWINALQAKKPKRVAAVALANKLARICWAIMTTGEGFRVDTYVKA

SEQ ID NO: 276450 - protein, 429 aa, unidentified
MDSDYANRLRWFRQFKASAQRRKKVLIVGIDIAKDQHHAFMGTADGCSLCRRLIFENSLNGFADLLSEANRHLNDEALDDVVFGVEPTSVYHKPLAEYLITMGYWVVYVTNNAIKKNRALLDGRWDKNDTKDAANVADLVSRGKCHFYDFADIDLRDIRNLLSLRKRLKKQEHRLMSRIRNNLVAQYFPELDRAWYSCQHENLSIVRWCLWPGKITQLGFDEFCRLVTTTRRGIGQYQRLRHIYQVADESIGCTPGASVDFEAKLLVDSLQTVRSQIDMVAQHLHSSCQHYCHEYEILQTIPGFGPFVSASVLGGIGYAQRFENAKQVLRLAGFDLNAKRSGKTSRSAVPVISKNGKADLRYALYQAAKVATGKTAEFKAYFAHLLQGREKEKGIITKMRVKVAAKMLVIAWTLLKTKQAYQPGLLTIR

SEQ ID NO: 276451 - protein, 482 aa, unidentified
MKKRNIFQNRSQQLLRLFEKAGNRLKMMCVPIDYAKRDHMVMFCNGYGDILRKPFSVKNTLEGVKYLIDQVMRSCRQRRIKKEYVFFGGEDVNSYAENFANALRTKGFLVANVNAHDAKKQRETLQASTDRIDLMGIATMLLNLRAKCSPAQDGKYRNLRTLVRHRKKLVVMKTEVKNRVHTLVDRLLPGFLNEKNTGINPFSKSSLVLMEDRFSAQQIRRRQKSTLIKILKRCATPDAEKIAAKLHSYVTQVITTPDEYAATLQLSLQHHIKHYRCLQENIDQLLSEIALVLAQTQAAFLTSIKGVGIVLAAGVSSEIGDPFGQKPLNNLTSYCGIIPRVKQSGGIEGHTHTGRVSKRSNHLLKDYVVQSAFHIGIRGPQPLLQDYKRRDAAGQHADFGIGRRFLRMAMCLMRSSQVYLPPKLRNPKTQMQERAGYYLTAWPLLRDKWKKAHAHQAAFAKDQPLGQWRQMVQELYDIKLKL

SEQ ID NO: 276452 - protein, 343 aa, unidentified
MQTVTTIGLDIAKSVFQVHGVDAAGNIAIRRQLKRRYVLLFFGKLPPCLVGIEACASAHHWSRELQKLGHTVRLMPPAYVKPYVKRHKNDATDAEAICEAVTRPNMRFVPTKTAEQQSCLTLHRTRHLFIRQQTSVINAIRAHLAEFGIVAPVGRNGMEQLLEVAADASDKRLPDVARACVAALGAQLRTLKVQILQFDRMITAWHRSSEASRRLDDIPGVGPALATALVASIADPRAFRSGRDFSAWIGLVPKQNSSGGKDRLGNISKRGDRYLRSLFTIGALAVIRYAKIHGTKHRPWLTTLLMRRPAKVAAIALANKMARMAWAIMAKGERYKEPAALAA

SEQ ID NO: 276453 - protein, 318 aa, unidentified
MTEIVCGVDVSSQSLEARIGRQGASASFPNTPAGIAALGSFCQAHQAGLVAMEATGGYERQAFALLSEQDLRVAILNPRAVRQFAHSMGSLEKTDRIDAGMIAWYAEVKQPPPACLAPASQQHLRALVTRLRQLTELRVAQLNQQRLVADRAVQASFQKLLTVLARQIRDLEQRIAALLEQDPLWRELDRAFRTIKGVADRTVARIMAEMPEIGALSHKTVSKLAGLAPLANDSGLHQGKRRVRGGRAAVRDILFIVASVVGRYEPDFIAFQKRLRAAGKPPKVVRIALAHKLLIRLNAKAREVRARFAASNQLASQS

SEQ ID NO: 276454 - protein, 404 aa, unidentified
MKSVYENVAAVGMDVHNKFSTVTMRDAQAKVVRREKLEHGDRAALRERLSQWHPEAPVVMEASFGWGWLADEMTELGMHPALSNCFKVEQMRKSRGLAKTNRKDADLLSLLPFEKEDWWKVWLAPPEVRDRRETMRYRSSLVAIQTGTKNRISALLQRHGVMHEFSDLFGVKGYRFLEELGREGRWSQGQLLPGARQGLAGLLELLDHVRKQLAQVSRRLRAELEATDLTRRLDGVPGIGMILAHTIQSEIGKIERLRNHRALACYSLLAPMSNDTGEDEPGKAPLGRHLGHRGNRTLKWAFIEAAHAAVKRGGKWRKIFDEATEGGRRNRNTGYIKVARELVKVVYVVWKKNVEYTDTPPARPGSRKPSYSPPEEPRRETAREFFGCTRSGTGQSSRPMAAVQ

SEQ ID NO: 276455 - protein, 348 aa, unidentified
MLIIGCDYHPGFQQIAFVDTETGECGERRLTHREEAEQFYGGLRQRSVRVGMEASGHARWFERLLRDLKFELWIGDAAEIRTKRVRKQKTDRQDAQLLLRLMVEDRFPRIWVADAENRDLRQLLWHRHRLVQMRTRVMNQLHVVALNEGLRRKKALWRPAGRSELESLVLARWASRRRQDLLDVLDQLTPKIQELTRALEEEVEKRPVTRRLATHPGVGPLTALAFELVIGTPERFQCGKQIASYVGLVPSEESSGDRRRLGHISKQGNSLLRFLLVEAAQVTVRSQPQWRSKFFHLALRRGRKIAKVAMARKLAVHLYWMWRQGKDYGQLEKLGSHAGEPGNRHGAH

SEQ ID NO: 276456 - protein, 340 aa, unidentified
MEKRYVGVDLHRNQFTVCVRLEKGRTYLRTWRLEALPQFVKQLRAGDELAVEVTGNTRLFHDAVAPHVGRVVVVDTNQFRVITQSVRKTDAHDAERLALYLAKGLLPEVRMKDKQHSQIASLTQTRDTLVKQRSALKNKVNNLLSAHGINLAKEALSSEKKLEEVLGLSFDRLVQLELRVIIGQIRSLNQSIRELENTIGEEGSQLEGHRQLTSIKGIGKITGAILLSVIEDVNDFPDEHRLASYFGIVPRVSNSNATEHSGHIHKRGSKLGRTALVQSALVAAKYSPYLKNFYQRVKNRRGAGRAIIALARKFLGIIYRTLKHQWVFEDFPNFVLAEGA

SEQ ID NO: 276457 - protein, 419 aa, unidentified
MNRIETKKQKIVNAKTLIVAIDISKTTDMGYCRCPSGEEMKSFEFSNNIEGFRTLWDRICWMKLSHHLEEVVVGFESTGAYGEPLVHYLRQKPVKLVQVNPMHTKRIKELEGNSPGKTDRKDPKVIADIISLGHALTVVVPEGAAAELRKLTLARERGIQRRTALYNQLQDLVFSLFPEFMQVLKDIKTKSAHYLLRNYPRPQDIRECGVEPLGSILKRVSRGKLGSAQAQALYEAAAESVGLREGTQGIVLEIEEILSALEACNRFIEKLEEEMLPHLEQIPYRDSLLSVKGIGVITVAGLVGEVGDFRHFHTLREVMKLAGLDLFEISSGNHTGNRHISKRGRPLLRKLLYFAAINTVRKGGIMHASYQRHLDKGMPKTKALIAIARKLLRVLFALVRDHSQYVQSYSKKEVLKLAA

SEQ ID NO: 276458 - protein, 357 aa, unidentified
MQEKLYVGVDLHKTQFTICVINEEGDSFEAGTKFPMDKEGYIAFADKMKKLSRRHDGATVSIAIESTANARFFRDIMEAKGFEVTVVNTLRFKVVNLSTKKTDKNDAKTLAEFLARDILPKSHLCRPESESLRRVLKSRTLMVQDAVALKNQAHAVMLAYGYITQPAQFQSKSSRTKLLARLPAKVKEIIEIIFETLDLVESQTHVLERRLRRITIDNECVNLLMTIPGIGIVNACTIYAYTDDIDRFESYKNFSAYCGLVPWVQTSNESVYYGKITKRGPQELRTALVQCVVAMVRMPGKTADLGIMKQYHQLKDDKSSGKAIIATARKLSRIIYVMLKTMTPFDSAKLIKDDPKE

SEQ ID NO: 276459 - protein, 343 aa, unidentified
MSNDTRIAVDVAKAVLEIGISDRPGHVLRRERLPRAQFLAFMAQQPAATVVMEACGSAHHWGRKIQGLGHRVVLLPPHHVRPYVRRNKTDRTDTKGILEASRNEDIRPVPVKTIGQQVLTSLHRLRSGWMTERTARLNALRGLLRELGVFIPMGAREVVPAVWSLIEDADSDLPEALRPIFAEACREIREIEARIKQVERQLEATAEQLPAVEYLRTIPGIGLLIATALVAFLGDIRRFPSGRHLASYLGLTPREYSSGLKRNLGRISKRGDGYLRTLLIHGARSVLIHARKEQPDRLREWANKLATTHVHNKAAVAVANKLARIVWAVWSHARPYGLMTTTV

SEQ ID NO: 276460 - protein, 459 aa, unidentified
MYTIGLDLAVQAAHKAVVADEQGRFITPILTLRTRPRELDQLLTRARNGKPDMALRVVMEPTGMAWFPIAVYLIRHDVTIYLVNSQEVADLRRYYKRHAKSDRIDARVLARLPLVNPEHLHRLHLPSAKASACQRSCKQLDRLGTLISAIQNRVQAIDRFAWPGLEEQVFADPFAPAARWMRTHWYEPQRVLEAGVAKIREQLQASSEAADSTGEWVEALVDLATEVIALYGAENQYLDFAQLQAEVCREQEWLTALEQQHQTLRKKIVRPLYRQIHPSRNLETLKGVGQDSAAVYASFIGEAERFSSTRVFRGWSGMVPDSAQSADSEAKGLHITQAGPGLIKKFAYLDAEIARRWDPQMAAIYYDQVINKGKHHKQAVCACATHLLDRVLVVLREDKAYELRDVDGTKVSVEQAQAIIAERYTVSQEARQRTTKRHRKAQAERQAERNSKGKGAEAW

SEQ ID NO: 276461 - protein, 338 aa, unidentified
MKAYAGIDLHSSNNYVGIIDENDKRLYGKRMPNELNYVLTALEPFKDRLEGVVVESTYNWYWLVDGLQEHRYKVHLANPSAVKQYEGLKHTDDKWDSFWLAHMRRLGILPEGYIYPKKDRAVRDLLRRRLFFVKHRTSNILSLQSMITRNLGSKMSGNAIKKLNENDANELFDCPNLAFMAKNNIAAIAFLGKTIKGIERQVKPQVKLRKEFEMLLTITGVGDILGLTIMLEVGDINRFEQVGDYSSYSRCVKSERLSNGKKKGENNKKNGNKYLAWAYVEAANFAIRHSVAAQRFYQRKKAQRDGIVAIKALSNKICRASYYIMRDQVPFDEGLLFK

SEQ ID NO: 276462 - protein, 416 aa, unidentified
MQSAPTTLSSAPPNGLTCGIDWAKDDHAVAVVDSAGREVHRWTVEHTNAGLHGLLRRLARTGVAEVAIERSDGPVVDALLGGGLTVVVIAPSQLKNLRSRYGSAGNKDDRFDAFVLADTLRTDRARLRPLTPDSPATVTLRASCRARRDLVTHRVALANQLRAHLQTVFPAAVGLFRDLDSPISLRFLTRFDCQDRADWLSVNRLAAWLASVGYCGRVDPAVLHARLTAAPRGATGEHGTAAAHVTHALLAALTTLVEQIKALTEQIDEQLDLHADAHIFTSLPRSGRVRAARLLAEIGDCRARYPTPEALYCSAGAAPSTRQSGKHRAVTFRWACDKQLRDAVCDFAADSRHANPWAANLYQRAIDRGHDHPHAVRILARAWLYIIWHCWQDGVAYDPAQHKALQRLTQDHQAAA

SEQ ID NO: 276463 - protein, 413 aa, unidentified
MRVVYERCCGIDVHKQTVVACAIVAGAEGQSVKETRTFETMTADLEALAGWLTRLGVTHVAMESTGVYWKPVYNLLDDRFAILVVNAEHIKAIAGRKTDVQDAEWIADLLRHGLLKGSFIPSEVLRELRDLTRYRTKLGDERKSEVNRVQKVLEDANIKLASVASDVMGVSGRAILAEIVQGQTEATTLAELAKGRLRDKHDLLVKALSGRVRPHHRFMLAQHLSHIEYLDEAIGHLDQQIAEQMRPFAAALATWDSLPGINQRIAEIIVAEIGADLAPFEDADHLASWAGMCPGNNESAGKRKRGRTRKGSPWLRRALVEAAHGAARTKNKYFQALYRRLASRRGKQRAAVAVGHSLLVTGYHLITRKTTYQDLGGNYFDERDRETVKRRAVRRLEKLGYRVELAPLAAKAG

SEQ ID NO: 276464 - protein, 404 aa, unidentified
MGDENSTFYAGVDWGEEHHQLCVVDDRGQRRAQEQVSHDVTGLARLRSQLLRFGPGLPVAIERSEGLLVEHLQAHGHPVYPVSPRIAARARERYKVASVKDDRFDAYVLADTLRFEHQGWRPLSVPSPVLAEIKALTRDRDRLLETQQAIESQLRMILESYHPAPARLFSSVDRQITLSFVLDYPTPATASRVKATRMSGFLTRHHYTGRTSGQVLAERMRANLLTGSAGTVAGKSFSAQSYARLLGLLNSQLAEYDDAIASAVSEHPDAPIFASFPGVGPVLTGILLAEIGEDRGRYPDPAVLLAEAGLAPVTRASGRSHIVRFRYAANAHLREACMWWAFNSMKTSPWAAAAFKQAREDRKQHYHRALRGLAARWTRILWRCWQDGATYDPHRHTSAAALTA

SEQ ID NO: 276465 - protein, 351 aa, unidentified
MDYRIGCDAHKHYSQFAVLDEEGRLLHQARVDHQPGAIRTFLEAHPKGTLVALESVGNWYWIADEVEEAGCVPLLAHAGKAKAMMGHVDKTDKLDARGLATLLHNGTLPTVWLPPGPVRDQRELPRTRMALVRVRTALKNRAHSTLAKYALAPEEEVDVFSQKGRTWLRAGLSRLPAETALCLAQELELLDQVQAQIVTLEARIRQAIEDTPAMQLLKTLPGVANILAVVIEREVGSIERFPSAGHFASYAGATPTVHSSGGKTRHGRMRHQANQYLKWAFIEAANVVARHRTSSGWRRKHVVELYDRIRSRKGHAIAVGAVARHLAEATYSILKKGEPYREFLSSGRARA

SEQ ID NO: 276466 - protein, 361 aa, unidentified
MKKPTHHLIAEVPRSSSTVGITIGIDLGDVWSHYCTLNEDGEVVDRGRFRTSPSGVEKWFTDLPRVRIAMEAGTHSIWVSEQLQELGHDVIVANVRELRAISHSDRKSDQVDAEKLARYARLDPNILRPISHRTVAQQEALTLIRARNVIVRLRTAAVNAVRGLAKPCGYRLPASSTLCFAKRCMAVLPSGLTQALGPVLEQIATMTMKIKHYDRLIKQLTETEYSETQALIKVYGVGQLTALTYVLTLGSKERFQRSRDVGCYLGLRPKRSQSGDRDPQLGITKAGNIYLRSLLVECANHVLGPHGRDSTLRQWGLHLASRGGKQSRNRAIVAVARKLAVLLHRIWVTQEPYIPFYAVAA

SEQ ID NO: 276467 - protein, 341 aa, unidentified
MLEVNIIGLDLAKNVFQAHGSDASGAVLFRKKLRRDHVLRFLAAQPACTVAMEACAGGHYWAREIAKLGHDVRLIAPGYVKPFVKRQKNDAADAEAICEAAQRPTMRFVAVKSEDQQATAMVFRVRDLMVRQRTQTINAIRGHLAEFGLVAAQGLFHVAKLIAEIEDKDSTIPEAARQILSLVVEQLRSLDEKVAMLDREIARRARNDAEAKRLMTIPGIGPISATAVAALAPSAKTFKRGRGFAAWLGLTPLQHSSGGKQKLGETSRMGERTLRRLLIIGASATVRWAMRKGATADPWLSRMLSRKPPMLVIVALANKTARIVWALMAKGGTYRTPALAG

SEQ ID NO: 276468 - protein, 413 aa, unidentified
MALKIVYQICCGIDVHKTFVVACIASTNNNVTTYKRHRFSTYTKGLKELSQWLCENKCRDVCMESTGKYWIPVFNILETTCKITLAHPKYVKAIRGKKTDKKDAKWIADLFKHDLVVGSFMPPQAIRQLRDLMRYRFKLTNFKSSEKNRFQNSLTVSNIQLGNVVSDTFGKSSMAIIEQLLNPASDQPLDIPSLIHGTMKKKIPELEMAVDGFITHEQAAKLQIIRQHFEDLNNRKSDLEDLILCLSLPYTEEINLILTVPSFKNIFSAITIISEIGADMDVFPTAKHLCSWAGLTPTNNESAGKKKSVRISRAGCYLKPLLVQCAIAVVKSEKHPEIRNRYLKIKKRRGHKRAIIAIARMLLTAVYMILKKKEPYNAELYKNSDVLPVSREITVDQAIALAKSQGYQILSDA

SEQ ID NO: 276469 - protein, 344 aa, unidentified
MKISTISIDLAKNVFQLMMFDDQHKIRQEKRLNRAAFLQFIQQHPPCKVVMESCYSANFWGRELQKLGFEVRLIPAQHVSPFVRGNKNDRNDALAIYEASQRPHIRPVPIKTEHQQEILMLHKIRERLIAERIALTNQIRGVLTDFGFVFKLGHQGFLEGLVELESKELSEIKRMVVKNALDDYKRLRERQLQIEIALKKFITESAAAQILLTLPGVGPIIASAFAASIDKGQAFHSAKDFAVWLGLTPKQSASGLRSSMGGITKRGNNYLRKQLVHGARTLLRKASVKPDALNQWITELRCRKHVNCVIVAIAHRLARLMWVLLTRNSSYQAQPAKNLELVSM

SEQ ID NO: 276470 - protein, 324 aa, unidentified
MTTRVSLGLDMAKRTFDAALLQEGRTRHRQFANTPIGFQQLEAWLRQQATAPIHAGLEATACYGEALALFLHQHHVPVSVINPARTHAFAKSELARTKTDKADAALIARFVATQQPPLWTPPPPEQRQLQGLVRRLEALQAMRQQERNRLDLEEATSLLREFIVAHLTHLEDQIRQVQQRLRVHLRAHPALQQREALLQSIPGIGECTALKLLAELPSPLQCRSARQAAAYAGLCPRHRESGSSVRGKTHLSKTGNARLRKALYLPAVVAMRYNPILREFAQRLLERGKPKMAVVGAVMRKLLHQAFGVLKHGQPFNPNYALTP

SEQ ID NO: 276471 - protein, 445 aa, unidentified
MTLSQLDEKRIQIKNKIIIGIDPANEKHQGYIIDEYGISIGKTFSFGNNHNGITTKLWYQLKKRLDPEQICPDKLIFAIEASLDFWQILAAYLENKGYKVALVSPLTTKKTRALPGNDFSRTDPKDARLVAENTKEGFFHWYRKDTAREKAMKTLSLTYNKIRKDLQSNQARLRSQIKRIFPEFLEIVTLNTETGIHLLSKYLYPEEYITMDIETTFNEISKISWRYTQTKLLELQTSATNSIGIPKSIEEKIADKITVTTLITLIKTLKKQQKIIKKELVKMAKESSYFEIITSLHGISDLTASLFLAEVVNPDKYDHFKQIQKLAGLNLRLNTSGNSRSYYKINKIGNSRLRWVVFQMTTETSKYIPEIRIKYLKRQLKQPGYTKNITACSGKLLQLLFCLMKNKQPYEYRAETQVLLVDLEEQYYRKTKKYKTKKSAEPNYA

SEQ ID NO: 276472 - protein, 333 aa, unidentified
MEDKMCLGIDVSKKTLDCCLYDGNDYKHKIFNSNNASIVSKIIKNYKLTKACKVVMEATGVYHTSIFKSFYEKGFNVVVENPLKIKSYSKMKLCRVKTDKADAKLIAEYGYMQVTERTIPHEPYQDELAALLKLIDGYQCDVTRCTNRLEALNNYSINTSIHIASLNRQIISLNKEIQTLKVSIREIIASTCEEQYQLYLSVTGVGPVTASSIIANFGNFSRFEQSKQVANFIGICPSPFSSGTSVKSSGSISKKGNPLLRMTLYMSALTASRKNRACHDLYTRLVAKGKNKKLARIPAGHKLLRQLFAIAKSGEPYDPDYEIKMCENRKNVK

SEQ ID NO: 276473 - protein, 345 aa, unidentified
MELHTIGIDLGKTVFHLVGLNPRGEVVVRKKYSRAQLLRFTANRQVHLIGMEACGGAHFLGRALREQGHEVRLIPAQYVKPFVKTNKSDFIDAEAIAEAVGRPTMRFVPIKSDDQLDLQSLHRVRERWVMRRTAVINQIRGLLLERGMTVRKGRRHLEAALPAVMEDAAGKLSATLRLLLAQLKLELDQLATRLEEAEALIQLTAQESEACRRLDAIPGIGPVTATALIAAIGNGAAFGKGREFAAWLGLVPREHSTGGRQKLLGISKRGNAYLRRLFVQGARAVLQQRSKQSSGLSAWLKQLTASAHHNVVCVALANKLARIAWAVLATGQAYRPPAITAVAAA

SEQ ID NO: 276474 - protein, 338 aa, unidentified
MKVQILGIDLAKNVFQLHGVDRKGRSVLVRRVRREQLLRVIGELEPCLIGIEASTGAFYWQRQFEKLGHAVKIMAPQYVKPFVRRQKNDTNDAEAICTAVQQRNMRFVPKKTLEQQDIQALHRARQRLVNHRTALISQMRGLLLDRGIAIAVSATRARRLIPKILATADDELTVLMREIVSSLYAFMLQIDERIRAFDRKIDAIFKASEVCQRIAKIRGIGPKTATAMVAAIGDGSDFKNGRHLAAWLGLVPRQHSSGDRRVMMGISKRGSQHLRTLLVHGARAVVRTAVRKTDSRSMWVNELRQRRGYNRATVAVANKNARIIWAVLMSGEPYRSAA

SEQ ID NO: 276475 - protein, 408 aa, unidentified
MEIIYPRCCGLDVHKRSVAACVRRLEADGRLDQETRTFGTMTRDLLEMADWLAAAGVTHVAMEATGVYWKPIYNLLEERFTLLLVNARHVKHVPGRKTDVKDCQWLAQLLQAGLLQPSFIPARPQRQFRELTRLRSQLVAEKARVANRLQQVLEDANIKLASVATDILGASGRDMLRALISGETDATKMADLARRQLRSKIPQLRPALEGRVTEHHRFLLGQLLAHVEHLEGQIEALSRRIEELSGPFAPAREALVSLPGFEQRAAENVLAEIGADMSVFPSEHHLSSWAGVCPGNNESAGKRKSGKTTKGNRWLRTALVQAAWAASRKKDSYFQAQYHRLAARRGKKRAIVAVAHSLLTVIYHMLKTGSTYRELGGDYFDKLNKNRLLPYFVRRIKDLGFQVTLEAA

SEQ ID NO: 276476 - protein, 408 aa, unidentified
MMMEFLFLLLFFFVDKYNFVNKYIKKEWGELSCRTDFKDLSLVLVPILSNQVTKDQIEYHFLPNKGFSQSNHNKYKIMKILDTIGIDISKLNFDVRIHSTQFYQQFENSNKGFVTMLKWVYKNSSFSKENILFVFEHTGLYSHQLSVYLTDKEVPFSLIPGLEIKRSLGIARGKNDKVDATKIALYAYRLRDEIELTVLPTEQIRSLKTLLSLRDRIVKQRAGYITSLNEQKRVLVKNKNEVILYTQEKIIKHLSKQIKVLEIEIQEIISSDEQLSNQFKLITGIKGIGTQTALFVIAYTHGFTRFKTWRKFASYCGIAPFPNASGTSIRGRTKVSNLANKKIKSLFDLCAKSAIQHSPEMKVYYTRRLEEGKNKMSTINIIRNKLLSRIFAVVERQTPYVDIMKYAA

SEQ ID NO: 276477 - protein, 358 aa, unidentified
MKLTQVTKKIDFSGETIYVGLDVHKKQWTVTIRTSLVEHKTFVQPPSAHTLGNYLKRNFPNADYKSAYEAGFCGFWIHYALLEEGIGNIVINGSDIPTTHKEKSNKRDKVDSRKICKSLAAGLLTGIFIPTKVEAEEKEVIRLRRKVVNDITRCKNRITSFLDRRGIRFSDSLSTFSLWTGKHILWLEGLELETHVGTSSLKIMIRELKELTKLLKELERHIIKNVQEKYAEEFRLLKTVSGVGAIASVTVLAELGDTSRFPNVDHLTSFVGLIPNSHGSGEKEHFGNMTKRKNSYLQPILIQSAWMALRRDPSLTKKYHKWCNRMKASKAIVRVARQLLIRIRYVLINRKPYEILVN

SEQ ID NO: 276478 - protein, 385 aa, unidentified
MHVGIDAHKRTCTVCVIEDGAVRESFAFPTTREGVSEFMERIPSRATVVVEASTTGKVISRMLADKHEIHMVAPPERKRPIKTDRRDAERIVREDMLQYLRRCYIPSAAIEETRFLVFQQIQVGRKIGRVKNQVHALLERNMIHDLDGFSDIFGVHGLRRMVEVQLPAQEKAALARYLEELNLLTAHHRQLETELARLAESDRDALLLMSIPGIDFFTALAMKSRIGDILRFPTKKHLCSYGAVVPGASNSGEYVSRHNRVKHGDMILKSALTCAVRGAVSAEKNSAVKRFYLKHSRRMGAQKAEVAAARKMACIVWKVLRTQQPYMEEDERLTARKRRILSLKAKRQDSAPSDIRQLAEDLVGDVTVLERYPVGFNQEFEGRLT

SEQ ID NO: 276479 - protein, 342 aa, unidentified
MSISYVGVDLGSSKFHQVAINHSGAHTLNREFVTSEATLVKSFTDLRGEIHVHLEAGELAPWASEIIRPLVTRVVCSHPQTNAWIARDRDKCDRIDAYKLASRLRLNEFKEVHYPREQSRRDFKTLVQHYDELTQQQARWKTKLKARLRMQGIIVRGEEVFSARGRKAVLEQVKSNVVRTAIKQLYAVLDQSIASQTEAQMLMLRAAQALPEIRIMRTAPGVGPIGACRFSAYIHTPQRFSSTRKLWKYCRLSVSHRSSNGKPLRRPRLDRMGCGRLKDVSRKAFEAALRRRDNNGFKRAYQRALETTHDATHARLTVQRKIVSTLRAMWINQTPYCDELMR

SEQ ID NO: 276480 - protein, 338 aa, unidentified
MKAYAGIDLHSSNNFIGIIDETDKRLYSKRHENRVDVVLKVLRPFKRNLQGIVVESTYNWYWLVDGLKEKGYKVHLANPSAIKQYEGLKHTDDQWDSFWLAHLLRLNILPEGYIYPKEQRALRDLLSRRLRFVRHRTSTTLSLQSMIARNRGFTMPASSIKTFTEQFVEDMFDSPHLVFAAKSDVAEIQLLNKVIKNIEKEVKTQIQLRKSFQMLLTIPGIGEILALTIMLEVGDIKRFDKVGNYCSYCRCVKSQRLSNGKKKGQGNRKNGNRYLAWAYVEAAHFATRYCSGARRLYQRKKAKSNGAVATKALANKLARASYYIMRDQVPFDEEKLFG

SEQ ID NO: 276481 - protein, 394 aa, unidentified
MLCVGIDVAKRSHEVILLDDAGEARGKPFSIPNSHAGLSRLIDRVEQANPEQQPVVFGLEATSHYWLALYSHLRKCGHEVIALNPLRTSAYRRLQIRPVKNDRRDARCIAEVLRLEPIVRTTLASDAVLGLRHLSRLRSEMVDQIADQKRRVVGVLDQVFPEFETLFSDIFGTTAAALLQEHPTPEEMAELDLDQLTSLLHKHSRGRFGRAKAEQIQEAARTSFGVTLALDALTAGLQMLLVQICFLQEQVAELEERIAGYLEQVPQHLTSIPGIGSVLAAAILGEIGDIRRFKNGSALVAFAGIDPRVFQTGQFVARSTRMSKRGSRYLRRAVWQAAQVAARDDPALKPAYEEKRRAGKHHFAAVGAVANKLVHIIYAVLRDNKPYEPAVRQM

SEQ ID NO: 276482 - protein, 392 aa, unidentified
MYIVGIDIGKNHHEASIVSPEGKQIGRSLRFATTHKGADSLMSFIFKNIGNSPCVFGMEATGHYWYPIYSFLKAKGYTIYVINPIQSDSLRKMYIRQTKNDSIDSFLIAEVIRFGQFGTTSMADENILAMRQLCRYRDSVISSRTEIKLRIGTIMEQIFPEYEKQFSSLWVSTSMGILEKYLTPENIENAPIDELFEIIKDKSHNRLTKAKAISIKEAAADTFGIKIAQDAFSFQLKQLIDRMNFLDKQIEALDCQILEYYEKFDCYLHTIPGIGMIAAATILAEIGDINRFKSSSALVAFAGIDPTVRQSGEFSSTHNHMSKRGSPYLRHAIFLAATTCSFHNSPLNAYYKKKRDQGKHHLTATGAVARKLTTVIYAVLRDSKPYEPKKFC

SEQ ID NO: 276483 - protein, 343 aa, unidentified
MQVVRIGLDLAKYVFEVHGVDQRGKVVLCKTLRRGSVSTFFADLPPCLIGMEASNGAHYWARVLTDLGHKVRLISPQFVAPYVKSNKNDRNDAEAICEAVGRPTMRFVPPKSPEQLAIQALHRIRQRLVRSRTRLVNQIRGILSEHGIVIARDIWRLRRALAEITGNATDDLNMLVRLLIGETQAELIELDRRIASCDRRIRELYRTNKLCQKLGEIEGVGPVTATALVAAVGDRSCFKNGRQFAAWLGLVPKQRSSGGRHQLLGISKRGDRYLRTLMIHGARAALGKAGGKQDPRSRWLVNLRQRRHPNVAAVALANKNARIAWAMLSGNLCYEPARSVQAA

SEQ ID NO: 276484 - protein, 318 aa, unidentified
MRMAQEQVVVGIDVAKEKVDVAIRRGAEGCFANDSRGRRQLLAWLKEHAVGQAVMEASGGYEKSWAQLLRKAGVEVVIVDPKRVRHFAKSAGQLAKNDPIDARMIAWFGEAFEHRGKPEDAAREELDQLVTARRALSRLKEKIDNWGEHEQPKAVQKAYQALLREVDRQQARLEALIADRIEQTESFSLPAEIIQSVPGLACNSAAALLAFLPELGKVGRQAASALLGVAPFDDDSGKRRGHRHIQGGRRKLRCMLFTPILGAATRHNPVLKAYYRRLIAKGKAHKVALVACMRKLLCILNIMLARGEKWDPARHALA

SEQ ID NO: 276485 - protein, 349 aa, unidentified
MHYMGIDHHKQYSHITVLDERGEVIRADRVGNTSKEVEVFLHDLDGKIEGVIEAGYSHYTMMDLMESVGVRMKIAHPEQVKAIAKAKIKTDKRDSKILAHLLRSNLIPEVYCRDEENREAQRVLKHRVTYVRMQTQVKNRIRALLAKQREEVRQIVELEENLFKVSGIKVVQSLDLPGKDQQMLESYLDTLEHLKGKIKLSDALVREVLRSSEEARLISTLPGFKEFFPVLVSVEIADINRFDSPAKLHSYAGLVPSTHASGQKLYHGKLVRQGNKWLRWAAVEAVWPAVRSDFDIRLYYQRRAKRKGANSAKVATARRLLTIIYRVLKEKRAYIPYKREKHTAAFSGI

SEQ ID NO: 276486 - protein, 369 aa, unidentified
MEERYHGVDLHSTNFLVNTIVKKNDGSVERNFKKVYLDEIKTKFISHLTKSDYVCLEASTGSFTFAKLLKPHVKDVFVINPFDFKALYLSGRKTDKIDAKKLANKLKYHIEANDPEDGFPSVFIPDDKVTELRGLFSTYELYKKQKNALKNRVHSIIKQNLIHYDSVTLFTHFDTIMPTLKLNERDKKTILLLYEDILHFEARQEQIKEEILSTGYQRFANEIKLIIGIPGISVFIACAILADIGCIQRFKNSKKFCSYLRSAPKIDASNEKIKNGSINKKGRKLSFSFVLQGLIHIIKTNPNFKEFQSKNIVGKNKCKVRSALIRKTFEMLFYMLKNKTEYKYIDNVLHKKKIMELEKFLQKKIGNAA

SEQ ID NO: 276487 - protein, 408 aa, unidentified
MDLLPIVKSSAGLDIHSKMVVVTLLQEQEDGSLKETTREFSTFPEQLMLLADWLKSEAVELAVMESTGVYWKGAFESLEAKSIKTYVVNARMAKQIPGKKTDISDSKWLATLARYGLVKGSFIPKEELRHLRLVTRYRMKLKGNIASEVNRMHKILADAGIILGLVFSNLQGVSAISIIDGIIKGEPINNLLAKLQGKSRKKEQELRAALAKPISQTHKFLLKTIRDHINYLNAECEELDQQIFAAMESYKKQWEILQTIPGIDKVAAAMIIAEIGVDMQQWETSEKFCSWAGLAPGNNESAGKRKPCKTVKGAPFLRKILCEVANAATKTTSQFKSFYTALQIRRGHKRSIIATGHKILRVIYKLLSGGKAYSDPEVDYEALMVKRNAPRWIQSLLKFGYLQNSCSI

SEQ ID NO: 276488 - protein, 356 aa, unidentified
MEYLKVCVGIDVAQAELVCSFGALDSTLKQHTLSRGTFENHPKGFNVLVKWVKSIHTGEAGVVFVMEATGVYHQKLAHWLFQKSHPVVIVLPNRISNFMRGNNVKTITDTTAADAICQFGLEKQLDFWAPADPIYTQLQHLTRERDQMINERTMLKNQLHAHQSAAFVNASTVKRLKQRIRLLDKQQTDINRELHQLINSNATLKEQVNLITSIPGIGEQTAAVILGETNGFELIRNKRQLTSYAGLDVQVKESGKSVKTKTRISKRGNKYLRKAMYFPAFTAIKHNEQYKTSYARLVAKSGIRMKAAVSIQRKLLELSYIIHKTKRPFDPLYHTMKELPTSGVSAPSESGLCRFN

SEQ ID NO: 276489 - protein, 430 aa, unidentified
MNYTQNQKIEQVTESTLVLGVDIGSSEHYVRAFDYRGRELTRKVFRFSTDINGFNSFYDWVTQICIKHGKNEAMIGCEPTGHYWYTFYQFVKDHGMKLAFVNPASVKKAKELDDNSPKKTDLKDPKTIAKLVIDGRYSFPYVSEGIYAEIREVTSSRDRIMKELNAASNRIQRWLKIYFPEYLTVYKKFDTTTGMMILEEVPLPTMVTALGVDNIIKIWREHKVRGKGASFNRAKTLVDAAHDSVGKSGGQGAVMEIQMLLEDYKVKKQQLEMVTSVMEELIMQIPNAEKMLSVDGVGLVTVAGFISEVGDISRFKNPKQIQKYAGFELVENRSGKHKGRTTISKRGRKKLRKIIYQVVLPLIQSNKEFRSIYDYYRKRIKNPLKGRQAMIAVGCKLIRVFFAIMTKGVVYNGSKMIEDIHRPTQLPQAA

SEQ ID NO: 276490 - protein, 341 aa, unidentified
MTIVGGIDIHRAQLTYDYVDLVTGEVHAGRVMPAHRDQLRVWLERFRGVDEVAFALEGCTGWRYVVEELVRVGVTAHVAEPAETAALRGKKSRAKTDRADARHLRQLLVDGRVPESWIPPADVLDARVLVRLYKDLVDERSGWLQRVHATLFHHGVPAVGASLVTASGSDQLAAACLPAAGRYAVDAGMRQVQRLTAEMVPLRQQIISLGSHQQGCRALRQHYGIGPLLAVAIWEELGDCLRFTSSDDAVRHAGLDVTVWSSDGKRTRGHLAKQGPPVLRWALYEAAVYATRPRSPDYAYYRQLREHLEAHIALITIARKLARRCYHTLRNTGPAAFETAA

SEQ ID NO: 276491 - protein, 318 aa, unidentified
MPEAVFIGIDVSRDTLEIGSSTARSTWQYANDSDGIEAMTAELAKLAPALVVLEATGGYEFEAACALQAAGLSVAVVNPRQARDFARAMGTLAKTDSLDARMLAAFARVLHQHPQRERFIKQLPDAQLQRLQALVLRRRQLVTMLTAERARLTMAHASARPSIEQTIKFLKSQIDDVEHDCADHVRTHHAELAQALSSVKGIGPATVATLLAELPELGSLCRRRIAALVGVAPLNRDSGQMRGQRTIWGGRAEVRRALYMATLVAVRHNMVFKSFYARLTALGKPKKVALVAAMRKLLTILNSMAKSGSHWDDSLHLA

SEQ ID NO: 276492 - protein, 356 aa, unidentified
MTNSTKYIGMDVHKESISIAVRNAAGKIVMESVIETKASMILEFVEGLRGDVHVTFEEGTWSAWLYDLLKPRVTRLVVCDPRRNALLQEGNQNDRVDARKLAELLQNDQLRSVYHENHGLRALKELVRSYLTITKDTGRVMTRVKAIYRSWAIPCSGKQVYASRHRAEWLGKIQEPGVRRRAELYYQQLDAVRVVRQDVRRELLAEGKKHKAWKRLCEIPSIGPIRAAVLLGIVQTPHRFRTKRQLWTYSGLGVEVHSSADHHAVKGQLEQKKKHIEIRGLNKNCNHDLKNLFKGAAVVASIKPGPFEEFYSALLAKGMRPEIARVTLARKIAAIVLIVWKRGVCFDANHLKPQTA

SEQ ID NO: 276493 - protein, 345 aa, unidentified
MEPMYYIGLDIHKRKISYCVKDGSGQLHAEGSIPASRHDLDCWMKTLPQPWSAAMEATLFTGWIYDHLQPHAAALKVAHPLMLRAIAAAKRKNDRIDANKICDCLRCDFLPECYVAPTAIRERRRILRYRNLLVRQMVQMKIKTGSLLMEAGVSYNKERLHKAAYFRELLATHPDIDESLRSLLRQCRETVLRLSKTENALIRSLQRDRLLAERVERLMSIPAIGPITALTWALEVGDVRRFSSNKKAVSYCGLCGAEKSSGNTVRRMPLSKQRNKHLQTTLIEAAKMAPRFSATLALLYDREKKKGNANRATLAVARKLVAYLVAVDRGQTHFLVLDRESSIAA

SEQ ID NO: 276494 - protein, 337 aa, unidentified
MLINELSVRFHVGIDVSKLTLDIFILECNIHKKVSNNPRGFNELLQMIEKNTHVSPELVVFCFEHTGLYSLSLALYLEERNLHYAMVAPLELKKSLGITRGKNDKVDSARIADYARRFGDRVPLTKLPAKDIRKIHYLLNMRERLVKNMHGHLVTYKETLRVMRPSDFPELFSFYESTISMLKAKIKEVEHQIKTLLKENLALWSSYRLITSVKGIGLIVAAYLIVYTCNFTRFDTWRRFSCYSGIAPFEHQSGTSVKGKTQVSPIANRQIKMLLHLSAICALHTDTELREYYQRRQAEGKSKMAIINILRNKLIARVFAVIKRGTPFVDIKRYAAT

SEQ ID NO: 276495 - protein, 316 aa, unidentified
MADPIFIGIDVSKAELAIAVEPSTEAWLSPTDPAALEALVERLGTLRPQLIVVEATGGYELPLVSACAAAGLPMAVVNPRQVRAFAQALGRTAKTDAIDATLLALFAARVQPEVRPVPDADTQALAALIGRRRQLLEMLGAEQRRLAQATTAAVRRDLRQHIRWLEHRLANVDDDLTRAVQRSPVWRVQEDLLRTVPGIGPIVARTLLAELPELGHLDRRTIAALVGVAPFNRDSGQWRGRRMIWGGRRSIRAALYMAALVASRRNPPLARFYQRLRDHGKPAKVALVAVMRKLLTILNAMMKHQSSWSDQTFVTA

SEQ ID NO: 276496 - protein, 378 aa, unidentified
MKVTYQTCCGVDVHKSFLVATIVKTTGGIEPSYQKKRFSTFNNSILEFKQWLLDNHCHDVCMESTGKYWVPVFNLLEDEINVVIANPKWVKAVKGNKDDTKDSKWIGDLFRLGLVKGSYIPCKIVRILREYTRYRYKLVSCRSSEKNRYQNALTVCNVALDSVVSDIFGKSSTSIIDYLLEQSGTSINHEEINDVDKMIENIISSNPDFENAVQFLCTIPGVKRDSAITIISEIGTDMSQFSSSKRLCCWAGLTPGSNESAGKKKSVRITRAGVYLKPALVQCAHAAVKSDKSPYYKKKYESLVKRRGKKRAIIAIARMILTAIYQMLSTGEQWNPSDLYKIDMPVALVEKQKAKAIKQAKKLLQREGLLPPDEPLAS

SEQ ID NO: 276497 - protein, 345 aa, unidentified
MYRTRVGVDLAKEVIQVCTYRNKKVQSNIEMTPNEFLCWLIKTKPATIIFEACSTSNYWKQKAIEAGHDARLISAKLVATVRQNQKTDKNDALAIVQAASLPDVTFIGGKTVEQQQLQSIKRLRELAVKQQGASQKQLVSLLLELNIRISNRKGGIICAIEGVLEDAENGLSVECRAAIYTAKEQLSILIKAVHCYDDCLDKSVASHPDCKKLLKLEGVGTVNAINLYLALGCAEIGTFSKGRDASACIGVTPIQYSSGGTVKLGSIGKYTKNSLLRNQLICGAMATIRHVVKREARTQKDVWLKALVERRGKKCAAVALANKTVRTAFAMLTKGTEYKAELLAV

SEQ ID NO: 276498 - protein, 362 aa, unidentified
MQIIGCDLHARQQTLAMLDTATGEVVNQTLAHEGNSVREFYSTLPGPVRVGIEATGSMKWFLQLMEELGIDCQVGHPATIRAAEPRRQKHDRRDAELLLKLLVEDRFPSIWQPSKEQLDLRALLLHRHQWVRLRTRIQNALQAIALANGLRRGSSLWSQSGQEAIASLPLATHTAQRRSELQAMYARFEAEIEQLNQQVLERAGERRTAGLLMTHPGVGPITALATDVFLGDPKRFRDGKALASYIGIIPREHSSGGRQRLGGLTKQGNPLLRFLWCEAAAHAVRRDPELRQFYRRKLVQKGLGKARVAAARKLGIRLWIMLRDQIDYQEFCRRGQMQQKSGAACAGMPGPRYGVKNHRLID

SEQ ID NO: 276499 - protein, 405 aa, unidentified
MLYLGIDLHLKQITVSLRNEGGDVVLRRQVSTRWPKLAEFRTQLAHAAAGDEKYVAVVEVCGFHDWFVKWLRGDPRCHMVLLVQPLGRSAVKTDRRDAHALSELLWINRERLLRGERVHGVRTVHQPDEDQQADRRLTQLRERLVWRRTQTINQVHKILRRNNLEWDRPTKTFQTCKVIRWLRSMQLNSMDRLAMNQLLVQWKLWEEQLLEVDTRMTSRFLANRDAQLLATIPGVNTYIALAIACRIAPIERFPHGRSLANFLGLTPGCRSSGETERPGSITKVGSRMVRSLIAQVILHLLRKDGAVRTWYQRIKRRRGSRIARVAVMRRTAAIMQRMLSKGEPWRAEKVDSATSETGNKRRRVQPRQRRKTVPSALAERRTESPSSSTGSSSLPAGEEVAQCPV

SEQ ID NO: 276500 - protein, 448 aa, unidentified
MFIMHYKRLLTFIDGVSSYLSVGLDVGADFTWMSIALPNGSFVGKPFKIIHSDSRSRDLAVTKIKEAQETYSLKSRCFLESTGIYHIPLLCFLRDKGFDCSVINPIITKNSTNINIRKLHNDKFDSKKAALVGLNVSLKTSILPDDSVVDLRNLVRDYYYFKDLQSAVALKLTAELKVSFPAYAKTFSKVTTQSSLKLLSSYPLPADMLAASKEDIVDIIRSTARFGEAYALRKYDAIIAAAQDAAVFGRALPSNAVRIRLYIDTYQEYQKHLDALLKALHETVEKLQDTLIYDQICLLQSLRGIGFLSAVVLIAEMGNFKLFSSPKKLYAYFGLDPAVKQSGKLNGDKVHMSKRGSSLARRVLHMAALNNVKVDKGSGTPVNPVVYDYYTRKCSGKKKPVAMGAVMHKICNIIFAMLRDNKPFEIITPEEHCRRFATEHPDKIRKAA

SEQ ID NO: 276501 - protein, 371 aa, unidentified
MKSILSVGMDVHKNSFSLCAYDGYTGEIVSESTFASDVKLVIKFIETLKSRYENDVEIKCGYEAGCLGYSLYKSLTARGVDCVILAPTTMQVSAKNKMVKNDRMDALNIAKNLASGSYKAVYVPDEEDVEIKEYIRMIHDFKKELKRVKQEICAFVLRHGYQYDGKSKWTIRYMNWIRELEMSEIQRETLNEYIAEMENLNDKINRFMNRIDEMYQSERYHEKVSKLRCFKGIETFAAMTIQVETADFERFPNAKAYASYTGLTTGEHSSGDKNNRIGITKQGNTVIRKTLVECAQSLVKGNVYAKKSQGLKSRQKGMDVNIIAYADKATERLKKKYQKLIERNVPRNKAIVAVARELACFIWGMETGNIH

SEQ ID NO: 276502 - protein, 421 aa, unidentified
MTFYLEQGYKWQNGSVENKQRPIFEGGFLMIYVGIDVAKSKHDCCILGMEGQILFDSFTFQNSKSGFQELTSSIQACLLSANEKEVRVGLEATGHYSTNLVAFLRNSGIEPVLFNPLSTNLFRKSQTLRKTKTDKVDARCIASMLRSADPAPHVSVSYHIDELKALTRSRYRLIGYRSKLRISLTRLLDIVFPELAGLVWYTHQKSVYALLLELPNTSAIAHCRIDKLTRILQEGSKGKYGREKTILIRQAAMDSIGSNSPALAFEIRQTIHLIQNVQVEVDQLEQEIENEVKSADTPLLTIPGIGYTLASIILAEIGDIDRFDSPEQLLAFAGLEPSTHQSGNYSANHTPMVKRGSTYLRWAILQAARLVAMRDSTFKAYLKKKRQEGKHFLVALSHTGKKLVRVIFHMLKTNRVFVPQS

SEQ ID NO: 276503 - protein, 429 aa, unidentified
MNSCEQTAQDWLAHRAFGGLDWASEKHNVIVVDPRGKVVEDFEIAHSALGWKKFRERMAPYGAIPFAIETSQGAAVEQLLEAGMKVYPINSKSAKSYRERKAPSGVKDDWLDAWSFADACRIDGQDWRALRPEDPLVKELRLLCRDEVELIQQRTSFICQLRHALGEYYLTALEAFEDWGSMSAWMFVQRFPTPQLLEAAGKRQWEKFLHAHHLWRTESGPRRMELFAHATELCGTVPMANAKSQLALSLISMLFALEKQLGIYRRRIEEIFSRHPDHDLFGSLPGAGPKLAPRLLSEIGDDRGRFEEGPQALQCLAGSAPVTRRTGKCKVRANPDHWPCHQRWACDKHLRHAMHLFSEHSLGQCVWAQIYYQHHRQKGSSHADALRRLAQRWLKIIYRMWMDRKPYDAMLHHQNQLKHGSWVFELKTA

SEQ ID NO: 276504 - protein, 341 aa, unidentified
MDAIRVDATGTTGAGAVPSPAASYVGIDVSKDRLDLARSDRAAVGSFANDQAGVAAVVRLLAGLGPALAVVVVESTGGLERPLLGALLEAGLPAALVHPGRVRYFAKALGVGAKSDPIDARVLMDFGRLASPRLAERRTKNQTELADLVACRRQLTATRTQQLNRRSSTSSRAALRSLDAVIAAVDKQVEALDRRIRELIDADDDFRHLDKLLRSVPGVGPTLSATLVAQLRELGDADRREVAALAGVAPYDDRSGRRDGPRSIAGGRTALRCVLYMAALSAMRFNPVIRAFAERLRAAGKRGKVVVVACMRKLITLINAMARDDLTWDQLDVVKKLTANH

SEQ ID NO: 276505 - protein, 328 aa, unidentified
MEWTVAIGVDTHREVHVAVAVDRVGRRLGALEFGVDERGFEQLHRFALSLGRPAFAVEGTGSYGASLARALLAGGFAVFECERPQRRRRTGKNDLIDAELAARRLLSGAPLALPRTGRKREQLRLLLAERRSAQHARQQAVNQLKAAIVTLDPSLRAELEQRPPATLARSNLLRREQLAPLQRLARRIVLLERELREIDRELDELTRALCPQLLDQPGVGPLCAAQLLVSTADPHRIRSEAAFAALAGVSPVEASSGPIKRHRLNRSGDRQLNWALHMSALNRIRYHPETRSYYQRQLDRGKSKREAIRIVKRALARRLYHTLTATTT

SEQ ID NO: 276506 - protein, 361 aa, unidentified
MAKVRSWAGLDVHARSVLAVTLDAESGELRSVRLPGETAKVVEFLAKLPAPSRVAYEAGPTGYGLARALGAAGIGCVVAAPGKIERPAQDKLKTDQRDAERVLRLLMIDALHPVRVPTVEEEALRDLIRAREDVRGDLMRARQRLSKLLLRHDILYEDGASTWTQRHRSWLRAQQLGGGAQATLLDYLGAIDTLELRRGTLEKTIGELVVASPYAQTVARLRCLRGIDTLSAVGLGAEIGDFTRFERAGQLMSYVGLVPSENSTGESRRQGPITKTGSRHARRLLVEAAWHYRKTPSRGVTLQRRQDGQPANIIAISWQAQQRLHRVWRRLADHRGKRRTIVAVAVARELAGFCWALARAD

SEQ ID NO: 276507 - protein, 407 aa, unidentified
MKPLHERCCALDVHKKMVVAAVITPEGNETRTFGTMTNELLLMADWFTKRNVTHIAMESSGVYWKPIFNLLEGREFELMVVNARHVKAVPGRKTDVKDAEWLAELLSFGLLKPSFVPSREQRELRELTRYRKTLIEERARVVTRIQKVLEGANIKLGDVATNVVGMSGRAMLRQLAAGNTDVHAIAELAMSNMRPKRQQLAESLVGSVGPHQRFLLNSQLDLIEAMEAQLEALDAEVVQRMRPFQAAVDLIDGIPGVGRQSAEQILAEIGSDMTRFPTAAHLASWARVCPGTNESGGRRHNTSTGKGNPWLRSTLIETVLGAVRASRAKPNFFAARYKRLAVRRGPKRAAMAVAHTMLIAMYNILRNGVHYEELGANHWDEHHRETVALRSVKRLEQLGYRVTIEAA

SEQ ID NO: 276508 - protein, 342 aa, unidentified
MTAIGIDTHKATLAACAVDELGRTVGEASFANDPAGHLAFIAWARWIAPEALIGVEGSSSFGAPLARSAQSAGLEVREVPPHLSRVERLRTRRPGKSDPGDALAIARVTAREKNLPPIRLPDRTTELRLLLEAREDLVDESTRARNRLHAHLLTLAPGYGVTVANLVAARHRAAVGRLLRGVGGVQAELARGLLLRLVRLEREVKALTSRIGMLVAGHPLLGLPGAGPITVARLIAEVGDVHRFRSADALAALAGVAPIPASSGQVQRMRLNRGGNRQLNRAFYVIAVIQSRFHPPAKAYVTRRMEVDGKSWREAIRALKRLLVRPVFRLLVEGAAAQLEAA

SEQ ID NO: 276509 - protein, 322 aa, unidentified
MSVSNQRCAGIDVSKGTLDIAISNIASQFTVPNGTDGFTQVLRELKRNETRLILMEATGGLESCVACYLQSEGFDVVVINPRQARDFARAMGYLAKTDRIDARVLLQMSEVINQHPERERYIRPLPDAHRQILTAMVVRRRQLTIMLTAERNRLHPSHPLSHASIRSIISALKGELARIEGEMAIHIKEHFSELSELLNAVKGVGSATVAVLLAEVPELGSLSRREISALIGVAPVKRDSGTMRGRRTVFGGRASVRTALYMSALVGTRHNPVIKEFYTRLVAAGKPKKVALTACIRKLLTILNAMLKKNEAWDPMYHQHAS

SEQ ID NO: 276510 - protein, 387 aa, unidentified
MTKQFVSHNAAATFDHNSTLVVALELSGKSWKVGAVVPGVSRRPQRDLAPRDMSGLLKAIGRWKQEAASAGREVARVVLTYEAGREGFWIARYLLGHGIEVEVMHAASIPVPRRGRRAKTDRIDLEMLLRTFLAWLRGEPRACSMVRIASEAEEDARRPGRERERLGSERVKLENRIENLLCLHGIAGFKPRLKSAMARLEQLRSYDGKALPEHKMAELRRLMERHRLVSDQIKQLEAERDQVKTLERPDRAERMILLLARIYGLGMETARLLVREVLCRRFRNRQALAGFVGLTGTPFHSGGMEREQGISRNGNGQVRRMLMQLTWRWLRFQPHSALSQWFVMRTAGGKKRIRKIMAVALARKLLVALWRYVETGEVPQGVRFHAA

SEQ ID NO: 276511 - protein, 378 aa, unidentified
MPQVWAGVDIGKEHHHCVVINTDGERLLSRRVLNDETALMELIADVLAVDDDVLWAVDLNHGGAALLIGLLLGHGQSMVYITGLTVHRASASYRGEGKTDAKDAFVIADQARMRRDLGPLRPGDEIAVDLRTLTTRRADLVADRTRQINRLRSQLLEIFPALERSLDLTCKGPVMLLTGYQAPAAIRRSGARRIETWLRNRKVRNSAALAKAAVEAAEAQHTALPGEKLAAAMVARLAKGVMALDEEIAELEALIEARFREHPHAEVILSFPGMGRLMGASFIAATGGDMDAFGSADRLAGYAGLAPSPRDSGRVSGNLRRPRRFHRGLLNAMYLSAFASLKSCAASKTYYARKRAEGKGHKQALLALARRRLNVLWR

SEQ ID NO: 276512 - protein, 348 aa, unidentified
MDTIGVDLHKRETQLCIGQADGTITEQRIVTSRERFTAVLGQRPPARILVEASTESEWVACHLESLGHEVIVADPNYAPMYATRSRRVKTDKRDARTLMEACRAGTYRPAHRLSAARRHVRAELAVRDAVVRTRTRYVALAKALVRRDGLRVPSSAAERVGAHLAALAVSPALAAELAPLLTLLPPLTATIAAADQRLAALEHTDSSVALLMTAPGVGAVTASALVATIDDVQRFASAHQFEAYLGLVPGERSSGELRRIGPITKAGNRRARWLLVEAAWRILRSKDAAGAPLRAWARPIVARRGSRIAVVALARRLAGILYAMWRDGAPYEAGKIRRPRSARQNPGA

SEQ ID NO: 276513 - protein, 314 aa, unidentified
MSPLIFVGIDVSQAHLDIAVRPGASFSIAHHESAIATLVEQLRPLSPTLILLEATGGMEIPLTSALATAGLPVVVVNPRQVRDFAKASGRLAKTDALDAQMLAQFAEVMRPQPRPLPDAEARALTALVARRRQLVEMLTAEKNRLLSASSPIRKRVRAHIAWLERELAHTNTELSEAIRHSPVWREKDDLLQSVPGVGPVLTSTLLASLPELGTLTHKQIAALVGVAPLNRDSGTLRGRRTVWGGRAQVRAVLYMGAIVAARFNPVIRVFYQRLQRAGKAKKVTLTACMRKLLTILNAMLKHRTPWRVVEAHHA

SEQ ID NO: 276514 - protein, 340 aa, unidentified
MREVTTIGLDIAKQIFHAHGADSSGAPVFSRRITRQKLIQFFASQPRCVVAMEACAGAHHWGRELRRLGHEVRLIPPAYVKPFVKRQKNDAADAEAICEAVQRPTMRFVPVKSEEQQASAAVFRARDLFVRQRTQLLNALRGLLAEHGWVAPKGLFHASAMFAKIEDPSCDLPQSARDVFLVMIASVKALDERIHLLDREITKRAREDETARRLMTIPGIGPITATALSALAPAPESFRNGRDFAAWVGLTPLQRSTGGKSKLGSITRMGERTLRRLLILGSAAVVLQASRRGAPRGSWLEQMMARKPRMLVTVALANKTARIVWAVLARGEVYRAPAGA

SEQ ID NO: 276515 - protein, 316 aa, unidentified
MNASGVFVGIDVSKETLDVAVRPSGERWRTTNDERGITELVSRLRPMGATLVVMEATGGYETALALSVVEAKIAMRIVNPRQVRDFAKGKGLLAKTDSLDAAVLAEYGEIYRPEARVLLDEQAREMADLLSRRRQLIEMKTAENNRLEHARGQVRKEILAHLSWLSRRIKKIDEDLDKRIRNSPLYLDKRERLKSVPGVGNQTALSLILNLPELGTLNRKQIAALAGVAPFNKDSGRRRGKRSIWGGRAQVRAVLYMAAVVASRHNDVFRDFYAKLCAAGKPKKLALTACMRKLLTVLNAMAKNQTSWTPSLATAR

SEQ ID NO: 276516 - protein, 419 aa, unidentified
MAPAVLAEAVNVIDQEVCLLLYRGLRILVRRATYRTLVSVLCKDHRRQTMHDDTTAFVGLDVHKEAIAIAVADPGRAAARYLGAVRPALIPLTKALAHLGPPKSLALVYEAGPCGYGLARRLLKLGYRCEVVAPGKIPHRPGERIKTDRRDALTLASFARSAELTPVLIPDERDEAMRDLARAREDAVRARLKARQQLKAMLLRHGHHYSGRIFWSAAHQRDLAKVSFPHPAQQIAFTEYRLAVTEADERVARLSAALREQAETWRLQPLLNALMTLRGLQFLSAATVLAELGDLRRFPHPKQLMSFLGLVPSEYSSGLSRRLGPITKCGNAHIRRVLIEAAWSYRYPARLSRELQLRQQGQPKAVRDIAWKAQLRLCARYRRMQARGLHQNKTCIAIAREMAAFIWDIARHVPIAPAP

SEQ ID NO: 276517 - protein, 411 aa, unidentified
MNPVIGLDVAKGESQVQAYLERKKPYKKSFKVKHDLDGLASLLDFIKELEDISGERPPLVMESTGHYHTPIVQYFEDRGYLIIIVNPLISYKAKSSSLRKVKTDIIDANHLCELYYKEDLEPYKKRGIQLANLRNLTRQHDNITGMFVQTKLQFQAVLDQVFPEYSNVFGDLYSDVSLKILYAFPTSEDILKANNEVLATKIKEFCNSRSLQWANKQAEKLMTAAAQNPFQKALYSSLALSLDMYINMLFEYKKHLSMLENEIDALSKSIEESKIIRSIPGIGEKIAAMIVSEIGEIERFNHPKKLVAFAGLDPSVFESGTFKGTYNRITKRGSSRLRQALYMAVKCAIRDCRKQKTTDEILPRNKKLRAFYDKKRGEGKPFRVAVIACANKLLHWIYALLKSKTSFQDLA

SEQ ID NO: 276518 - protein, 350 aa, unidentified
MMIIGCDLHTRYQQIAMLDTDTGELVGRRLEHESGEARAFYSALQGQVRVGIEATGHTHWFEAMLAEFGYELWMGDAAKIRASVVRKQKTDARDAEHLLNLLRQDRFPQIWRPSPAERDLRQLVWHRQKLVWMRGAVKNQLHALAMGEGVCRKKKLFTAKGRKELEDLALGPWASYRRQELLRMFDELAAATAQLDLAVEQAAKNQPLAVRLMTHPGVGPVTSLAFVLIIGPVERFERSKQVVSYLGLNPQEHSSGGKQRLGAISKQGNPMMRSLLVEAGHTAARFDPALKRMYQRLKFRRGASVAKVAVARKLAVRMYWMLRSTADYAQLVRMQGSPWATLVEDSPSLG

SEQ ID NO: 276519 - protein, 343 aa, unidentified
MPVSTSHWKVQGVCVVDATGRIVREAKVASEPEILIGWFRSLRFAVTRIGLEAGPLSQWLYAGMRDAELAVELLETRHVRDAFKAMPVKTDRKDARGIAQLMRLGWFRAVHCKSLPAQEVRALLAARKLLQTKNHDVEMSLRGVLRGFGLKVGPTTPRTFPGRIRELVATHTTLSTVAEALLAARSTLFEQWQKLEKRLRSLAREDGRVRLLMTAPGVGAIVALTYASAIDDAARFRSSKSVGAHFGLTPKKYQSGETDVTGRISKIGDGGVRTALYEAANVILTRPVKGSTLKSWGMRLAARAGMRKAKVALARKLAVVLHRMLADGTSFLADKAATVATAR

SEQ ID NO: 276520 - protein, 391 aa, unidentified
MPMYFVGIDISKYKHDCCIISAADQQIISKFTITNDKDGFEQLLTALNSLSNPEDIKIGFESTAHYALNLELFLENAHHNFMEVNPVLIKEYKKSTTLRRTKTDSVDCESIARWLITVEYKPHSKGFYHAYSLKSLTRLRDRLIRQRSFYLVKITNVLDHTFPEFKPFFNERLSKTALYLLENYGSAEKMARMNSASYDKLRCISRGKFSIQQFLRLKELAANTVGVNNSIFDLELNTLLTLYKSLSDEINTLETEIIKLIEEVHPHYMSIPGIGPISSAVIYAEYGDISNFSNPGQMLAFAGIEPGINDSGTESHGGRMVKHGSSQLRYVLLNACLPLIRFDLTFATYYEKKRAEGKKHRVAITHVAKKLIRVIYALERQDVDFNAQKLR

SEQ ID NO: 276521 - protein, 449 aa, unidentified
MRKPQVIEDQQHERVFERVAAVDVAKASGMVCTRTPNPARPGARHSTVWEVPAAMNAVLALADRLVADGIEMVTLESTADYWRIWYYVLEGAGLAVQLVTASQARNLPGRPKTDRLDAMWLARLTEMGMLRPSFVPPAPVRVLRDYARARTHLVQDRTRCWQRLEKLLEGALIKVSAVASKLTTVSAQDMIKAMIGGQRDPHILAGLARGRMKAKHDALVEALTGMFDDHHGELAQMLLDQIAFCDTRIAALATRIEQHLAQVRDAWGVDADGSTGPAAGAGPGAAVLPAAQRLAEIPGVSAELARSIIAETGLDMSRFPTAAHLVSWAGLCPSARQSGARNRTGKKGQGDGYLRGYLGQAATGAAGTATFLGERHQRIARRRGRAKAQVAIGRSILVIIWHLLASPGTRFADLGPDYYASRTDKDKKIRNHIRQLQALGLTVTIAPAA

SEQ ID NO: 276522 - protein, 341 aa, unidentified
MSIITVGIDLAKNVFAVHGVDDNGKAVLVKPKVPRDKLLELVAQLPPCVIGMEACSGAHHWARQFRRYGHTVKLMAPKFVTPYRMSGKRGKNDAADAAAICEAVRRPQMRFVPVKEEHQQIILSLHRTRNGFVEERTATYNRLRGLISEFGIVLPQKVANLRREIAEHLEDLPGYANLCVGDLLAHADVLDARIAEYDRAIAQAAREDARSKRLMQLPGIGPVTASALLASIGGGHDFANGRQVAAWMGLTPGQYSSGGTARLGRITKAGDHYLRSLLVMGARAVLSGLGDKQDRFSRWARSLQERRGYWKAVVAIAAKNARLAWAVLKYGEDFRLHPAAT

SEQ ID NO: 276523 - protein, 336 aa, unidentified
MPMYQLGIDVSKNTLDLCLLREGIKGRIKTRKLKNTADAAKVVAEWLKKQSCELGEVHIIMEATGVYHEPLAYGLYFAGARISLANPHRTREFARGMNILTKNDKVDAWMLACYGSLKEPEAWTPPPESVRYLRALLRRRDALVADSTREKNRLEKSVFTDSPDAVRASIENMLQELSNEIEHLDVLIQEHIKTHPELNQDFRLLTSIKSVGYLLGLNMLAILKSHSFESAEQAAAFLGVVPVERRSGTSVKGKPKLSKIGPPEIRTKLYLAALCGLRFNPVMKQMYTKLCQRGKSKMCAIGALMRKLVHWCYGVLKTQLPFDAEYNQQSHYKTTC

SEQ ID NO: 276524 - protein, 391 aa, unidentified
MTILVGIDVAKDKHDCFIMNSEGEVLAKSFTILNNKEGFDFLYKKIQSVSSSDKIKVGLEATGHYSYNIIGFLLNKDLATFILNPLHTNLYRKSLSLRKTKTDKIDSKTIAMMLLSDVSLKSYSDISYHNEDLKSLTRYRFSKVEERAKLKTSLSRLAQILFPELEKLVPTLHMTSIYQLLEEFPSASAIASAHLTRLTKLLSKASKGHYNRETAIKIREAAKNSIGSNMPAKSLELKHTIKLIRALTIDIGEIEAEISKMMDMIASPITTIPGIGRNIGAMIISEIGDFSRFSSPDKILAYAGFSPSIYQSGKLDNCYAHMEKRGSRYLRYALFNAAKLVCHWDKTFADYLAKKRAEGKHYYVAISHAVKKLVRVIFHIEKTKQAFLKAS

SEQ ID NO: 276525 - protein, 360 aa, unidentified
MSVQGTSVGLDVHALSVVAHAVDEVTGEVSRARLCPDYGEIMCWLSQLRAPVRVVYEAGPTGFGLARALNDARVECLVAAPSKLQRPAGDRIKTDARDAAHLARLLRLGEITAVRVPDADIEAVRDLVRAREDARADLMRVRHRLSKLLLRQGIVYFGGTPWTDAHELWLRRQRFADVHLKAAFDHGFDAVLTATAARDRLDEQIAEVATSPRFADPVNRLGCLRGISALTGLALTVEIGDWSRFTGSSIGAYVGLVPSEYSSGNSRVQGSITKAGNTHVRRLLIEAAWHHRKSYSTSGPTLRARWAKVDPALRARGHAGNRRLNKRWRNFTERGKNPLVANVAIARELAGWCWSLATMQ

SEQ ID NO: 276526 - protein, 341 aa, unidentified
MKYVGVDLHKQTISVCVMAEVAQKRKVQQRKSLLCKDVQSIRRFFEGLGTFRVVVEATSSYEWFLLLIEDLSDRCVLAHPKKLRIIAETKHKSDKIDAQRLAEFLMLDMIPEAHRPSPRVREHRVLVRHRNRVQRQITKVKCQLRHKAASYNADIVGLFSARGLIHLAKIAMNHADRFECRALEDQLEFLQQQLKSADQELRAFAQTGPVAEREARAILATVPEVGPVTTDVILSETADVRRFRSAKRAVAYAGLDPGIRESAGKGKQLSISKDGSPLLRWALIETAWRLVRKTTRWKRLFERLRASTGHKKKAIVGVARRLFCVLFAMLRDGKAYRLAAD

SEQ ID NO: 276527 - protein, 347 aa, unidentified
MRFYTQQHPFYCGIDLHARTMYLCILDQAGETLLHRNMPATPEALLKAIAPYREQIVLAAECMFTWYWLADLCAEHGIPFVLGHALYMKAIHGGKAKNDKIDAQKIAVLLRGGMLPQAYVYPAEMRATRDLLRRRMHLARKRGELLAHVQNTNSQYNLPAIGKKIAYKANRDGVAERFADPAVQKSIEVDLALITYYDELLRDLELTIVKTAKHHDAQTLYLLQTVPGIGKILSLVLLYDIHQIDRFPRVQDFASYCRLVKCAKESAGKRSGTSGTKIGNAHLKWAFSEAAVLFLRDNPAGQKFFTRLEKKHRKGKALTILAHKLARAVYYMLQHKTAFDMCQFFNG

SEQ ID NO: 276528 - protein, 337 aa, unidentified
MNPTKSNHKFCLGIDISKADYHVALLHRESGESIARSKFANNPQGHAKLLDWLAKHTGADLPVHACMEATGSYGESLADHLDGKVAILSVVNPRAIKAHGDSDLRRCKSDPADARLIADYCRSKQPRAWQAPSPAQRKNKAISRCLANLKKDRTRESNRLDLCSDKTVVKALKAHIKWIEKQIAKLEDELIAAVKENAASARALELIVSIKGIGEKSAAYLIAELPDLALLKNARQLAAYAGVTPRIFQSGTSGKTRTPMSKAGNRHIRKALFFPAMSAMRFNPICKAFAERLKEKGKPSIVIIGAVMTKLLHLIYGVLKSEKPFNPDILKKAQIIP

SEQ ID NO: 276529 - protein, 375 aa, unidentified
MVRSVVNRQGSSRRREPRVQGTLGVSQPTRKRKETLVEHEQQYVGIDLHRRRSVIVRMTESGEVLSTVQIDNDPVALAVAIAEAGPDPEVALESTYGWYWAADLLQAEGARVHLVHPLGLHWDTRRVKNDVRDATALANRLRQRDLPESWIAPPEVREMRELVRYRAKLTALRTSAKAQIHAVMAKHGYIPELGRMFGPTGQVLLDEMCFEGVYGLRVESLRDLLEIYERELALVEREMRAMFKNHDGYHAIQAITGVGPVMAAIFCAEIGDVTRFPTARHLCSWAGLTPKVRDSDDKLHRGHITKQGSGLIRWAAVEAIARYHGGAPIRPSYKRIADHRGKMIARVAAARRLLTLVYYGLRDGEIRCLTRQEAS

SEQ ID NO: 276530 - protein, 416 aa, unidentified
MIEQRQCYAGVDWASESHHVFLTDGDGRKIAERVFKHGGEGLAEMAAWLMTTSGVIDASQVQIAIEVPHGPVVETLIERGFKVHAINPKQMDRFRDRFTLAGAKDDSRDAEVMASALRTDARCFRLLAVAHPVVIELREWSRIAEDLGAERNRLTNRMHEQLWRYFPAILELESDLGAEWLLDLWQTVPTPEKAARVRESTIAKVLKRHRIRRFDAAHLINVLHKPSVQVTPGTIEAASAHVATLIARIRLVNRQLTEAHRRLDELTARLVPTEEVEPGQRKQHDVEILASLPGVGRIVLATLLAEAFDALQRRDYAALRSLTGVAPVTKRSGKSCIVVRRQACHDRLANAMYHWARVAVQHDPRSRAKYAALRSRGHSHGRALRSVADRLLNVACAMLKTGTTFNPSMAAQQISC

SEQ ID NO: 276531 - protein, 430 aa, unidentified
MKSNTQNAKIEAITEKTLVLGIDVGSETHYARAFDYRGIEYSKKPFKFSNTEAGFATFKEWILDLKERHEKDKVVPGMEPTGHYWFNLGKFLQDNEMKPVLVNPHHVKKSKELDDNNPTKNDRKDPKVIAGLVREGRYMIPYLPEGVYADLRTASNIRFQLQAELTRIQNRISRWFNIYFPEYKTVYGKPDAKSGMLILKAAPLPEDILTLGIDGVNQIWRDAKLRAVGKARAKTLIEAAEHSVGSKEGAVSARMEIRMLLEDYESRNTRLQEVMVLIEELVRKIPMAEKLLEIKGVGIRTVSGFLAEVGDISRFNNPKELQKLAGLALVENSSGKHKGETTISRRGRKRLRYLLFEVAMSLVSKNQEFRELHNYYTTRRLNPLKKMQSLMAIAAKLIRVFYAMLTKGVDYDPKKMVSDIKRPAVYLQAA

SEQ ID NO: 276532 - protein, 311 aa, unidentified
MEIYVGIDIAKLTFDLCSGPQKQNQQFENNTKGIRQAARMLAGLRPKLVVMEATGGYETPLAAELYAVGLPVAIVNPRRIRDFARARGQLAKTDKIDAEVIATFAAKMQPPTQEHVDHTSRLMKALVARRHQLIRTRTAENNRMEHALDKVITASLGRIIKAIDREIENVERLIREQLDRMPELKAKAQILDSTPGIGETTAAMLVTEVPELGRLNRRQIAMLIGVAPINRDSGTFRGKRMTGAGRRDVRSRLYMPTLVAIRHNNVIRRFYQHLLSKGKPKMTAIIACMRKLITILNIMVAKNETWNPNLA

SEQ ID NO: 276533 - protein, 386 aa, unidentified
MNPTFSDKTEFPEDLAKVIYVSVELSQSNWLVTSFLPSVDTKMARKGLPAGEIGRLLSLLAERRLKAKNRTGDLLPIVVIQEAGLDGFWVHRVLADEGLESHVVDATSIAVPRKARRAKTDRIDGEILIRALMAFKRGEPRACAMVRVPSHAEEDRRRLLRERKALVVERLAHANRIEGLLFAQGISDYRPLNRDRRPRLEDLRTGDGRPLPPFLKAQISRELDRLELVIEQIRAIEAERDELLASERKEANSAVAMLENVRGIGPEFASMLWAEGFYRKFDNRRQIAAYAGLAPTPWQSGSVNRDQGVSKTGNPRLRTTMIQVAWLWVRHQPDSALTGWFRQRAASSGVGQRKKVVVALARKLLVALWKYVTSGIVIEGARLKNA

SEQ ID NO: 276534 - protein, 401 aa, unidentified
MKTILKPKRLKRYSRFCGIDIGKNTHVARIIDSQGQNIVRSQSFRNDAAGFDRLIERLTQAGKVRQILIAMEATGHYWYCLHDFLKRLGYDVVLLNPVQTSQQAKKGIRKSKTDKIDAGHIATLIKNSEHRPAHIPDDTGMTCRQLSRLWYSLVKQRSRVKQLIRSRLHPVWPEYETFFADMFGITGRTLLQAAPTPEDLLAMGLGNLTELIRKASRGRLNTKRAQCIWETTEKSIGMRRGLDGARIGISTLLSQLDALRLVQENFEKELKLLAENLPPFLLSLPGINYIRAVSLFGEVDPITSFASPDKLVAFSGLDVAVFQSGQYDGTKRHISKRGSPFLRRTLWTMAHVALRSESDLRDYYLRRMKNGSHHLVAVTATAAKLCRIIWRIMTDERDYVP

SEQ ID NO: 276535 - protein, 321 aa, unidentified
MTYIGIDVSKDTFVVAYSPDKNSKTKTFRNTTRGIHEFIRTISKEEHHCVMEATGNYSALLVYLLSEAGITTSLENPLKVKNFARAMLSTVKTDEIDARLIALYGEKMQPAPYKLRSDAILTLKQKRTVIRQLKKQLIATRNLKGSMEALPFFDAKCRKSVEKTIAFLEKQIKDLEEDLASLAKSEYKKQMDLLTSVKGIGITLAAALIMATGGFTYFDNAKQLTRHLGLSPTYQQSGTSVNFKGHINRNGDSSLRSQLYVAAFASLRCNTECRACYDRLRSNGKPGKVAVIAVANKLIRQAFAVVTQEKPYVDGYVSSKK

SEQ ID NO: 276536 - protein, 412 aa, unidentified
MKDLLEISCGLDVHKEKIVACILTGPLGKPTRSEIREFSTLIPDMIALRNWIVSKNCHHVAMESTGIYWMPIYEILEDAFYGDITLLVVNARHMKNVPGKKTDMRDSEWISTLLRAGLLNGSFIPEKRIREFRDLNRYRKSVIRDITSQKNRIEKFLQSSGFRLSSFISDIFGASGRNIILHLIEHGQIDKTALDSCLKTKTRNRIDEILMSVNGTLSEHQKAFLRILMTHYDSLKKHLAEIETSLEEDMAPFALQVEQLNSIYGISTTASCAIIAEIGIDMKPFKTAEHICSWAGLCPGNNESAGKRKSTSVTKGNPYIKSMLCEIAWVIAGKRNTYLSAWYWRIKQKKGAKKAIVALARKLLVIIYTMLKQGTLFDESCFETRRKHCEQKQLSRYIRELEKHGYHLEAQS

SEQ ID NO: 276537 - protein, 346 aa, unidentified
MNNHNKKCTIKVLGIDLAKQSFQLHGVDELGKVVLRKNLSRNKLTSFVANLPPCLIGLEACGGAHHWVRVFKSLGHTVRMMAPQFVKPYVKSNKNDAVDAEAICEAVQRPNMRFVPEKSISQQDIQCIHRIRSQLIARRTAQANQIRGLLMEYGIIIPKGISYIRKVIPHILEDADNKLTSLLRELLNELYDEMVYLDELISSLENKLKIISHQNEDCQRLLTIPGIGLLTATALIAAIGNISVFRSGRELAAWLGLVPRQHSTGGMPTLMGISKRGDCYLRTLLIHGGRTVVRVAHLYTDKRNLWISELDKRRGKNISAVAVANKNARIAWALLSKKESYQVTAI

SEQ ID NO: 276538 - protein, 403 aa, unidentified
MQTLVECGCGLDVHQATVVACLLIVGKDGKVQKQMRTFGTTTRELLNLREWLLSQGCTHAAMESTGVYWKPVYAILEGGLEIVVANAQHVKKVPGRKTDVKDAEWIADLLCHGLLRSSFVPPKAIRELRDLTRYRRKLVESQAAERNRLLKLLESANIKLASVATDVFGTSGRLMLRALIAGKATAQEMAELARRKLRSKIPQLQLALEGKLEGHHRFLLKLQLDRLERAEGDLAVLEQRIQEKLEPYAAQLALLREIPGVDWTLAAVIIAELGVDMSVFQSVSQVASWAGVCPGNNESAGKRKSSRIPKGNVYLKTALVEAAHAAARTKGTYLRDKFYRLKARRGYKRAVVAIGHKILVSVYHMVSQNVSYNDLGDLYLDKLNKNHLTRNLVHRLAPQQKAA

SEQ ID NO: 276539 - protein, 427 aa, unidentified
MNYTQNRKIEQVTDQTLVIGMDIAKQKHYASMVDARGRVLKKLFPVIQSRSGFEQFYASIQEAMKEFGKTEVIVGIEPTGHYWLNLAYFLEEKGIPLVMVNPMHVKRSKELDDNLPTKHDAKDALVIAKLVKDGRFSYPRILHEVEAELRAGSTFRESLTKELNAVRNQMIRWLDRYFPEFVQVFPSFGKMALVVLEKTPFPMDIANQTVEGLMERYRQSETLKCPQKPKVQKLLEVARHSIGITEGQQMARIEIATLVRRYRQLEQEIAALTEELTALAQTTAEYEWLQTIPGLGDATIIELLSEIGSFAQYQDSRQLIKLAGLTLKENSSGQHKGQKRISKRGRKRLRALLFRVMMPLIRHNEAFRQLHEYYTTRPINPLRKKQSIVVLCGKLLKVLYAVCVKQQAFDGERMIQDIFSQSQAQAA

SEQ ID NO: 276540 - protein, 348 aa, unidentified
MNYLGLDVHKRTISYCLRHPDGRILQEGSISAQRDGLDTLLAQLPGPCLAGMEATLFTAWVYDHLSMRGIPVKVAHPAMLKVIFTSKRKNDEIDAQKLADLLRCNYFPECYIANREIRDRRRVLRYRNTLVRQSTQTKNKMAGMLMETGIPYNKQQLHTSKTYFEDLLETKAALMPESLPGLLRLGRNVIEILRSMNRQLVRMLETDPVLTDRVARLMTIPGVGIILALTWALEIGDVSRFPSIKAAISYCGLCGAEQSSAGKSQRTPISKQRNKHLQTTLIEAAKVAPRWHPEYALLYDQQKQKGNRNRATLAIARKLVSYLLAVDRGRRQFFTRDPRSVDVQAGAA

SEQ ID NO: 276541 - protein, 342 aa, unidentified
MKFYCGIDLSARDCHVCVIDQQLKVVVQQKLRNELPKIIQLLEPYKAHLKIVVESTFNWYWLIDGLQAEGFEVVLAHTLGLYLITGAKVKTDRRDAYALAKLLLVGAVPAAYIYPVATRPVRDLLRRRMHLVQVRAGEYGSLRRLLLRQGILSSKQQEIKTATEAELEQWFAHPLVRLHASQELQRIELYSEQIAELEKTILELAKTERSYELLLKLPGVGQTIALTILYEVGELTRFANVKDFSSYCRVVPGIAQSGNVTRRGRGSKQGNHYLKAAFSQAAVHAVRCYPKVRRCYERQLKRHQGRGRQMICYNIIAHKLAQAAFHVLKEQIEYREELLFGR

SEQ ID NO: 276542 - protein, 395 aa, unidentified
MNKKVHYLGLDVHKETIAVSIAPQDSSEVRRYGIIGGTLEAVDKLLRKLGGENIELRVVYEAGPCGFVLCRHLRSRGIHCDLVSPSLIPKKASDRVKTDRRDADQLARLYRAGELTAIHVPDQEDEAVRDLIRARFAAVCDQRQARNRLKGFLLRLGYRYTGKSSWNDAHKRYLSGLVMPQPAQQIVFQECIHAIDDATERLERLTQSVEDALPGWKWEPVVRALMSLRGVQVLTAMTLVAEVGDFSRFSEAGSLMHFFGLTPSEHTSSDKRVQGGITKCGNTHCRRVLTEAAWQYRLKPQVSEAMQKRQEHQSKAVRLLAWKAQERLHKRFRQLSVRKKSVVVATAIARELAGFVWAIACHVKPAEQAAAPEIIRTCRGKVYRLDREKKLQKTK

SEQ ID NO: 276543 - protein, 411 aa, unidentified
MHNRQNYLYVGVDLHKEHHTAVMINCWQEKLGEIQFDNKPSAFSKFLLEVETYVCDGIIVVFGLEDVGGYGRALAKYLVDHEQVVKEVNPALSFLERKSQVMIQKNDSWDAECVARILVNKFNQLPDAKPNDLFWSIQQLVSRRNALVKAQSALKNQLHIQLNHHYPSYKKFFSELDGKTALAFWQQYPSPSCLEGANIKQLTAFLLDVSNNTCSVKKASEILKLVKEDGHTMKEYQETRDFLVRSIVRDIEFKKTEMKYIERELKQLVKLLDYQLETMPGIELVTASALIAEIGDVRRFPNANKLARFAGIAPVYFGSGGKGKTHKSKQGNRALHALFYNLAVQQVQVAKGSKMPRNPVFHAYYQKKLKEGKTKGQALVCIMRRLVNIVYGMMKYKTAYELPVVEEKEVV

SEQ ID NO: 276544 - protein, 360 aa, unidentified
MKALKVNLGIDVSKDKCDCNLSKLTDQLVVKVIASKTFLNTEKGLEELVNWLIKKCPSDCLKVHAVLEASGVYHERFALGLQQAGYCVSVVLPNKAKKYMESLGIKSKNDSIDAKGLARMGCEQNLEEWTALSPFFHQLRTYTRLHEDIQQKKTDTTNQLHALKHNAVQIKEAIDALERMVKFFNKELDSIQKLIEAHITSNAEVKERMDKVCDIKGVGTLSAATVVAEMNGFDLIENIPQLISLNGYDVVEDQSGKRVGKTKISKKGNAHVRRILHMPALNMKTYQVGNMAALFERTFDKHGIKMKSYVALQRKLLILIYTLYTKNEKFDKDYEKNKSARVEQAETSSRVRLEEAGKAA

SEQ ID NO: 276545 - protein, 273 aa, unidentified
MTVTTVGIDLAKNIFQIHGVDQHGKSILKKKLKRDQLFTFFANKEPCLIGMEACSGAHFWARVLANQGHHVKLMAPQFVKPYVKTNKNDAADAEAICEAVTRPNMRFVGIKSPDQQALLSLHRARSGLIKAQTAQINQVRGLLTEFGIIMPIGKAAVKRYLPLILEDADNGLPDMFRQVISRLYEHLKELGEHIEQYDHLLNEHFKHCELSQRIASLPGIGLISATAIVGTIGDASEFKNGRQLSAWLGLVPRQHSSGGKNTLLGISKRETVT

SEQ ID NO: 276546 - protein, 402 aa, unidentified
MRALQSRWCSKLTTTYSVFVAVNERGEASPAIRVGHDREQYRQFLEQLAAGSEIALEASGHYYWMVDDMEAAGHHPRLAHPLEAKKRMGKTSKKTDKVDANGLGILLRNGTLPEVWIPPAELRDQRESLRLRMFLVQQRTRLKNRIQGTLARYNVQIAGVSDLFGVEGRLRLGKRLGELPEHTRQSVEVELATLDFLEVQLGDIEKRLEALMKVTPEADLLKTLPYVGRILSMVMTLEIGKVERFPSAAHLASYAGLVPRVHSSGGHTRLGQICGDVNQYLKWAFIEAGNLVVLHQKHLAGQHVVRLYQRIKRKKNHQKAVVAVARHLAEAAYWILKKQEVYRDPQPQPKIPVKARAAHSMGGARVSAEPALVPAGQSAATAASLAAIGAEIQPGAGGKRCA

SEQ ID NO: 276547 - protein, 423 aa, unidentified
MNIVYPICCGVDVHKRFFVATLITTKGIEAKYEKQRFSTFNNEILKFKAWLLENNCRNVCMESTGKYWIPVSNLLEDSINVTIANPKWVKTVKGNKDDAKDSKWIGDLFRIGLVPGSFIPCKDIRILREYTRYRFKLVSCKASEKNRYQNVFTVCNVALDAVVSDMFGKSASSITDYIINSDTFDPVHCVSLLQKSLKSKADEVVESIEGFQMTDSQKKRAKMVKEHHDYLLEHIQRLDALVDELAKPFEPALTLLCTNPGIKRNSAITIISEIGTDMSQFGSSKRLCRWAGLTPGNNESAGKKKSVRVARAGVYLKPVLIEVAHAAVKDKKNPYYRIKYERIAKRRGKKRAIIAIARMILTAIFHMLSTGEVWNPVDLKQIDMPPELREKEIQKSLRRAAKLLVAHGIIAPDIIQFPQAASG

SEQ ID NO: 276548 - protein, 368 aa, unidentified
MNTVKFIGMDVHKKTITIAIADEGRQKQPRVYGTITNDLDALDKFCRKMVSTANQLHFVYEAGPCGYGIYRHLTEKGIDCMVAAPSLIPKKSGDRIKNDRRDAKMLARLHRADELTTVYVPDCQDEAMRDLNRAREDAVIVAKKAKQRLKAFLLRNGVAFAGSSQWSEAYFKWLADIAMPHPAQQVALQEYIDAVHESLNRVKRLTDQIRQMVPSWRLAPIVFALQAARGVSLVVAVTVLAELGDLSRFAKPSQLMAHLGLVPSEHSSGESIKRRGITKTGNSHVRKALVEAAWSYRMQARVSRLLLKRQQGLPDQVCKIAWKAQLRLCARYKRLVAKGKTKQKVVTAIARELSAFLWAIAKQVQPLA

SEQ ID NO: 276549 - protein, 319 aa, unidentified
MKTNLQKSFVGVDCHKDTIACYVNGRFKEFRTDSKSFKKALEWAGKDAQWCVEGAYSYGLAFSTFLLASGCKVFEVNPLITSRLRKVDSIAGSKNDFGDAKVISIFAHQSNLQEVSLKTVKLKEKISARKLLVKQRVELINSIKSTFVKRGVSPLFKGLTTIKAIKWLSNHEDIVINSFGKVINELTNSINLLEKEIEGLIPKEAQNLTRLTGISTLSAAIIYAEIKGNKMTKAQFASYAGVAPVDCSSGLTQKHRNNKRGNRQLNCVFYQISVQQSIHDEKGSAYYEKKIAEGKTKHHARKCLSRQIVNLVWKILNEA

SEQ ID NO: 276550 - protein, 344 aa, unidentified
MTFYAALDVSLRSVAICIVDEIGTVCLERTASSEVSEIAACLRGFGHGIEVVGFEAGTLSQPLAHGLGSEGFKVVCLETRQVKAALSAMRNKTDRTDARGIAQILRTGWYAGVHVKSWDSHYVRALLSSRKALLKKAIDLENEIRGLLKVFGIKLPASLGHGPFDARVRPLIEADRVLAEALLPLLEARGMLYEAYLEMDRRVRRAASADTVCRRLMTVPGVGPITAMTFKAAVDDPRRFARSRTVGAHFGLTPRRHQSGEHDNPGRISKAGDAEVRSALYAAANALLSRSQRWSALKAWGMRLQRTRGRQKALVALARKLAVIMHRMWLDGSDFQWGKEAPAR

SEQ ID NO: 276551 - protein, 407 aa, unidentified
MEVVYRCCCGIDVHKKVIVACLVNGGKQELREFGKTTSEIKTLANWLTESGCEMIAMESTGVFWKPLYNLFELMDLDAMIVNAAHMKALPGRKTDVKDAEWIADLLRHGLLKASYIPNREQRELREITRYRKSLTEERCREVNRLQKILEGANIKLDSVVKDINGKSARKLLQRIIDDDIPDSDEVSKLVHGRMRPKLEQIVASIEGITTPLQRKLLAQIIDHIDDLNRRIGELDKLVQEYMAEYEAAIEAIDEIPGIARRSAEVILAEIGLDMGRFPSAAHLCSWAGVCPGNYQSAGRRKHGKTTKGNKALKTILTQCAKSAKTVKSSYFFAQYQRISARRGKNRATLAVAHSMLIAIYHILKNKTAFHDLGSDYYDSFNRDRKINSYLKRLKALGWEPDAISSSA

SEQ ID NO: 276552 - protein, 426 aa, unidentified
MSERDYSKQVARRQRIGNTTLVVGVDIGCASNAVGFMNKEGKVLGSDPNMPNSRGGFERFVKMTEGLKAKHGLSDVLIGLEPTGHYWRKFAYFAKAKGYEVRFVRTTALKHHRELDESSSAKSDQRDALTLTNITREGKYIDTVIEDGRMRQLRTLVKVREKIQKRNGSAKNSLHTALDDYFPELKEIFWSMHARGLWALLERCPFPVDVVTLKVSVLTELIGRASRRRLEASRKAVAVYQAAKESIGLRQIGSADRYRLKMCLDEVKRTELMIKDMEREIKRMLKEIPEAQYLLSIPGIGPISAAVFLGELGNPSYFQRARQVVKYAGYDPQESDSGYRVSRKFISKKGRWLLRKHLFFMSMRVVVLSRYFQEYYQRKLQTKNRFGQLPRKKEILCAVAIKLIKVIFALLRDKRNFEDTVAYSVE

SEQ ID NO: 276553 - protein, 393 aa, unidentified
MNQTSVTDRVVIAIDPHKASWTAAAVDAALQPPEVIRVAVSAEGYRRLRRFAQRWHDHSWAIEGAAGLGAPLTQRLHTDGIEVTDVPAKLAARVRVLSTGHGRKTDEADAISVGIAALTATRLNTASVDAAITALRAVVEHRDDLVKTRTQTVNRLHVLLTHLIPAGAARGLTADHAANILRQIRPRDPAAKTLRSLAVDLVAEIRALDRRITKAAIDITAAVESSGTTLTELSGIGTLNAAKILARVGKIQRFRSADAFASYTGTAPIAASSGEVTRHRLSRAGDRQLNCCLHTMAISQISRDTPGRAYYRRKRAAGKSHREALRCLKRRLSNVVYRQLVRDADTLTGAGPAGHTGATPTSSAAGSHPITSTSDKSLTGPATLYLTSGDRTA

SEQ ID NO: 276554 - protein, 410 aa, unidentified
MDVVYSRCAGLDIHKKTIMACVIVPGPKGKPQKTIQAFGTMTDDIVALGDWLAARQVTHVAMESTGVYWQPLWNLLEERFTLLLVNAHHIKQVPGRKTDVGDSEWIADLLRHGLLRASFVPDRAQRELRELTRYRTALLQERAAEVNRLQKTLEGANIKLAAVASDVLGKSGRQILQALVAGGSEAAELAQLAKGRMRDKIPQLERALTGSFRPHQQFIVARHLALIDAIDETVAQVSAEIEERLRPVEADVELLDAITGIGRRTAEVWLAEVGTDLERFPTHSHLASWAGMCPGNNESAGKRKSGKTRKGNPNLRTALVEAAQAAARKRDSYLSAQYRRLAARRGKKKAIVALGHSLLIIAYHVLKRRVDFQDLGPTYFDERDRTNVERRLVRRLERLGYKVALEPAAA

SEQ ID NO: 276555 - protein, 523 aa, unidentified
MSHSSTRKRPRARRVDVVQKPRGTFHPRVQQIGPEHFGIVSVDCAKARSKWMLADFYGNVLVRPTLLAHNRPALEAAIDQLRQAVRDHDLKDLLVAVERTGRYHRTVQHAFAAAGFEARIVHPFATKQFRQPADPGNKTDDTDLAALHRAAVSGFALVEAGRDEAWTTFQLLIRHRRELVRKSAMLRSQIREHLDAAFPGFAANFADLWERDCAWHLIRHFATPADIHATGLDGLCRSLDAADVRYQRRTLETILAWADQAAAPDLAAAARRRFALALDDDLVQKAREIQVIERDIAAALVRTPYVLLLSSPVVNVVSAADLAGEAGTIEHYASSRNITGRAGLRPSRYQSDEVDRPNGPLVRCCNRKLRAAILRVADNLIKCNHHFNILAHQWREQKKDPRHTHVKVALRFCRIAYQIVAGRQVFHHPCLHQRHYVLAKLMAFQREHDTGPAESLRDLQAALEQVPQREHRVEAKPLHEELDRIQNGGRRGLQLLGDILPIVLARLGVGGVQSTASGEEDPT

SEQ ID NO: 276556 - protein, 360 aa, unidentified
MFSERTSVGLDVHARSIVGCALDTVTGAVTRRRLTPTMEGVSAWLAELPAPVAVAYEAGPTGFGLARQLTAAGVRCVVAAPSKLQRPPGDRVKTDSRDARHLANLLRMDQIVEVRVPTVEQEAARDLVRAREDVRGDLMRSRHRVSKLLLRQGIVYYGGRPWTGPHEVWLRGQRFTAPGLQLAYDTAVETVLLTVARRDRLDRAITEMAFSSEFTPVVRRLCCLRGVSTLTGFGLAVEIGDWHRFTGGSIGAYLGLVPTESSSGAKRSQGSITKTGNTHARRLLVEAAWHHRKAYRPGLTLRARWDQAPAAARARGHEGNHRLHHRWEVFTARKKRPVIANVAIARELAGWCWSLAVLDD

SEQ ID NO: 276557 - protein, 427 aa, unidentified
MNQTKLNRKTTAASGRGDFAALIGLDWASQRHALCLYDCATEKRENSTLEHAPEAIAQWAHGLEQRFGGRKIALCLEQAKGALINALLEYSFLVLYPINPATAARYRQAFKTSRAKDDPSDAQVCLELLLHHREKLTPSLVNDGATRELSRLLEARRSLIDLRTLLTNMLRDALKSYYPQALELAGQDLFAPLGCQFLLKWPSLGQLQKARTESVRKFYYAHNCRRMDVIEKRLHSIASMIPLCRDPALIEPAIVQVKMLARQLLQLGIALKEYDSRIEQLFTQHKDASIWESFPGAGPTLAPRLCCAFGNERSRYQSALAIQQYSGIAPVIERSGKNQHWVHRRWGRPHFVHQSFFEYASQSVLHCSWAKVFIQDQIARGKAYPTAVRALAFKWQRIMFVCWHLNSLKRRGSHLTSKLNHELPKAA

SEQ ID NO: 276558 - protein, 365 aa, unidentified
MKSVFYVGMDVHKESVRIAVLKGTEKQTVYEATVKNDIPKITKIVSGYKAKGNVVAGYEAGCMGYTLQRSLAAASVDCRVIPPNRIERLGSQRIKTDTRDAILIARMLKNHEGESIYVPTTDDESARDLLRCREDLRIELHKAKQQLQKMLLRSGFIYDGEKKLWTKAHREWMAKLKFRHELQKETVTQYYCHIVEIENRIVRIDAKAIEVAESEVYRERVSYLRCFKGIDYITALAFVCEIGDFRRFGSAASFMAYLGLVPSEQSSGPKRRQGGITKTGNTHLRRLLVESSWHYRYRGSASAALQARRSGVDENIITYADKALHRLQSKFAHLLFKGKSSKTAVTAVARELAGFIWGSMVGLYS

SEQ ID NO: 276559 - protein, 338 aa, unidentified
MIGVDLAKNVFQLHAASMTGHPKYRKKLPRNNFAAFMAQQPPAIVVMEACGSAHYWAREMIKLGHEVKLIAPQYVKPFVKRQKNDAADAEAIVTAAQRPEMRFVDPKTAEQQSRAILFRARERLVHQRTELVNALRACLYEYGHVVPQGIHHIKRIEGILDVPNSDLPDLMREECQELLVQIAEKTIRINARTGKIKALAAEADAARRLQTIPGVGPLTALAVEAFAPAMESFKCGRDFAAWLGLVPRQFSSGGKERLGRISKAGQADIRRLLIIGAMSRLNWLGRKSIPEDSWLARLAARKPRMLVAIALANKMARTIWALMTKGEDYRDSAQAAVA

SEQ ID NO: 276560 - protein, 325 aa, unidentified
MIDGILGIDVSKNTLDASMSSCNNRVRTRSFANSSDGWRHLLDWLTTQKIRRVHACMESTGRYSLGIACALYEFGHIVSIVNPAQIRDFARTKLGRNKTDGVDAAHIREYCELFKPKPWAPPSEAHRRLGELQTIRSGIVAGLTEWKNRKSSGMVDAVAQSLADVTISHFTSQLEAVDEAIAQTIDNDSGLLRKRGLLLSISGVGETLAGVMMAELPGPDVLRSSAEVVAYAGLNPRQHQSGTSIDRVTRISKIGNAVLRAALYLPAMSAMRYNPAIVALVARLKSRGRLKPKQIVVAAMRKLLVLCFGVLKTGKPFDPAIALGC

SEQ ID NO: 276561 - protein, 337 aa, unidentified
MHKKSWRITALVEGDIVMAVTLARPNYDSFKKLLVQFLGNYVRIVYEAGPGGFDLYDRLTDDGVECIVTPPSLIPTASGSKVKTDKKDSYKLARLLESNMLKQVWVLTPEERAHRQLARTRRQIANHRSDVMRQIKSLLLFHSIEIPFSSRQQWTGPFTKWLHGLDLGDEYLNKSLEALIKLFDYLSIEKKSLTHEVIKLAREEKYASRVKLLKSVPGIGALSAMEILVELQDIARFKTADELAAYLGLTPSQHSSGEHTRMGHITHAGNDRVRTTLVESSWILIGKDPEIKKKYDNIKYRSGGKRAIIAVTRTLSARIRRMLLDQIPYKIDLKKAA

SEQ ID NO: 276562 - protein, 337 aa, unidentified
MGEVIRIGLDTSKHVFQMHGVNAAEQTVLRKRLRRGDIERFFAALPGTLIGLEACGAAHHWARVLGKLGHEVRLLPPQYVKPYVKRGKNDAADAEAICEAMSRPSMRFVPVRTAANQAELMLHGARDLLLKQRTMLMNAIRGHAAEFGITGAKGVGRITTLLERIGAHESVPDLAREIFARLVEQLVSLERRVCELEKKLLAWHRTNERSRRLVTIPGVGPIGATALTMRVPDPSVFKSGRHFAAWLGLTPKDHSTAGRQRLGVITRAGDETLRRLLVSGAMAVIKCAKSGRSSPWLLELLARKPKKLAAVALANKTARIAWAVMMRGEIYRRAIPT

SEQ ID NO: 276563 - protein, 329 aa, unidentified
MNQQILGIDISKLSFDAAFLDGGHTYRGQFSNDNKGLQKLANWLKKRRAEQVHVCMEATSRYWEEVAYFLYEQGHKVSVVNPKLTKKHSEATMQRNKTDKQDALSIADYCAKHEPTLWTPPPPSVRRLQVLVRHVESLKGDRQRERNRRETSTQAADVVTAIDRHIAFLDEQISDLEQCIKNLIDNNPGLKQQYELLRTIPGVGDKVAITFLSEVPNVKWFAQASQLAAFAGLTPGERQSGTSLHGKGKLVKWGNAHLRSVFYMPALSAHRWNPIIAALRARLKAKEKHGLTVVVAIMRKLLHLCYGVLKTGKPFDPNHALGLNLSLDF

SEQ ID NO: 276564 - protein, 418 aa, unidentified
MNRTLTKKLAQVKPGTIYIGVDMGREHNIAVVLNEQAERLARFRFPNDGDGYDYFHRRGAALQKRHQATAVLVGMEPTNYFWKLLAADLEQREAAYRLVNAFTVKKHREGDQLDRSKDDARDAFTIADLLRTGKFTETQLLHGGYAELRQCVALYDRLRKDIRSQKNLIYNVVGQLFPEFSSVFTDLAGQTALAMLRRHGAAAVVRQMPVESFITAVRADLRGRRLMVSQLRRAHQLSKTSIGLQDGIQALQLALRFHIETLEELQSQMRAIRSTLLEAFLALPESRYLLSVPGLGAITAAIILAEIGDPSRYHNAHQWVKLAGIQPVPNTSGRKTRSRTPMSHKGRPRLRTALYFAVLRLVQVDEAFAREYQRFQQRERNPLTKMQALGALMNRLLRILWALVRHQRLYDPHYQPTT

SEQ ID NO: 276565 - protein, 341 aa, unidentified
MQITTIGLDIAKHVFQVHGIDAAERVVVRKRLRRSQVIAFFAALPPCLVGMEACASAHYWARELTKLGHEVRLMPAKDVKAYVKRNKNDAADAEAICEAVRRPTMRFVQVKSAEQQGRLMQHRARDLLLRQQTQVTNALRAHLAELGIVAAQGREGLKQLLAIIADEKDARLPIDARASLMVLAAQLQALHTMIGAIEKRLTVQHRANEASKRLQSIHGIGIIGASAIAATVTDPKAFRSGRDFAAWIGLVPREDSTGGKRKLGPISKQGDRYLRRILVVGAHSVLRRAKQNPEKYPWLTQLLARRPFKVVAVALANKMARIAWALLASGGHYRPRLAAAA

SEQ ID NO: 276566 - protein, 393 aa, unidentified
MRFVGIDIGSEQHVVAVVDATEVVLRSATKISADAAGHARLRELLGPSADTLVAMEATGHYWKNLFAMLAGEGFAVALLNPRRTSRFAQEELERTKTDAVDALNIARFAAQKHPAVTRLPDRATDDLRELVRHRDRLVQDFGDRTRQLHRLVDLGFPEFKRHVRDLGSELATTILNEYPTAEAFHGLAPGRLSRLRYDGRHTVGPELAKALIDLARVSVGHFHSPAYRLQVHHCCEDLDLLRRRLREIDADVARTLAEHEVGTLLTTIDGIGPTTAARIIAEVGDPAAFLSPATLAAYVGVVPALKQSGKRQPRRAGCSSIGNARLRKALWMPTLTAVQKNPWLRAYYERLRARGKLPKVALVACMHKLLGAVHSVARRRQPFIPILQPAEAT

SEQ ID NO: 276567 - protein, 423 aa, unidentified
MDKNDDSRLAEFRQLKREIRGSTQHLVVGIDIAKERHYAFFGTPAGKTLLHRLVFDNSKEGFEKLCFQTDILKTQHCLTKVVFGMEPTGDYHKPLGEYLIQKDHLVVLVGGSAVKNNRELLDGRWDRNDTKDAANVADLLTQGKCLFYEFASPPLQELRSLLSLQRRLKKQEQGYRVRTRNHLIAQYFPELDPYFGYSEGPAIVKWCLDPREITELPFEEFVRMVSSSNGGEKQRRRLQEIRQKAASSIGCEAHPSVAFEGRVLVEEVRHLQDLLRETQASIRVVCHHFPEYFFLLTIPGFGPDISAKVLEAIGNPHRFENHRQVLKLAGLDLSAERTGKKQDVTPVLSKRGKADLRYGLYQAAFVASTRNRQFMTYFTNKLKGREREKGIGTKMRVKLAAKMLVIAWTLMKKKEKFDPGCIA

SEQ ID NO: 276568 - protein, 400 aa, unidentified
MRAVFGIDVSKASSEVAILVNSEKVHGYSMPNDAIGFSRLLKDLNTVSNPEIIFEATGVYSRRLQAFLEENGYAYTRLNPLEAKKQLDSLRVRKTDKIDAEKLAESQFILNRKPTYGQEEVYQNLRDLSRFYQNLTEDMVRTKNRLHKTLQVTFPELEQLLAAPTGEQYWNLVSSFPSKDFVLELSPSELAEAIRQSTSKRISEKRVTLLSDKLTELAKQSYCAVKKTSPMIEEVKYYAQELLRLTKRRQVILDEMVNLAQPLPEYNILLSIPGIAETTATSIIGELGDVRRFHSANQINAFIGIDLRHYESGNFLAQEHITKRGNPYARKILFKCIHNIAAASHTNPCHIADFYEKRKRQSQTTSTKPHTIAAVHRLIRTMYYLITHNKLYDYTATQSH

SEQ ID NO: 276569 - protein, 413 aa, unidentified
MRNLLEVCCGLDVHKEILVACMLKGGIEEEPEPIIKEFSTLLSGLDEFKSWLIEHNCHDVAMESTGVYWFPIYNVLESIFYEDGPMNIIVANPHHMKNVPGKKTDIKDSQWIATLLRAGLLAPSYIPPKEIRELRDWTRYRDVLIKELVGHKNRIEKHLQQCGFKLSSILSDIFGMSGYELIRKLCEKGKLTALDVKGCLHGTLRAKSDEVQQAVAGRLSAHDRLFLTNLVKVMEHCRKEIEEAEWHITVYAQKYEPTLQLLETIPALQRRASTIIVSELGVDFSMFPTAGHLCKWAGLCPGDNESAKKKKTMRITKGNPRIKSVMVQCAWAATRCKNFFLRDWFYRLRARRGTKKALIAVARKLLAMVWHILTTGEIYEETRYEKTKKNQEDRRKQRLKTEAAKLGFKLVPA

SEQ ID NO: 276570 - protein, 446 aa, unidentified
MKKVYRRCAGLDIHQKTVTACVLIAKAKGEVEVHKQVFGTFTNDLKRLRRWLKDFKLRRVAMESTGVYWIPVWNVLERGNWFDLVLVNPLHVKALPGKKTDQMDCERIAELLQYGLLRSSFIPPRENRELRELLRYRVGLKQDYNRIHNRIHRLLESANLKLSSVVSDILGLSGRTILHAIAAGQTDPGWLADYARGSLRGKRHELELALTGNITEHFRFMLKQLLDDVQYTLDRISKLERVIEDRMQVHQDLIRRLCTIPGVDRIGAWTLIAEVGTDMSVFGDAAHLCSWAAVCPGNNESAGKRQSGRTGKGNRYLRRALCQCAWAVSHCKGNYLTALFYRISSRRGMKKAVVAVCHRLLTIAFHIIRDGTSYRELGANFFDRLQPASTTKRLTHRLEQLGYEVTLAPRLPSYPEPPKKTKRGRPCKCEERALDCKHRPLQPEGF

SEQ ID NO: 276571 - protein, 344 aa, unidentified
MQIAVLGIDLGKNSCSLVGLDASGTVIKRRRLRPENIPPFTELMPACVVAMEACCGAHHLGRVLAAQGHTVRLMSPEYVRPYVKAQKNDDRDAEAIAEAASRPTMRFVELKSEAQLDMQTLHRARDRLVGERTALINQLRAILLERGVTVAQGRHKLERHLAAMLDTGADSAISPRMRQLIEDMRAEWLELDQRIAAFDNEFAACARSDADARRLATIPGIGVLNATALVAAIGNGETFARGRDLAAWLGLVPRQVTTGGKPRLVGITKRGNKYLRKLLIHGARSVLPILAASATPLGSWLQGLLKRTHKNAAVVALANKLARIVWVVLRRGAVFAAAASSVAA

SEQ ID NO: 276572 - protein, 413 aa, unidentified
MEVLYPHCAGLDVHKDTVVACVRHMVNGTVSREVRTFKTTTKELLALSEWLATEGCTHIAMEATGVYWKPVWHILNDGDFALVLANAAHVKNVPGRKTDVNDATWLADLLAHGLIRGSFVPDQQTQEMRDLLRTRKQLVREASRHIQRLQKTLEDANIKLDSVISDVMGLSGRRMIEALIAGQSDPEELAQLAHRRIKASPEELREALRGRVTRHHRFLLSLHLQQIDAVDAAIGAIDQEVDAQIEPFRTTVHLLTTIPGVDELSACVILAEIGRDMSRFPTAGHLISWAGLCPRNDESAGKRRSTRMRKGAAWLKTTLVQCAAAAARKKASYLQALFHRLRARRGAKKADQIEQGHRFALQGMDNVLVIDDVAVFAAWLRAPPAQAHQRRRAEKAFQPIVVKPHPQAMADQP

SEQ ID NO: 276573 - protein, 400 aa, unidentified
MGVDLALEKNVVIVINEKAQRLDHFSFPQDRGGYDYFLQRMEGLRQKHQAGEIIVAMEPSNYFWKLLAKELEEKKIPYHLVNAYTVKKHREGNQLDRSKDDRRDAGQIAELSRNGHYTETRLQKGAYEELRQYATLYDQLIQSLRREKNVLWGLVGQVFPELHQVFKDLTGETCQAFLGSFAAAASLRQLNIDDFITHVRKAFTGKKLCVSKLRQVYQLATNSIGVAEGLQAIQLATQVHLAELDTLQEQLKRVIPAMTTSLAPMPETPYLLSMKSLCTVSAAIFLAEVGDPNRYHTAAQWVKLAGIQPTPNSSGKKQRSQTPMSRQGRSRLRTMLYFTCLRLVHQDDHFAQLYSHLQRTSDNPLTKMQALGVLMNKLLHILWALIHNQTFYNPSLGQSI

SEQ ID NO: 276574 - protein, 407 aa, unidentified
MDLLKTVFGIDVSSRKSNVCIMVNGQKVNDYAISNDMVGFNRLLGDLKQVTKPQIIFEATGVYSRRLQAFLDMHELRYVMMNPLEAKRKTKDDLHQNKTDKLDALYLAKLQSEHPQRLAYVQNKEYQELMANNRIYEQASHDLITNKNRLHKAIQLTFPEIEHLLANPRGKNYWSIVLRFPHPDIVLETKEADIIDFLKGLTGIGKKRANDIAQSLIRLAKVACPAVKKNSAHIRGLKMAINNILSAEEECQTALQEMAKLAPKRDLEILTSIPGIGENTALRIISELGDIRRFNNPSQLNAFVGVDPQVYESGNLTAHLSISKRGTAIGRKVLYLAINQIQSAKKAGNPCHIADYYEKRKRSSETASHKKAAIASIHKLLRTIFALIKNDQLYSYDVAKHNQRLLS

SEQ ID NO: 276575 - protein, 340 aa, unidentified
MDRIGLDLHKRESQLCTLTAAGEVVEQRIVTSRERFSAVLGGRPPARILLEASTESEWVARHLESLGHEAIVADPTYAPMYATRSRRVKTDRRDARTLADACRLGAFRVVHRASDAQRHVRAELAVRDALIRTRTRYVAVVKALLRRDGWRLPSGMPEHTARKVAALPLGPAVLTELAPLLALLAPLQDQIDAADRQLEGGAARDPVVRRLRSVPGIGPVTAVAFAAALDTVDRFASARQVAGYLGLAPSERSSGEQQRRGPITKTGNPRVRVLLVEAGWRLLRSRHPAAAPLRAWAERLAVRRGRAIAAVALARRLARILYAVWRDGREYCPARLTSAA

SEQ ID NO: 276576 - protein, 491 aa, unidentified
MGARRRHKQKPVVVAGPVEIPDAEHELVIERAAAIDVAKAAGKVCVRLPGKSGRRFSRVWDVPARTGAITELAEQLVELGIEKVTVESTSDYWRIWYYLLEDAGLDVQLVNSRDVKNVPGRPKTDKLDAVWLAKLTEKGLLRPSFVPPAPIRVLRDYTRLREDLIRERTRYWQRLEKLLEDAAIKVSAVASKLDTLSTRDMVEALIGGERDSRRLADLARGRMKTKRSELITALDGRFDDHHAELARLLLGQIDALTAQIGALSARIERLIDAMDESDHPTGDRGRSGGGGPQVTGAPSTGGQATAPARRTTTAIGVDSDTATVVEPQRLTAVERLDEITGVGQRAAQTIIAEIGLDMTRFPTPEQLVSWAKLCPRTIQSGPVIRGGKTGKGNPYLKAALGEAAAAAARTDTFLGERYRRLVKRRGRLKALVAVARSILVIVWQLLSDPTARFHDLGPDYHTSRGVTERKIRNHIAHLTAMGFHVTLQPAA

SEQ ID NO: 276577 - protein, 348 aa, unidentified
MDDITTIGLDIAKNVFQLHGVDAQGQVVLRKALRRANMIAFFTKLPPCLIGMEACATAHHWARTLMELGHEVRLISPAYVKPFVKRQKNDAADAAAICEAVVRPSMRFVSVKSKQQQATLMLHSARELLISHRTALMNALRGHFAELGIVVAQGARNVAELVLILEGNGQGPNEEGLPETMRLALQPLATALIGVEAEIAKLDKEILAIHRRNDVSLRLATIPGVGPITASFLSASIPDPGLFEGGREFAAFLGLVPRQYSSGGKPRLGRISKMGNRHLRKLLVVGAHAALYSIKNGKTKSPLADWARALLAKKSFKLVAVALANKMARIAWAIMTRTGHYQPNLATQ

SEQ ID NO: 276578 - protein, 425 aa, unidentified
MKVTYQTCCGVDVHKSFLVATIIKTSGRIEPDYLKKRFSTFNNSILEFKQWLLVNECYEVCMESTGKYWVPVFNLLEDVINVTIANPKWVKAVKGNKDDTRDSKWIGDLFRLGLVKGSYIPCKKIRILREFTRYRYKLISCRSSEKNRYQNALTVCNVALDSVVSDIFGKSSTSIVDYLLDQSGNSINHEEIASKLLRSLKSKEDAVIESIEGYQMTDSQKHRMRLVRAHMDYITAEINDVDSEIESIISSDPDYENAIQFLMTIPGVKRDSAITVISETGIDMSQFCTSKRLCCWAGLVPGSNESGGKKKSVRITRAGVYLKPALVQCAHAAVKSEKSPYYKKKYESLTKRRGKKRAIVAIARMILTAIFQMLSTGEVWNPSDLYKIDMPETLVEKQKAKAIKQAMKLLVREGLYPPPQKTAAS

SEQ ID NO: 276579 - protein, 355 aa, unidentified
MLSVKYIGMDVHKETVSIAVLNSSGKLVMESILENKANTIIQFVEGLRGDLRVTLEEGTWAAWLYDLLRPQVTEVVVCDPRKNALLKVGNKSDRIDARKLAELLYLDRLKPVYHGEHGVRTLKELSRSYLAISADQARVMTRIKALYRSWAISCAGKQVYAPRCRSEWLGKITEAGVRRRAEFYYQQLDALRGLRQQVRRELLAESGKHQASKLLCEIPAIGPIRAAQLIAILQTPYRFRTKRQLWAYGGLGIETHSSADHRYVDGQLQPSKRQVSLRGLNRNHNHELKNIFKGAAIIAATKPGPLQQFYDALVAKGMRPEMARLTLARKIAAIILIVWKKGVCFDAQYLKPQTA

SEQ ID NO: 276580 - protein, 316 aa, unidentified
MPRKRILVKSIDTLISYQVIGIDLAKHLVSACLITGAGEIFGIDRLTYDDLLKSAERMSPTLFCMEPCPEVHYLAEKLQGYGHHTKVIDGAAVKEYIKTHFGGQKTDLNDAQAIAFLSLDTNLPEITPKNTSNSVLSSIQAVREQFRKEYIQSFVSLKGICQRWGLPISKGVMNKNKVEELVSESKKIPQEVKDWLLELLQSCRELQKRLNKISKYLKEYADNDEICQKIMSVPGIGPITATRLKATIGDIQRFEKPKSIVAYYGLVPKSKATGHNEKKRRHNSSRRSSCPFSSDRGCGSSFEFGSKKIPKIKASQ

SEQ ID NO: 276581 - protein, 411 aa, unidentified
METIVERPAALDVHKAQVTACVRVPSVEGKGREQHVAEFATTVRGLLGLRDWLAAHRVEQVTMEATGVFWKPVWAILEDDFPLLLVNARHVKQVPGRKTDVSDAVWLCQLAEAGLLRASFVPPKPIRALRNLTRYRKTQIQERQREANRLHKALEDTGIKLDCVATDILGVSGRAMLAALIEGTTDPEVLAELARGRLRAKLPALKEALEGRFDRIHGLWIGAILAHVDFLDEQIDGLSDAIEEQIAPFVPAVRLLCSIPGIQRRAAEVIIAEIGTDMSVFPTDKHLASWAGQCPGNDQSAARRRSGKSRHGSKWLDWTLEEAALAAVRSKDTYLAAQYNRLRPRRGHKKALGAVKHSILIACWHMLTTGELYNDLGGEYFQRRDPERTTKRLIKQLEALGHHVTLEAVAA

SEQ ID NO: 276582 - protein, 404 aa, unidentified
MERLHPHCCGLDVHKGIVVACRMSDGEKETRAFKTTTPALRELAAWLQADGCTHVAMESTGSYWKPVYNLLEDHFELVLVNTRHLKLVPGRKSDVKDAEWIAELLQHGLLRASFVPSREERELRELSRYETSLKGERTAEINRIQKVLEGANIKLATVASNVMGKSGREMLEAIASGIDDPRALAVLGTGRLRAGQDVLTEVLTGLVQPHQRFMLRQQLRHIDELDRHIAEVAAEIGERLAPFAETRDRLETIPGVGGRAAEIALCEIGTNVDRFPTAQHLASWAGLCPGMNESAGRNRSGRTPKGNMALRPALVQAALSAGRTQTYLGAQYRRFKLRMGPKKAAVAVAHSILVIIYHILRDQTDFHDLGPNYFEPRDRHRAARTHIKRLERLGFTVTLSPEAA

SEQ ID NO: 276583 - protein, 418 aa, unidentified
MDIKKTQKVTKINHQTLIGAVDIGKNVQYGYFRAPNGNDTVTFKFFNTRKGFTVFWKKLCRFKKQEGLEDVVIGFESTGCYAEPFSNFLRKKPVKLVQVNPVHTKRVKELTGNSPNKTDKKDPRVIADIIGLGHALTMVVPQGPAAELRRLTQARERSIKNRTAANNQLQDLVYIIFPELLNAMKPSTKTGAYLLKNYPCPEDIVSLGQKPLAEIVTKISRGKFTDQKALALFEAAQTSVGIKEGKASIVLEIQYLIDMIAQHNQFIASLEKEMHTYLEQIPYGPNILSIKGIGVVTASGLIGEVGDFKSFTTIPEIMKLAGLDLYEISSGSRRGQRRISKRGRPLMRKLLFFAAINAVKSGGIMHDKYHQMLDRGMNKIKALVAISRKILGLIFAIVRDNTMYRKNYSYDHYCKLAA

SEQ ID NO: 276584 - protein, 338 aa, unidentified
MRYIGLDVHKENTTACVISAGGKALKNFEVPSSADGLTAIRDIMKDHEYCVMMESSTYTYPVFRFFSDLGIETYVVHARSLKMVTESTKKTDHHDAETIGIMLRLWKKKEIKGLSMSFIPTREQCELKDICRYCEELSMKIGTEKRRIGSHLYRNCRTLPPEYDDLGTKKTRKYISETWPEDPTLQKRMKELETLMKESKNVKEEVVSRLPEDDNVKLLETIPGVAGLTGVQLMSMIIRIDRFPDPENFCSYFGMVPKVHDSGGKKYHGRMTKQGDKMMRAIMERVTSVHVMHCESSVTEYYRRKVKEMGVKKALITASRKMLTMIYAMLRDRRPFKA

SEQ ID NO: 276585 - protein, 456 aa, unidentified
MSRERTRSKPAGLPIIHPFAAGIDIGSRFHVAAVSPDLCDEPVQTFQAFTSDLQRMADWLVATGTKTVVMESTGVYWVAAYEVLEARGLEVILANAREARAVPGRKSDVNDAQWLQRLHACGLLRASFRPGRAIAELRAYLRAREKHTDYAAAHIQHMQKALTFMNIQLHHVIASITGVTGMNIIRAIVAGERDPDKLAAMRDVRCKESLETIRGALVGNYQPEHLFALKQALALYDFYQRCIDECDAEIEHAVAALNIDRPMPEAPLPKAKHRSKMPNDPGFDVRQALYQLTGTDLTQIHGIGPFLALRLVGECGTDLSRWPTAKHFTSWLTLSPGCKISGGKVLSAHTRKTSNRVTVTLRLAAVTVGKSHTALGAFYRRLAARIGNAKAVTATARKIAVLFYNAMRFGMDYRDPGADYYEQQYRDRVIKQLHRRAAQFGFTLQHLDPIATGGVS

SEQ ID NO: 276586 - protein, 428 aa, unidentified
MQRKAAVCLPFILSRGLLWFLPEQSRTNDRDTRVPEALQCKQFQLANTPMKSELYLGLDVDKEWIVITVAEWGRNGAVQDLGAISNDLHALEKLLARLRKRYGPEVIIRACYEAGPCGFTIARRLRQLGVECAVVAPSLTPTRAGDRLKTDKRDARKLARLLRAGELTEIYIPEPTDEAIRDLCRARSDAVDDRRRSRHRLKAFLLRHGYRYQGKSAWSAAHERYLRELVLPHPAMKVILEEYLISVQLASERIARCEAAMSDLLGKWRLEPAVRALMAMKGFQTVAAMIVVSELGALDRFTHPRQVMAYLGLVPSEKSSSDRRRQGAITKCGNAHARWLLVECAQHYAAPPKVSKELSRRQQNQSRAVRTLSWKAQNRLHQRYCRLMARRLQRNKVMVAVARELCGFIWELLRTQNCYHAPAPSGIS

SEQ ID NO: 276587 - protein, 420 aa, unidentified
MSNKVIFNLDELFISVGIDVGADFSWMSIALPNQQFVGKPYKILHNSIDSLTTAVSKIKEAEELYSLESRIFLESTGIYHYPLFCYLRDKGFNCSVINPIITKNSTNINIRKVHNDRFDSKKAALVGLKPDLKVSLMPSDLALNCRNLCREYYDLMDNRSAYVNKLQGELRMAFPQYLGIFSKVTINTSLTLLETYTSPSAFLKADKQEIIDIIKSTARFGLTYAQNKYNAIIQAATDANQFGYIIDSNIKRIRLYISFIRKYDEEINSILESLHELVDANEDSDFVKQIHLIETFKGAGFLSAVSIMGEIGDFSAFSKPKQLFAYFGLDPAVKQSGKFEGTKVQMSKRGSAIARRVIHTLTLQSISISRNGEAKNPVLREYYLKKCDSKPKLVAMGAVSHKVCNMIFAILRDNKPSPAE

SEQ ID NO: 276588 - protein, 421 aa, unidentified
MSEAKRWYAGVDWGSESHCVFLTDDQGRKVGQKFFKHSGDGLAEMASWLLKVSAAAEPGAVLVAIEVPHGPVVENLIERGFAVHAINPKQMDRFRDRFSMAGAKDDSRDAEVMASCLRTDAKCFRKLASAEPIFIELREWSRIAEELGVERNRLANRLREQLWRYFPALLELEDDCSADWLLDFLTLAPTPAKAVRVREAKLAEMLKQRRIRRIDPASILKAARSPPPKLAAGTVEAASAHVGSILPRLQLVNRQIKEAERKIGALIDSLTASQETQESEPGQTKQHDAAILASLPGVGRTVLATLLAEAWEPLQRRDYPALRSLAGAAPVTKRSGKSCIVVRRQACNDRLANALYHWARVAVQHDPRSRAKYAELRKRGCTHGRALRTVADRNLSVACAMLKSGTVFDPALHAEKTQKTA

SEQ ID NO: 276589 - protein, 322 aa, unidentified
MSVSNQRCAGIDVSKGTLDIAISNIASQFTVPNGTDGFTQVLRELKRNETRLILMEATGGLESCVSCYLQSEGFDVVVINPRQARDFARAMGYLAKTDRIDARVLLQMSEVINQHPERERYIRPLPDAHRQILAAMVVRRRQLTIMLTAERNRLHPSHPLSHASIRSIISALKGELARIEGEMAIHIKEHFSELSELLNAVKGVGSATVAVLLAEVPELGSLSRREISALIGVAPVNRDSGTMRGRRTVFGGRASVRTALYMSALVGTRHNPVIKEFYTRLVAAGKPKKVALTACIRKLLTILNAMLKKNEAWDPMYHQHAS

SEQ ID NO: 276590 - protein, 460 aa, unidentified
MNRKKSKPKIDRKMPMVHPNAAAIDVGATMHMAAVRPDRTPEPVRSFGTFTTDLHRLVEWFKECGVETVVMESTSVYWIPIFELLDAHGFTVLLVNARDAKHVPGRKTDVSDAQWLQRLHSYGLLRGSFRPKGQISELRAYMRQRERLLEYAASHIQHMQKALIEMNLQLHHVVADITGATGLRIVRAILAGEHDPKVLARLRDYRCHANAETIEKALTGSYRAEHLFALEQALALYDTYHEKVSACDVRIEAVLKELSIGRGRSPGSNPLPSPRRPRTDQANAMAFDVHTALFALLGKDITKIDGLGPYLSLKLIAECGDDLSAWPSTKHFTSWLCLAPSNKISGGKVLSSRTRRSGSRAAALLRLAAVTVGRTDTALGAFYRRLSARIGKSKAVTATARKIAVLFYNAVRHGMDYVDPGASFYETRYRARVIDNLHRRAKAFGFALQPIEPIPGIAVS

SEQ ID NO: 276591 - protein, 412 aa, unidentified
MTATNQFAAHVGLDWADKKHDVCVQFKNGERVFHVIEHTAEALDVWLTELHQKVKGRIAIAVELKKGPVVYALQKYPFITVFPVHALSLARYRQAFSPSGAKDDPQDAELALELMLRYPQKIKAIEPDNADIRLLQQLVEQRRQLVEDKRRFVNRIINTLKQYYPQPLEWFSHRGSLLLCELIIRWPSLQQLKRARRDTIRNFLNAKGGRAMALTEQRVASIDNAIPLTIDPSVIEANELMATALATQIKVVSEIIKTYDERIETLFDTLPDAGLFKSLPGMGPCMGPRMLAALGDNRDRFNSAEEIQNYAGIAPVTERSGQKSWVHWRWQCAKFVRQTFVEWAAKTVNSSYWARLYYQGLREKGKSHQSAIRALAFKWIRIIYRCWKTRTQYDEAKYLLALEARQSPLLKP

SEQ ID NO: 276592 - protein, 315 aa, unidentified
MTNNTIGVDISKDHLDAHSMSDCESRRFTNDHAGHKAFLTWLGRSPQDHCPRIVYEPTGPYHRAFERRLAAAGLALVKVNPRQARRFAEATGRLAKTDRLDAAMLARMGALLELQARPTRSPVLNDLKDLHMAREALVKNRTAAKNRAKTISLAILRRHNAEQLRQIERQMAAIETEIMTLIEADPDLARRFAILVSIPGISAVTAFALLIDMPELGTLANGQAASLAGLAPVARQSGQWTGRAFIRGGRANVRQALYMPALVAMRCNPDLKAKYHQLKAAGKASKLAITAVMRKLIVLANALLREHRKWSPSPA

SEQ ID NO: 276593 - protein, 338 aa, unidentified
MEPTTIAIDLATRVFQVHFVDPETGAIHSKVLKRAQLVPFFANRTRSRVVMEACGSAHHWARQLAKLGHDVRLIAAQFVRPFVKSNKNDAADAAAIWEASQRPGMRFVAVKTEDQQAMLALHRMRQQLVRFRVMQVNQLRGLLYEFGVVLPQGRRASIEAAKGAIASLADQLPSMLTDSLQDQLSRLLALDEQIQRIEQHITDWRRGDEACRRISEIPGVGLLTATAAVAVIGNAQAFRSGREFAAYLGLVPRQNSSGGRVKLGGISKRGDVYLRTLLIHGARAVISSSKHLPERLRNMLIRRPTNVVAVALANKLARTIWALLAYGRPYQIPAPMRA

SEQ ID NO: 276594 - protein, 339 aa, unidentified
MNRIVIGVDIAKRVFQLHWVEPQTGEIVALQLKREKFLEHFVNRSNCVIGMEACGGSQHWARSLQKLGHEVKLLSARMVKPFVGGNKNDAADARAIWTAVQQPGIKVVAVKTEAQQAVLALHRMREQLVKFRTAQINGLRGLLTEYGEVMPQGRAGIKRDVPGALGRLSDRLPAIVIETLREQYARLSELDEQIWQIERRLRQWQSRDSAAQRIAAIPGVGLLSATAAVATMGDAKAFKSGREFAAWLGLVPGQTGTGGRVRLLGISKRGDKYLRTLLIHGARSVLTHSKSPPEWLTELIKRRPKNVAVVAMANKMARTIWALLAHERAYQSGYVSRPV

SEQ ID NO: 276595 - protein, 338 aa, unidentified
MYYTGIDLHKFTSYLTTVDSSGNIVKQENIKNVAHNFVQYFNSIPGEHKTTVESTMTWYWLNDLLTSMNIPLVLAHAKYVKAIAYAKVKTDKVDSHTLAQLLRLDYIPVAYKISNEKRLLRDALRARLKIVQRHTSITNSMQLLLAKYNYDTPEQLSGIPKFQYEQLSEVEALLNDQMLDLEKQLYPFLIPNDDIQRLLWIPGIGKMNAFTILLEVDDIYRFPDVKNFFSYCRLTPSARNSAKKSKQRSSKDGNKYLKIAFCDAALHAVQYYPVIRKYHNSLLRKKNKQIAKTIIAKEIAVIVFHVLKNKTVFNNKFRGQELQHLKSLQWPRVVSPYA

SEQ ID NO: 276596 - protein, 325 aa, unidentified
MRQPQSQVKPQTQVGLDVSSQTLDVHIRVDGKAFSVPNTDAGFDQLCEILSAYTVSMILMEATGGYEDNVACYLQLQGFDVVVINPRFARRFAQSMGRLAKTDRIDAAILAQMAFMIDSGPDRDRYIKPVTDEQRKQLSRLSSRRRQVVDLITIEKQRLTHADDYARESINGVISLLNVELKRIESDILHYVKKNFSELANRLLSIPGVGEQAMIVLIADLAELGHVNRRRISALLGVAPFNHDSGKFKGQRRIRDGRQTVRNVLYMGVISATRFNPVIKAFYDSLLLRGKPRKVAIIACMHKLIRIINAMMRTGKPFDMSLHGV

SEQ ID NO: 276597 - protein, 353 aa, unidentified
MTKITQLNFEGETIYCGVDVHKTNWKVCARMNNLEIASFSQNPDPTLLKKHFQSKFPGAELKVAYEAGFCGFGIQRSLTSMGIHCIVVNAADVPAADKDRKRKTDKRDARKLSAELSKGNLKPIYVPDKSMEHARSLVRQRHRLVQDQSRCISRIKHLLLNNDLHAQEKSSYFSLKYIKQLQQLDIQSQTLKMTLHFAIEQYLQIRRLVYELTVSIRQLSKEEPFEPIQKVLQSIDGIGLISGMIIQTEIIDIYRFKTLDSLCDYAGFVPDIYSNSEKMLVRGISPRANDFLRQTIVECSWTLIKKDPAMLMKYNEYRKRMNANKAIIRIGKHLLSRIRYLWKNHLPYERDVV

SEQ ID NO: 276598 - protein, 342 aa, unidentified
MNHYAGIDVSLECSSVCVVDGSGKIVREAKVASEPEALIAWFVSLGFGLERIGLEAGPLSQWLFAGMKRAGLAVELLETRHVRDAFKAMPVKSDRNDARGIAQLMRLGWFRPVHCKSMGAQETRAMLTARKLVQSKLRDIENHLRGILRGFGLKVGKTTNRSFGMRVRELVANHASLEMIVEALLSIHAVLLREFNLFEKQARSMARSDTKARLLMSTPAVGPIVALTYSSAIDDPTRFKSSKRVGAHFGLTPKRYQSGEVDYTGRISKIGDGSVRTVLYEAAHIMLTKPVKGCSGLKSWAMRIAKRAGMNKAKVALARKLAVILHRMLVNGTPFNAAASVT

SEQ ID NO: 276599 - protein, 431 aa, unidentified
MPGENQDKLMSGNQPAVQYAAFLAIDWADQKHVWSLQEANSSARERGEVDHMPEAVETWVAQLSQRFAGRPIAVAVEQSRGALVFLLSKYAQLHIFPVPPAMTANLRKAFYSSGAKNDPTDADLLLDLVQQHREKLRRLSPDTEATRHIQNLVEERRKLVDEKTAQSNRLEAHLKIYFPQIPRWFGDVGSPMVCALLERWPTLEALQKARPDTLRSFFRKHHCRKEELIESRIKAIGEAMPALKDRAVVQTKVAVVKVSVQLIQVLHEGIEGLNRQIQEAAEAHPDFFIFDSLPGAGAVMAPRLLAAFGSQRERYQNAVEMQTFSGIAPVTESSGKSSWVHFRFACSKFLRQSFHEWAALSITQSQWARAYYELQVRRGKKHHAAVRALAFKWIRIIYRCWKERVAYDENVYLAALAKHNSPLVAATKAAL

SEQ ID NO: 276600 - protein, 396 aa, unidentified
MTATHTMHATAPTVQLHLVFELGWSQWVLAFTVGHGQAPRLRTIRARDEEALKAEIAKAKLRFGLPADAPVVSCYEAGRDGFWLHRYLTAQGISNLIVDSSSIEVNRRKRRAKTDRIDAGKLLCLLVRYHNGEKKVWSVVRVPTVAEEDQRQLGRELLALKDEQTQHVNRIKALLASQGLDVKVDEKFPERLAAFRLWDQTTLGEDRQQQLQREFARWQFVHRQILDLEAQRRQCIRRAETPAVKQVRSLLELRGIGLNGAWLLVRELFGWRTIRNRRELAALVGLTPMPYQSGDSACEQGISKAGNRRLRRLLVELAWGWLRWQPSSALSRWYAARFGSGRRARKVGIVAVARKLLVALWRYLDRGEVPEGALLCDWRDKVDPSRKKVAAVAAEA

SEQ ID NO: 276601 - protein, 526 aa, unidentified
MASSNKHSKLRACDEGRYTSDGLKNVTLDDGTRVVTSPSNDIKRPVCGSVDVHKSVLMAAACVTDKESLNAVFYVRQFTSSNSDIRLMAEWFASYGVQDVCMESTGKYWIPVYDILEQNGIKPILTHPKYVKQAKGKKTDFRDAIHIANLFRMDLVAASFIPPADIRDLRELCRYRLKLTYIRTSEKNRFQNSMTISKVRLDSVFTDPFGKSASNIMSYLIQTDPDEVSDEKILSFVRRGVKASPEEILDSIHGYEFIGVQRDKLEVIQTHMDDLNKCINMIDEKLSYYRLKYSKVILHLVTMIGISEESALYILGEIGADMSVWRDSDSLASWAGLSPANNSSAGKKKTTKIGKGGHYLKPLMVQCALAAIKSTKKHPYFYYKYLTLKKRRGHKKAIIAIARKMLVAIYHMIRDDKDFEPIDYEQVVTRKQSQKELNLTNIIEFLGEHGVDPETIRTVETQCSQAGQTGEGTSTSKPKKSQQKKQPKSKTETTPTEQKPAKRRGRPPKSPQTKSQSSTQSAAATA

SEQ ID NO: 276602 - protein, 349 aa, unidentified
MQSTTISVDLAKSVFQIAVSRRPGKVSESHRLSRSQFLRFFAERRPALVLLEACGTAHFWAREIQALGHHVKLLPPHAVRRHVDRRSKTDKGDAKALLEAHRDDRVRAVPVKSVAQQTLAALHRLRSAWMADRTARINLVRGLLREFGLPIPVGARHVVVTALALLEQDQLPAPLRPGLAAACREIGEFETRIAELERQLRTLAVQLPVVERLQSIPGVGLLTSTALVALVGDVQRFPTSRHFASYLGLVPREHSSGLRRRLGGISKAGDTYLRTLLIGGARSVLLATQRCQRREPDRLRRWALQVHRLRGHNPAAVALANKLARIVWAVWRNDTRFASRPVTARSKAN

SEQ ID NO: 276603 - protein, 384 aa, unidentified
MVGTYVGIDVHKNMCHAIVMSQEGSIIGEKIFSTNAKVLEAWVRTHPKDYVYAMESGTPTKRLYWVLKEMGREVHVAHPTEVRRMMGTKKKTDREDSAFLAELLRMNRLPKSYVPDPEANEERQLLRYRMDLAKKVIAVKNQIHAILTAAGVPECEFTDVFGREGLRTLHRIELQGYQKYILDCHLRQFELLNAQIEDVMGALAKLAQKNPAARNLMQIKGIDFYSALVILNEIGDVTRFPTAKHLTSYAGLVPRIYQSGDISRMGHIHKQGPKALRTMMVRCATASVRGPGKFQRFYDRKRKQIGHGKAIVAVARKMLAIVFTLLTRGCEYEERDDRNVDKKMRIMERKAKALPDIDLDSSFAGLPENARQVLRGETGIWDLG

SEQ ID NO: 276604 - protein, 369 aa, unidentified
MDDIIFVGLDVHRATVCIAIAEGGRGGEVRQLGIFENRPEILSKVVSRLSKGGRRLSFCYEAGPCGYGLHRLLTGYGHECVVVAPSLIPMKAGDRVKTDRRDALMLAKLHRAGELTAIWIPDAAHEAMRDLVRARATAVRVLVKARQHLQGFLLRHERIYRGARAWTLAYRRWLTTVRFEHPAQQIVLQDYIHAVQEAETRRDRLTQQIEELLPNWSMAPVVAALQSMRGVALVVAVTVVAEVGDFRRFANPRQLMAYLGLVPSEHSSGSSVRRGGITKAGNALARRVLIEGAWTYRMSARVSRKLHDRLEGLPAAVRDIAWKAQLRLCARYRRMAATGKPKVVVTTAIAREMVGFIWAIARLAQPALV

SEQ ID NO: 276605 - protein, 376 aa, unidentified
MNKCHSNTELSSHEGTRSQFNGGAGAIKSAVGRMRPVCALGIDVHQDFYVVVEQVDGTNPKPPQRFPKQAFLRWAARLKENTGAEVHAVYEACGFGFSLQRQLSSLGVQCHVVCPQKLDEQNRRVKTDGLDAKALVLKLDRFVQGNRSALALVRVPTEEEEQKRAIHRQREQLVKARKQLEAQGRSLMVNHGLEPVQSWWKPRAFAALPVPQWMKELLANSQPILVALQQKIASLTIQLQSSATPKQPRGLGLMTSVIIDREIGDWRRFSNRRQIGSYTGLCPGEYSSGNTRLQSCVTKHGNPRLRAALVELAWRLVRFQPNYKPIVKWRQILAKGALATGAARKKAIVAVARQLAVDLWRIKTGRLRAEELGLIN

SEQ ID NO: 276606 - protein, 357 aa, unidentified
MTYYIGCDAHKHYSMFAVLDDEGQLHQQIRINHAPKAIKGYLSQFPEGTPVALETIGNWYWIVDEIEEAGCTPKMAHAAKAKVMMGNVNKTDKLDAKGLATLERLGTLPVVWLPPGDLRDERDLPRTRMAFSKMRTALKNRIHSTLAKYNLSLDSSSDIFVPKWKGQLLHAFKALPPETRRCMEQELELLDHVKDHIKRLEERILERVELTKTIQLVKTLPGVGKILSIVIEREMGCVDRFSSSEKFASYAGTTPKVKASGGKFRYGKMRKQSNNYLKWAFIEAANVIVRHRNYPGWRDKHVSRLYERIRRRKGHAVAVGAVARHLSEAAFWVLKKNEPYKEPVPRTVLPKQGRARG

SEQ ID NO: 276607 - protein, 387 aa, unidentified
MPVFLGVDPHKRLHAVVAVDHNHQVLARATFPNTNDGFIELRRFGRRWKDRTWAIEGCNGVGKHLSQRLFSTGERVVDVSTRRAALVRVYAGGNGRKNDDTDAHSIAMVASHTPDLPEVQADDRAAALRLVSHRRKELIGLRTQAVCRIHRDLQVLIPGGAARKLSAAKARELLATVRPRDEVGKLRRRFIADQIRDLERLDRQIAKLDDELATMVDDTPTTLRELYGVGTITTAMILGEVGNVARFRDRNHFASYTGTAPCDRGSAGDPRPSVNPHGNRRLNHAIHVVAVTQVRNDTPARQLYARKISEGKTKKEALRVVKRRVADAIFRQLVADAQREEKVGPGGQAGTSLSSSVTSSTPTAGSSEKPQPGPAPEPTTTPLRVPA

SEQ ID NO: 276608 - protein, 320 aa, unidentified
MQSVCGIDVSKDRLDIMVLPEQQCFSVRNDAAGWAELVERLRGLSISAIGLEASGGYERGAMRALLAAGMPARQVNPFKLRQFARASGVLAKNDPLDARMIASFLAIMPTLPAQLRAPAIERLAEMLAVRRQLSAGKVAAENASRLLEDPMLQRLSRRRIRRLAADIDMLDRHLTQIVGTDAALAHRYRLLTSMPGVGLVLACTLIALLPELGHMGRKQVAALVGVAPYAFESGKFKGRRCIWGGRAPVRNVLYMAAMSASNWNPVFKAFHDRLKAAGKLPKVVIVAIMRKMITALNAMVRDDVVWADHLSGRHSVPTAR

SEQ ID NO: 276609 - protein, 342 aa, unidentified
MKEFIRIGVDLGKRYIQIHALESKDGRAVKRKLPRSKFLEFFADVAPCLIGMEACGSAHYWARQLRAMGHDVRLMPPVYVKAYVKRGKNDAVDAAACCEGVSRPDMRFVPVKSEEQQATLTLHRTRELLVRQRTMCVNALRGHLTEFGLVAAKGIGRAGELIDMAGTDAVLPEIAKSVVKVFAEQLAAIQASIATLEKKIAGVHAQSPMSQLLAGIPGVGKIIASAIVASVPDPQVFKSARDFAAWLGLVPRQNSTGGKTKLGPITKKGDRYLRKLLVLGATSALRVAGKRKGALRDWLAALLEKKKSARLASVALANKLARIIWAMMTSGETFRKDMFEPA

SEQ ID NO: 276610 - protein, 347 aa, unidentified
MNFYTQQHKHYCGIDLHARAMYVCILDEQGTKLVHKNLPTTPEAFLRLIAPYREDLVVGVECMFTWYWLADLCSQEGIAFVLGHALYMKAIHGGKAKNDKIEAHKIAVLLRGGMFPQAYVYPSEMRATRDLLRRRCHLARKRAELLAHIHNTNSQYNLPEIGKRLANKSNREDVADHFPDPSVRKAIEVDVALIDQYDQLLGEVELYLTRSAKAHDVQPFARLQSVPGIGQILALVILSEIQDIARFPRVQDFVSYCRLVKCAKESNGKRFGTSGKKIGNVHLRWAFAEAAVLFIRQSQSGKEYFAKLEHKHGKAKALTVLAHKLGRAVYYMLSREQAFDLKRFVTA

SEQ ID NO: 276611 - protein, 432 aa, unidentified
MGLVEVRGIQPTTGWMVIHMYFAGIDIAKKQHEACIIDDQGTTVLTMPVPNTQPGAARFLAAVRKRIGDDPHAVAFCLEATGHYWLSLYCFLTQQGYPVHVINPIQSDAIRNLYIRKSKTDRKDAFILADLLRMNQTEETCMASEVVLKLQTLSRTRFAFVNQVSALKQRAIGVLDRIFPEYASCFSDVFIKTSRELLKNHSTPDEIAALDLHELTRFLESHSRGRLGQGRAERIQELARGTFGIGLAVDAFALELRLILSQIEFIEAQISDLESAIKLAMEELQSQHAPGSLEGEQHHVIETIPGIGTILAAAIIGEIGDIHRFSDARKLVAYAGIDATVRQSGEFTGSRNRMSKRGSPELRRAIWLAAVSARRFNAELSAFYEAKKQQGKHPMVATGAVARRLVHLIHSVWSREQPFDPDYRWSPSGSAD

SEQ ID NO: 276612 - protein, 392 aa, unidentified
MLYVGIDVAKSKHDCCIIDSDGSILSDALRISNSLDGFELLCSTILSHLQDDDLDNVKIGLESTGHYSTNITNYLYAKGFQITTLNPLATNLFRKAHTLRKTKTDKTDAMVIASMLFTDEPKSYSPVSYQIQELKSLTRHRYRMIGYRSKLKLSITRLIDIIFPELPSEVWSIHQNSSYQLLLECPTPEAIVACHLTKLSNILKRASKGHYGKDKALALKSLASKSIGSNNRSLAFELKQTIRLIQSVQHEINELELQIKIVVDELNSPLMTIPGISYTLASVIIAEIGDIERFSSPAKLLAFAGMEPSTYQSGNYKATNTPMVKRGSTYLRWAIMQAARTVSMRDITFANYLHKKRCEGKHYCVAINHVGKKLTRVIYYLMMTNTAFVSQT

SEQ ID NO: 276613 - protein, 340 aa, unidentified
MKKILFIGIDFSKSKFDVTVLKSIDQQDCAQAIFLNEQQGFNDLLKWLSKQSDVSKQDWLFCGEHTGLYSRGLAEFLVKKNLFVWLENPLQIKCSWGIKRTKNDRIDSLEIARYAFRFQDKAVACKPMNKDIESIRMLLAYRGRLVKNKVSLEVAAKETRRVINRDSVSRFVYENSQRDIERIKKEIEQIEFKMQEIIMAGDLKQNYQLVVSIKGVGPITAITLIVHTDNFTAFDTARQLACYSGVVPFEKSSGTSIKGGNHVSHLANKDIKVLLTQCARSAVQYDKELSAYYTRKIAQGKKHLVIINNVRNKLIHRIFAVVTNKIPYRENYLNPWADCA

SEQ ID NO: 276614 - protein, 423 aa, unidentified
MEAMHERVAGLDVHKAMIVACVRMMAGGKVSRECRTFDTTTAGLEGLLGWLTESGCTDVAMEATGVYWKPVWNILSDGKFELIVANAAHIKNVPGRKTDVNDAMWIADLVACGLIKASFVPAEAIQELRSLLRARKQLTREQTSHIQRIQKTLEEANIKLDSVISDILGVSGRRMIEAMIAGVRNPFKLAELADRRIKASPKALYDALHGRLTDHHRFMLQLYLRQHDSLSEAIAKIDQAADASIARMDEEVEAGQASFRSLITLLCTIPGVSTLSATTILAEIGRDMSRFPTAGHLLAWAGLCPGQNESAGKRKSSRLRKGAPWLKTMLVQCAWAASRKKDSYYKAQFNRLRSKRGPKKAICAVAASMLTAIYHMLKDGTEHQDLGADHFDRRSTAVKANRLVAQLVKLGFQVELHPLAEAA

SEQ ID NO: 276615 - protein, 344 aa, unidentified
MGEVSTIGLDIAKSVLQVHGVDGAGAVVMRKRISRAKMLEFFADLPRCLVGMEACPSAHHWSRKLQALGHRVRLMPPSYVKAYLKRSKNDANDAAAICEAVVRPSMRFVPIKTKEQQAGLMLHRTRQLLVRQRTMLSNALRGHLAELGIVSAKGRNGISQLLGIITDVTDNRVAPAVRGLLDVLARQYSAIGAEIRSIDKSILTWHRSCEASRRLEEIPGIGPIVATALVAEVGDWREFRSGRNLAAWIGLVPKQHTTGGKERLGSITKQGNRYLRWLLVTGAMAVIRYAKKHGTERRPWLARLMERRHTKVAAVALANKMARMAWAIMVRSERYEEPKLLLAA

SEQ ID NO: 276616 - protein, 324 aa, unidentified
MAGGVFVGVDVSKDRLDVAFRPSGEKLTVPNDRRGVTRLVRTISRLKPECVVLEPSGGYERKLLEQLSEEGSPVAMVNARNVREFARASGRLAKTDAIDAAVLAHFAEVMKPELRRLPDPETRKLRALITRRNQLVRMMTAEQNRRLQALESVRAGLSAIIRCLKKQIGVLDKQLAALIRATPAFRQKAELLRSAPGVGHVVSATLIAHLSELGTLNRKKIAALVGVAPFNRDSGKLKGKRAIWGGRGDVRSMLYMSTLVAVRLNPSLRVFHERLRRAGKPPKMALTACMRKLVVMLNAMLKAGGRCTEEGIRPVKIIPARVST

SEQ ID NO: 276617 - protein, 352 aa, unidentified
MANGITTMLTIGIDLGDRQSAVCVLGGDGEVVERFNVATTREGLERKLGRWERARIVVEVGTHSPWVSRWLEAKGHEVIVANARAVRSIAESDRKTDRNDAEQLARLGRVDPKLLHPIRHRGEAAQRHRMLHTVRDHLVRTRSSFIVQARGLAKGLGERLPRCKSETFAKRMRVAPWATLFPAMDVIVTTVEQLDAHIAALDAQLEALGRHTYPETLLLRQISGIGLLTALAFVLTLEDPARFRHSRAVGSFLGLTVRRRQSGARDPALRITKAGDFYLRRLLIQCAHFVLTHGPDCDLRRFGEQLIARRGRRKAAVAVARKLAVRMHRLWITAELYEPLYDAERRAQRVAA

SEQ ID NO: 276618 - protein, 306 aa, unidentified
MYYIGLDIHKKTISYCVKDAAGCVHREGKIGSSRRELDAWVRTLPQPRMMAMEATIFTGWIYDYLLPHAEKLKVAHPLMLRAIAAAKKKNDKVDAAKIADCLRCDFLPECHIAPTEIRDRRRVLRYRNLVVKQMTQMKNRVSGLLMETGVSYNKQRLHKVGYFGEMMSTNVDISDAVRPLLNLSRGMIRRSGKLEYDLVSSLERDPLLKERLRRLRTVPGVGSITALTWALEIGDYTRFSSNRQAISYCGLCADEKSSADKVMRMPLSKQRNKHIQRVLVEAAKLAPRLSPELAMIRCTRVGERKS

SEQ ID NO: 276619 - protein, 343 aa, unidentified
MQAITTIGLDIAKSVFQVHGVDADGRVVIRRQFKRRYVLAFFEKLTPCLIGIEACASSHHWSRQLRALGHTVRLMPPAYVKPYVKRQKNDATDAEAICEAVTRANMRFVPTKTPEQQSGLVLHRARHLFMRQQTSVINAIRAHLAEFGIVAPVGRRGVEELLRVVSDAHDRRLPELARACVAALGSQLRVIKAQILNFDRMIAAWHRSNQMSQRLDELPGVGPALATALVASVADPRAFRSGRDFSAWIGLVPKQSSSGGKQRLGGISKQGDRYLRGLFTAGALAVIRYAKIHGTGHRPRLAALLARRPTKVAAIALANKIARMAWAMMARGERYREPVALAA

SEQ ID NO: 276620 - protein, 347 aa, unidentified
MSYLGVDLHQNSITICRREADGSEAFETLTLTPADLDRFCLSLDAGDEVAIEATGNSAWFRDQVLPCVGRVVVVNPSQFKVIRKSVKKTDRNDAAALALFLEKDMLPETRAKTQAEAELASLAHTRDLLVKQRTRLLNKLHALHVGKGLKLKKESLGSKRGLAAIDMGLFSACEQIEIAVLRETAAALTASLKQLDGEIEKLASALAGYEGIVSIKGIGARSAAVLLAAIGNVHDFESADKLAAYFGMVPRVSQSNETDHRGRITKRGNKLARTTLVQCSFIATRYSPYLKAFYDRIRARRGTGKAIIATARKLLAIIYDTLKNGWVFEDFTQFQRRENPIPAGQSS

SEQ ID NO: 276621 - protein, 445 aa, unidentified
MDRVVDRPGALDVHKEQVTACVRLSDQDGRSRRQEVREFKTTVRGLLAMADWLRAHGVTVVAMGATGVYWRPVWAVLEGEFELMLCNAAHVKNVPGRKTDVADAVWLCQLLEFGLLTASFVAPKPVRELRELTRRRRTLVRERAQEVNRLHKALEDTGIKLDCVASDILGVSGRAMLDALLAGERDPQKLAALAKGRLKVKSPALIEAFEGCRFGSQNTLLIGGILRHIDFLDTEIAALGEAIEQHLKSDRPADDRPAPFELAVRIACSLDGIQQRTAQLLIGEFGTDMSRFATDKHFASWAAQCPGNNQSAGKRKSGQTRKGPRWLDGALHDAAMGAIRVKDGHFARKYRRIKARSGHKKPIGAVKHAIPIALYQMLKNGELYRPNPQPRRRAPSPGARHQTPHRPTREARTHRHATNGNVNDPGTGRRLRRIFLPARASRVRP

SEQ ID NO: 276622 - protein, 320 aa, unidentified
MAELSHCGIDVSKDRLDVVVLPDEQCFSVVNAAAGWAELIEKLRGLNIVAIGIEASGGYERGIVRALLAARYSVRLINPFKLRQFAKACGVLAKNDRLDARMIARFVATMPTRPMQRNMAAERLAELLTARRQLSEEKVAAQNGSKLLEDSMLQRLYRRRITRMEADIMLLDKRLADMVAADPALAQRYELLISMPGVGPVLAYTLVALLPELGQMSRKQVAALVGVAPYDFESGKLKGMRCIWGGRAPIRRVLYMAALIASRCNPALKVFHDRLQATGKKSKVVIVAVMRKILTTLNAMARNNVLWNDRRNGRHAVSAA

SEQ ID NO: 276623 - protein, 450 aa, unidentified
MSPLALDVVTKTDKTPVLGRMLSKYVGRKTSSIENGITKARNHSRQRGNIMRVVFGIDVSKASSEVAILVNGEKVHGYTIPNDAIGFNRLLGDLKTVHQPEIVFEATGVYSRRLQAFFEDNSYTYTRLNPLESKKQLDSLRVRKTDKIDAEKLAMSQFILNRKPSYVQEALYQELRDLSRFYQNLTEDIVCAKNRLHKVLQITFPELENILSAPTGEQYWNLVITFPCNSFVLESDDATLTAIIRQSTAKRISEKRVTYLVDKLTKLANQSYCAVKKTSPMMEEVKYYAGELLRLSEHRQGVVEEMVTLAQSLPEYEILLSIPGIAETTATSIIGELGDIRRFHSANQINAFIGIDLRHYESGEFLAKEHITKRGNPYARKILFKCIHNIASASHTNPCHIADFYEKRKRQSQVTSTKPHTIASIHRLIRTMYYLITHNKLYDYTSIQNR

SEQ ID NO: 276624 - protein, 343 aa, unidentified
MSEVSTIGLDIAKSVFQVHGVDVDGAVVIRKRISRAKLLEFFASLPPCLVGIEACPTAHYWSRRLQALGHTVRLMPPSYVKAYVKRSKNDANDAAAICEAVTRPSMRFVATKSEQQQSGLMMHRSRQLLVCQRTMLSNAIRGHMAELGIISAKGRNGTAELLAIIADEQDDRIPAAARFSLDILARQYAVVRAEIATIEKRIHAWHRSSEESRRLEEIPGVGPIVATALVAEVGDWKVFSSGRSLAAWIGLVPRQHSTGGKERLGRISKQGNRHLRWLLVAGAMAVIRYARQHGTKRPWLARLMARRPIKVAAVALANKIARMAWAMMVRGERFKEPKLLPAA

SEQ ID NO: 276625 - protein, 401 aa, unidentified
MSKKNTRNALDTSLSYAVIGLDLAKADCAVAAVPCSDDELGLIDRMDYESLFEQAEKLGPTLFAMEPCCGYSQISLRLQNMGHEVKVISGHAVKNWIATHKSNQKTDLNDATALAKLALYDHDLQPIRVKNVEECRIASVQAIRIQLRTQATKSLVCFKSLCQCWGIVIRRGSLNTKKMAEAVAAVEKLLGAEVVSSLMILRDAYKFTMKQINALDKLLDALVEANEQARTMKTVLGIGTQTAARLAVTTGDIKRFPMPRSYVAYFGLALRNIITGHSGTPSPSKRGALKPVRSRGQGKGYRRGDRVARSFIIQGAATIYMLYCKDMLPECQLRRWLHEQIMRGKPYGKIIVSLAAKLLRIVWALLTYGEKFDSHKAGVPRSVLAAMEKPLKHDAAAESAA

SEQ ID NO: 276626 - protein, 454 aa, unidentified
MKYHFIGIDVSKEKLDATLICYESESDSEQQLAYTIVENNPKGFRRLVSWSKKNAGRGVKTDTMLFCCETTGGYDRALCDWLYGNGLNIWRESALQIKRSMGLRKGKDDKADSEMIAHYALRFRSKAAIYKPMDGNMRSLRDLFLYRQSLVAERRAKTVSAKEKRHISSKSKVDNFIYRDAQKAIDLLTKSIKECERRMLEIIKEDEEMYRHYLHLISCKGVGLVTSVMLIVYSDNFKGWSAKKMASYCGIAPFYESSGSSVFHKSNTGGYSNRRLKGILTQAARSAITHNPTFKQYYQRMKAQGKPHGVILNNVNNKLLHILFSLVAHDCDFELEHESKREPPPRRAGSRREVDRASETRKNFAFYLHMNLESSRYTSPEEIGNIQGANENSPRRGEIKLRRNEMKLRKNEIISPKNFPTPHWIIRNLYRGIYDFLHREVDELIIYNVSPPNL

SEQ ID NO: 276627 - protein, 382 aa, unidentified
MTQTASRRKHSVEAERLYVAFELGWTTWKLGLCTRLDDKAWVATIDARDIGAMKKTIAKAQARLGLSPTWPVASCYEAGRDGFWLDRLLKQIGVVNVIVDSASIQVNRRARRAKTDRLDAEALLKMLVRHVSGEPKVWHVVHAPTPEQEDARHLQREIRTLTKEQTRIVNRVRGLLASQGVAVKMGERGLVGSLESVRIWDGSPLPAGLKLRIEQELSRRAVVHEQLLALVAERNRGIREGAGATAAISRRLMELKAIGPATAETLTREIFFRHFKNRRQLGSYSGLTPSPYQSGEMSHESGISRAGNTHFRGISVDLAWDWLRYQPQSALSRWYQRRFGSGGPRMRKVGIVALARKLLIALWRYAEKGILPEGARRKALAV

SEQ ID NO: 276628 - protein, 355 aa, unidentified
MTSAKYIGMDVHKESISIAVRNAAGKIVMECVIETKASMILQFIDGLRGDLQVTFEEGTSAAWLYDWLKPHVTKLVVCDPRKNASRREGNQSDKIDARRLADLLRLNHLYSVYHGEHGLRSLKELVRSYLTITKDLGRVLSRVKAIYRSWAIPCSGKQVYAPRHRVEWLGKITEPGVRRRAEFYYQQLDALRAVRQQVRRELLAEGKKHPAWKRLCQIPAIGPIRAAVLLGILQTPQRFRTKRQLWAYSGFGIETQSSADHRRVNGQLQRVKKQSSLRGLNRNGNHDLKNLFKGAAVVASSKPGPLQEFYTTLLSKGIRPEMARLTLARKIATIVLMVWKRGVCFEAQHLKPQTA

SEQ ID NO: 276629 - protein, 434 aa, unidentified
MSEFLSDFVVGIDVSSEFSVVAMLEPNGSLIRKPFRIDHNPAGFNKLLTILKKEEERLKQKPIYFVESTGIFHLPLFFFLKSNDLKGFVLNPLCVHSTKNFNLRKVKNDAKDAESIARLAKFQNVKYSLVPEPRILALRMLLREYYSISDMLTELKNRLCTDLYLLFPGYLDVFSDPFGKSSLKILRDYPTPQAILSESPDTLAKMMATTSRKGLIWGQKKVAKLVEMAQLCLSMPMEFTILSRKIQYHLDGIEMFQNNQVGLKEQLAVMISDVDFPKNVRDSIILLEAMPGIGFLTAATIMAEIGDFSRFHSPKALVAFFGIDPSVNQSGKFNGDRNKISKRGTRLGRRVLFTAALGSIRTTSKGDPINPVLRDYYQNKCQNKKKKVALVAVMHKLLHYIFAVLRDQKPFEFRNPEDHQSWRNSNRSGLTLVA

SEQ ID NO: 276630 - protein, 367 aa, unidentified
MKKVSTILAKQSRKSFQQKLTIGLDLGDRNSWYCVLDEVGHIQLEQRVRTSAKGLGEVFGAMPHSRIALETGTHSPWISRLLREFGHEVIVANARKVRLIGESRKKDDRLDAQTLARLARIDPELLCPVKHRSAQAQADLMMIRARAGLVRARTGLVNTARGLAKSYGERLRGCNVRNMNPEKAEGLSAELQAALEPLLAAIESVSERIAEYNQRIEKLAQESYPQVAVLKQVKGVGTLIALTFLLTLEDPHRFDKSRDVGCYLGLQPGRRNSGQSEPQLHISKEGDPYLRTLLVQGAQHILGPFGVDCDLRRWGLKLADRGGRNGKKRAIVATARKLAVLLHHLWVSGEVYEPLHNNRRVAVTAAA

SEQ ID NO: 276631 - protein, 336 aa, unidentified
MFQLGIDVSKKTLDLCLLREGVKGRVKTRKLQNDINAVSSVIAWLSKQHCKPEDVHIIMEATGVYHESLAYGLHKAGGRISLANPHRTREFARGMGILTKNDRVDAYMLACYGALKAPEPWLPPPEEVRHLSALLRRRDVLVTDCTRKKNRLEKYLATDTPPVIAESVEAMISQLNAEIKRLDRLIRSHLNLHPELKKDFDLLTSIKSVGYQLGLNMLVILRSHDFTTAEQAAAFLGVVPVEKYSGTSVRGCPKLSKIGPPEIRVKLYLASLCGLRFNPLMKSMYERLCLRGKAKMCAIGALMRKLVHWCYGVLKTQKPFDVDYLSSDARSACKAA

SEQ ID NO: 276632 - protein, 413 aa, unidentified
MKEVYRRCCGMDVHQQTVVVCVLPPDGVEGKAIRKVYSTFRNDLIRMRVWLKQLKVTEIAMESTGVYWRPIWNVLEEQGFSRLLLVNPVQVKALQGRKSDGRDCQRIAEFLQDKRLDGSFVPPPEIRQLRFMLRHRVALLEQRNEVHNQIRDLFETAGIKLSSVVTELMGVSGRRIIEALIAGQDSPELLSWKVRGRLRKKEKVVRESLKGYFSEFHRMMLRSYYEHYQFLTRQIAWLEVEVEQHMQPHAELIALLLTIPGVDRIVAWTLIAELGTDPSVFPDGAHCASWAGVVPGEDESAGKPRSRRCRKGNKTLRRILTQAAWAASHCKHGYLRALFYRIKARRGWGKAILAVGHKILLIAYAIIKDRVAYRDLGDDYFDKLNPARTVKRLVHRLERMGLQVQVSEVRSGV

SEQ ID NO: 276633 - protein, 362 aa, unidentified
MRTVFGIDVSKASSEVAILVNSEKVHSYSMSNDAIGFSRLLKDLKSVQNPEIIFEATGVYSRRLQAFLEDNNYAYTRLNPLEAKKQLDSLRVRKTDKIDAEKLAESQFFLNRKTTYIQKEVYQNLHDLSRFYQNLTEDIVRAKNRLHKVLQVTFPELEQLLSTPTGEQYWNLVIAFPIKNFVLEVSETELTELIRQSTSKRISEKRASSLADKLTELAKQSYPTVKKTSPILEEVKYYAQELLRLSQGRRVVLDQMISLAQPLPEYDILLSIPGIAETTATSIIGELGDIRRFQSANQINAFIGIDLRHYESGNYLAQEHITKRGNPYARKILFKCIHNIASASHTNPCHICLLYTSPSPRD

SEQ ID NO: 276634 - protein, 460 aa, unidentified
MRKQRDSKRKGKSQHPVSWEEGLPALNRNAAGIDVGNAEHYVAVPVGRDPEPVRKFGSFTADLHRMAQWLKACGIQTVVMQATGVYWVALYQILEDNGLQVNVVNARHTKTLPGRKTDVLECQWLQKLHTFGLLNNSFRPVEEIRILRTYLRQRENMVAATSTCIQHMQKALTQMNLQLANVISDISGATGMAILRAIVAGERDPDKLAGWKHGRIRASKQQIAQSLEGDWREELLFVLQQSLELYDTYAGKIAECDQRIEAHLKTMQSKPGTTSQPLPETSQPRKLRARFNLRDHLHRIAGVDLTKIDGLDVQTVQIIISEVGVDMSRWNTEKSFASWLGLCPDNRVSGGKILKRGTRQVVNRAATALRLAAWSLIRSQSALGANFRRLRSKLGAPKAITAMAHKLARLIYRMMKFGSEYVDLGMTAYESRYRQQQMKWLAKQAASLNLQLIPASEVTG

SEQ ID NO: 276635 - protein, 312 aa, unidentified
MDAIYVGIDVSKDRLDVAVRPSAESFAVPRTGAGIDELAKRLTAISPLLVALEATGGFETIVAAGLAGASLPVVVVNPAQVRDFAKAVGKRAKTDPIDAMVIAHFAEATKPPVRQLPDEMTRLLADLVARRRQIVEMIAAESQRARRVSNPRLKKSIARLHKALEKELAALDGDIGEHVRGTPAWAEKEDLLASVPGIGPTIARSLIAELPELGTLDRRQIAALVGLAPWTRQSGQWRGKSFIGGGRASVRSVMFMGAMVAARYNPPLKAFRDRLVAAGKPKLVAIIAVARKLLTILNAILRDKTPWQPKNA

SEQ ID NO: 276636 - protein, 310 aa, unidentified
MDSIGVGIDVSKDRLDIAVRPSNESFSVGRNAAGLEQLIARLRQLSPRVVALEATGGFETVVAAALSAAGLPVAIVNPAQIRAFARAIGQRAKTDPIDARVIAHFAEATNLEPRPLPDEQTRLLADLVGRRRQIIEMMGAERQREQRLSAPRLKKSIARLVKALEKELASLDTDIGDAVRGSPAWRAKEELLASVPGVGPVISHTLIADLPELGQIGGKQITALVGLAPFTRQSGKWRGKSFIGGGRTDVRAVLFMGALVAKQHNPVLKAFFDRLIAAGKPKMVALIAVARKLLTILNAILRDNRPWQTA

SEQ ID NO: 276637 - protein, 432 aa, unidentified
MKVNRTNQRLEEITVNTLIVGVDIAKTMQWARFVDYRGVEVGKAVYFSNDRKGFETIVAKIKEHCNNKIFANPLNKVIIGMEPTGHYWKPFANYLIKQGLRVVGVNPYHTKKAKELDDNSQTKSDKKDAITIARLVKNGSYFDPYMPQDVYAELRVLTNTRISIQKRSSAVKNTITAVLDEYFPEIVQVFKNPLKGKASRQILKSCPFPMFILELGEDGVLAEIKKAVKKTVGVKKVQQLIETAKESIGVDYGLESAKLRLNCLVAELDMIEANLAEVETSMAKMLEATGYADKVLGIKGIGVVSAAMFLGEVGDPLRFDSDRQISRYAGYNLTEDSSGKNKSGTCISKRGRKQLRGILYKMAFTMVGQNAEMKELYEYLKNRKNNPLKKKQALVVVSKKIITVIYSLLKKQETYKPELVLGTARREMLLAA

SEQ ID NO: 276638 - protein, 352 aa, unidentified
MEAYRTSAQKRNTIFVGVDLHRLSWHVTVRTEDQELFSGTLPGHWEALRSLLHRYQADSIQVVYEAGYFGFWLHDRLMGYGVDCIVTPPSLLPQQYGNRVKTDRRDSRKLAHLLAKGMLSRVWVPTLKERYHRQVIRRRRQLIGDRVRTKNRIKAELRFYGIEICEPHGPWPRWYVEKLWSICFNDPWMQESFQRLLEQYEFLSEQISKQTQLVQKLSDTSCYRGRVAILRSVPGIGLIAAMELLVELQDVARFRRAEQLAAYVGLTPSQYSSAEKIRMGRITGIGKSGLRGTLVEASWKLITKDGAMREKYERIKARSGAKRAIVAIARTLLLRTRRMLLDGNPYAVGLLA

SEQ ID NO: 276639 - protein, 429 aa, unidentified
MNSCEQTAQDWLAHRAFGGLDWASEKHNVIVVDPRGKVVEDFEIAHSALGWKKFRERMAPYGAIPFAIETSQGAAVEQLLEAGMKVYPINSKSAKSYRERKAPSGVKDDWLDAWSFADACRIDGQDWRALRPEDPLVKELRLLCRDEVELIQQRTSFICQLRHALGEYYLTALEAFEDWGLVSAWMFVQRFPTPQILQAAGKRQWEKFLHARRLWRTESGPRRLELFAHATELCGTVPMANAKSQLALSLISMLFALEKQLGIYRRRIEEIFSRHPDHDLFGSLPGAGPKLAPRLLSEIGDDRGRFEDGPQALQCLAGSAPVTRRTGKCKVRANPDHWPCHQRWACDKHLRHAMHLFSEHSLGQCVWAQIYYQHHRQKGSSHADALRRLAQRWLKIIYRMWMDRKPYDAMLHHHNQLKHGSWVFELKTA

SEQ ID NO: 276640 - protein, 398 aa, unidentified
MLSIGIDVSKGKSTVCGMKPRGEIVYTPFEVQHTREGMSELVSLLRGSGEEVRVVLESTGSYHCPVVAALLENGIFVSVVNSLRMKRFCSQSIRRVKTDQIDAMQIALYGLAYWQELQPTRLPENTYRELQLLARQYYQMTSLLIKAKVDFNAICDQVLPGMQELMSDHAGRHKLSDFVLRYRHTTHILKMGETRFRKDYCKWAEKKGYRNHERMAALIFATAQNGIPVLPDAPSTQIVITEAIRVLHTVEASRDAILTQMQALAKTLPEYSLVREMPCIGDTLAPRLIAEIGDVRRFHSKRALIAYAGIDAPPYQSGKFCANNRHISKRGNRYLRKTGYEVMQSYVMHKPANDPIFTFIEKKRSEGKSGKLAMVAGLNKFLRVYYGKVTELYRSLPQ

SEQ ID NO: 276641 - protein, 341 aa, unidentified
MPTMIVGLDLAKHVFQVHAVDPAGKVTIRKKLRRSEVLEFFKGLPPSLVGMEACGTAHYWGRELTALGHDVRLMPAGYVKPYVKRGKNDAVDAEAICEAVTRPTMRFVEIKSAEQQSGLMLHRTRELLVRQRTALINSLRGQLAEFGLIAPKGVWSIPDLHALAQGATPAVLPDAVRSCVELIMGQIDDLQSRVQTIEKAIRVAHRASEVSLRLQTIPGIGVITASAITATIGDIKAFKSGRHLAAWIGLVPRQSGSGGKVYMGKISKKGDAYLRKLLVLGATAVIRYCRNKPELAGWINALLQRRPPRVVTIAVANKMARIAWAVMSRGESFRQAASAIA

SEQ ID NO: 276642 - protein, 344 aa, unidentified
MKEVITIGVDLAKNVFQIHGVDAEGSVVFRRQLRRSRMLPFFKKQPPCLVGMEACATAHHWARQLIELGHEVKLMPPHYVKPYVKRNKNDAADAEAICEAVTRPTMRFVAVKNTEQQSILMLHRTNELLTRQRTMLINAIRAHMAEFGIVAPTGVPQVKKLLRIIADADNARLPSIARSCLESLARQFLSLHEEIGAAKQQIHAWHLSNEVSCRLETIPGLGPISSSAMAASVSDPDVFKNGRELAAWIGLVPRQNSTGGKQRLGKISKQGDQYLRWLLVVGAMSVIRQAKRRGTSNMPWLDDIIARKPAKVAAVALASKNARIIWALMKQGGIYQKPVTVPSV

SEQ ID NO: 276643 - protein, 341 aa, unidentified
MNHVAIDLGGRESQVCIRSPQGEIVEEKRVPTRRLESLMKSWPPSRLILETSAEAFRIADDALNAGHEVRVVPATLVKTLGVGARGIKTDQRDARTLSEVSARIDLPSVHIPSRLSRELKSMCGARDVLVETRTKLINNVRGWMRTQLLRIRSGSSATFPARLREHAGRTSQTLPFHVEQQLKLIEMVVTHVREADRQVKRIACEHPICRRLMTVPGVGPVTAVWFLAALDQVARFRSAHRVQSYLGLTPGENSSSDRQQRTGITKAGSTQMRRMLIQAAWTALRYCPTQPMVAWATQVAARRGKWIAVVALARKIAGILFALWRDGTTYRPSLAAQPAQA

SEQ ID NO: 276644 - protein, 319 aa, unidentified
MSRIFIGVDVSQDHLDVHVRPTSARKRFANTAAGIMELLAWVRPLGAERILFESTGPYQKAAVGALLAEKLPAVVVNARQVRDFAKAMNYLAKTDTIDAAVIAHFAEVATTTVRPLESQEIRDLRELYDRRGQLVRMLTMEKNQRHSATVAQASSKVLKSIDKHIDYLEGQIKDLEERMDKLIENSPAFQAHDAILQTITGIGPQVSRTLIAHLPELGRCNRQRIAALVGLAPFNDDSGDHSGQRHIRGGRSKVRVGLYQAAIAAIRHCKHTKAFYAALKARGKASRVAIIAVARKILVLANAMIRDTAPYKAPANSVC

SEQ ID NO: 276645 - protein, 470 aa, unidentified
MPDTPNQSHTAISIPQEAAATGTPTPRRFAAFIGIDWGDKKHAWALQVEGSAQVERGEILHTPEAIEEWAAELRRRFPTGRLAVALEQSRGPLVFALTKYENFTLYPIHPTSAADYRKIFRPSGAKSDGPDAAMHLDMLLRHRDKLRPLNPDTVETRMLQFLVEDRRQLVDQRTQISNRLVADLKSYYPQVLEWFEQPYAPVALDFLERWPTLDELQKARATTLHQFLKQHKCRDQAKNQTRVEAMRGAVAATHDTAVVTAGRWAVCAAVRLLRDLNRSIQEYDRKTEELAQAHPDFAIFDSLPGAGAALVPRLIAAFGTQRDRYQSAAEIQKYSGIAPVTEDSGHQHWVHWRWSCPKFLRQSFHEWAAQSAQQCDWAAAYYQAQREGKNKSHHAAVRSLAYKWIRIVFRCWKDRRPYEDSRYELALIRRKQATPASPKPSPFELPIQWTSCGSFKKLALKTHNKSDKVY

SEQ ID NO: 276646 - protein, 407 aa, unidentified
MLFVGDDWAEDHHDVCLQDAEGRVLAARRLPEGVAGITRLHELVAGHLDGDDPGQVMLAIETDRGPWVRALVAAGYRVFAVNPKQAARHRETVAVSGKKDDTFDAAALADMARTRRHQLRAVAADSDEAEAVKVAARAHQKLVWERTRHALRMRSALREYFPAALEAYAELTLTGPDTLELLAKAPDPAAAARLTSAQISAALRRARRRDVAGRAQRIRAALREQHLGQPEIVTEAYAASVTAAAAVITVLNEQIKKMEGTVESLFRRHPDAGVYLSQPGIGVITGARMLGEFGDAPGRYADAKARRNYAGTSPLTIASGKKKTVHARFIHNDHLVNAMHDQAFAAISASPGARACYDELRSRDIDHTDALRRVANRMAGILHGCLKTGAAYDEHTAWGHRSQPAAA

SEQ ID NO: 276647 - protein, 467 aa, unidentified
MESKGAIGIDPDAHGFVCALVNGQEPKVISRTFLVTDSDLGAFLRWVKAQTDILIAIEGSGGQSRPIEKLLREAGLIFYSFKPADTDKFRKAVLGQNKNNQRDAESVARYALALQAQGKLDRYRRVWFADPQLQPLTRSYERLSQQMTAEINRLWKLIRQAAPDLYLALGDSHPEVNLGANTLKNGGFLTLLANKPDPGQWKTLSEAELLEDMGGFSSAGRRRIVQGLHLLSTRLPSCSASLALLIQASAQRISMFKAHLAAIIAMLDTITQDNSAVAALRQTRGIATVTASTLVAEIIDIRRFPREGSLACYAGLGRKEHSTGQSTRMVPSSLFNHRLKDAFMTAARNVVRFNPDSHLAGYCRNLIKRGMSPLEAYKRVARALVRVFYRTLNGLLPHDTREDTNSDEAGSDMASGQARSDGCHQSNMPLPAQRHGTTQRVQRIKRDGAKPHVSRRPRKVATHQRRS

SEQ ID NO: 276648 - protein, 446 aa, unidentified
MSRKKRTHLRGERGQAFADKIRGIPVEQILCVSLDIHKYFHVVMMHNALGEIVTPPFEVDIFQAGFDRLCQAIDAAVARTDAQIVLVGMEPTGHYFENLARHLHHDQPSPRPVTLINSFAVSRNRDQQMMQREKDDEIDVAAIGDLLRRGEGTPFQPINGLYLEMQHLARVRLSKVKIRTALKNQIVGHLDRIFPGLVIQGKVARERYEPLFVADFWSCQTLQHLIRVCPDPRRLATMAPHELRTAFHEQGFALGVKTAAEIITYAQKVLLPDSEVIAIRADLLARDLAFLEEVERLITELEDRLHALLQQTPYWVWTKVRGLSETQVASLAAAIGDPAHYTYAAQVFRRSGLVSGRNDSGTRRHKGKGKRVVKTGDVYLRRALMNAIMSLIRHQPTLHDYFDELHRSKHAGVARVATARRAVGILWAMQRDQQSRTLVLKRGAKM

SEQ ID NO: 276649 - protein, 343 aa, unidentified
MRLYTGIDLHSSNSYLAIVDETGKRVFKKKLPNDPEQILSAFAPYKDSIIGIVVESTYNWYWLVDALMAEGYKVHLANPTEIKQYKGLKYSDDQHDAFWLAEMLRLGILPEGYIYPKEDRPVRDLLRKRGHLVKLRTSLIISLQNIICRNNGFRLKTNDVKALTTDRVAPFLEQNEDLALAGKISKESIDFLTLKIKAVERVIEERMELREPYKKLLTLQGVGKTLGLTIMLETGPISRFAQVGNYCSYCRKVSTKWISNDKKKGKGNKKSGNKYLAWAFSEAAEIARRYYPEARAYYQRKMQKTNAMIAHQALAHKLARAAYYIMRDGVSFMPEKIFTQQSS

SEQ ID NO: 276650 - protein, 343 aa, unidentified
MAYFAGLDVSVKETSICIVDDTGKIVRQARVASEPEALLQVLTNNNYRFKRIGLEAGPLSQWLFSALAEAGLPVICVETRHMRAVLKAQINKTDRNDARGIAQMMRVGLYRPVHVKTLRSQKLRMLLTHRKLLQSKAIAIENDLRGTLRNFGLKVGMIGAVKFEERIRELVENLPDLAVLVEPLLIVRRVVREQLGILQRRVLAVVRDDEVCRRLMTIPGVGPVVALTYRATVDVPARFRNSKAVGAVFGLTPAKYKSGETDRTGAISRCGDEMMRMMLYEAAQSMLVRSTKWSWLRAWAMKIARHRGMKKAIVALARRLAVIMHRIWVDGTEFRWTREVTAA

SEQ ID NO: 276651 - protein, 366 aa, unidentified
MKKNSTVAVGRKQILKQARLTIGLDLGDRTSYYCILDAAGNVIWERSVPTTLNGIRQGFGRMPRCRIALETGTHSPWVSRQLSEMGHEVIVAHARKVQLIGQSSRKDDQLDARTLARLARIDPGLLSPVKHRSAQAQIQLTVIRARAALVSTRTALVNAARGLTKSYGQRLKKCGTEQMNRDSSEGLSQELREALDPLLREIESLNERIAEYNRRIEEIAKEVHPEVARLKQVQGVGTLIALTYVLTLDDPHRFRRSRDVGCFLGLRPGRRNSGQSEPQLHISKEGDRYLRTLMVQGAHYILGPFGQDSDLRRWGLKLAERGGKNAKKRAVVAVARKLAVLLHKLWVSGEAYEPLRNNHKGARAVA

SEQ ID NO: 276652 - protein, 339 aa, unidentified
MEEISTIGLDLAKRVFQVHGVSRCGDVVVRRSLRRGAVLGWFAKLSPCLVGVEACGSAHYWARELGKLGHDVRLLPPSYVKAYVRRNKNDAADAAAICEAVSRPSMRFVAVKTMEQQAAAGLHKVREMLVKQRTMLMNQLRGLMAEFGVVVPEGSRHIRELLAILEDRSDQRVPELLKSALLLTGERLRGVQEQAEAIDKQVLEWGRSNQTYRHLITIDGYGPILSSAMAAIVTNPEAFASGRDFSASLGLVPRQNTTGGKVVLGPISKRGNGYLRRLLVNGATSVLCSKRAKQDPWLIKLLKTKKRKVAAVALANKMARIGWAVMMRQEDFRQRSQAS

SEQ ID NO: 276653 - protein, 408 aa, unidentified
MQVAHPVCCGIDVHKDTLTACLRRVDANGQVSKERREFATTYTSLLTLSDWLVEQHCPIVAMESTGVYWKPVYHVLVGTVEVYIGNAHELRSRPGKKTDKRDAAWLAELFAHGLIQPSFVPPLEICALRDVTRTRVALVQTRSQSKNRVHKLLEDTNLKLGSVVSDLFGVTGRRMLAALVAGARDPQVLASLALGALKHKRPQVELALTGQFTAHHGTLLGLLLELIELLDRQIATLDQPIGELMMPLHAQLAQLDSIPGVDIIAARDILAEIGTDMSRFGDAARLASWAGVCPGNHESAGKRYRGKTRKGNRYLRRVLGPCAWGARKTPTFLGRTFRRLEVRIGKKKAALAIAHKILVIVYHLLATGSCYEEARYDHYHPKQEARERQRAIKALERLGYTVTVERAA

SEQ ID NO: 276654 - protein, 339 aa, unidentified
MNTNVIGLDIAKRVFHVYTIQADGKAVKKMLRRQQVLSFFANYPASLIGMEACGSSHYWATELMALGHEVKLLNARHVKAFVKGNKNDFNDAEAIFDAVSRPNTRTIAIKTIEQLDIQLIHRLRQEAVKRRTALVNQIRGLLGERGIVIEQGVSQVRKRLPALLEEAENALTPLSRAAFAEQYERLLALDKEIKRYDQQISQLCQVNELSKRLAEVPGVGPLTATMAAGDLGQNQHYGNARHYSASLGIVPRQCSSGGKSVLLGISKRGNSYLRTLLIHGARSVLRTCHHKEDPLSVWLQQLIKRRGFNVAAVALANKNARILWALANKMERYQTAVSA

SEQ ID NO: 276655 - protein, 390 aa, unidentified
MFYLGIDIGKSFHVASLIDDKKNVIFKGFQFKNTTGDANLLLQKITPYQEIEIGMEATGHYWLALYSFLVKNNYVVHVVNPIQTDSWRHSTKIRPHKTDKIDSLIIADFIRYGEFSETSLASEEILEIRNLSRFRNYLVDSIGDLKRKTVCVLDQIFPEYESVFSDVFGKTSKEILKFFSSPADFENISAEKLNLLLDKVTKKHFAENKIKQLSNLAKNSFGISFGLQSLKFQLQLLIKQMSCIEGQVTDVEQKISELVDKLNSPITTIPGIGKVIAATILGEIGDIKRFSTPAKLVAYAGLDSKVEQSGSSENFSSKMTKRGSPFLRTALFRAAPVASNIDPVFKAFYQKKRAEGKHHLTCIGAVARKLCYTIHAILSKNCVYEIQSTT

SEQ ID NO: 276656 - protein, 356 aa, unidentified
MLYLGIDQHARQITISLRDENGDVVQARQVSTQPDKINAFFLQLTRERLQNGESFVAVLEVCGFNDWLIRMLQDYRCHKVILIQPEERKKRKTDRRDAAALSELLWVNRLRLLQGKPVRGLRQVDIADTVALENRRLTILRRDAGWAQTRVINKIKQILRRHNLQWDMPTKTFPTHAAVAWLKQLALPVIDRLEMNQLLTELEQIQQRLKELERVISERSTASREVTILSSLPGLGKGYTALSLECRVGRVERFRRAHSLANYWGLTPGCRNSGENNQRLGRITKAGSATARWLLAQLVYKVLRKDARLREWFKRIKRRRGSSIARVAVMRKLTTIIWHMLSKQKTYAECRERVAA

SEQ ID NO: 276657 - protein, 428 aa, unidentified
MQWFRQFKEHVNASTSTLIVGIDIGKDTHHAFLGTPAGRTIHRRLIFENSIEGFDHLLFLIKRSVSDEKLAEVVIGVEPTSVYHKPLAEYLITMGYSVVYVTNSAIKKNRAILDGRWDKNDTKDAANVADLVSRGRCHFYDLPDINLRDIRNLLSLRKRLKKHEHRLITRIRNNLVAQYFPELDRAWYSCQQENLSIVRFCLSPQKIAQLSFDDFCKMVTRRRRGLRQYQRLRHLHEVAEESIGCRPGSSVAFEAQLLVDNLQQVREQIAEVEEQLYLICDSYKEYELLQTIPGFGPYVSAVVLGAIGYAQRFENAKQLLRLAGLDLNASRSGKRSQTAVPVISKVGKADLRYALYQAAKVATSLTVEFKAYFKRLLKGREKEKGIKTKMRVKVSAKMLVIAWTLMKTRQPYKAGLLLIDEPGQLRGR

SEQ ID NO: 276658 - protein, 377 aa, unidentified
MNDEKYIGLDVHQATISVALMDSAGKVIMESILETKAATILQFFAGLRGTLWVTFEEGTCAGWLYDLLHPHVAHLVVCNPRKNALLKYGNKNDRIDARKLAELLRGNHLKPVYHGENGVRTLRELARSYLTTVKDLTRVMSRLKALYRSWAIPCAGRDVYYTRHRAEWLGKIKHAGVRRRAEQLYQHLDVLQQLRQQVRRELLAESRKHPATAKLRQVPYMGPIRSALLVALIQTPHRFRTKRQLWAYSGLALETRTSAEYQYVEGQLRRSKKLLSIRGLNKDHNHDLKALFKATSITASVRPGPQPHQDSKCVFLVSPGKAPRSPQCWIRFGVRESVLSLLLTYVDRLWLCQTVFPLELGRPFARPSGAIRNELTP

SEQ ID NO: 276659 - protein, 343 aa, unidentified
MNAFYYIGLDIHKKVIAYCIKTLDGRLIGQGKIDADRKSLDDWVQGLPGPWIGAMEATIFTGWIYDFLKPYAADLKVAHPQMLKAITAAKKKNDRADAEMIADLLRVNLLPECYMLSEEIRELRRILRYRNHIVRTAVKMKNKMSGLLMEVGACYSKKRLHGKKYFNSLLERVEEIPHSVKELLKLSRASFEMFSAVQKRLVEALRTNSLIRDRVQRLMSIQGIGEVTSLTWVLEIGDPKRFGSIRKAISYCGLCSAQKESAGKEQRGPISKKRNKHLQTILIEAAKIAPLWNPQLAALHDRELKKGNRNRATLAVARRMVAYMMAVDKNETDFMLREEEKAA

SEQ ID NO: 276660 - protein, 355 aa, unidentified
MCSKKTGDIEDLAVVGIDIGKDTFHMVGFDRSGQLVMRKQIKRLALNATFAQLPRCIVGMEACLSAHFVSRTLRGMGFEPRIIPAIYVKPFNKGQKNDYNDAEAIAEAALRPNLRTVSEKDQDQLDLQALHRVRARLVSRRTATINQIRAFLIEQGITVRSGLRALKNSFEAILEQRRDEISPRMRGILIGLYGDWLWLDKRIEDVSGEIEEISRTEENCANIMTIPGIGPMISTAMVAAVGQGEAFDRGRDFAAWVGLVPRQFSTGGRTILGRITKRGSRYLRMLFVQAAKVIMMRPHRWSDFSFGPWLTEAVARMPRNKAAIALANKLARTAWSILRNGTRFDAPKDAAMEAI

SEQ ID NO: 276661 - protein, 346 aa, unidentified
MTIVEERPAITGGVDTHSEVHVAAALDPVGGLLGTREFPATAAGYAGLLGWLGKFGDVALVGVEGTGSYGAGLARYLAASGVRVVEVDRADRQDRRRKGKSDPLDAVSAARAAQSGRAAGEPKGRDGAVEAIRSLMVAKRSARGERTQAINQARALVLTGPEELRDRFAGHRAAALAAGIAALRPRPGDAADYAVRMALRELGRRVEFPGAQIERLDDLIVPLVTVRAPGLLSLYGVGPDTAAMLLIAAGDRPERLRSEAAWAHMCAVAPIPASSGKTRRHRLNRGGNREANHALWRIVITRMSAHPATRAYVERRTAEGLSKKDIIRCLKRYVAREVYPYLRERG

SEQ ID NO: 276662 - protein, 428 aa, unidentified
MTIDQKQRNRKERKELARRLRSEDPGLEVVHPHAAGVDVGNRAHYVAVRPDRDSQPVRRFECFTADLHRLADWLQSCGVKTVALQSTGVYWIPLYDILGERRFEVYLVNARHTKNLPGRKSDVQESQWLLKLHTHGLLNNSFQPTSEIRVLRTYWRQRAEHARGIGTCILRMQKALTQMNLQLANVISDLSGVTGQKIVRAIVAGERDPQKLAELSDPRIHASKAEIAKSLEGNWRQDLLFVLHQEVEMYDVYQRRIAECDQQLQEHMASFADTVPPQAKEGEPKKKKTKPNKNTPQFHLSGELQRISGVDLTRIDGIDVMVAQTLVSEVGLDMSRWKTEAHFASWLGLCPDNRISGDKVLSRGTRHVVNRAATALRIASTTLLRSQTYLGAQYRRLRSKLGAPKAITVMKSSALCCKSQRTGHKPRS

SEQ ID NO: 276663 - protein, 351 aa, unidentified
MSIIGGLDVHRRQITFDWVDRDSGEAHRGRIAPATRAGMRAWLGELRGAKGAFAVEGCTGWRFVAEELQAAGLVAYLAEPAETSSLRGPKRRAKTDRTDARLLRELLEQDRLPTSWIPPTWILDLRTTVRLRKTLVDQRTAWQQRIHAALFHHGLPRPEQELLSRATRAWLEQAPLPPASRQALAVALGQIDGLDAELDPIDQWLRTLARRQPGCRALMTRHYGIGAITAPTILAELGDARRFAGGDQVVRATGLDITVYASDGKRSPGHLSRQGPEVLRWALFEAAKAAARPSSPDYAYYQQVKARQGGNRATLAVARKLARRVRHTMLALGDAALAPVEGLPLPLPAAA

SEQ ID NO: 276664 - protein, 330 aa, unidentified
MKKKDYVGIDISKEKVDIRLFNSKMDGQFDNKPSGFRKMRSLIEKHVDKDTELLFCFEHTGLYAVPLQVYLEKENMAYHMVSGLQVKRSLGIQRGKNDRVDARRLAEYAQLHREEIKPQNLQSTHLIRLKYLLSMRSRLVRQRAGFMASIKEYKKCLALANTDVMIHVQQEMIKVLDKQVVKLEKEIRGIIASDTKIQSLFNLATSVKGIGLISATYMIVLTNCFTEFKTWRKFACYAGSAPFEHQSGTSVRGKTRISHYANKQMKAILTNAAQSAIQYSPEIRLYYQKRLKEGKHKKIVVNIIRNKLISRVFAVVRRGTPYVELVKYAA

SEQ ID NO: 276665 - protein, 353 aa, unidentified
MYIGVDTHKQTHVLLAIDEEGRTCGSRTLANTPEGWATALQWAREQQQQHRWGVENSGSLGKGFAQFLLAQGEPDVREVVPHRTAQYRRRGRTQDKTDTADALAMARLLRAEGELLPAVQADDASTELRLLSDHRDNLVVDRTRLINQLHAQMLQLDPRYAERSGPLTCAAGVRYCRDLCLPESNGIAQTRLLVVRQLATRLLQLDADISAATKALEQRVKATATPLLQCRGVGVVVAARLLGELGCTPRVHSAAALAALAGIAPLAVASGGRHGHRVNPGGNRKLNRAIHIVALTQRRCEPLAQAYYEKKRAEGKTGRAAMRCLKRRLVDVLFRLWQPRGQALPAATPALAA

SEQ ID NO: 276666 - protein, 310 aa, unidentified
MEHLFVGVDVSKDRLDVHVRPGGEAFAVSRDGNGLGQLVERLQALSPTLVAVEATGGFETIVAAAIAGAELPLAVVNPAQIRHFAQAVGKRAKTDPIDAGVIAHFAEAVRPASRALPDEASRLLAELVGRRRQIIEMMVAERHREKRATNVRVRKSLARHIAVLEKELNAIDQDIDTLVRGSAVWRAKEDLLASVPGIGQTLARILLADLPELGTLGRREIASLAGLAPYTRQSGRWRGKSMIGGGRSAVRAASFMAALVASRHNPPLKAFYQRLRAAGKPKMVALIAVARKLLTTLNAILRDNRPWQNA

SEQ ID NO: 276667 - protein, 371 aa, unidentified
MRENTIFVGLDVHKNSISVALADVGRDGEVRSYGTIPGDLESVHKVVRKLQSTGATLRFVYEAGPCGYDLYRSLTKKGFDCVVVAPSKIPRKSGDRIKNDRRDALSLARLHRAGELTPVYVPTAEDEAMRDLTRGREDAVKALRVARQHLLAFLLRYGHRYNGKSYWSKAHWKWIADIKMPHGAQQIILQEYVHAIHEQSERVQRLNEQIRELVPQWHLAPMVKALQALRGVSLIVASTTLAELGDLTRFSKAKQLMAYLGLVPSEHSSGDNKHRGSITKTGNGHVRRALTEAAHAYSHPARESRILLARMEGLPQRVQQIAWKAQVRLCGRFRRLLARGKNRNKVVSATARELSAFMWAIAQEVQPRSQA

SEQ ID NO: 276668 - protein, 368 aa, unidentified
MTERTTTSPTAVTSTTIGIDIGDRTSHICVLDDAGNVIETGVVATTPEAFAKRFERDDSTRIAIEVGGQSAWIDETLSALGHDVIVANARRLRMIYENESKSDEVDAEQLARVARVDVMLLHPIQHRQRSTRTDLAKARSRDMLIATRTSLINHVRGMLKSFGTKLGSRGAAYFHGWVRDQIPDEFHCALDPIVDTLEEIAVQIAALDKELERLANEVYPETMLLRQVNRVGVHTALRFVLTVEDPDRIKCSRNTGAYFWLRPRRHQSGARDPEMRITKAGDRDVRRLLVQCAQQMLGPFGTDSDLRRWGLDLAGRGGKSAKKKAVIAVARKLAVLLHVLWKTGQVYEPLKNANAKDTAQAAKTQVPA

SEQ ID NO: 276669 - protein, 418 aa, unidentified
MEVLHERCAGLDVHKKTVVACVRRARDGGVEKEVRTFKTTTADLLALGEWLDGHDVNHVVMEATGVYWKPVWHILDDGDRELVLANAAHVKNLPGHKSDVSDCDWLSDLEAHGLIRGSFVPTRQTQELRGLLRTRKQKVRERSSNTLRLQKTLEEANIKLDSVISNVIGVSGRRMIEAMIGGETDPVALAALADRRIKAPPEVLCEALRGRVTGHHRFLLGLQLEHIDALDGMIDKIDQQIDASVEPFRAAAGLLTTISGVNQLAGRAIVSEIGIDMSRFETAGHLISWAGLCPRNDESAGKRRSTRIRKGAPWLKDILVQCAWAATRTKATYLHAQFVRIRSRRGPKKAIIAVAASILTAAYHMLKNGVPYRDLGPQHFHSRNKQAQAKRLLARLRDLGFTAEFDSLKPIPDAVVSY

SEQ ID NO: 276670 - protein, 338 aa, unidentified
MDAAEKVVLRKKLRRQQVIEFFGKLKPTKIGLEACGAAHYWARELEVLAHEVVLLPPQYVKPYVKRGKNDAADAEAICEAMSRPTMRFVPVKTAEQQAALMLAGTRDRLIRTRTQLTNAIRGYAAEFGLTAAKGLDKIEPLLARLAAATELPKLAKELFAAHAREYAQIKVAIQKIEAKLMAWHKHNELSRRLVEVPAIGPIGASLAVMKVPDPRVFRSGRDFSAWLGLTPKDHSTAGKTRLGVITRAGDETLRSTLILGATAVIQQVRRGKGHPSPWLIDLLKRKPPKLAAVALANKTARIVWKLMVSGESYNPMRLRDTRGPSARYGSKATAITQA

SEQ ID NO: 276671 - protein, 421 aa, unidentified
MPHLVPEEFAAFVGIDWADAKHDICLQAVGSDTRECSQLAHTPEAIDAWARALQERFAGHPVAVGLELNKGPLVYALRKYAFLVLFPINPGTLAKYREAFTPSHAKDDPTDAELQLELLLKHRDKLQSLTPQSPAMRALEQLVEPRRRVVGDKVRITNRLTSTLKNYFPHALQWFDDKDTTLFCDFLAQWPTLKAAQRARRTTLERFFRTHHVRDVNVIDQRIQAIRSATPLTTDEGVIAPNALLVQALVAQLRGILQAIADFDHAIAQRAQCHPDFPLFAALPGAGAVFAPRLLVAFGEQRDRYGSADELQKYAGIAPVTERSGHNTWVHWRWQCPTFLRQTFVEWAAESIRHSFWARIYYQQQREKGKSHQAAVRALAFKWIRVLFRCWQHRTPYDESVYLNALKHRGSPLMRNLVHGS

SEQ ID NO: 276672 - protein, 441 aa, unidentified
MKAEKQNVLPMLYPNAAGIDISSKEHYVAVNPQLHKESVRSFGSFTEDLLKLADWLKSCQVDTVAMEATGIYWVSLFLVLEQAGFDVVLVTAKHVKNVRGKKTDVSDAEWIRQLHSCGLLSASFQPDAFTRTLRSYTRHRKNLLEMSATHIRMIHKALEQMNIKVQYVIADITGKSGQAIIRAILKGERDAQVLASCCDRRINKSKAPDIISSLHGLWKEEHLFELEQSFQMYHHYQRQIKECDKKIEKHLSEKAAAQAPGSKGKKFVKANKNSLNFNAKAMLEQITGTNLSAIFGISDTNALELLSEVGLDMSKWPSSKHFVSWLNLAPNTKISGGKVLSSRIAKKKNHAGQIFKMAAYAVQRSKNWLAAFYQRIKYKSGSRKAIVATARKIAAIFYTMLKDKAPFNPIPIETYQQASSTRKLKALKRQALSLGFQLIEI

SEQ ID NO: 276673 - protein, 328 aa, unidentified
MNKITRVGADLAKHVIQVHAVDAAGQRITSRALVPGKFMAWCAQLPPGCLVAMEASSSAHHWARRLIALGLDARIIAAHLVAPYRLQGKSGKNDANDAAAICEAASRPQMHFVPVKSVEQQSMLCIHRLREGFKEERTACINRIRGLLAEFGLVFPQQPAALRLALPDVMEDASNELGAQARLALQRALMQWQELDGHLAWCDERIAAHLKDSAQVRQAGQLLGVGPVTASAVVASVGDFKQFRNGAQFGAWLGLVPRQNSSGGKNHLGAITKRGDMYLRMLLIQGAKSAVMTAHRRDDPISMWAYQLRERSGWQTSLSGVHRFPCKT

SEQ ID NO: 276674 - protein, 407 aa, unidentified
MIFVGVDWAEAHHDVHLADDEGRRLATARLPEGVEGIARFHELVGAHVQDPGEVLIGIETDRGLFVSALVGAGYGVYAVNPKSTSRYRDRHSTSGAKSDPGDAQVLCDMVRTDRHRHRLMAADSAEVEAIKVLARAHQSMVWSKGRQSNLLRSALREFYPAALVAFDDLAGTDALEVLRIAPTPSLGSTLSRSKIAAALRRGGRQRRVDERTVEIQAALRSEQLEAPPAVSAAMGASVAANVAVLAEMVVQIGHLAAELSSNFEAHPDAEVVRSLPGLGTILGARVLGEFGDEPNRYATAKSRKNYAGTSPITRASGTKKAVLARHVRNRRLGDAIHQWAFASLSSSPGARTYYDARRSAGDGHHQALRALGNRLVGILHGCLTSQAIYDESIAWGHRSVPEFDKAA

SEQ ID NO: 276675 - protein, 314 aa, unidentified
MADNGYKFHVGIDVSKNKLDLFMSTSDALLCFSNDECGLKELIKILPSKKKSLIILEATGGYERFAASYLRAKKFIVAVVNAKRVRDFAKASGKLAKTDGIDAEVIMKFGRAFNPIPQPLPSQEEDKRLQSINRRAQLVKMIGMEKQHLEHAAEYIRKRIRKQIASLEKERSLLETELLEQFNEDSVLSEQLMRLDEIKGVGPVTAMNILIHMPEIGKVTSKEISALAGVAPFSKDSGQKKGKREIHGGRSQVRAALYMAVLSAKRSNAALKRFYDRLIAKGKLKKVALVACMRKLIIIMNAMLRNNTRWNAMC

SEQ ID NO: 276676 - protein, 494 aa, unidentified
MSVPGRSLPVGIERVGGAVDSSVEVVVDDTEQVLERVAAIDVAKASGKVCVRVPHDTREGRRVTRVFDVGATVPAVEGLADHLVCQGIERVVVESTSDYWRIFYYLLEERGLQVWLVNARDVRNVPGRPKTDKLDAVWLAKLNERGMLRRSFVPPLGIRRMRDVTRMRVDLVADRTRVKQRAEKLLEGALIKLSTVVSDIFGVAGRRILDALVAGERDPHRLAALGTGLKASPEALTAALTGRFSDHDAFMLTIYLEQIDVLDRQIDALSARIEQMTAAMPLPAPAAASTNAAEVTALPGVGTVSTVTGEITPPAADAPADRRPGPRTAADLVDLLDAIPGVGRETAQLILAEIGTDMSPFATPGHLASWAKLTARTVQSGASLRMGRTGRGNRYVRRTLGIAAVSAGRTNTFLGARHRRLRTRRGALKALVATGRSILEIIWRMVRDQVPFRELGADYHTRRQDPERRKRALVRQMKNLGISPEEAASMLAAA

SEQ ID NO: 276677 - protein, 339 aa, unidentified
MKISMIGLDIAKNVFQVHGVDEAGEVTLRKKLRRRDVLSFFAAQEPCVVAMEACGTAHHWARELAALGHEVRLVPPSYVKAYVKRSKNDAVDAAAIYEAASRPSMRFVPVKTLERQAALVPHRVRDMLVRQRTMLINALRSQMAEFGVVVPKGRHRLGELIAMLREDQGIPASARTMLMELVGAIEALTPRVDRIEKAIVAAVRMDPLARRLTTVPGVGPITASALAAMVGDPARFRNGRHFAAWLGLVPRQSSTGGKQRLGRISKMGDKYLRKLLVLGATASLRRAPSTDRLALWTRGLLDRRPARLVTVALANKMARIAWAVMARGQAYRPETAAAA

SEQ ID NO: 276678 - protein, 343 aa, unidentified
MQTITTIGLDIAKSVFQVHGVDAAGQVVVRRQLKRLYVLSFFQKLPPCLVGIEACASAHHWARELQALGHTAKLMPPAYVKPYVKRHKNDAIDAEAICEAVTRGNMRFVPIKTPEQQSCLTLHRTRHLLMRQQTSVINAIRSHLAEFGIVAPVGRNGVEQLLGVVADPNDKRLPEIARACVAALGAQLRVLKLQILEFDRMITAWHRSSEVSKRLDQVPGVGPLLATALVASVADPKAFRSGRDFSAWIGLVPKQNSSGGKERLGNISKRGDRYLRSLFTTGALAVIRYAKIHGTKHRPWLTSLLARRPTKVVAIALANKLARMAWAMMAKGERYKEPAALAA

SEQ ID NO: 276679 - protein, 430 aa, unidentified
MANKSYKMNETDEIPFHKRYKLFVGFDWASDHHDIVTVDEIGKVVMELTIEDTAEGWILLRKKFVDKIGQEDLCLVAVAVETCNGPSVERLLDMGCHVYPVNPKAAKEYRGRKSPMGSKCDRLDAWSLGDALRTDGHAWKILKSDDPLTQELRILCRDEVKLIEQRTALVLQLRAALNEYYPAALEAFDDWSGPGAWAFIETFPTPQDLARAGKRKWKTFLKDHRLSCREKNQTRLDAFSRAHKFCGPPAVTKAKSRLAVTIVKQLGILHTQLAEYRKAIEALFEEHPDSDIFKSLPMAGAKLAPRLLSEFGQNRDRFDDPEILKCYAGTAPVTKQSGKSRFVIFRRGCNKNLRTAVHQWVDLSRKECAWAQAYYKAKRQQGKSHCCALRCLGQRWLNILWKMWQNKTTYDEALHTRNQVRHGSWIVKPG

SEQ ID NO: 276680 - protein, 376 aa, unidentified
MKQFNDIYVGLDVHKDTIAVAIVRGLRSKPTYFGEIPNTPAAITKLLHQLSPDGEVLNFCYEAGPCGYEVHHQLTKLGQSCSVVAPSLIPRMPGVRIKTDRRDAMSLAKLHADGSLTAVWVPGKEQEGIRDLSRAREDFKQTETKARQRLGAFLLRNGKIFTGKSKWTVAHWRWMETLTFETPMQHIVMQEYVEALKEASRRLLGIEKQILLAVRGWSLEPVLNSLLAMRGVNTITAVTLLAELGDITRFDNPKQLMSYLGLVPSEYSSGSKRQQGSITKTGNGHVRRVLVEAAWNYRFPARKSRTIEMRAEKTSDRVQAIAWEGQKRLCGRYQKLLSLGKLKQKVCTAVAREMVGFVWAIACEASGRVHGSRATA

SEQ ID NO: 276681 - protein, 357 aa, unidentified
MKNRAEHVLGSEKIFVGLEDSKKTWSLCVRSKGMIVHETSMPAQYEVLRNYFHNKFPECQVQVIYEAGFRGFDLHDQLEADGWECVVTPPHTVTEEKCQRKKNDRTDCRRLAKNLENGDYHNCFVPDKLLREDRQVSRTCGQVQADITRVCNRIRRMLEFHGLDNGLSPGRWSGVAYAQLRQHLSNIELSDSLRFSFEIMFRELDQLRQLKKELLLQLRKLARSDRYKGSVGLLMSAPGIGILTAIRLALEWGDVNRFKRKEEFAGFLGLVPSDYSSGDQEHRGHITKQGNRSVRRWLVETAWVAIRHDPALLEKFRRVLRNCGSKKKAIVAVARKLALRLRRVLLSREPYAIGVLV

SEQ ID NO: 276682 - protein, 345 aa, unidentified
MMVVLGTDAHKRNHTVVAVDEAGVEIGSVTATATPEGHLKLVKWAASWEQRRWAIEDCRALSRRLEGDLLQLGELVVRVPPKMMAGVRRSARTRGKSDPIDALAVARAALREPDLPVAQLDGPSRELRLLVDYRESLVKDRTAAQNRLRWRLHELAPGYDPPAGSLNRYKTLDNIDELLTAHTSMVAELGRREVARIRELTREANQLERDIARRVEELVPTLLEIPGCGGLTAAKLVGEAADITRFKSRDAYAMWAGVAPIPVWSANNQRFRLNRGGNRQTNAAIHRIAITQIRIHPDAQTFIARRLETGSTKREALRLLKRKLSNVVYRTLLTDSQQPALKAAA

SEQ ID NO: 276683 - protein, 337 aa, unidentified
MKRYLGVDLHRTQFTVCTRLESGRTYLRQWPMRELKLFAAQLRKDDEVAVEATGNTRLFYDAIVAKVARVAVVNPSQFKVISQSVKKTDKNDAELLALYLSKELLPEVRMKKRGQREVGHLAQTRDLLVKQRSALKAKINNMLSAEGINLKREALSSNKALDRVLALPLSPLMLAEARVLAGQIRSLSQSIAELEKLLEEEGSKLPGHDNLMSIKGVGPVSAAVLLSTIGDIRDFEEPGKLAAYLGLVPRVQNSNETERSGRITKIGNKLARTALVQCALIAKRYSPFLQQFYQRIQRKRGGGKANIALARKFLGVLYHTLKNNWVFEDFPNFVLAS

SEQ ID NO: 276684 - protein, 342 aa, unidentified
MTPSLPAYDLFVGIDIAAATATFAWQRQGAPLSRPLTIPQTPAGYASLSARLQASGVTPARTLVVMEATGSYWITLATTLHDAGYAVSVINPAQAHAFAKALLKRAKTDAIDAATLTQLAALLQPPPWTPPPAVYHELLQRLAQRDALLDLRQQVRNQRHALLQQPTVIAAVQARMDTLIATLSEQIAAVEAELAPALAQDAAWAAAAARLQTIKGIGLLTASWLLVSTICFTSCPTPEAATAYAGLAPNERSSGTSVHHRPRIGHTGNARLRTALYLATLSAAQSNPVIKPFYARMRAAGKPKKVARCAAARKLLHLAWAVVTKKQDFDPSYAQRQQAGAM

SEQ ID NO: 276685 - protein, 423 aa, unidentified
MEHPRIYAGVDTHSDTHTLALIDEYGRPLATQTFMADPTGYERLAAMIGDPDACLGIGVEGTNSYGAALTRRLVEAGYNVYEVLRPKRAVRRRDGKSDPVDALAAARSVLAGDGTSVPKSADGWVEALRALNAERAQLVTAMTALSNSATGLLTTAPEHIRERYRGLRTPIRMRRLAVCRPSGNMVEQGMLVALKASGKAWKALKEQADLLEKNMRLILEEHARPLLDIYCASTVTAATLAIVAGDNPERIRSEAAFAKLCGACPIPASSGKTNRHRLNKGGNRQGNSALHHIAIVRMRYHQPTRDYVDRKTGEGKGKMEIIRCLKRFIAREAYRALVSIRRGRTPLNKPPAERGRRLRELRVAHGITQQQIGDALGVHSSRISEIERGTRNLPELERRAALWIQTITTPNQPTQHTETFDNV

SEQ ID NO: 276686 - protein, 335 aa, unidentified
MEFEFFIGIDVSKNELDFAVQQGGDLLFHREVVNEPKAIIAFIKELGTLQGFKLYNTVFCMEHTGIYNNHLLSCLHKNKASICLEAASQIKNSLGNIRGKNDKIDAIRIARYAYKERETVRLWQPKRETVQQLAHLAATRLRLINVKKQLKVPLREQAAFGTKKAGRQSLQICSHSIKAIEADITRADKAIGQLIAEDEELTRIFKLVTSVSGVGKVTAVQIIITTNEFKDIHDPKKFACYAGVAPFTDDSGKVIKKAKVSHMANKKMKTLLHLSAIVAIQHNPDLKLFYQRKVIQEKKNKMSVINAVRNKLILRIFACVNQNRTYEKNYHKLLA

SEQ ID NO: 276687 - protein, 325 aa, unidentified
MQGKEASEQETRKCTAGIDVSKNWLDAHVLPSSESLRVANTGEGIRQLKRWLLRCKVELLAVEATGKWHREVCRSLSASRIAIAVVNPYRVRMFAKAHGILAKTDRLDARVLAMFAAMMSPTCRPPAPQALEAMQELVTARSSAVDEAVALKNQLAAATGDFLRRQLVRRIKQLDAHIEAIGKECIRRIKADEALARRFTILTSIPSFGDVVAITLIACLTELGSLSDKHIGALGGLAPVADDSGERRGVRVVWGGRGPIRRILYLAAITAKTCNKDMSVFYRRLIDSGKKPKAALIAVARKLLVLANVLIAQDRLWMTTAPQSA

SEQ ID NO: 276688 - protein, 321 aa, unidentified
MAMSATPIEAGVDTAKDELVIQSAPSTKPFAIPNTPKAIKAWLKTLPKGSALAIEATSTYHMEMAEQAHAAGFAVYVIDGLRLSKYRESVAVRAKTDAHDAALLARFLSNERGSLKAWVPPPAGHREIQMLLRRRAKLVAVRGMLRMSLSGDKMFASALKSLEETVKRVELLLEKQLRTVIKTAGLSDQLRRVQQLPGVGFLTAAGLVMSFMRGEFKNSDAFVAYLGMDVTVAQSGKWAGRGKLSKRGDSEVRRLLYNASMSGSRTKTWSQFYAHHQARGKKTTQALVILARRLARLAFGLMRHQADWKPEIYTGGAKPAS

SEQ ID NO: 276689 - protein, 349 aa, unidentified
MIVIGIDSHKRTHTAVAADGNGRKLGEVTLGTTSAGHLELVRWAARFPGHRFALEDTRHLSRRLASDLLRAGEAVTWVPTRLMAGARRHGREQGKSDPIDALAVARAALADPDLPTATLEGEERELRLLVDHREDLVAERTRARNRLRWHLHELDPGNEPAPRSLDRAVVLRALDERLEGVEGTVARIARELVGRIRDLTRTIDALEREITRLVREVAPTLLALPGCGPLSAGKLVGQVAKAGRLRSAAAFARHNGSAPLPVWSGNDERHRLSRKGDRQVNVALHRIAITQMRIDERGRAYYQHRRAAGDTKTEAIRALKRRISDEIYRRMRHDERLRATPRAALAAAA

SEQ ID NO: 276690 - protein, 311 aa, unidentified
MTYDTIGIDISKLHFDAHRRMTGRHARFDNTAAGFKAFSHWIGADHPDLVVFEPTGPYHRDFEAAFAGRLPLAKVNPLQARRFAQSQGTRAKTDAVDAAMLARMGRALELVPDRPAEEIQTVLRELRVARSGLVRDRTALMNRLSAARLPLVRRLVKARLAQAERQIATLDAEIDGRLEACPKRRRAAQILTSIPGIGRITARSILAECPEIGTLRHKQIAALAGLAPMTRQSGTWCGKARIEGGRRHLREALFMPALVAMKKNPDLSAKYDQMRAAGKPHKVALTALMRKLIQLANTLIREDRTWHPKCA

SEQ ID NO: 276691 - protein, 349 aa, unidentified
MAKLARIGIDTSKSVFQLHGVDEEERPVLRKQLRRRQFLVFFAQLEPTLVGLEACGASHHWARELQKLGHQVVLIPPQHVKTAYVGRNKNDKIDAEAICEVMKRDKVQERFVPIKSVEQSAMQMLLGVRESLVKRRTQLTNSIRSHAAEFGLVAAKGLDKIPPLLARVATDDSLSALTKEMFAVLGQEYAELGPRIAKLDKQMLAFHRSNEVTRRLMEVPTIGPIGACLLVTKIVDPHAFRSGRRCAAWLGLTPTDHSSAGRQRQGGITRAGDEHLRAVLVSGAMACIRHAKNRRSNSSSWLGELLKRKPPKVAAVALANKTARIAWKIMTSGERYDPNRGMAPQGPAA

SEQ ID NO: 276692 - protein, 349 aa, unidentified
MILVGCDLHTRKQQVALLNTDTGELWDQELSHDGDAIERFYATLPPPVTVGIESTGYSLWFHALLQRLGHTLLVGEAAKIRAMVVRKIKTDRRDARHLRDLLKDDRFPVVWIPDPATRDLRALIKHRLRLVRIRTMVKNGLHAIALNQRLALGPSLWSRAGLAQLHALVLPPHTRRRRDDSLELLQWLNGHIDELDLHVATAAAADPNARRLMTHPGVGPLTALATVLVLGPVGRFPGSKHVVSYIGLAPAVSASADKYRLGHISKQGSSLLRWVLGQAAPLATRGDAALKRIYFAVLRRRGRPKAKVALARRLLVRLYVMLRDQIDYDEFCRRGRTQRPGLEPVRIPV

SEQ ID NO: 276693 - protein, 352 aa, unidentified
MTVTIVETRTQARAITGGVDTHADVHVAAALDPLGGLLGVQEFRANPAGYARLVEWLGGFGTVCLVGIEGTGSYGAGLARHIAAAGIRVVEVDRSDRQDRRRRGKSDPLDAVSAARAAQSGRAAGAPKGRDGQVEAIRALMADGRTARSERIQTINQARSLIVTGPDDLRARFTGHSADDLVAELASLRPRPGSMIRYHTLLSLRELGRRAEFLDGQLQRLDALIVPLVTARAPGLLALYGVGHDTAAKLLIAAGDHPERLRSEAAWAHLCATAPIPASSGKVTRHRHCPGGDRQANHALYRIVITRMSSHPATRAYVARRSKEGLSKKEIIRCLKRYVAREVYPHLRPAAG

SEQ ID NO: 276694 - protein, 367 aa, unidentified
MHQPTRFVGLDVHADSITVAVAEEGRDEARHVGRYPNDLTRLLKALDRLGERDSLRCTYEAGPTGYGLQRALSKAGIECSVIAPSKTPRGSGDRVKTDRKDAIRLAHFLRSGDLVEIHVPGEACEAMRDLLRAREDAKRAQLRARHQLSKFLLRHERRWPKSNWTNLHLEWIAKQRFDRAALDNVLAESIQAVNEQSARIERYDQRLAELVPATEQAKLIEALQAFRGIQLLTAASIAYELGDLRRFPSAKKLMSYIGATPCEDSSGDRVRRGRITRAGNTALRRLLVEASWAYRHRPNEGYRHRKRAENVAPAIRAIAWKAQTRLNARYKRMLARGKSKQKTLVAVARELAGFIWAVGQEEQLTLT

SEQ ID NO: 276695 - protein, 360 aa, unidentified
MTKQLMAGIDLHSNNLMIGIVDQSGKRLKHQKVACNLKEVIAVLAPYKARLKSIAVESTYNWYWLVDGLRASSYPVVLANPAGIEQYSGIKCADDKNDAFFLADLQRLNILPTGYIYDAKLRPVRDLLRRRMNLVRYRSALMISFKSLYTRTTGGEMKLGELKTLESAKAAELYEHPANQLIAKTQKEHIEQFDQSIGRIEKAVLKSARELPYYEKLNTLPGIGRILGMTITMEVGEIERFKSAGNFASYCRAVESKRTSNQKGKGQNNRKCGNKYLGWAFVEAANFARRYDERCRRWYDRKAARTNTVIATKALACKLAKAAWHVMAHNTNYDRKRMLPEECGRAAVSQRKGLAKGLRD

SEQ ID NO: 276696 - protein, 641 aa, unidentified
MFDYTKNLFQSMKRFLKAQKRRLPEHIRNLSDEAWLDLIIKSISEQYIEKIEFPGFPPPDLQVQFVGSDYEQALREAFIFYTFVKSHAESLKMPLRRNSQFLDFGCGWGRFLRFFWKDINENKLFGCDIDSVILNVCRVTNVPGNLSLISPEGRLPYPDNYFDFIIAYSVFTHLPPTDRCDITEQRNRIGRRTKFLPGSENPHFSVFPASIIPNRLIGRLSSCETGGLATRHPVDPKSSQRRWKMYGLYVGIDVSKDSFSVAGIDSKGNVLFQGSYSMDAEGFSLFLETIVQHCKNLKQILAAMESTGCYHLNLFSFLNVQGIEAVVINPLLISNFAKLSLRKTKTDKKDALTIAQFIVQHQDAVSRLGVSQGLQDLRDLARERESLCHLISETKSEIKRVLRTTFPELESLCDISTKVMLQFLLQYPSARMITSAKQKDVVKALERKGVGTRITFSAQDIIKAAKNSVGIVSPAKEIILQGKVSTLMHLQERVEHMTKLMTALCKASMLQELEIVTSIKGIKTKTAVPFLAEVGDIKNYSCYKKLIAFAGLDPSVRQSGKFVGQSKISKRGNRHLRRALYLMASSVVKYGLFRQYFIRKKKEGMSAQKALFAVTHKLIRIIFAMLKNKTYFNLKEVSVNS

SEQ ID NO: 276697 - protein, 341 aa, unidentified
MLNCNVIAIDLAKNLFQVCKTDKYGNVIFNKTFTRAKLKELLTKEKKSLVAMESCGGTHYWARMAKNAGHQVKSIHARKIKAFRQGQKTDANDALAISVAARQPHIKESRLLSTQEQCLQGIESMRDLLVKQKVSLGNQLRGLLLELGHAIAQGDAKLRQAIPEILEDAENELTQSFRFSIDLIYQRFINTIDEIKLIEDKLAKVIKQDKTCQRFQALEGVGPVCALLMKVALGNVTHFKNGREASACIGLTPVQHSSGGKEKIGAISKVVGNKKLRSALYKGALAVVSQLEKREVRSQKEVWLKGLTARRGKKVAAIALANKTVRTAFALLKHDQVYKPQ

SEQ ID NO: 276698 - protein, 408 aa, unidentified
MPELDHRGPFAAVDWAKDAHAVSIVEESGAERLAEQFPNTEAGLRALTGALLEGGVERVAIERPDGLLVDRLLSAGLCVVAVHPNKLASARERHSASGKKSDGFDAFVLADLLRTDGHRFEALRPDGDETRALRALSRTREDLVGARVALANQLRAGLEAFWPGAAVIFAEVDSPIALAFLERYPSPADARRLGVRRLEGFLARHAYCGRRPAVELLARLRGAPEGRSGEAEVEARRQAVLSLVAGLRALVEQIGLLEAEIAGAVRAHVDGAIFSSLFRSKATVTAARLIGEIGDVRERYRSADALAADAGMAPVSRSSGRSRVVTFRWACDKRLRNAVACLADTTRHHHPWAGSVYRRARARGCDHPHAIRILGRAWLRVIWRMWQDRVPYDPALHRGLQQVNPAGG

SEQ ID NO: 276699 - protein, 343 aa, unidentified
MEYYVGLDVSLKQTSICVVDQAGLVVREGVVDSDPEAISVYVTSKAPNAVRIGLETGPTSTWLWTGLRRRGLPVICIDARHAKAVLKMQINKSDRNDAIGIARIMQTGWFKEVHVKDIDSHSVRALLASRALLVKIKRDLENHVRGLLKNLGLVIGCAKFKVFSVRAEELIEGRPELIAAIRPLLEARNAVGQQVDELDRKVMKLARHDAQVRRFMTVPGVGPITALAFKATIDDPARFARSRSVGAYVGLTCRRHASGEVDWSGRISKCGDAMLRSYLFEAAGVLLTRVPKWSAVKAWGARLAKRNGLRKAKVAVARKLAVILHRMWIDGTEFNWSKQEIAA

SEQ ID NO: 276700 - protein, 308 aa, unidentified
MPQAVIGCDLSRALIDICELPSGRTGQIANTPDAIAVWLDTLDLDVRVVFEATSGCDGDLIAALATRGHPFSRVNPRQAPEFARATGTLAKTDRVDARVLAQMGAALDLPATIPLSPARSRLADFLRRRRQLVDMRKAEKLHRHSAGQPEIAQAIEAMITLLGQQIAELDRQIAGFIAQDQALSEQAHLLNAVPGIGPTVLATLLGELPELGTLCRRKIASLAGLAPHARESGTWRGARRIWGGRRKVREALYIAALNASRRIPVLTAMRDRMRAKGKAPKTILIAVARQLLVILNAMIRKRQPLQLG

SEQ ID NO: 276701 - protein, 427 aa, unidentified
MPEKPVAGIDVSKDFSDMCIIKPDNKVFQTVHIFHDATSLRRSLAALEAAAREFREKPVIVMESTAHYHRVIAQFLQSAGYEVMVINPMQSGALKNINIRKVKSDKSDAHRLALLYRLKTLHTTNQPNELLSNIRDYCRQRADIMNSHTAYVNRLTSLLDQAFPGYARVFSRVACKSSLGILKTYPSPAAILASDPEQLAETISKYARRGVTTDYVIKKVAALRRAAENAEEINLKREAYSVLIVTVAELLEGLQRHIETLKKRIIELATEDPSVKFEVSLLQTIPGIGLYSAVLLRAEIGDFSLFQKPKQLVAFFGMDPSTRQSGKFVGTKTKISKRGSPYARAILDICAQSAVHPVKGKEPANPVLANYYAEKVKTKEPKVVKCIIMRKLVNIIFAVLRDKKPFELRTPEEHIELLKHPNISRAA

SEQ ID NO: 276702 - protein, 339 aa, unidentified
MKITAIGLDLAKNVFQVHCVNEEGKVVQRKQIKRDKLAEFFVRLEPCLIGMEACGSAHFWARKLQRMGHTVRLIAPQFVKPYVKTNKTDAADAEAICEAVQRPNMRFVPIKSVEQQAILAVHRARQRFVKERTAQGNQIRGLLAEFGIVIPLGLASVIQRTPALLEEAEEELPAMFKDLIAELLLNLKELDRMVQQLALVIQRWHTSCAESQRLAEIPGIGPISATALVASIGDVRNFKNGRQLAAWIGLVPKQHSTGGRQNLLGISKRGDTYLRTLLIHGARAVVRHAASKVKDDWLHRLMGRRNANVVSVALANKNARIVWALLTHGREFQADYAAA

SEQ ID NO: 276703 - protein, 356 aa, unidentified
MVAGIIPGIDRHPLKKLKADEQALLRLLHRWRDEATKAGRNINRIAVAFEAGRDGFWLARWLQAHGVEAYVIHASSIAVSREHRRAKTDRLDTDHLKRAFIGWLRAEPDHCHMAAIPTLEQEDAKRPTREREKLVGERTRIINQVKSCLARFGVRGFKSKLRKAAERLEALRTPEGVALPPNTLAELRRDLLRLRVIMDQIKAIEVGRLERLKKAPKARPNAMVRLLARVIGIGIETADMLVHEILSRNLRDRRAVARYAGLTGSPDKSGKRRREKGLARAGNARVRRGMIQLAWRFLKFQKDSALAQWFQSQTTNARCRTRKTMIVALARKLLIALWRLVTSGEIPIGVALRPAA

SEQ ID NO: 276704 - protein, 330 aa, unidentified
MQIYGIDLAMEKFDVSFLDRKGDEKHLVVNNKLGAIARFLKRVPPGSLLCAEHTGVYGNLLVFLCNHLEIQISLTSGYSIKHSLGLLKGKSDKLDAKRIREYGERFRDKLELAEYESEKLQELNELSVLRSQLVKERKMLETQQQSKKHNPYNSISAHKQAEKVISVFNKSISEIEEEILKIIESDQSLKRTFELSTSVKGIGPITTCELIIKTGNFKRIDTARKAASYAGVCPYPNSTGKMVKKDRVSHMSDKTLKTLLHLCAKSATQHNQAYRLYYEKKKQEGKPHYLILNNISNKLLRTLYSVITSGISYDPNYICIDPRLKNKKAA

SEQ ID NO: 276705 - protein, 391 aa, unidentified
MSTRNGTSWSGHIPVSKTEVMMGNCAGVDWASEKHDLLIEDCDGQELTAGTFSHDEAGVSALCKTLTRFDVEVIAVERPDGVLVERLLETGVKVLALHPNQVKAARDRFRASGGKSDRFDAFVLCELARTDAHRFRVLEPDSDATKAIQALVRAREDLVAARVAMGLQLRAELDRFWPGPTRMFQKLDSRISLAFLSRYPSPEDACLLGEKRLGGFLKANGYRNQTPVTVLLERLRSAPSGRAGQIETRTRRQIVLALVHTLQVMGVQIRELEAEIAEQLERHPDGEIFRSFFRTRTSVVCAATLLAEIGDCRARYPQRDAIASDAGHAPVAVESGKYRNATFRWACNKRLRGALRTLAHSTRQWNPWAAELYLQARQRGHDHERALRTVG

SEQ ID NO: 276706 - protein, 429 aa, unidentified
MKIIYPRVCGIDVHKKFIVAVICISESVEPVYLKKRFSTFHNDLIRFRDWLIQNDCQNVCMESTGKYYIPVYNILESHISNIVVANPKWVRAVKGEKDDDKDAKWIADLFKLGIVKSSFIPQKDFRILRELTRYKYKLVNMRSSEKNRYQNALTSGNCKPDMVFTDVFGKSASNIIDLILSDNPYTDEDILSKVHKNCKASPDMILNSINGTDLTPVQKSRIELVNNHIKQLSSNIQRLDKLIDLMIEPYEDYISFLCQIPGVSRNSAITILSEIGVDMNQFTSTRRLTSWAGLTPSSNQSAGKKKSVRISRAGVYLKPCLVEVAHATVKDTNHPYYANKFNKISKRRGKKRAYIAIARKILVAAYHMLLTGEIWNPADLAEVETPVEQRIKYVKNNLKSDIKQLLDIGLTVEELTLMIQQNANNIATQ

SEQ ID NO: 276707 - protein, 409 aa, unidentified
MRIIGLDIHRAFAEAVAWDDGELKRLGRVDMRRRLLEAFAKKLSKDDVVVVEATGNASSVAAVIAPHVKKVVIANPKQVRIIAHAKIKTDTIDASVLAQLYASGFLPEVWIPDEPTQALRRQVTRRNQIVRQRSRLKNIIQSILHSHLIPSCPHADLCGASGRAWLFHQVLPEDERLAVERHLREFDRLGEDLKVIERDLARSALGNEGVKRLMTIPGVDMVVALAIVAAIGDVGRFEQPQKLVSYLGLNPSVRQSGPGPAYHGRITKQGRGHARGMLVEAAWAAARAPGPLRAFFLRVRARRGQHVAAVATARKLVVIIWHLLRKGESYAWARPALHAKKLRDLELKAGYKAERGQRGAAHTYNVKSHRDQERRWVEQAETAYARFVAGWNPRGPKRARTGAANEGRQ

SEQ ID NO: 276708 - protein, 342 aa, unidentified
MQITTIGLDIAKNVFQVHGIDAAEKVVVRKQVRRSQVLAFFKALPPCLIGMEACATAHYWARELTKLGHQVRLMPPKDVKAYVKRNKNDAADAEAICEAVRRPTMRFVQIKSVEQQGRLMLHRVRDLLMRQRTQVINALRAHLAELGIVAAQGREGIKELLKIIASEEDAGLPVDAHASLVVLAAELQAMQTMIGSIDKRIMAQHRSNEASQRLESIPGIGVTGATAIAATVPDPKVFRSGRDFAAWIGLVPRQASTGGKQKLGPISKRGDRYLRRILVVGACAVLRYARQQPQKYPWLTQLLARKPFKVVAVALANKMARIAWALLARGGTYRAPMLVAAA

SEQ ID NO: 276709 - protein, 311 aa, unidentified
MYYIGIDVSKKDLSVFDGKDLNFINKEGLKSFKKYLKKKYRLSEIALIFEPTGVYSLYLKEFCAENSIKAYIVNPKKSHIFARALGIRPKNDKIDARTLYKFHKLIDLKDIQVPKIDQQAKTLASYLVSYEFALKQRISLSNHLESLRDKRLIDLMKKDLKRAKKLENKLFNEILEYVRQNQNLKEDYQRLLTISGVGDKTAIALLTLFKTYQGTNRAQITALAGLDPVKRESGTSVKYKVKISKNGKGIYRKIFYLPTICATVHNQKIRVFYQRLLAHHKTKKLAVIASMRKLLLIAHAMYRNKTEYVAV

SEQ ID NO: 276710 - protein, 349 aa, unidentified
MSHKLNSAIAVIGIDIGKNSFHAVGHDNRGAIMLRQKWSRGQVERRLANLPPCLIGMEACVGAHHLSRKLRMLGHDARLMPAKYVRPYSKGQKNDFRDAEAIAEAVQRPTMKFVATKTAEQLDLQALHRVRERLVSQRTGIINQIRAFMLERGIAVRQGLRFLRAELPRILATPCDVLSPRMVRVIEDLAGDWRRLDERIEGLSSEIEVVARRDCGCERLMSVPGIGPIISSAMVAAIGSGDAFCKGRDFAAWLGLVPKQISTGDRTILGKISKRGNRYLRVLFVQAAWVVLIKPKSWQRHGLKQWLEAAKKRLHHNVLAIALANKLARIAWSVLVHGRTFEASKIQAA

SEQ ID NO: 276711 - protein, 412 aa, unidentified
MKQQAERAAGLDVHRDNVVAAIRINAPGGEVTVTKKRFPTTRRGIGELAAFLTDAAVTRVAMEATGVYWKAPYYALEGLFDELWLCNAQHVKNVPGRKTDLGDAEWLADVAAHGMVRPSFVPPPEIRELRELTRYRKTQVDARSKEIQRLEKTLQDAGIKLTSVASGVWSVSSRKIIEALVTGERNPVVLAGLVVGKLRPKIAQLEEALDGRFGAHHAFVCRQVIDHVDFLDGSIAALTEEIAARLLPFEAAVSLVCSVTGIAELSAQAIIAEIGVDMSRFPTAGHLCAWAGVAPASYESAGKKRPAGTRHGSPWLRRVLVEVARAASRAKGSYFSAQYSRIARRRGPNKAAVAVANSILAVIWHVLTNGCLYEDPGADYFERRHDPAVEAKRLQARIEALGFDVTLSPKAA

SEQ ID NO: 276712 - protein, 335 aa, unidentified
MDQSGSIDEFSSYPNTSFDARQTAEYLVKRYGECRAVVESTANLWLKTYEAFESAGIDVRLANPSKTRLIAEAKIKTDRLDAKALARLLRGDLIAECYVPSKDIRLARALLGHKTNLSREQIRIKNRIYSLLDKYDLKCEYDEVFGVHGMQWLHSIKLDGHDQAMLGSFLRQIEFLSREEETANSQIASEAIRSDYVPKIMSMTGFDYCSASVMATCIAEISRFPSPSHLISWVGMCPSVHQTGKTMYMGNMKDGNKRAQWIMTKVANSAALHDPRMRAYYERIVKRHNYNVAITHVANKMLRVLWYMLTENTLYNERKEGLYARKLKRLAGMAA

SEQ ID NO: 276713 - protein, 342 aa, unidentified
MSVSYVGVDLGSSTFHQVAINHSGAQTLNRELVTSEANLVKAFSDLHGEIHVHLEAGELAPWASEIIRPLVTRVVCSHPQTNAWIARDRDKCDRIDAYKLASLLRLNEFKEVHYPREPLRRDFKTLVQHYDELAEQPARWKKKFKARLRMQGIIVRGEEVFSARGRKAVLEQVKSPVVRTAIKHRYAVLDQSVASQTEAQMLMLRAAQALPEMKILRTAPGVGPIGACRFSAYVHTPQRFSSTRKLWKYCRLSVSHRSSNGKPLRRPRLDRMGCGRLKDVSRKAFEAALRRRDNNGFKRAYQRALETTHDATHARLTVQRKIVSTLRAMWINQTPYCDELMR

SEQ ID NO: 276714 - protein, 385 aa, unidentified
MQKLNDLSRSLAPLNPDSTLIAVIEMSQSSWLVAGIVPGIERHPLKKLEPNEGELLRLLMRWRAEATKMDCTITRIAVAYEAGRDGFWLARWLRARDIETYVIHPTSVAVSREHRRAKTDRLDTGLLKRVFIGWLRGEPDHCHMAAIPTLAEEDAKRPNREREGIVRERTRIVNRMKSCLARFGVRNFKPTLRKTPERLATLVTPEGGHLPPNTLLELRRDMARLRFVTDQIKEVEQARAQRLERTPQDKTHAMVRLVARVIGVGIETADMLVHEILSRSLRDRRAVARYAGLTGAPDESGSKRREKGLAKAGNARVRRGMIQLAWRFLIFQKDSQLAQWYRTRTERGGKKRKTMIVALARKLLIALWRLVTTGEVPAGVVLRAA

SEQ ID NO: 276715 - protein, 477 aa, unidentified
MIKSVGIDFHQGKHVVRCLDERAQLCDGFSFQTTPEGLDTFEEHIFRDGSNPVIVFEPAGLTWFMMAICIRARHPDCRLVRAKGQKVAALRRYLRGSSKSDRIDALTLAKMTFIDPEQLDEVYLPPAKIHALQRLSRQRKRLEGDIAARKTRIGTIVESYVPGVRKAFSAPWSSQARAFLRCRLNPLAVTHDGEKALHSFLVRARHRNKTDKEESYRVFLVCQSAANLYELSSRAEAVDDEFFSVFQEEIERELRLVELEEAESEAVAKRMDELYRDLHPSDNLRSIPGVGRVTAPMFLATVGDPARFHNQSAFVSWTGVVPRTKQSSNVEAKGLRMTKAGPAIMKWALFQAGDIGRRFDPQLASLYYREMVHHGKNHKQAMGAVMSHLAARVIKVLQDGRPYELRDNEGKAVSPAEAKKLILLNFQVPENIRRERRRRNPVKSVSPKSQGTALPGINEATVVPQPVKATIPKNQFN

SEQ ID NO: 276716 - protein, 355 aa, unidentified
MNSSKYIAMDVHKDSISIAVRNATGKIVMESLIETKASMILQFIDGLRGDLHVTFEEGTSAAWLYDLLKPHVTRVVVCDPRKNKSMREGNQSDKIDARRLAELLRLNHLTPVYHGEHGLRTLKELVRTYLTVTKDLARVMTRLKAIYRSWAIPCSGKQVYARCHRAEWLGKITEPGVRRRAEFYYLQLDALRVLRQDARRDLLAESKKHKAWKRLCEIPAIGPIRAAVLLGILQTPHRFRNKRTLWNYGGLAIEMHSSADYRCVDGELQRSRKNVLVRGLNRNCNHDLKNLFKGAAAVASSKPGPFEEFYAALVAKGMKPEMARLTLARKIATIVLIVWKKGVCFDAQYLKPQTA

SEQ ID NO: 276717 - protein, 315 aa, unidentified
MAMRVSQEKMIIGVDVAKNELVIYHEQYDQLEAIPNTKVAIAKWLKTLAGTSAIAIEATNVYHVLFADMAYEAGCEVYVLDGYQLSSYRKSVNIRAKTDAQDARLLARYLKNEFDELRPWIPPSPLYRQLLSLFRRRAALVQARTGLVQSWANETLLKTAFANQINSMKRLEALVEKKIRDVLQEAGLMVQVNRCMKVEGIGFLTAARLVTSYQRGEFSGADAFIAFLGLDLRVSKSGQRDGPRRLTKRGDPEARRLLHNAAMSGSRTPAWKPFYEEQRRRGFSTTQALVMLARKMARVVFALLKNQSEYQTKAA

SEQ ID NO: 276718 - protein, 411 aa, unidentified
MPRVLGLDIHRDFAQAVALEEDRFIQLGRVQLDRESLIAFGRRLLPSDEVVLEATANTFAVVRVLRPMVGKIVVANPLQVRLIAQAKIKTDKIDAGVLAQLHATGFLPEVWIPDSETEGLRRKFSRRSQLVRHRTRLKNEVHAILHANLIGRCPVSDLFTATGRKWIAGQNLPPGDREAVERGFRELERLGQDLATMDRDLAAQAVDDARLRRLMTITGIDMVSGLGLLAVVGDHKRFSSSEKLVSYFGLNPSVRQSGNGPARHGRITKRGANQARALLVEAAWAASRVPGPLRSFFMRVMARRGSQIAAVATARKLAVIVWHVLDREEDYVFARPSLVARKRRGVELRAGQPQRRGRCGIAGRYHNPATRAEERSRLEHAERAYERVVSGWQPSGSRTAQRSRPPEREMP

SEQ ID NO: 276719 - protein, 365 aa, unidentified
MTTTTTATAASPILAIDLGKYKSVACLVDAANDLRFTTIRTSRAEITRLLIMHRPAVVLIEACLLCGWVHDLCVEHGVPCLVANTASEAWKFKHLKRKTDKDDAQRLTEVYRLGKFPTVAVPVKEVREKRGLIETRQKLVSRRVALQNRIRAVLVSQGLPAPCGVKAWSALGLAGIAAYAQPLAECAPADLWRGRLDLALTELAQVKELLKVAEKKLDELAKHDAGMKILDSIPGVGPRTAEAVVAFLPDPQRFRTTKQVSAYGGFVPRQYQSTDTDHRGRITKRGPRTLRKLLVECAWVMLRYNAWARAIYERLTHGGKTRKKQAIVALARKLLVRCWAMLRDGTVWRADPVPPAETSPPAVPA

SEQ ID NO: 276720 - protein, 483 aa, unidentified
MNKQKVKANTVRVDHRNIVGIDIGKRKHAATAVTPKGAVIASLKSFENNQAGVELLERKVLIPATGKSKPRIAMEATGQYWNALHDELQRRGYPCVVLNLIQTGNKGKKRIRKTKTDSLCSGLIARTILTGDAQATLAPDESIYELRILVRHRWRMIRVHGVVLRYAIGLLDRVFPEYDGVFCKPFLKSVRTLIREVGLTPKTLVSKKTEVKKILEKASRKQLSSETIDDLLKRARCSIGTKQGESIINGQFRMVVDYLDFVEGQVQSINKELQERMVTLNSPLMSLGIGAEVAATILAESGDITRFLGPGEYSAFCGLDPSVQDSGDSIRGVSHISKRDAPLLRWALYVSAQTMVKKHRDFTKIYDRHINRGHRFALIAVAHKLQRLIGGHPQDVHNMRFCDIDHSAEIWRYIPFTHKTKKLGKIRMLPIGPKAQAILKSYLDHEESASEQFVFPRTDGKCHKRQYYEAITKACVKAGVPHW

SEQ ID NO: 276721 - protein, 376 aa, unidentified
MTDGNRRVVAGVDAHTDEHHAAVLDESGRLLGTAAFATTREGYEQLIAWVAGHGVIDRIGVESTGSFAAGLVRALEERAIVTVEVNQPHAHTRHRRGKSDPIDAELAARAVLSAVASAVPKHTAGIVEAIRQLSVTRDSAVKARSAALNQLENLIITAPDELRVELTRRKTLSGKATLCRKLRPDLARLGEPAQAAKLALRSLARRVRELDLEINELERQLDRLTRSAAPRTTRLLGVGAVHTSRLLITAGQNIDRLRSEAAFARICAAAPIPASSGRTTRHRLDRGGDRQANKTLHMIAVCRLRHCPRTQAYAARRTAEGLSKRDIIRCLKRYIARELYHSLRADLTSVAPPTPPARELTITCGIGPTGISRRRP

SEQ ID NO: 276722 - protein, 387 aa, unidentified
MPQPNDLSRSLVALDQDSTIITVVEMSQSSWLVAGMLPGIERQPCKKLEPSPERLLALLHRWRDEAVKAGRKITRIALAFEAGRDGFWLARWLQAREVEAHVIHPSSVAVSREHRRAKTDRLDTELLKRGFLGWLRGERGHCTMARVPTIAEEDAKRPNRERECLVGERTRIANRMKATLARLGIRNFKPTLRKAAERLATLHTAEGVPLPPNVSAQLQRDMARLGFVTSQIRDIEEARQKRLEQEPDTGQHAMVRHLARVIGIGIETADMLVSEVLSRPMRDRKAVARYAGLTGSPDESGARRREQGLAKAGNARVRRGMIQLAWRFLRFQKQSALAQWYRARTADSRLGTRKTMIVALARKLLIALWRFVTTGETLEGLILRPAG

SEQ ID NO: 276723 - protein, 411 aa, unidentified
MRLFVGDDWAEDHHDVELMNEQGRVLARKRLPEGVAGMARLHELTGEQLGEDADDAEVIIGTETDRGPWVAALVAAGYTVYGVNPLQASRYRERHGVSGAKSDAGDSHMLADMVRTDSHQLRAVAGDSPGAGAVKVVARTHKTLIWERTRQVQRLRHQLREYFPAALAAFEDLDAPDVLELLARAPDPARAAKLTRAQISAALKRARRRDIPGKATVIMAALRGAQLGQPPAITAAYAAAVRSLIAVITTLNEQVKILQGQVGEHFGQHPDAEIYLSQPGPGPVVGARVLGEFGDDPHRYASGKARKNYAGTSPITRASGKKKMVMARFIHNDRLIDALMAQALSALGSSPGARAFYDAQRAVGVEHNAALRKLANRLVGILHGCLKTRTLYDEATAWPHREKTPQSDIAA

SEQ ID NO: 276724 - protein, 348 aa, unidentified
MRFYTGQHRFYVGVDLHARTMFVHILDHKGQTVFAKDLPASPAEFLHAIKPYRKDLVVGCECMFAWYWLADLCADEGIPFALGHALAMKHIHQGKSKSDKIDAAKLAGMLRGGLFPLAYAYPRAKRQTRDLLRRRSFFVRQRAQLIAHVVNTNTQFNLPPLSKKLTYAANRTPELLDRFADPSTRLMVATDLALVDDYDTQIAELERHLVKNARVDDPVTFGLLRTTPGIGPILGLILLYEIDDIGRFPEAGNFLSYSRLVRCEHSSAGKVTGSGKKKIGNAHLKWAFSEAACLMIRALPAVKSWMQRQEKKRGKRKALSVLEAKIGRTVYHLWKKQVPFDVKRFLRG

SEQ ID NO: 276725 - protein, 449 aa, unidentified
MKILALDLGKFNSVCCVYDSKTRKKTFLTTPTKREHLQSVFQNEGRLADLVVMESCGPSGWINDLAQSFERNTLVCSTNEEAWRWANVKRKTDKDDALKLARMAAMGELKSVHMPSPEHREFRSLVKYRKTLDGRINKTKNTIRAWFVNHGIEIDKGDKAWHTGRKRIDSFRKGIQDCTPDELWKGQLDIELTILDSLTEQLDTIVKRLEELGKNDERIKRLRTIPGVGPRTAEILVACIDAPHRFKNGRQVSAYFGLVPRQYQSGETDRNGRITKRGNPLARTILVECAWASLRYNPWAKGIYERICGKQKTRKKKAGIALARKIAVIAWAMLRDEKDWEPKRMVEVTESYGEMPDKLKESLLNMKPKENSDQRKARLRREARQAKDAKQTSKAKPTNKKTRPSSNPSSRTEKATPQATKPKKKSTPVKSATKSRSKPRRAGKLVSRD

SEQ ID NO: 276726 - protein, 380 aa, unidentified
MASVHDSARSKTTVYAAIELSKKSWVVAIARPDRDRPSIHRIAGGNLADLIGRLRKAAGEKQRIVVCYEAGYDGFWLARSLAKIGINCRVLDPASIQVNRRARRVKTDRIDSLALLRALIAIDRGERHVCAVVRVPTVEEEDARRSHRERQRLVRERTGHINRIKGLLFAQGIRGIEPKRRRTRIDFGKLTTAEGMPLAERLRRELEREYQRLELVQSQLRIVEKERDTADAQDPAVERKRELLCALQGVGGASAAILAREVFARQFASRRQLGSYLGLTPSAYDSGSTTRCQGISKAGNSWARRVLIEVAWLWRKYQPGSSLSHWYVRKTADQSPRIRRIMLIALARKLAISLWRYVETGLVPDGAVMAKTTPHMAAAT

SEQ ID NO: 276727 - protein, 346 aa, unidentified
MIIVGCDFHPGWQQVAVFESETGEIRELKLTNGDGEAERFYRSLPVPSLVGLEACGNTHWFEDLLDQLGHEVRIGDAAEIRASYVRKQKTDKRDAAHILRLLIEDRFPALWRPSRTDRNLRQLLIHRHRLVAIRTRVKNGLHHLMLNKGVQLKQKLWSEAGQKVLCELPLDGWAAQRRTDLLQLLTTLNPQIAELDRAVEHAAYADQRARLLMTQPGVGPITSLAYVITMGNVSRFKNGKQVASYLGLIPAEHSSSNRRRLGGISKQGSPFLRMLLVESVQTVCRLDEGFRKQYKQRCHRMKKGIAKVAAARKLGVRLYWMLRTNTAYPEIARIESSPREGVVGES

SEQ ID NO: 276728 - protein, 390 aa, unidentified
MIYVGIDVAKDKHDCCILGSDGEILFSPFTIQNTLQGFDELYEKIWSLTQDLDEIKVGLEATGHYHLNLLRSLLDNGLASYVINPLHTNLFRKGQSLRKTKTDKVDAASIAMMLLTDRTLKPYSNTSYHNEELKSLTRYRFDKVQERAKLKTSVSRLVSILFPELEKLVPTLHMASVYALLSEFPGASFVASSHLTRLKHLLYEASKGHYGRDEAISIREAAISSVGAVIPAKSMELKHTIHLIEVLSDEINEIETAINSIMDTLESPITTIPGIKNRMGAMILAEVGDFSRFENADQILAYAGLSPSTYQSGQLTSSYAHMEKRGSRYLRYALFNATIYVCVWDPMFNAYLAKKRAEGKHYYVAVSHACKKLVRMIYRMQLTGEPYRAA

SEQ ID NO: 276729 - protein, 385 aa, unidentified
MVKGSTDDQEAPLLKYGLSTISISSQRSAHVNSIKYIGLDVHTATISVAVLDAAGKFIMESVVETKASTILQFMQGLRGDLHVTLEEGTWAAWLYDLLKPHVTNIVVCDPHRNALLKEGSKSDRIDARKLAELLRAGLLRPVYHGNQGLRMLQELARAYVTIGKDLNRVMNRVKAIYRSWAIPCHGQSVYAPRYREEWLNKIAHHGVRCRAELYYQQLDGLVLLRKQVRKELLVEGKRHKAWKLLRSIPTLGPMRVAVLMAIIQTPHRFRTKRMLWKYSGFGVVTHTSADHRYVQGRMERSNKPVFVRGLDTNHNHQLKDLFKSAATQASTSTGPFREFYEALLAQGMREEMARLTLARKIAVITLTIWKKGVAFDANYLKSQTA

SEQ ID NO: 276730 - protein, 406 aa, unidentified
MGLLRRACGVDVHRDDFMATLLRGEGDKETMKFKKDFEGIAAFKEWLSMNECKAVVMESTGVYWIPLYAGLEEEFDVKLAHAQKARKIAGRKTDQSDSEWLAYLLRAGLIEACYVPERKVRILRELTRLRTKMVQNRTDYKNRVHKVLQRCNIRLGSKLHNIFGKAGMEVLEGLMAGKNLDEIVGNSRSKVLKERRTELEGVVRNGLDEEDIFILKRCLRMIERLDEELEKMDARIAMLIGDREDDVRRISKVPGVGKTLAPAILSEIGDPKRFENGKKSASWAGLCPSVYQTADKNQTGKIKLGSKNLRRTMIQVAHSASRCKHSKLRTFYLRVAARRGKKKAIVALARKILCIIHHLLLTGEEYVEEGFEKRVTPLRVRALARIPLDEMAEVLRGAGYVVMAPG

SEQ ID NO: 276731 - protein, 474 aa, unidentified
MKEHKKTKAKTKSQATKVLREQEPNAAGIDLGAEEIWVAVPSERDQNPVRRFEAFTQDLNSIVQWLVGCGVRSVAMEATGLYWIPLYQLLEDAGLKVCLVNARHVKNVPGRKSDVRDCQWLQYLHSVGLLLGSFRPAQAICATRSIYRYRQNLISMATEHVQHMQGALDQMNIKLHYVIDDLTGFTSQAIIEAILKGHRDPVQLAKLRDKRIQASEEKIIKSLEGDWRKEHLFVLAKAWAQYQEVQKQIQDCDRELLQYTQELEACTTVLKPVKVMRLRAELVDSEPRAKLPTTKKARRKTSKNQPQGPWHQELERFFGVDLTLIPGISVLSGLTLMTELGNDLSAFKTPHHFASWLCLCPDNETSASKVLRRRTRRSQNRVRQALRMAASSLHHDKSYLGEKYRRLRARLSPPKAVTAMAHQLARIIWTLITRQVPFDLSLFAQQEKLNAQHRFKRLTASARQMGYQLTPLAP

SEQ ID NO: 276732 - protein, 351 aa, unidentified
MAMLADLVDVVIGVDTHKHTHTLAIVTAATGAVVNQATVAATTAGYQQLLALATQQPGQRIWAIESTGGYGAGLTRFLHAHHEQVVELDRPKRAARRHGAKSDPLDATRAAREALGRDQLAQPRAAGHRAALQVRLTARRSAVQATGDAQRQLHALVTAAPETLRGRLRNMATPQLVTACRRLRHHTDWDTETTATAASLRALARRIQLLDHETAQHTRAITTLIRAWRPELLTRTGVAPIVAAAVLCAWSHAGRCRSDAAFAMLGGAAPIPASSGQTMRYRLNRSGDRQLNQALHVVVMTRLRTDPATRAYAQRRRAQGKTNREIKRCLVRYVARQLYRLLETNPALDPT

SEQ ID NO: 276733 - protein, 311 aa, unidentified
METVGIDISKLTFDARVHTSQAYQSFDNENKGYQDLISWAYENSSFSKEKIIFVFEHTGLYSHQLSVYLTSQGIPFLMVPGLEIKRSLGMARGKDDKKDATKIAQYAYRLRDEIVPSKLATEEVMSLKRLLSLRERLVKQRSGFKSSLKEQKRVLPKKGNETLLSTQEKMIRYLSKQIDSVEKQMEGMIEENESMSRNFRLLTSIKGVGPQTALFMIAYTANFTKFKNWRKFASYCGIAPFPNSSGTSIRGRTKVSNLANKKIKSLLDLCAKSSIQHNPEMKQYYNNRIETGKNKMSTINIVRNKFEMNPI

SEQ ID NO: 276734 - protein, 382 aa, unidentified
MTATHKPDCTVASAPVLYMALELSSGTWKLAFTVGLGQKPRLKTVTARSTVGLLFEIKAAKKRFGLSEDTPVLSCYEAGRDGFWLHRFLLAHGVQNQVVDSASIEVNRRQRRAKSDGLDAVKLVEMLIRWHNGERKVWKLVRVPSVAEEDQRQLHRELIELKSERTAVSNSIKGLLATLGLVVIVDETLPKQLEHLRQWDNAKLPPSLHQRLLREFARWQLINRQIDDRERERSAKIRDDKTPQIEKVRRLMNLKGVGQNGAWLLVYEFFGWRQFKNRRELGSLAGLTPTPYDSGESRREQGISKAGNRRVRWMMMELAWGWLRYQPASELSRWYQKRFAQGNTRLRKVGIVALARKLLVALWKYVEGGEEPLGAVMVGWEN

SEQ ID NO: 276735 - protein, 432 aa, unidentified
MSKGSVGSIIAHPKMLLTYVGVDSHKETHAAVFLDCFFEKLGEIALGNRPADFAEFLCKAQAFRPDGTAFLFGFEDVTSYGRAFARFLMANGQTVKHVNAYLVARERKNLVFEKTDFTDAECAARMLISMFGSLSDAKDGKYDILRTLVVRRDALTKCNVTLKGTLHSLLTQDFPNYHKFFNEIDGKTALAFFTEYPSPDRLKGIAVEELARFLWEHSGGKLGAARAKEILAAIDALPPVHEMRNKTVQSTIRQLRFNLRELDSVEDDLAMVYGEFGTTLTSMTGLDLVSAAQMLSCIGDIRKFPTPAKLARYAGIAPITHSSGKMDMHYASMRGNRELNSLFYGLAIRLIHAYDPGYKAINPFFYEYYHKKMSEGKTKRQAVKCVQRRLVNIVWGMLTRNEDYVNPPMIGVEKPKEEEEEKPKSKLKPSKK

SEQ ID NO: 276736 - protein, 421 aa, unidentified
MAGHVVPDEVLYVRAAGVDLGKRFLVACIRVPNPKRAGTWSLQTERFDTTMAELRRLRDWLVEAAVEVVVLEATSDYWRSVYYLLQQRLNLMLVNPSHLRGIRGRKTDPSDAAFLARAGASGMVLGSFVPPRTIRELRDVTRRRTELGADRGREIQRLEKELEDTGMKLTSVLSDVTGVSSRRILEALIAGQRDPTLLAELATGRARCKITELAAALDGEFTDHHAWMCRHYLDEIDHLAQLVAVLDTRVADIVTALAREQDLNNLDTIPGIARTAAEIVIAETGGDMNFFATAAHLSSWIGVCPGMNESAGINKSGHTRHGNANLKRVLGTAAMAAIKNKDSYYAVYYRRVAARRGAQRALVAVMHKIVIAIWHVLHNHVTYRDLGADYFTRHDPQRAMRRMTKEANSLGLTIRFDPIGA

SEQ ID NO: 276737 - protein, 421 aa, unidentified
MTPPSHDTFAAFIGIDWADAKHDGCLQAAGTAKRECFQLEHTPEAIDAWVTTLRTRFHGHPVAVCLELDKGPLVSALRKYDFLILFPLNPLTLARYREAFTPSRAKDDPTDAELQLELLLTHRDKLHPLRPQSATMRALTQLVEHRRRVVGDKVRMTNRLTSTLKNYFPHVLQWFQDKDTPIFCAFLSRWPTLKAVQLARRSTLESFFRDHHVRSPEVIARRLQAIRAALPLTTDEGVIAPNALLVQALVAQLRVTLQAITDFDTAIAQRAQSHPDFPLFQALPGAGPVFASRLLVAFGEQRERYPSAAALQKYAGIAPVTERSGKKSWVHWRLQCPKFLRQSFVEWAAESIRHSFWAQVYYQQQRDKGKAHQAAVRALAFKWIRILYRCWQERTPYDESTYLQALTRRGSSLLQHLAKAS

SEQ ID NO: 276738 - protein, 414 aa, unidentified
MKTCLFVGIDTHKDSHTAAIMDNYFNAVDIITFANRYSGFDKFMEKLGAMASGRSITFGLEDSQGLGFFLADYLVQKGFSPIDVNPIYTDRARKATIHRDKSDAGDAVLIAKALIRERDKLSPVKIDKASIEIREMVRYRQMLVEESTKLKNRLHSLLFSQYMGAVNVFSNLFSKVALAFFSKYPDPHLLKGVGEDTLATFLKTHSRGRYGIEKARAILNSLPISVDRNLLNTRAYIIGSHIKRFMDLKDEIDTGNEKIKTLVEKSSYACLTSVPGVEAVTAAKIISQVIDISRFSSASKLAKFAGIAPREKSSGRKKKYEKSKYGKKFLRSTIFFIALNHITRSRNGKDRNPVSRAYYLKKIAEGKTKKESLTCLSRRLIDLIFAVMRDRSIYNFSKSKFLAQHTHVLDTVAG

SEQ ID NO: 276739 - protein, 472 aa, unidentified
MIRSVGIDLHQGHHRARCLDERAQPCDSFSFQTTPEGLATLEERVFRDGSNPTIVLEPAGLPWLMVAVYLRSRHPDCRLVKAKTQKVAALRRYLRGPVKSDRLDALTLAKMPFIDPEQMDEIYLPPAEIHALQRLTRQRKRIEQDIAGRKIRISAIVDGYLPGVRRTFNDAWSSPVRAFLKSRLNPFIVVRDEEDALHAFLSKNSYHSKWSKAQTRLVFLSCQSVAAVCKLSELAGTVNEDFFTDLQDEIARELRMLEADEVESEALARRIAELYQRLHSSDNLRTIPGVGEHTAPIFLATVGNPARFHSQSAFANWEGVVPGAKQSSNAEAKGLRMTKAGSSIMRMALYQAGDIGRRWDPQLAAVYYREMVYHGKNHRQAMGAVMSHLGARVLTVLKDDRPYELRNPDGKAISRIQARKLILSEYHVSEEIRSERRRRNSKVSKDRETATYRTNEAAKAPQPVQVEPVSRK

SEQ ID NO: 276740 - protein, 454 aa, unidentified
MNNRRLSVGIDIGKTGNYFAFKVDGKEVHKRTKLKNDFYGNVKCKNIIDKMCEKYSLSYDDCIIGLESTGPYWKNAKYYFEKCGFKVVCTLHEVVDAIKKIEKIKGKDDSIDSYAIATVVEMGKYEKITEQTVKLESIKRLARYTEELLKEQVRIKNKIRSWIAEFNQPFEKYFREINNVTAKALLKLYPSPLDVVGKDYYLVIEHLKEQTKIPDKKGVKLYLEECNEIKKFILHPSEINRLEIERYVDRLERVEEEVEVMKLRLEELAAETFEEWSTLSSIKSIPKTQLIIVLAEIGDIRRFKSPRHLLSYAGLKLCKKNESGDRGSQSKISKKGNVRIRKNTFLIVRTLIIHNRTFRHLYCRYKSYKRKYTNSDKAMLIGVACKFLRIIFGVMKNKTTFNSKEVLKGCNLLECDIKKYVSEFETEQVIKIDFDELSNIYGIQKEEIERLIKM

SEQ ID NO: 276741 - protein, 462 aa, unidentified
MYKRGNKGRGKAKGPSPQSLPVIRPKVAGIDIGSREHWVCGPGLPDGGVNVRVFFTTTPGLNQLADWLIEQGVESVAMESTYIYWIPVYELLESRGLEVVLVNARQLRNVPGRKTDMQDCQWLQLLHSCGLLRGSFRPGESICRLRSLHRQRRNLIEQRSQAVQWIQKSLDQMNVQVHRALADITGKTGMRMVRAIVDGERDPLKLAAFRDRRCKKSEEEIAEHLTGTWRDEHLFTLASALRLYDVLQAELERFDQRILEVLIELQPPQRRHETVPVHPNPQKRYYIKNLGEHELRNELWRFAGCDLTRIDGIRPGIAAIVLTEIGTDLSDFPDEKNFVSWLHLAPHRPISGGKLLDKRPNGAGSNRIAGALRMAALSLSHSKTALGAYYRRTARRKDGRTAVFATARKLAQLVFRMLRYGQDYIDIGEKAFEDRFRQNHITGLRRAAEALGYTLTPQASAM

SEQ ID NO: 276742 - protein, 308 aa, unidentified
MAIQQRGAALILWVKKLTEESSPVRYVMEATGVYHESLAYSLEVKGFEVSIVLPNKISNYFRTLEVKTITDKTASEAIARFGLERKLDRWKRPAEIFRKLKQKTRERDQLVGERTLVKNQLHAEQTEAYPGKESIARMKTRISLLNKQLTQIKEEINVLVKDNEEVKKSVELINSIPGVGVLTAVTVLAETNGFELIRNKRQLTSYAGLDVKEKLSGTSVKGKPKISKKGNRHLRKAMHMPALAAIRYDGRFKALFTRLVSKHGIKMKAAVAVQRKLLEMIYTVYKTNTVFDKEHSKTKLIKIKSLGS

SEQ ID NO: 276743 - protein, 327 aa, unidentified
MQMITTIGLDLAKSVFQVHGVDAGGQVIVRRQLKRRYVLAFFQKLSPCLVGIEACASSHHWSRELQALGHTVRLIPPAYVKPYVKRQKNDAADAEAICEAVTRANMRFVPTKTPEQQSGLVLHRARHLFIRQQTAVINAIRAHLAEFGIVAPVGRHGVEELLNVVADPNDNRVPEIARACVAALGAQLRRMKEQILEFDRLIRAWHRSNEMSMRLEEAPGVGPVLATALVAAVADPKSFRSGRNFSAWIGLVPKQHSSGGKNRLGNISKQGDRYLRGLFVAGALSVIRYAKIHGTKHRPWLTALLARRPTKVALSRSPTKSREWSGP

SEQ ID NO: 276744 - protein, 310 aa, unidentified
MKQTIVYIGIDVAKAHLDVAWQKRLRRFDNDKAGRATLVKWIKQKQSDPVQVICEASGGYEQELLDALAEADLAFSLVQATRVRQYARAAGILAKTDKVDARVLARFGAAMRPEPTSPRSAAQKLLRELEAQRRHLSDLLVAEQNRLEQLNDEKLRRLTRALMGTLKKQIALIDSRIATLIMQDQELCQKALKLTSVKGVGERTAALLLAQMPELGTLNRREAAALAGLAPFNRDSGTMRGKRLIFGGRRAVRHGLYMAALVASRRNPILSSFYRRLRIKDKPHKVALTAVMRKLLLALNQALTPNQSFT

SEQ ID NO: 276745 - protein, 353 aa, unidentified
MLPILAERLADRVDAVIGVDTHTDTHTAAVLTPVGTVLTEITVPATNDGAAVLLAWAGRQTSGLGTGRRAWALEGARCHGVGLLRVLRAAGEYVLEAPKPTTGRRRRGGKSDALDAVHAARGVLAADHVATPRTDGDREALRLLHVCRRHYSDTRTATINLFKSVILTADDDLRTQMRGLSTLRQVQRATTLTTSGSGLDRLRRTQLAALAAQILTLERLLKDNLTEIRALVDKLCPTLLDQPGIGPVTAAIALTAWSHPGRFRNEAAFASLAGVSPVPASSGRITRHRLNRGGDRTLNAALHTIAKARQRCHQPTKDYVNRRTTEGRTPAEITRSLKRYIARQIWRTLEAAA

SEQ ID NO: 276746 - protein, 370 aa, unidentified
MKDHTLYVGLDTDKKHIDIGLAEPLPKGEVRYWGKIANDTVALERVRKRLQKDGRELVVCYEAGPCGYGLYRWLNGKPGVSCQVVAPALTPRRPGVRVKTNRRDCLTLAKLLRAEELTAVWVPDAAHEAMRDLVRARGAAKEDLNRCRQRLGGFLLRQDIRYAGKPWTKKHRAWLGRLAFAEPAHRLLVGELRDALDQATARRDRLSDHIAELVPNWSLAWLVEALQVLRGYQLINAASVVAEVGDPRRFDSPRRLMGYLGMGVSEYSTGERVRRGGITKTGNKRARTALIEAAWTYARPAKRPKASAARQPAALRTIADKARHRLSVRYRKLIARGKLPAVAVTAIARESLGFIWAIAHAAAPDTPRQR

SEQ ID NO: 276747 - protein, 417 aa, unidentified
MANDEVIYERCAGIDVHKRMIMVCLRIGRKTQVREFGTLTHELREMTAWLKENGCQMAAMESTGSFWKPLYNIFEIEELPAMVVNAQHMKTVPGRKTDVKDAEWIAKLLSQGLLKPSFIPDREQRELRELTRFRKSQIEERARNLNRLQKMLEGANIKIASMVSDIDGKSSTEFLELVIGKPDFTVDDVAARRHGKMKSSADELFRSLEGIVTPIQRELFKHVMKVIREQTTQIEQTDALIKNYMTQAYRDAANALTKIPGIGQISAQQIVAEIGCDMSRFPTAAHLCNWAGICPGNNKSAGKQKSGRTNYANKTLKTTLVQCAQAVKRNKNTFFSAQYQRLVVRRGKNRATVAVAHSLLIAIYYVLQGSHFRDLGADYYTQFNREKKINSYIKQLEKLGVSIPDDVLRSAIAEGVT

SEQ ID NO: 276748 - protein, 414 aa, unidentified
MKLFVGIDVSSKELETCFMNADGDMLETLTVKNNLEGASFLRDRIVALADKHSISDIHVGLESTSVYSWHPAMYLHQDASLRERNAKVFTINPKLVSKFREAYPDLDKTDRLDAWVIADRLRFGRLTTTIVMQEQYVALQRLTRMRFHLIHNLAREKQYFLQNLFYKCNAFTTEVESSVFGHAILEMLSEKYSLDDIATMEVGDLADYLRDKGRNRFPDPDHVARCIQKAARASYRLSKVVEESIDLVLGTSIQAIRSIQAQLKDLDKAIENILETIPGALCLRSVPGIDRVYAAGILAEIGDIERFSDQAAVAKYAGLTWRRSQSGSFEAEDTKRIKSGNRFLRYYLVEAANSVKNRDEEFGEYYRKKYKEVPKHQHKRALVLTARKLVRLVDVLLRNGQLYTPRRKVTPTKD

SEQ ID NO: 276749 - protein, 420 aa, unidentified
MKRSRTKKMRNINEKTLITTVDIGKVTNMGYCRCPDRSEVEPFEFFNTGRGFNKFYRCIQKTMKIQHLEEVIVGFESTGPYGEPLTHYLRKRGINLVQVNPLHTKRLKELQGNSPNKTDKKDPKVIADIIELGHALTLVVPEGIAAELRRLSQARERRTNMRTALWNQLQDLVFLLFPEFSQVMKDVKTKSAQYLLKHYPTPEAIIECGLEVLTLTLRKISRGKLRKERAEALYEAARSSVGIKEGQESILLEISNILAFIEASNRIIADIEGKMSSHLKQVPSSRFILSMKGIGEVTVAGLIGEVGDFSKFETISEITKLAGLDLYEVSSGKHKGKLRISKRGRPLMRKLLFFAALNVVRKGGVMHERYQRYLKRGMLKMKALIAIARRLLGIIFALVRNHSEYEIGYQKTQNKLNIAA

SEQ ID NO: 276750 - protein, 317 aa, unidentified
MSNKPSIVCAGIDTGKRKLDAAIDGRPDQLQVDNDPDGHRVLSAWLRRQRVKRVGIEASGGYEQAIVRQLRGDGFEVVVFQPAQVRAYATFHLQRAKNDKIDAALIAACTAAAKKIHAPPDPRLAPFAEPLTLIEQLSEDIAHLKTRRESCRDPQNRQFWAQEISRLNKLRSSAVKTLAAAIRQYPDLANRLDLIASVQGIGLQTAIIILVRVPEIGRLTREQVAALVGLAPYDDDSGDRLGARHIAGGRERVRTSLYRAALPAAFRWNPQLIALYQRLIATGKLHKVALVACARKLLIYANTVVERGTPWVPQSAR

SEQ ID NO: 276751 - protein, 362 aa, unidentified
MSDGSTENIEMTAGLDLGDQYSYLYVLDTESGELVEEGRLRTTPDGLLRRFDSERKLKVAIEVGTHSTWVSRILEGCGHEVLVANPRKTRLIYAGKRKTDKLDAQKLARLARADPELLYPVGHRGEESQAHLALIHSRDALVRSRTQLINHVRGTVKSFGARLPKCSAESFHRKAADALPSKLAETLEEVVETIGSLTETIRDYERRIERLCEQSYPQETGLLRQVPGVGAITSLSFVLTLEDPDRFEKSRSVGAYLGLVPGKDQSGQSDPGRPISGEGDEMLRRLLVGSAHYILGPFGPDSDLRRHGEKIALRGGKNAKKRAVVAVARKLSVLLHRLWITGEAYDPLRNARSAGTLGEEAA

SEQ ID NO: 276752 - protein, 344 aa, unidentified
MKYFAGLDVSLDETAVCIVDEDGIVVREGKVPSEPDDLVRWLTALELTLVRLGLEAGPLSPWLHAELTAAGLPAICIETRRMKGATAAMAIKTDRNDAHAIAQAMRVGWFTAVHVKTAESQELRLLLSNRRVLLQKRVAIDNEIRGTLKAFGLKIGAVGVVGFEARVIELLVDRPRLFAMVRPMLNAREALRQQGAVLHKLLLKNVRASKVCRRLLSVPGVGPVVALTYVTGIDDPARFARSRDLGPHFGLIPRKYASGEIDRNGSITKAGDSAVRGALVQAALTLLTRDRRWCALKVWGLAVAKRRGLHRAIVAVARKLAIVLHRIWIDETTFIWSHKETASV

SEQ ID NO: 276753 - protein, 351 aa, unidentified
MEKIYIGVDFHARQQTICYLKTETGELVIVELKHEDKEQVRAFYRQFQEPIAVGLEASGYSPWFETMLEQLGGEVWLGHATEIRRRARWRQKNDRRDAELIWDLMVHHEFPRLHRPAVQSREILRMLRYRQKLIKLRTMTKNSLQAIALQAGLAKGRQLFSAAGQQQLQAAVMSPVLHWQREHWLALLKPFNQQLLETMVWFKEQSKDDLSVRRLRTHPGIGLLTALCLLHTLQPVSRFRNARKVAAYAGLEPVERSSAERQHFLGISKAGSRMLRYLLVEAGQTAVRYDEDLKRFYQRLAERRGRPKAKVAAARKLLIRAYIMLRDEIDYAEFRRRAVAARLARRGQRPT

SEQ ID NO: 276754 - protein, 425 aa, unidentified
MSLLQPTQPAAVLVAIDIAKLRHDVLVEAPGWKSRKRLVLPNNAAEFRLFADFLHGLKHPVRVVFEATGNYHRPLAHFLQAEGFQLELIASLAVARTREAMHNSWDKNDPKDAQVLLHLLKTGVTQHYHDPLANRILDFQELSLTYAQISLEKTRTQHRLLTHYLPLYFPEIERYYHASRSEWLLAFLQVFPTPALIAQLSMEDFVQQAWTVVGRKVSKQRLLEDIYRTAQSSIGIPVEAGSEAVAMFRVVLGEMIRLCQLRDQLEERAACHMKDNADFRRLQQMPGIGPILALTILAEAGDLRRFNHHRQFLKFCGLDLSTQQSGQFRGATKLSKYGNARLRCAFWIAATVAVRLRENSFRDKFERYLRRDPLSADRKRMAYVAVAAKMARVAHGIIKTGTDFRCFYEAAAPSGRAASPGPSRP

SEQ ID NO: 276755 - protein, 345 aa, unidentified
MATYYIGADVHSNNTELAVENRHKIVARYSVPTTIPAISTVLNSLQGRKILAMEEGPMAGWLYRNLCESVDELVVCEPRRNKLITCDGDKDDKIDAGKLAVLLRGKFLKTVHHTNDNKRAYLKHWVNLYHDRVRDAVRYINKIRACCRMHGVATPRKVIHNNANLNDWLSSINNSVLQAQLQMLWIGYEATKEQVLIAREQLNSSARKYPTIKHWCRLPGIGLIRAATIFAYLDTPWRFKKKSKLRKYCGVGLERTASGTDKKGRIKPVRLRLPRMVNRRLKDAVLGAATSAINRHKHNGFKKYYERMLSNGVTPANARHSVARKMISVMSGMWKTDSKYDPKML

SEQ ID NO: 276756 - protein, 345 aa, unidentified
MEKPKYYVGIDIASKTYTATIGQYREDKGWEIIAKPSTFENTYDAFSQFIYWLNTIKVVANNCIVCMEATGVYGEALAYFLVRNEYTLVVEAPLRVKRAFDPEGHKSDPVDSRQIAEYAYRFIDQLKVWEPKEMIIEQIKVLLTVREQLVAQRTAHSNANQALNRKVVQTPFAQDIHEKAFKELDMHVQEVEAEINRLINESPSSRELQRLLETVPGIGPILATFLVMTIHSAPEPYNPKALAAYIGICPYENSSGTSRNKRATSRHYGPSPMRRLLYLAAMSVRQHCPKFEHYFLRKVAEGKQKQLVMNNIANKLLKVACAVARTKTPYISGYRSIHPQLLKGN

SEQ ID NO: 276757 - protein, 356 aa, unidentified
MSQGTWIGLDVHARKTVAGVLDAATGEVRTCRVASRPEETVTWLGELPAPVRVAYEAGPTGYGLARACAAAGIGCVVAAPSKIPRAPGDKVKTDRRDAERLARLLRLGELVAVRVPEPHEEAARDLVRAREDARGELMRARHRLSKLLLRHGCVYDASAWTLAHEAWMRRQPFESRPLRLAFDESYAAMLQAKTRRDALDQAITELAAEPPFGDVVGRLVCLRGVATLTALALTVEIGDWSRFRPESLGPFLGLTPSEDSTGDRRKLGAITKTGNTHARRLLVEAAWHQRRPLRPSATLARRRDGQPAVVCAQADRSARRLHTRWHALERRGKRRTVVAVAVARELAGHCWALATM

SEQ ID NO: 276758 - protein, 355 aa, unidentified
MNKTKYIGLDVHQASISVAVLDENGKLVMQSVIATRAAAIVEFLDGLRGALQVTFQEGTYSAWLHDLLVRRVSKVVVCNPRKNALLKAGNKSDRIDALKLAELLRGGLLSAVYHGENSTRTLQELARSYQALTEDTTRVMSRLKAIYRSQAIPYGGKKLYTQRHRGAWLQQLKQPGLHRRAARLYEQLDLLQQLRRQARQELMVESQKHSVCDRLRSVPYLGPIRAAMLVARVQTPHRFRSKRQFWAYFGLGLETRSSADYQQIEGQLKRSRKKVLIRGLNVDHNHDLKNIFKGAAMSASIFPGPLQEFYQQRVAAGVKAEMAQLTLARKIAAIALTIWKKGERFDPTKLKAQAA

SEQ ID NO: 276759 - protein, 318 aa, unidentified
MGTVMNQSSSVYIGIDVSGSALDVAIHDTTEHFRVDNEPVAIEQLVQRLIALSPTLIVMEATGKLELAVLRALCEAGLPAVAVNPRQVRDFARATGSRAKTDRIDAFAIAHFAAVLKPAVRPLTDVQTGQLQALLLRRAQLIEMLVAEKARLERAHAAARDSLNDHIKWLKQQIKVADNDIDSFLRSSPAWRQKEDLLRSVPGIGPGAAATLIAFLPQLGSLNRREIAALTGVAPFNSDSGRHIGKRRIQGGRAVVRRALYMACVPALRFNPTIRAFYDRLREAGKPFKVAITACIRKLVVTLNAMVRNATPWSSSIN

SEQ ID NO: 276760 - protein, 422 aa, unidentified
MRAERLAKAPPIVEKERDNLMALTKRYTRFCGIDIAKRKHVARIIDRDGQCVARAQSFNNDADGYQSIVARLKDAGGPRKVLIGMEATGHYWYSLRDFLVDHAYEVVVLNPIQTAAQAKKGIRKSKTDKIDAGHIATLIKNGEHRPALVPGELAMTCRQVTRLRYAMTRQGVRIKQLLWSRLHPVWPEYEALFATPFCTTGRKLLATAPTPHDVLAMEQQELVELIRTTSRGKYGPAQVERIRRAAADSVGTQRGVDGVRISIRSLLTQLEALQPIRKQLDDEIIALADRVPAYIHTLPGANAHSAVSLFGETDPIKIFRSPGQLVAFAGLDLTVFQTGQYKAPRRRISKRGSPALRHTLWQMAHRACYQEGDLRDYWLRRKGDGLSHRSAVTATAIKLCHVAWRIMTDHRDYLPQPPARDS

SEQ ID NO: 276761 - protein, 340 aa, unidentified
MNTTQISVDLAKSVFEVAISEEPGRVAARHRLSRARFRSFFEAHGGAHVFMEACGTAHYWARELEACGHRVSLLHGGDVARYRDGNKTDRADAKALLEAARNADIDPVPIKSVEQQAIAALHRLRQGALRARTARINALRGHLREFGILIPVGATRVVPAARTALAGDVVPDYLRLALEDAIEEILALEARAESLRQQLGQLAHHLPDAQLLMTVPGVGVLTATALLAFVGDIRRFRSGRDFAAYLGLTPREHSTGRVRRLGRITKRGNSYLRMMLVHGARSALRAGNVTDQPDDLRTWALRIQQRSGHNVAAVALANKLARVSWRVWHDGRPFQRREAR

SEQ ID NO: 276762 - protein, 336 aa, unidentified
MNGSTERWVGIDVAKSKLDVALLDDRGKLRSHVFANDAKGHAALMAWLNQRGGSSQQVCVCMEATGCYSEALAIALMDAGWCVSVVNPARIKGFGQGELVRNKTDRADAALLARFGQALRPEPWVAPSVEVRQLRALVDRLHSLKEMHQQEANRLEAAMNQTGMRESIQSHMQWLQAGIKQLERQIDDHIDGHPQLRADAKLIISIPGVGNTTAAKVIAYLGDVRRFKNAKALAAFIGVTPRLRLSGSSVRGRSVISRSGHAAIRHALYMPALVALKHNPIVKTFGERLKTGGMSPKAVVAACMHKLVHLIYGILKSRTAFNANFMVVRLDSQDGI

SEQ ID NO: 276763 - protein, 344 aa, unidentified
MNISRVGVDIAKSVFHVHGVDRHEKPQWRGKYSRAKWLEAISRRVPQGAVIGMEACASAHYWARELQARGYQVKLIAAQFVKPYVKTNKNDRADAEAICEALGRPTMRFVAVKTVDQQDCQATHRIREELISQRTAKANQIRGLVGEYGFTAPTGIQQLRWALPLWLEDATNGLSDRFRCLLADLADDLRYLDERVAQLTSAIETHANTDPVAKRLMSLRGIGPITASALSGVLGDGAIYKRGRDFAASLGLTPRQHSTGGRERLLGISKRGNSYLRKLLVHGARAVLRFAVRQEDGLSQWIKHLAVRKHRNVAIVALANKTARMAWAVTRYEVPYNPELAAAA

SEQ ID NO: 276764 - protein, 365 aa, unidentified
MCQRVIVTDESHEGAIHMQISTIGIDIAKTVFQVHGVDAAGKPVLKKQLRRGQMLEFFGKLPPCLIGMEACATSHHWARELRKLGHDVRLMPPSYVKAYVKRGKNDAADAEAICEAVTRPSMRFVPIKSAEQQGALMLHRTRDLLIRQRTQLINAMRAHLAELGLVAQTGREGVQQLMRTVAEADNERLPSDARVACQAIIAQLQAVQMQIAGLEKRIHQAHRANPASKRLDAIPGFGVIVSTAVVATMTDPRAFKTGREFAAWIGLVPRQNSTGGKDRLGSISKQGDRYLRRLLVVGALAVIRSARARPDKYPWVMKLLGRRPAKVVAVALANKMARIAWAMPAKGETYRASVHRSSEAIAARA

SEQ ID NO: 276765 - protein, 327 aa, unidentified
MTHSVLGIDVAKATLDVALIQGERKLYQQFDNTASGYQQLTLWLSKQGASQASVCLEATGQYGEGVAEYLFAQGYAVSVVNPARIKHYASSKLRRNKTDKADAQLIAEYCLREKPALWSPPPASFKHLQALIRHLEDLQASRVQTTNRLTSGVDTPLVLEQLNALRTFLEGQIRQTKQAIQTLIDVTPNLQRAQALLVTIPGIGRLTAAKLLGEIRDIGDFQSARQLAAYAGLTPRAFVSGTSVHKKSRISKTGNANLRKALYMPGISAKRWNPIIHQACERLAQSGLRPQELVCAAMRKLLHQAYGVLKTGRHYDPNYLVKVQDIS

SEQ ID NO: 276766 - protein, 328 aa, unidentified
MGIDIAKASFDFCLLSSHGAVLWRGHLSNDASGIKQFLAELKTGRWKVSLIHFALESTGVYGKALINALHQAGLALSVLNPAQVKFFAISVLRRIKNDRVDAQIIARFCLERKPLATRPLRPIEEQLKLLVHERESRVSEQTRERNRAKNDPFQIQLPWLISRQRQQRLNQLQKELTQLDDAINKLIASDQFLKAQSQLLCSIPGIAQTTAAKLLSELAAKEFHSARQLAAYAGLTPSQFLSGGSCYGKTHLSKIGNAFLRKALYLPAAVARRWCKALKPWVILLEKRKLSDLAIRGAIMRKLLHIAFGVLKHQKTFDPSLVGRPKAV

SEQ ID NO: 276767 - protein, 353 aa, unidentified
MSKDITLTVDYHDRACVVRWFDHSTRCDRVLSEVLTTKHALDEIVEQARRAAGRKGGVTWIQESTTGWARIQALVGDRARFLLANVLQMPLPPKGRRRKTDKIDTARIQREYLNGSLPLAYQPPAQWRELRRLVAYREGLVKRQTAVRNWINRYLAHETWFDRTGLWSPTGQTRLRAALQKLPRTDALIIGQKLDELMRLEEQLRIAVSELVSVYSVCPEAKRIDAIAGIDVVSAVSIVARIGPVERFPNADSLIAFAGLAPGIQESDQTRRNGRIGGGGTDSHLRHYLIEATMWARKLPRYKRVYDRIAKRRGKKVGRLVVARMLVRSIYKMLKTGVNFDAGALAPAEAIAS

SEQ ID NO: 276768 - protein, 345 aa, unidentified
MKHFAGLDVSLEETAICVVDETGTMVREARVSSEPEALVAFFRGLGLVVERIGLEACSLSAWLHESLVAASLPAVCIETRRAKAAMGAMPNKTDRNDARGLAQIIRNGWYRAVHVKSPTCRSWRALLTARRLVLNKMRDLENGLRALLREAGLKLGTPARKEFAARVRELTAADPVLSVMTEPLLTIIAAMTRELAQLTKRVLDIVRDEPVCRRLMGVPGVGPLTALTFRATIDRPERFRRSRDVGAHLGLTPKRYQSGETDVQGGISRCGDELARTALYEAAHSLLIRSRKWSTLRAWGMQVAKRRGMARARIAVARKLAAILHRMWADGTEFRWGEADAAVAT

SEQ ID NO: 276769 - protein, 385 aa, unidentified
MANQNDLSRSLVALEQNNTIIAVIEMSLNYWLIAGIVPGVDRHPLKKLNVDEKALLQLLRQWRDEAAKAGHVITRMAVAFEAGRDGFWLARWLRARGVDAHVIHPTSVAVPREHRRAKTDRLDTELLKRAFLGWLRGEPEHCRMAAIPSLQEEDAKRPTRERENLVGERTRIINRTKACLVRFGIRNFKPTLRKAPERLNQLYTPEGDPLPPNTLAELRRDMARLRFIIDQINEIEAARLLRLEQARVEGPTAMVRLLARVIGVGIETADMLVHEILSRDLRDRRAVARYAGLTGAPDESGSKRREKGLAKAGNARVRRGMIQLAWRFLLHQKDSALTQWYRARTASAGRKRKTMIVALARKLLIALWRLATTGEVPTSVVLRAA

SEQ ID NO: 276770 - protein, 309 aa, unidentified
MEIVVGIDVSKERLDVAILPQEEVFAVGNDHAGIDELAERLKGIGVDAIALEATGGFEMLAVAGLSAAGLTVLVVNPAQVRAYAHAIGRRAKTDPIDAAVIAAFVLATKPEIRPLRDAETQALSELVARRRQIVQMIVAEENRLRMALAKQAQKSIKRLLTALRRELESLDADLDSHIRKSPVWRVREALLTSVPGVGATTARTLLAELPELGSLDRRQIASLAGLAPWTRQSGKWKGKSFIGGGRGKVRAVLFMAALVASRYNPDLKAFRDRLVAAGKPKIVATVATMRKLLTILNAIIRDGRPWQNA

SEQ ID NO: 276771 - protein, 462 aa, unidentified
MQLQHSRCAGLDVHKKSVSVCARIRQGDKTIIETAVFGTFTRDLERLRDWLAAHKVQQVAMESTGVFWIPVWNVLERAAAGFELLLINPQHAHALPGRKSDRMDSDRIAELHQYGLLRGSFIPPAEVRQLRDLTRRRTHLQQDRNRVVNRIARLLETVNIKLGSVVSDLTGKTAQLILDAVAKGNHKPEELVQLAQASLKNKRELLIGSLEGFSNEHFRWLLSEALHDLKQLDGTLEQVDQRLGAALQPHKELLLRLCTIPGFDFTAAAAVLSEVGFDMKRFADPAHLASWAGLCPGCNESAGKRSSSRMRKGNRYLRRLLTQCAWSLLRKKNCALTSLFFRVAARGGKKKAAMAVAHRILALAWHIIAEGGVYKEKDAAGNPNQASRTARRLARRLADLGFKVELKQKTTPTPTTPRQLDPKPENPVKPPKPKFQKTLVRRKPRDPKPRLWTTSTSTESTT

SEQ ID NO: 276772 - protein, 346 aa, unidentified
MEQYVGLDVSLKLTAICIVDRTGKIDREGVVASDPETIAAFVRSHAPHVARVGLETGATSTWLWTELNKLGLPVICIDARHAKAALKMQINKSDRNDAVGIARIMQCGWYKEVRVKDLGSHAIKALLVSRALLVKIKRDIENQIRGLLKNLGLVIGRAKMNVFAVRAAQLAESRPELAAAVEPLLKAREAVGRQIADLDRKVMRLARNNAQVRRFMTAPGVGAITGLCFLATVDDPTRFKRSRSVGAYVGLTTRRYASGEIDWTGRISKCGDAMLRSYLYEAANVLLTRVAKWSTLKAWGIRLAKRSGLRKAKVAVARKLAVILHRMWIEGTEFKWSLKEAANQPA

SEQ ID NO: 276773 - protein, 340 aa, unidentified
MQITTVGLDLAKLVFQVHGVDAQGRTVLTKQIKREQLTAFFAQLPPCLVGMEACASAHHWARVLRDLGHDVRLIAAQFVKPYVKSNKNDAADAQAICEAVGRPSMRFVAIKSIEQQTVLSMHRAREGFVRARTAMGNQIRGLLAEFGIILPVGLANIRPRVPALLEAAADRLPAALTYLITQLVEHLTLLDARVKDLERQITSWHRHDELSQRLAQIPGIGPMTASALIATVGNPALFKNGRQMAAWIGLVPRQHSSGGKPTLLGISKRGDSYLRRLLTLGAQSALIRSRRPGASPSWAGQLLQRRHVNVVATALANKNARIAWALMTKSEAYDPNYLPT

SEQ ID NO: 276774 - protein, 359 aa, unidentified
MNRISRVGVDLAKNLIQVHGVNSVGATVSNRALSRDNFLIWCAKLPNECFIAIEASSSSHYWARKLVALGFDARIIAAQLVTPYRLQGKSGKNDTNDAAAICEAAGRPQMWFIPIKTTDQQSMLCVHRLREGFKIERTACINRIRGLLAEFGLVYARGTRVLSQALSEIIEDASNELSGLTRRVIGQAKNQWVELDAHILWCNSQILAHLKQDEQVRKAAQLMGVGPITASAIVATVGDFARFKNGAQFGAWLGLTPRQNSSGGKTTLGGITKHGDMYVRMLLIQGARPAVVTAHRRDDPVSKWAHRLREKSGWQKAVVAMANKNARILWAIFTSGKPFDAHHISTHPASPPVSAMSIA

SEQ ID NO: 276775 - protein, 332 aa, unidentified
MENNCFIGIDVSKNKLDICVLQGKEVLQEDVIDNTPSAIQRFLVDMAEKRGLDLCSCLVCAEHTGNYTYPLTLACRDLGCRLWLENTAQLKNSSGVHRGKNDRVDARRIALYASRFNDKAMLYHELTPELERVKQLRQERSLYRSDLSKYKGQLSDQKNFMESTVYKAKANRLKHVIKELEKMIDVVEREITGIIDSCDVLKRQMKIITSVEGIGRETALCFIVETAAFTRFTDSRKFACHAGIAPFQYTSGSSVRSRNRVSRRANKQVKTLLHMAALSITRKKKSELKVYYKRKVEEGKNKMTVINAIRAKLVARVFAVIRKNDIYSINFT

SEQ ID NO: 276776 - protein, 308 aa, unidentified
MYLGIDVSKLTIDCCLISDGLFFERKFKNSKVGFQELKDWLKENGATERLHCCCEATGEYLSKYYRMSVENPRKIKGFGTAVLQRSKTDRQDAKTIAQYCKALEPRPWQKPTEAQTKLQELTRYQHRLKRQKAAEQTKLQTAPAYLLPLIQSTITHLQQQIKAVQNQLNQFHKDNPDYKIQKERLKTITGIGEAAANSLLSVLIQKDRFKTAAQFVAYLGLDPKENQSGTSIKGRPRISKLGNTHLRTTLFIPAMHAYRSRIFAKYVSRLQKNGKRPKVIIVALMRKLAVIAYHLIKTGQDFDNSRYE

SEQ ID NO: 276777 - protein, 457 aa, unidentified
MAQRSKKAKSRKFKITQLPAQLRHINLNAAGIDIGSERHLVAVPEGRDDVSVREFGTFTVDLEALADWLKKCGVTSVAMESTGVYWIPVFEVLERRGFEVKLVDARHVKNVSGRKSDVLDCQWLQQLHTYGLLAGAFRPPDEVCVLRSYLRQKEMLTQAASMHIQHMQKALQQMNLLLHNVVSDITGVTGMKIIKAILAGERDPKVLARNRHALCKNSPSTIAKSLIGNYREEHLFALRQAVELYEMYQAKIADCEQAIIKQLEKQPNVSDDEPPPADKETQTRSRIRADVDVQDLLYKKTGIDLFAIPGLAADTLLTLASEVGFDMTPWKTEKHFASWLGLCPGTRRSGGKVLNSNTKRNPNRATQAFRMAASSLSRSKTALGAFFRRVKMRTGGPQAVTATAHKIARIYYAMLTKRSNYIELGQQAYEQRYQQRRINSLKNQAKSLGFQLVPCAT

SEQ ID NO: 276778 - protein, 332 aa, unidentified
MDFFYFIGVDVSKKKLDFCVMFEGKVVHEEKTANHQSAIMSLLRNLEEDYGITSGQMLVCAEHTGQYTFPLACACKSVECKLWLENPAEIKYSSGVQRGKNDKVDAKRIAIYANRFQDKVQYYERPTEDIERLKQLESERTLYVTDLAKYKGQMKDQKDYMPKALYERKMKRLQALMDDLEEAIQAITDEMDEVIASCPVLSRQRELLMSIDGVGRVVATNMIIATEAFTRFVDPRKFNCYAGIAPFYYSSGSSQHSKAKVSHRADKVMKRLLHLAAVAVTHRVGGELKMYYERKVAEGKNRMSVINALRAKIVARMFAVIKKNEKYKPILS

SEQ ID NO: 276779 - protein, 383 aa, unidentified
MNDAKYIGLDVHQATITVAVRDSAGKLVIEAILETKAETILQFLHGVRGSLHVTFEEGTWAAWLHDLLKPHVTRVVVCDPRKNALLKAGNKNDRIDARKLSELLYLNKLSAVYHGEQGIRPLKELARSYLTVTRDLTRVMSRLKAIYRGWAIPCAGEQVYAPHYRAEWLAKISEAGVRRRAELYYVQFDTLAALRQGVRRELLAESRKHPATRLLRQIPSIGPIRAALLVALIQTPNRFRTKRQLWAYCGLALRTYISGEYRFVSGQLKRSKKVLAVRGLNLNHNHDLKNIFKGAATRAAATAGPLQDFYEARVAKGVKPHLARLTLARKIAAITLLVWKKGERLCAGINRHEVENARVSRERTSDSPGPEFCAAYREVHSEA

SEQ ID NO: 276780 - protein, 360 aa, unidentified
MDVSRDEPLMTAGLDLGDKYSYLCLIDQHSGEVIEEGRLRTTPEAFRRRFASQEQPMPIAIEAGTHSPWASRVLEECGHEVLVANARKLRLIYSNKRKTDEIDAENLARLARVDPKLLYPLKHRGEESQAHMALIRSREALVGTRTQLVNHVRGVVKSFGHRLPRCPARSFHKRASEHIPEALRPALGPILEQIGSLTERIRDYERQLETVAKGHYPETELLRQVEGIGPLTALTFVLTVEDPYRFEKSRSVGAYLGLVPATDRSGDRDPQKHISKEGDEMLRKLLVGSAHYILGPFGSDSDLRRHGEKIASRGAKNAKKRAAVAVARKLAVLLHRLWVSGEVYDPLYNTHRREQREEAA

SEQ ID NO: 276781 - protein, 338 aa, unidentified
MTTFCGIDLHSNNSFVVVLDEADRVVYGKRLPNDLATILEALAPYREELAGVVVESTYNWYWLVDGLQEAGYRVHLANTVAIRQYDGLKHSGDAADARHLAHLLRLDILPTGYIVPKAQRAVRDLARKRLQLVRARTAQVLAVENLFARNTGSRPSANSVKRFTCEDIDRLGFDADVALALKANVAILGALNTEIERLEARLLERVAPRPEFVLLKSAPGIGDILAMTIWLETGTVARFAAVGNFSSYCRCVDSARVSNGKKKGEGNRKNGNRYLAWAFVEAANFAVRFCPQAQRFYERKKARTNAIVALKAIAHKLARACYHMLREGKPFELKRCFG

SEQ ID NO: 276782 - protein, 342 aa, unidentified
MIASTIGLDLAKHNFHVHAVDADGSVIKTAALRRSEMIKFFQRARPCVVGVEACATAHYWARELMKLGHEVRLIPPSYVKPFVRRGAKNDAADAAAICEAVRRPDMRFVPVKSEANQSFLMLHRARGLLVRQRTMTVCAIRAHLAEFGIIFGQGRQRIETIMPMIEEVAASLPEHARYALTSLIGSVGELNKQIDGIETKLAEIGRSDPVSNLLSSIPGVGPITSTAIAATIPDARMFRSGREFAAWLGLTPRQNSSGGTTRLGGITKQGDAYLRHLLVIGARNIVRYPKARAKVGGAWIEALLQRRRPMIVAVAVANKLARIIWAMMTSGEMFREARVKTA

SEQ ID NO: 276783 - protein, 405 aa, unidentified
MNAVGIDVSKGKSTVTIRRPGDVVLMPPCDIPHTQSAINALIEQIKSLDGETKACMEHTGRYYEPVANWLSDAGIFVSAVNPILIRDFGDDSLRAPKTDKADSKKIARYALDRWAKLKQYGSMDKTRSQLKTMNRQFGFYMDQKTAMKNNLISLLDQTYPGANDFFDSPARSDGSQKWVDFVYTYWHVDCVRSKSLQAFTEHYQKWCKRNGYNFSAAKAEKIYQSSSDLIAVFPKDDSTKTLIRQAVTMLNTASQTVESLRLKMDQTAATLPEYPVVMAMNGVGPSLGPQLMAEIGDVTRFTHREALTAFAGVDPGKNDSGKRNQKSVRTSKKGSPSLRKTLFQIMDGLIKRSPVDDPVYAFMDKKRSEGKPYYVYMTAGANKFLRVYYGRVREYLASLEETRES

SEQ ID NO: 276784 - protein, 343 aa, unidentified
MQAVTTVGLDIAKSVFQVHGVDARGNVVVRRQLRRRQVLPFFKKLPSCLVGVEACATSHHWSRQLRALGHTVRLMPPAYVKPYLKRQKNDAADAEAICEGVTRPNMRFVETKTPEQQSCLMLHRTRHLFIRQQTAVINAIRAHLAEFGIVAPVGRNGVEELLDVVADPNDDRVPEVARECLAGLGAQLRMLKAQILEFDRCIVAWHRSNETSKRLDEIPGVGPALATALVASVADPRAFRSGRDFSAWVGLVPKQNSSGGKEKLGSITKRGDRYLRSLFTAGALAVIRYAKIHGTKHRPWLTALLARRPTKVAAIALANKIARMAWAMMAKGERYKEPAALAA

SEQ ID NO: 276785 - protein, 320 aa, unidentified
MSDHLAVGIDADSKTLVVACHGTKGSARITNSASVITKWLSTLPVGSRIGVEATNRYHELVVQAAQKAGHVVFVLNPRDIKHYAKGVACRGKTDSGDAQVIARYIAKEADNLHEHVARSPAQEQLHVLLQQRDSLVRSKAKLNLSLGAGASESAIFGRIFDGLKEAIAMLDQQIQQLCRSGEQRDLYRRIMTIPGVGPTVAAFVTHHITRWPLTSSDAWIACTGLDPRPNESGARIGRRRLSKRGNASLRQILYMAAMGLTRSKNGKPLYNAIRERGHSSTASFNILARKLARIAWGVFKSGRDFDPAMLKVGQTCFQQA

SEQ ID NO: 276786 - protein, 433 aa, unidentified
MLKLNYMSTLFVGIDVSSKTNAVYAMDFEENKYISSSFGNNQPGADKLVNMIAECMHKHKNLNTILIVLESTSVYSVHISNFLSTSEVLMPYKPYVFCVNPKATSNYRKSYIGMEKTDPTDAYLIADFGRVGRTKKLEPWRGGQFIALKRLTRHRMHLSECITREKTYMVSNLYLKFSELQLLEGDDKPFGSLYGATSSAVLTEFLSPQEIIDMPEEDLLTFLAGKSRNRISDLSKTSELLRKAARDSYRLDKCMYEPLSISLASSFNCIHAYQKEIKLIEQAIEKCINGMNPNALLILQSIPGIGPIWASGILSEIGDITVFHSSDALAKYAGLYWPKGDSGDFTSEDNKMSKAGNPYLRCYLGEAANSVRKHIPEYADFYARKYAEVTKHQHKRALALTSRKLVRLVFGLLVKNQLYTGEKLDTEYNIESN

SEQ ID NO: 276787 - protein, 333 aa, unidentified
MDKRFSVGVDVSQETLDVAACTERGERRTAQFANTGAGHRRLITWLTKGGRCARVVLESTGVYSLDLALALEAAKRIEVMVVNPRAARKFAEACLQRSCTDSTMAVALQEYAARMEFVPWTPPAAAVREVRAIARRIAALTVEKARERNRQHAAAASTSTPAVVLNDVAVNVRHLERRIAELERHAVALISGDAQLQRVYQHLLSVCGIAGPTAIQLLGELLVLPTDMTARQWVAHSGLDVRYVTSGTSVHKRPRISKQGNAHLRRILYMPALVAIRHEPHVRTFYDQLVAAGKKPIQAVVAVMRKLLHAIWGMLKTDTDFDGSKFRKLAEAA

SEQ ID NO: 276788 - protein, 355 aa, unidentified
MTSMTETPPDVSLTIYLGVDTHKHTHHAAIIDHLGRPLADREFPATDTGHRQLLAWLAGTGSVAAAGVEGTGSYGAGLTHVLRRAGLTVVDVDRPDRRSRRRHGKSDQIDAYAAATAALTGRATTIPKTHDGNVEAIRFLHNARRSVVKAKADAITTLKAMIVNAPEPLRAALRPLTDAALLRTCAALRPDPIAPDHLISAVKTALRSLARRILDLTAESRALLKNIETLIVHTAPALLARCGVGVETAAQLLITVGDNPERIAAEGAFANLCGVAPIPASSGKTTRYRLNRGGDRQANRALHMIVLARLKYDERTRAYRDKRLAENKTKRDIIRCLKRAVAREMFPLLNPRTSG

SEQ ID NO: 276789 - protein, 343 aa, unidentified
MGTQITGGVDTHLDVHVAAALDDRGGLLATESFDTTAAGYQQLAVWLASFGEVVLVGVEGTGSYGTGLTRHLQTLGISVVEVDRPNRQRRRRAGKSDTHDAVSAARAAFAGDALGTPKVRDGNVEAIRVLRVARIGASRDRTRALNQMRSLVTTAPETLRHQLRGLTIPRLIRTAAAFRPSGRTDVVSANRLALKSLARRVLTLDSELAALNAVLAPLVAETAPEMVNRLGVGTDTAAALLVAAGENAGRIRNERSFARLCGAAPLDASSGKQQRHRLSRAGDRQANSALWRIVITRLSYDPAARRYLQRRCAEGKTKAEAIRCLKRYVARELYACLPKKQLA

SEQ ID NO: 276790 - protein, 417 aa, unidentified
MNSPPETIPIQRYIGIDIHKHYVMIGGQNRHQEWTLRPRQVQMARFRSWAEKNLKPEDKVVVEATSNVWDIYDIVAPLVRKTVVANAYKVRQIAEARVKTDKEDIKRLITLLIADIVPEVWVPPCHVRELRSLISFRWRLTKQITMSKNRLHSVVQRFNLDPPEGGLLTDKNKSWWDRQAFTELTGFQVDRDLEIVEHLEEQKEAIDRKLMELSNTEPWASEMVYLMQIPGFGLIFSMVILSAIGDIKRFPHPKKLVGYAGLGAGVHASGEKYQEKSITKAGRKELRWALVEAAWVAVRSDPYWKAQFIRLKKRMHVNKAIVSIARRMLVSIWYILTRREPYRHFDEETIAYKMLIWSWAMDEKSRHGMTPQQFAKYGLLRLGVGQDLERIERGGALRRIAPTEEILALKPELAPPR

SEQ ID NO: 276791 - protein, 396 aa, unidentified
MKSFDFELVESDVFGSSGHALPFGPGREDIGSRGLGSRIGLFDDLFLFPGDPGMVSHYIALDVHCGFSEIAVVTERGKLVRRERCETAIPSIVERLSAVRRPRRVTFEEGPLADWLSRELRPHADEVLVCEPRRNHWIARDADKDDPIDAFKLAELYRGGFLKKVHQADSLERSLLKQQVLLYHDRVRDRVRQGHQLVAVCRRHGAFVKAADLRDDAEWKQCLDRLPAGSLLRRAWESGREVYLLMIERERELWTELVGTARNIEVVRRFEALPGIGWIRGMTFYALIDTPHRFRGKSALWRYCGIGLERRHSGNGPVRTRVTRQGHRRLKDVLLGAAKSAVAQADNAFADKHRAWKEEGLHPANARRNVARAIASTMWSLWKTGQTYDPQKATSK

SEQ ID NO: 276792 - protein, 481 aa, unidentified
MGEKKSAPRGKSGHGGKRRGRGVQKTLQVVNPDAAGIDIGAESHYVSVPEDRSEEPVRQFGCYTPQLEEMAGWLIECGIKTVVMEATGVYWIPVFRVLESRGLEVLLVNPKHVKHVPGRKSDVADCQWLRQLHTFGLLRGAFVPPQDVAAMRTYWRQRRTLVEAASREILHMQKALTQMNLHLHVVLSDVTGVSGMKILRAIVAGEHDPVQLAGLADTQVRASREEIAQALSGHYTGEHLFVLGQALELFDVFQAKIRDCDGQLAMHLSRFEGKVGAGAPPSNPKRSRRVSRRKNEPYFDLRAELWRLTGVDFNRIDGIDSLTAFTVLSETGFDVSAFATEHHYASWMGLCPNNSITGGRVKRRHTRRVINRAADALRIAAQSLWRSKSYLGAYYRRLAARMGAPKAITATAHKLACIMYRAVKYGQQYVDKGEQYLEEQHRKRNLKSLVHRAKDLGYMLVHSETGECLSLTNQPLTRCVS

SEQ ID NO: 276793 - protein, 317 aa, unidentified
MEFIGIDVSKDRVDIAIGSSDSGFSVLQLANREDALADWVATVEDRSVERVVLEATGGYERLAVRVCATAGLPVVIVNPRQVRDFARSMGELAKTDRIDARMLALYGERVKPPLRPISSEEQEDFRDLAARRRQLVGMLTAEKNRLAATRKARSRRPLQAHIRFLEKQVENVERELEAMIEASPLYRSTNALLQSVPGVGPAVSITLLADLPELGRLTRKQIAKLVGVAPLNRDSGNFRGRRSTWGGRAHVRSKLYMSALVAVRHNALLKTYYERLLSNGKSAKVALIAVARKLLTILNSIVKSATPWDPNFEIPKA

SEQ ID NO: 276794 - protein, 420 aa, unidentified
MTSHLKVDLGERFERYVALDIHKHYIMVGAVNLRRQWVLKPRKITMSRFRKWVHKNLRQGDAVVLESTSNAWDIFDLVDPLVSKIVVANPHKVGQIAQARVKTDKLAVEHLLTLLVANIVPEVWVPPHHVRDLRSLVSFRWRVNKQIGMSKNRLQSYIQRFNLTPPEGKLWAKKNAGWWDQQTFPDLVEFQIQHDLEILAHLEKRKAAIDQKLAELSNTEPWASDAVFLMQIPGFGVIFSMIVLSAIGDISRFPSPKKLAGYSGLCSGVHISGEKNQEKPITKAGRKELRWAMVEAAWGAVRSDPYWKAQYKRLKKKKHPNKAIVAIARRLLVGIWHILTKREPYHHADDETLAYKMLIWSQVMDDKARRGMTRRQFAKYGLLRLGTGQDIERIVRSGLPRRLAPAEEVLALKPELRPPR

SEQ ID NO: 276795 - protein, 316 aa, unidentified
MPLQHFGIDIDKAALTVACHEVPGRTERVSNDAASIDAWLRRLPTDSVLAVEATGACHQALLQGAVRHDLPIYLLNPRDVRHYAESLRRRAKTDRVDAQVIARYVAHEKGNLRRYLPAPASAARLEQLLRRRALLAQTQAQLRLGCSDLALPAMDHLHASFKATLAALDEQLDALVAQDEQRARQREQLRSIPGVGPLNSLALVSLFWRLPSITADGLIAFVGFDPRPRESGNYRGQRRISKRGDAETRRLGYLAAQAFARHPVGRPLYDRYRQRGLSATATYVILARKILRLAHALISQGTTFDPQRFAAACAGT

SEQ ID NO: 276796 - protein, 353 aa, unidentified
MRMYYLGMDVHQASIVIVVLNGAGKVVMESILETGAETVRGFLKQLHGKVYVTFEEGTQATWLYDVVRGLVTEVVVCDPRHNKLLAVGNKSDRVDARKLAELLRNGSLQAVYHGDKGQRTLKELVRNYDCLVQDTTRVMLRLKAIFRGRAIASGGHEVYRSDRRGQWLGKLSEPGVKQRASFLYEQLTALQGLRHEAKLVMLKEARRHPAYQLLLSIPRLGRVSVAQLIAVVGTPFRFRSKRQFWAYVGLAVVTRTSAEYVLVNGVVRRSSRPVATRGLNRNHNHLLKKVFKSAATSACVSGPFKAAYDARVAQGMDPSLARLTIARQLAAVTLVVWKRGEQFAPERMKQPVA

SEQ ID NO: 276797 - protein, 348 aa, unidentified
MATTYIGIDLHRTVIQICVLDEQGEVVREERISYHSLAEGLRAVEAVKGFAPGCRVAVEALGLNRWFVNACQAAGLDVLVCDARKLGLRKLGKKTDRRDAYEIARRLRLGDLDRMARTYYPSDAEYGRRKLLRVRHYLVQMRLQTTNQLRAMLNAYQLEAPRCELYSGPSQAKLAALRLPESELQATFDALRAVLERIQAQIRALDHRIAALPRQEAEIQTLVAMLPRIGAQSAATLRAEIGDARRFQTARAVAAYAGLVPTVAQSADIAHHGRLTKQGNRELRWILSQWAVRLISFDPLVADWAAKKGRRMHRNKVRMALARRLLVGVWITLTRGEVFDLRRCLGLA

SEQ ID NO: 276798 - protein, 345 aa, unidentified
MMVVLGTDAHKRSHTVVAVDEAGAEIGSVTVAATPEGHLRLVKWAAQWEERRWAIEDCRALSRRLESDLLRVGERVVRVPPKLMAGVRRSARTRGKSDPIDALAVARAALREPDLPTAQLDGPSREVRLLVDYRESLVKERTAAQNRLRWRLHELAPGYDPPAGSLNRYKTLDEIEQLLAVHTSMVATLAKREVTRIRELTREANQLEGDITHRVKELVPSLLEIPGCGALTAGKLLGEAADIGRFKSRDAYAMWAGVAPIPVWSANNQRFRLNRGGNRQTNAALHRIAITQIRVHPDAQAFITRRLESGSTKREALRLLKRKLANVAYRTLRTDTQQPQLAKTA

SEQ ID NO: 276799 - protein, 345 aa, unidentified
METMYYIGLDVHKRTISYCVKDVSGRVYAEGSVPATRFDLDRWMKTLPQPWTAAMEATMFSGWIYDHLKPHAAALKVAHPLMLRAIAAAKKKNDRIDANKICDCLRCDFLPECYIAPTAIRERRRTLRYRNLLVRQMVQMKIKISSLLMEAGVSYNKQRLHKAGYFRELLATNPDIDEGLRALLRLCRETVVRLQKTESAMVRSLERDSLLIDRVERLMTIPAVGPITALTWALEVGDVQRFSSIKKAISYCGLCGAEKSSGNTVQRTPLSKQRNKHLQTTLIEAAKMAPRNSADLAMLYDKEKQKGNANRATLAVARKLVAYLVAVDRRQKEFLTVERENRTAA

SEQ ID NO: 276800 - protein, 348 aa, unidentified
MKYIGLDCHKQYDHATMIDTETGEIKAKRLSHIKEEYKEFIGDRTGTRMVIESCRDWSRTYELSEDLVEEIILAHPLKVKAIASAKIKTDAVDSRTLAQLLMADLIPQAHLRKGDNRVKQRVIRHRAFMVVMRTRVKSRIHGLVDSQLLSPQILQVKPTNLFSKKGMEWLASLEWAKAEDKKLVESHLRIMEAINQEISTTNDMVKEIYEKDRDAQLLTTIPGIGVTLAMLISTEIDGIERFRSPSKLCSYAGLVPSTHSSGGKTYHGKITSEGNRWIRWALVEAAVPASYADAEIKERLDTLRKTKGANVAKTAIARWLLKVVYHVLKERQPYIAAYNGMIKAGAAF

SEQ ID NO: 276801 - protein, 353 aa, unidentified
MKTYYVGMDVHSASIRIVVLNGAGKVVMESVIETGAERVRGFLKQLRGKVYVTFEEGTQANWLHDVVRPLVTEVVVCDPRHNKLLQSGNKNDRVDAQKLAELLRLGSLKAVYHGDNGVGTLKELVRTYDCLVSDTTRVMNRLKAIYRGRAIACAGHEIYRQDRRAQWLAQLREPGAKQRAGFLYEQLAALKPLRHKAKLAMVKEVRQQPAYRWLISVPKLGSVSVAQLIAVVGTPHRFRSKQQFWTYVGLAVVTRSTADHEVVEGVLRRSKRPVSTRGLNRNHNHLLKRVFKNAATSACYSGPFKAGYDVRVARGMAPSLARLTIARQLAATTLALWKRGEQFDPERKKQQAA

SEQ ID NO: 276802 - protein, 309 aa, unidentified
MEHFVGIDVAKDRLDVHLRPNGEPFAVARDGEGLAALVERLQALAPALIVMEATGGYETIVASALAAAHLPLAVVNPRQIRDFARATGKLAKTDRLDAAAIAHFAEAIRPPARPIADAEAQALGELVARRRQVIEMIVAEGNRRRRATQRRVIRAIERHLALLQAELSELDSDIDGAIRSSPAWQADADLLKSVPGIGPATLRTLIAELPELGRLTRRKIAALVGLAPINRDSGTLRGRRTIAGGRAAVRAALFMPAMVASKHNPLIAPYYAKLRTAGKTHKQAITACMRKLLVILNAILRDRKPWQPA

SEQ ID NO: 276803 - protein, 320 aa, unidentified
MGQEFKSFVGIDVSEGWLEVCVLPQAARRRFAQDAQGWQALGEVVVEQPAPLVVIEATGGLERPAARLLSAVGIAVAVVNPRHTRQFAKGLGWLAKTDRLDAALLARYGALAQPTAHPPLGVAQARLQALVLRRRQLAQQVNAEGNRLRRATEALIRCSLTAHLAWLKAELAALDEHIAAALAAQPEGSERATILASVPGVGPVATSTLLALLPELGRRDGKAIAALAGLAPIAQDSGQRRGQRCIDGGRAVVRCALYMATLVARRHNPVIRAFYQRLVAAGKARKLALTAAMRKLLVILNAMLRDGSTWNPDHAAATNP

SEQ ID NO: 276804 - protein, 352 aa, unidentified
MKKTLFIGIDFAKANFVASALLSEDPDPVCLPKSFSNDDKGAKALVSWIVKLLPETCSLSDVLVCGEHTGSYSLLLPRRLFDAGVDCWLENAVCIKNGSGRIVREKSDSADATMIAEYARTFYQKRVRLFVPESPVLSELRECNDIRRRLVKEQAGLMCKRHDAEVRLKAKPGSKAIVMNIKILERQLAYIKEQIAKVDRQMYSLIRSEKKLSGIYDIIVSINGVGPVTAIALIVLTSGFTTFSSKRSLSCFLGIAPFRSESGTSIQHGSHRSRQADSYYSGLLYMVAVSAMSWNPEIALYKERLLKKGKPRLVIINNIKNKLITIIWAMVKNDTLYDPDHHLKVAQQYQTA

SEQ ID NO: 276805 - protein, 327 aa, unidentified
MQIVGVDVSKLTLDVHCYGHPKSADPVSNDPSGFKSLDKWMKHKVSKCKDDVLVVMEYTGIYTYNLERFLQHKGWKYVKRPALDIKRSCGMRRGKTDRMDAIMISEYGWMRQATLKPMVPLTDNQVALQQLMAHRDKLVADRASYQSRLKELKGQMGSKMNESIEESSIYLMEVITVQIKEIEKEIKQTIASNEAVQTNFELISTVRGIGFATAVHLLITTENFTRFENHRKFACYCGIAPFDHKSGTSIRGKTRVSHLANKKIKSLLTMAALTAIKYDADLKAKYEQKVQEGKPKMSAINIIRIKIIERVFTVIRRQTKYELRAVA

SEQ ID NO: 276806 - protein, 344 aa, unidentified
MNHFGGLDVSVNETSICIVDDTGRIVREVKVRSEPEALLEVLGNLAYRFKRIGLEAGPLSQWLFSALAEAGLPVVCVETRHMRAVLKAQINKTDRNDARGIAQMMRVGLYRPVHVKTLRSQKLRMLLTHRKLLQSKAIAIDNDLRGTLRNFGLKVGMVGTARFEARIRELVENLPDLVALIEPLLIVRRTLREQIVILHRRLLAIVRDDEVCRRLMTIPGVGPVVSLTYRATVDVPARFRKSKSVGAVFGLTSARYQSGEVDWSGEISRCGDEMMRTMLYEAAQSMMHSKKWSWLKAWAIQIARRRGMKKAIVALARRLAVIMHRIWVDGTEFRWTREQAAAAA

SEQ ID NO: 276807 - protein, 345 aa, unidentified
MIVVGVDPHKKTHTAVAASSQLGELRGELTVQARAKGHAKLIHWARALDSERVFALEDCRHVSGALERFLIGRGERVVRVPPKLMGEARRGARSFGKSDAIDALAVARAALRERDLPAAHLEGPAREIALLLDHREDLVAERTRIQNRLRWHLHDLDPELDEQAQRLERSKRRLEQLRRRLGRTEQTAQVRVCRDLLRRLKALSGDVKALEAELEQLVGRHAGALLELPGCGTLTAAKLVAEVAGVERFSNDAKLAKLAGVAPLDASSGKQQRHRLNRKGNRQLNCALHRIAVTQGRVHAPARAFLARKQAEGKSRREALRCLKRHLARVVFRILLIARPSHPEI

SEQ ID NO: 276808 - protein, 413 aa, unidentified
MDLLHDRCAGLDVSKKDVKACVRSPGARANQRHTEVRTFATTTNALLQLRDWLIEQRVTLVAIEATGDYWRPPFYLLEDDVNVILVNPAHAKGLQGRKSDVTDSMWLAQLGECGLLKASFVPPQPIRQLRDLTRYRTTLSREHTREASRLEKELEDAGIKLSSVASDILGVSGRAMLEALIAGERDPQVLAQMAKGRMRTKISPLTQALVGRFGQHHAFLCRMHLDRLDALEADIARLSARIEAALEPFRETLARLDTIPGVGRDVAEVIIAETGADMSRFPTPGHLASWAGVAPGLNQSGERNKPAHTRHGDHWLTGALGVAAMAANRTKDTTFLGARYRRLARRIGKLKALVAIEHSILTATWHVLSENTDYHDLGGDYHAKRDPQRVLRRITRDANRLGYTVRFDPIQAA

SEQ ID NO: 276809 - protein, 354 aa, unidentified
MSQKSASAIAVIGIDIGKNSFHIVGHDERGAIVLRQKWSRGQVEARLANMPPCLIGMEACVGAHHLSRKLRALGHDARLMPAKYVRPYSKGQKNDFRDAEAIAEAVQRPTMKFVATKTADQLDLQALHRVRERLVSQRTGIINQIRAFLLERGIAVRQGQRFLRAELPRILATPPDVLSPRMLRMIEDLAGDWRRLDERVEGLSNEIEAIARQDTGCERLMSVPGIGPMISSAMVAAIGAGDVFTKGRDFAAWLGLVPKQLSTGDRTILGKISRRGNRYLRVLFVQAAWVVLIKPKIWERHGLKPWIEAARKRLHHNVLAIALANKLARIAWSVLARGRAFEARKMDQAANQSA

SEQ ID NO: 276810 - protein, 344 aa, unidentified
MKEVSIIGVDLAKQVFQLHGATAEGEVVFRKKLSRRQFLAFMQSHPGCVVAMEACATAHHWARTLKAIGHDVRLIAPKFVKPYVKSQKNDMADAEAIAEAGSRPTMRFVEVKTPEQQGLGMIFRLRDLLVGQRTQVINALRGHLAEFGLVAGKGRENVDKLRTVLEPGAGSDDLPAVVRHMTQLCFDQIDGLSQRICELDTQIAAASRRSPFSTRLQKMPGIGPVTAMALAAFAPPMDSFRQGRDFSAWLGLVPRQHSTGGKQRLGRTSKSGQRDIRRLLIIGAMAVISGARVRPPAESSWLGRILARKPRMLAAIALANKMARMLWAMITKNEEFRGGPLVAN

SEQ ID NO: 276811 - protein, 430 aa, unidentified
MKSNTQNAKIEAITEKTLVLGIDVGSEMHYARAFDYRGIEYSKKPFKFSNTEAGFVTFKEWILNLKERHEKDKVIPGMEPTGHYWFNLGKFLQDNEMKPVLVNPHHVKKSKELDDNNPTKNDRKDPKVIAGLVREGRYMIPYLPDGVYADLRTASNIRFQLQAELTRIQNRISRWFNIYFPEYKTVYGKPDAKSGMLILKAAPLPEDILTLGIDGVNQIWRDEKLRAVGKARAKTLIEAAEHSVGSKEGAVSARMEIRMLLEDYESRNTRLQEVMVLIEELIRKIPMAEKLLEIKGVGIRTVSGFLAEVGDISRFNNPKELQKLAGLALVENSSGKHKGETTISRRGRKRLRYLLFEVAMSLVSKNQEFRELHNYYITRRLNPLKKMQSLMAIAAKLIRVFYAMLTKGVDYDPKKMVSDIKRPAVYLQAA

SEQ ID NO: 276812 - protein, 340 aa, unidentified
MSDITTIGVDLAKHVFQVHGIDAEGATVLRKRLRRGQVLAFFSRIPRCVVGLEACATGHYWARELGALGHEVRLMPAQYVKAYIKRNKHDAADAEAICEAVGRPTMRFVPVKTADQQATQLLHRGREQLVRQRTMLVNALRAHLAEFGVVAAQGLRKVGELIAIIRDDGDRRLPAVARQVLRVLANQIEQVEAAVAALERQLLAWHNSNPVSQRLASIPGIGPIIATAIATTVADPTVFRSGREFAAWLGLVPRQNSTGGRTRLGGITKRGNRYLRRLLINGASANLLRSKATKADPWVIGLRRRRPPLVVAVALANKTARIAWAVMLRQERYQPRAVAA

SEQ ID NO: 276813 - protein, 355 aa, unidentified
MTSTKYIGMDVHKESISIAVLNFAGKVVMECVIETKPSTILQFIHGLRGDLQVTFEEGTWAGWLYDLLKPHVTELMVCNPRKIALLKDGSKSDRIDARKLADLLYMNKIKPVYHGEHGLRMLKELSRSYLTISKDLGRVMNRLKALYRSWAIPCAGTQVYAPRYRSEWLSKIGEAGVHRRAELYYLQLDALRLVRQQARKELLVEARKHRATKLLRQIPGIGPLRAAHLVAVMQTPHRFRTKRQLWTYSGLGLETHDSAQYRVVERQLQRSNKPVTLRGLNTNHNHDLKDIFKGAAMRASTAAGPLHDFYEALLAKGRKPTMARLTLARKIAAITLIVWKKEVRFDANYLKQQAA

SEQ ID NO: 276814 - protein, 338 aa, unidentified
MFYLGIDIAKNTHVASLIDSNGNTIFKSHSFSNSIVGINSLIDKLNNISTKDILIDLESTAHYWLSIYSYLIEKKYEIIVINPIQTDGWRKATEIRKRKTDAIDSLLIADFIRYGNYESTSLSNENYLNLRNMTRFRHYLIEESSSLKRKIISNLDQVFPEYSSCFSDVFGQTSKEILLNFNTAEDFKNLKTSDIKKILKTITLKKSAELKLKDLKEISKDSFGINFALDSYSIQIKLLESKIENIVNELNTPILTIPGIGPITGVIILAELGDINKFSSDKKIVAYAGLDSTITQSGNSDGLHGHLSKRGSSHLRKALFQAAFVASCNNNIFKDFYD

SEQ ID NO: 276815 - protein, 457 aa, unidentified
MARKSKSKTKGSGRMLPVLHPDAAGVDIGAEEIYVAVPADRDPEPVRCFETFTRDLYKLAEWLQKCRVRSVAMESTGVYWISLYQILEARGFQVFLVNAQHVKNVPGRKSDVSDCQWIQYLHSVGLLKASFRPPDEICVIRSLWRHRESLVQMAAEHIMHMQKSLSQMNLQLHHVLSEITGVSGLAILDAILAGERDPAKLASLCNWRVRSSRETVAKSLEGDYRPEHLFTLRQSLVGYRFYQKLMFEVDQELELKMHELPRAEGAPEQMPPRTKAWIYQRAGNEPAFDLKAELFRIAGVDLTDVPGISALTAHTILMEVGPDVSRFRSASAFASWLGLCPEKQVSGGKILSTRSRKVKNRAAIALRLGAHCLYRAKNYLGEFHRRMKWRLGAPEAITATAHKLARIVYHLLSTKEPYSESVLVKSDRQANNRAEMRLRKQAANLGFQLTPVPEIES

SEQ ID NO: 276816 - protein, 461 aa, unidentified
MVMTREPEEILDEPHEQIMERVCAIDVAKDSGKVCVRLPAESGSGRRVSKVWDVPARTKAVIELGDHLACQGIQKVTLESTSDYWRIWFYLLEARGLDVQLVNARDVKNVPGRPKTDKLDSVWLAKLTEKGLLRPSFVPPKQIRVLRDYTRLRVDLTAERTRYWQRLEKLLEDALIKITAVASRIDTLSVRDMVEALIAGQRNPRILAGLARGRLKLKHADLVEALTGQFDDHHAELARMILDQIDTLTARIDTLTARIDTELATMPGAADPGPDPDPDDPGPRPNGQAEPAPVTSVGHDTASTTVGQWTVPRSALDLVDILDEIPGVGRHNAQAIIAEIGLDMSRFPTAGHLVSWAKLCPRTIQSGAKSSAGKTGKGNRYLRAVLGDAAAGAAKTQTFLGDRYRRIIKRRGKLKALVAVARSILVIIWNLLAHPGLPYHDLGVDYHDKRIDTERRTHNHV

SEQ ID NO: 276817 - protein, 343 aa, unidentified
MQIATIGLDLAKRVFQVHGVDASGNVVIRRRLQRAEVAAFFGDLPPCLVGIEACATAHYWARLIGGSGHQVHLIPPAYVKPYVRRNKTDAADAEAICEAVSRPSMRFVAVKSAQQQAGLLHHRARDLLVRQRTMLINAIRGHLGEFGIIAPAGRHRVTDLIKVLQGTVDADLPALAREALQILFAELSALEVRIKAIEAAIVREHRSNAVSRRLATIPGIGPITASAIAGTIVDHLTFRSGRELAAWIGLVPRQHSSGGKQKIGRVSKQGDRYLRRLLTIGATAVMRRLTGKTDGLSLWVRALLDRRPFRLVSLALANKMARIAWAVMVRSEPYRTALTIATA

SEQ ID NO: 276818 - protein, 354 aa, unidentified
MPQPNDLSRSLAALEQDSTLIVVIEMSLSSWLVAGIVPGIERHPAKKLEPDEVALLQLLRRWSDEATKAGHVIARTVVAFEAGRDGFWLARWLRARGVKAHVIHPTSVAVSREHRRAKTDRLDTELLKRAFLGWLRGERDHCSMAAIPTLEEEDAKRPNRERESLVGERSRIVNRMKGTLARLGIRGFKPTLRTAPEQLERLHTPEDTLLPPNTLAELRRGMARLRFVADQIREIEETRLERLEQQPEEGAHAMVRLLARVIGVGIETADMLVHEVLSRNLRDRRAVARYAGLTGSPDESGIRRREKGLARSGNARVRRGMIQLAWRFLIFQKARWRNGSGLGPRMPALARARQ

SEQ ID NO: 276819 - protein, 387 aa, unidentified
MIAVGIDIAKRNHEACFMASDGREQQPSCRFKNNRAGLQALLKQVRQLPEPVTIGLEATGHYWLALHDALGQAGLSVQVLNPLQTYAYRRSTLRKVKSDRKDAWLIADLVRIGRGRAAYVPDTTILQPRELTRFRWHLIDQIGDAKRKALTILDRVFPEYEGLFSDVFIQSSRALLATAATAADFASANLDELTALLTRASRGRLGQAKAQEVQAAAQDSLGSQALGRVARFELAALLQQITFLEKQVAAVERQAETLMTTTEQHLTDIKGISAVLAASLLAEIGDVSRFSRLESLVAYAGIDPTVFSSGEFTASQCHMSKRGSPYLRRALWLAAVSASQWNPDLQAYLHRRLEEGKPYRVIMGAIARKLLARIYVTLKQNRSYEVR

SEQ ID NO: 276820 - protein, 369 aa, unidentified
MLEETQDTEELIERVAALDIGKAELVCCVRVPGQGKRGRRLQEVRTYTTMTRSLLVLADRLGELGVTRVVMEATSDYWKAPFYLLEAQGFEVWLVNAKDVKHLPGRPKTDRLDAVWLCKVAERQMLRPSFVPPPAIRRLRDVARYRADLVGVRTADKQRVEKLLEDAHIKLSVVASDIFGVSGRAMLAALIAGERDPKVLAELARGRMRAKRSVLEEAFTGHFTDHHGFLLARMLGRVDGLDADIAQLDHQLEELIIPFTAAADRLDEITGVGRTAACAIIAEVGVDMGRFPTPGHLASWARFAPGVKQSPGKTKGKSSTGHGNPYLARVLGEAAAAAGRTDTFLASATGASPAAAAPSGPSSRSAAPS

SEQ ID NO: 276821 - protein, 353 aa, unidentified
MGKKRIQQEVILGVDTHLDTHVGVIIDCCGKMLGVLSIETNITGYHQLLKWARSFGNLQRAGVEGTGTYGAGLAQVLSDYGIDVREINRPDRSMRRFRGKSDPTDAESAARTVLSGNARAIPKLRSGAAEAMRIASVARRSAVKARTQTINQLRALLVSAPERVRANLWKSKPEQCVENCVRLQTLGGSSSLKTLATTLRLLAKRWLYLTAELKELDGTLEHLTNLAAKRLRQQFGVGPQTAATLLAVAGDNPERLRSEAALAALCGVNPLSASSGKTVRHRLNRGGNRAANNALWTIAMVRMRSDPRTRAYVARRTAEGKSTKEIHRCLKRYIVRGLYPLILADLNDAAATV

SEQ ID NO: 276822 - protein, 402 aa, unidentified
MRVFIGVDPHKLSATIEVVDDREAVLATGRFGTDKTGYAAMRSRVKAWPERTWAVEGSNGAGRPLAQRLLADGERVVDVPAKLSARARLFDTGHNRKTDAHDAHAVAVVAVRTPALRVLSYDVEIETLRMLVDRRAELSRTRIQTVNRLQRLLSELTPGKAKKDITTLQAKAILASMRPRDLAGKTRRRLAAEQLAELVIVDKKIKALNKELKVMVLASGSTLMDLPGVGPVVAARTLADVGHVARFADRNRFASWTGTAPIEASSGEIVRHRLSRAGNRRMNHMIHIAAATQIRLDTPGRAYYRRKLAAGKTRAEAMRCLKRRISDAIYRQLCADATAALVERVNAGPGGQGGASLQSSAAGSHPHTGTSDQPLPGPASTTLPTPTAARKSTISKPLQPAS

SEQ ID NO: 276823 - protein, 413 aa, unidentified
MDLLHASCAGLDVHKETVVACVRRRDAKGKVQQQTRTFGTMTRQLLELADWLAEQAVTHVAMESTGVYWKPIWNLLEDQFEILLVNAQHIKQVPGRKTDVQDAEWIAQLLQHGLLRGSFVPRTPQRELRELTRQRRQLIQARAAVANRIQKVLEDANIKLGSVASDVLGVSGRDMLEAIVGGQEDAQVLADLARRRLRAKIPELRLALTGRVTDHHRFLLRLLLDNLTQQEGLIARLSVRITEVLPSPFGEAVQRLATIPGIDERAAENILAEIGTDMGQFPTAGHLASWTGLCSGNRESAGKRQSGKTTKGNRWLRTTLVQVAWAASHTKDTYLAAQYRRLAGRRGKKRALVALGHTILVIIYHLLRDQTTYRELGPDYFDRLDTERLTRTLVRRLERLGHKVTLQPEQPAA

SEQ ID NO: 276824 - protein, 347 aa, unidentified
MVHVGLDLSRTRLDVHVMDESGTPLAVTTALPEAGGLAALVSRIGAEFGGPVYAAIESMNGARFVHDQLELAGWQVEIADAQKVKGLAPLACKTDKIDSWVLAELSRRDLVPAIWLPTPAVRAERERARWRLHLVRHRTALKNRIHATLLAFGHPCPVSDLFGTGGRELLGRLALPEPWAGDTAAALVLIDALDHEVAECERVLRQVGADHRYVPLLMTAPGIGWVLGYTIAAEIGDITRFASPTKLAGYTGLCPRVYQSGGKDHRGPLSKNGPKYLRWALIEAATHAARHPIYADRYHRTRTRLGRQRGPKVARVDLARRLAEAIWHMLTTNRPFAPAGAAQSLAS

SEQ ID NO: 276825 - protein, 316 aa, unidentified
METPQPFVGIDVSSQRLDVDSLPASHHFSEPNTEDGIASLVLRLRKLNPQIVLLEATGGYEVPVAYALYEAGLPVVIMNPKALRHFAKAIGKLAKTDKLDAQVLALYAQSIQPPVRPLKDQEQLELANLMTRRRQLQGMIVMEGNRRRTCTPKVRGNIDQSLAHLRQLLKDLDREIHDSIRRTPLWHENSEILQSFTGIGPKVSASLIAVIPELGTLPGTKVSALAGLAPMNRDSGQYRGKRKIQGGRPAVRQALYMAALVAAHHNPVIMEFYQRLRLAGKPAKVALTACMRKILVILNAMLKNRTYWNPQLPLAA

SEQ ID NO: 276826 - protein, 411 aa, unidentified
MDIYCGIDWSEDHHDIALVSRDGALLARRRISDDAAGLAAVLSLLAEHGDTPDDLIPVAIETPRGLLVACLRATGRKVYPINPMAVARYRDRHAVSGGKSDTGDSVVLAHVLRTDMHAHRPLPADSELAQAIAVLARAQQDAVWDRITAHNKLRSHLREYFPGFLHAFASARGGILRPEARTILAAAPAPADAARLTPAQLRSLLRKAGRRRGIDAEATRLREAFRAGQMRQLPLVEQAMGRQTLALLRQLDAACTAADDLERAVTESFNQHPDAGIITSFPGLGPLTGARVLAEIGDDRSRFQDAKGLKAYAGAAPITRASGKTRSVTVRRIKNNRLNAAGYIWAFSALTASPGARAHYDRRRDDGDRHAAAQRNLFSRLLGCLWHCLTTGQHYDEATAFPARPNLPAAA

SEQ ID NO: 276827 - protein, 341 aa, unidentified
MDKVTTIAVDSAKRVFSVYWVDALTGEIGAKTMTRVKFEEFMRTGKPSRVVLEAGGGAHYWGRWLARQGHEVRLIAAQHVRPFVRTNKTDGADARAIWEAAQRPEVQWVPVKSEASQAVLSLHRVRTQLKDMRRMQGNQVKALLYEFGIVAPAKVTVAQVEAWVAAGRVPELLQASLGEQIGRIAQLKCAELQLTRRIERHNADDALATGLLAVPGIGTLTASALAAELGEGAAAGYTNGRQYAACKGITPRLSGTGGKVRAGAISKRGDPYVRTLLIHGARSVISHQRRAKRLSPWLKGLLERRPLNVAVVALANKMARTAWALAAHGRSYQEHYGAQAA

SEQ ID NO: 276828 - protein, 342 aa, unidentified
MYYIGLDVHKKTISYCIKDVGGQVQREGTIPATRTELDSWMKTLPKPWTVAMEASIFTGWVYDHLLPQAAQVKVAHPVMLRAIAAAKKKNDRIDAGKIADCLRCDFLPECHMVSTEIRDRRRTLRYRHLLVRQMVQMKNRVSGLLLETGVSHNKQRLHKVKYFRELLATNKEVDDSIRPLLKLSRESIERLQKTDYALVSSLERDPLLAQRLQNLRTVPGVGPITALTWALEIGDVSRFHSVKQAISYCGLCGDEKSSADKVLRTPLSKQRNKHIQRVLVEAAKLVPKQSHELAWVYEKAKQKGNTNRATIAVARKMVTYLLAVDRGQRSFVPVEDFSTAVA

SEQ ID NO: 276829 - protein, 359 aa, unidentified
MKRMISKKQAWLKKICLTKDDDLYVGIDAHKKSLHVALWLNDAPAIDFVMPPDGTKLVEMLNKLRPALRMVVYEAGPTGYSLARTLHQANLPVSVVAPSKTPRQAAPDSKTDSLDARKLAEYAAKGLLRHIAIPTKHQEARRQLTRLREQLVAKQTRVKLQIKGFLLQHGFDQPQDLSRWSRAAVEYLRNIRLSEPLRYCLDILLDELHFLAEQLKLTEQKIKKAFSEKPLSTTCKLLATHPGVGPTIAAQFAAEIFNPKRFTDKTQLAKYVGLAPSVRQSGQRLTDGPILKTGRPQLRCSLIQGAWLWIRKDHDAYKTFCRLVHNTGHKNKAITAMARKLAVHLWKMACENKPYTCAV

SEQ ID NO: 276830 - protein, 355 aa, unidentified
MTSTKYIGLDVHKESISIAVLNSAGKVVMECVIETKASTILQFIHGLGGDVHLTFEEGTWAGWLYDLLKPHVTELVVCNPRKNALLKEGSKSDRIDAHKLAELLYMSKLSPVYHGEHGLRMLKELSRSYLTITKDLGRVMNRLKALYRGWAIPCAGTQVYAPHYRSEWLAKIHEAGVRRRAELYYQQLDALRLVRQQARKELLAEARKHHATKLLRQIPGIGPLRAAHLVAVMQTPHRFRTKRQLWNYSGLGLETHDSAQYRVVEGQLQRSKKSVTLRGLNDNHNHDLKDIFKGAAMRASTAAGPLRDFYEALLAKGRKPTMARLTLARKIAAITLIVWKKEVRFDANYLKQQAA

SEQ ID NO: 276831 - protein, 410 aa, unidentified
MRFIGIDVHRDFCEVCVLDRASGELQRRRVATRPDELAAFARELDREDVIALETSSPATAVARVLEPYAGRVMVIDPRRLVRAGARAKTDRLDARTLARLLAAEVLTEIWTPDEATRGLRRLVSRRAAVVRARTRLKNEVHAVLARNLCPRPPVTDAFGKAGRRWLETLELPEEERLTVRGCLRQIDALEADVAELEQALAKRLAGSAEARRLLSVPGVNLVVAAAFLAYVGDIHRFPTPKHLVGYLGLDPRVSQSGNDPARGGRISKQGAAEVRHVLSEAAWRGARVPGPLRGFYERVRARRGAQIAITATARKLAVLFWHLLSREQDYAFAMPSQVQRKRRALELLAGAPTHHGRPGPNGPCRPAATLRAREREIAVAAEHAYQRMIADRQATAPTKTGAGAATGERL

SEQ ID NO: 276832 - protein, 445 aa, unidentified
MFIQSQDDSHCCYSFFIKVVILMMKLKYSICCGLDVHKNVIVATIVTTNKDGISEYLQKSFSTINSDIQRFHNWLIENNCYHVCMESTGKYWIPIFNYLENDIDICLTHPKYVKAIKGKKTDKKDSKWIADLYKFDLVRCSFIPPKDFRQLRELARYRFKLVCMKSSEKNRIQNCMTISNVGIASVLSDPFGKTATEIMSYLLEHTADSMDEKAVRKLIKKGAKAKSDEIIEAIKGYNIETDQAKKLELAQGHLEYLDDMITQTEVELYVRIKPYYEFVEFVSTMPGMTELSSTIVLAETGVDMDIFDDAKHLCSWCGLSPANNESAGKKKSVRIAKAGDYLKPMMVQCALAAIKSKKQPYFAIKYGRIKKRRGHKKAIIAIARMMMVCIYHMVSEKKPFTPTDYEELMNPQNHVERVVLNENNVFAYLESLGYDSSKLVKRNDN

SEQ ID NO: 276833 - protein, 392 aa, unidentified
MEPVIGVDVAKGTSVVQAFRKRNEPYGKAVEIEHGTSGFEQFGEMLGRLQAETGVAPVVVLEATGHYHRALVSYLDRSGYTYYMVNPLQSKRAKGTQLRKVKTDALDAWHLAEMYYRGDVKPHRTWNETFTELQHLTRQHEFVTGIFVQAKLNSRALLEQVFPTYEQVFYNVFSATSLTVLAHCLEGDAEDWNEVIQGSAGKSHSKRWANEKARKLEKVLDHWKEGRHSPSQRKALLGMVSLLLTMIRQLDELEKQMEDMAANLPEVELVKSIPGIGTKLAAAIVAEVGDVKQFSDAKQLVAYAGLDPGIFSSGKFTSTSTRITKRGSKRLRRSLYLAVQCGMRKNANARIRSYYEKKRKEGKPYKVVVIACANKLLHHIFAILQKGQPYQA

SEQ ID NO: 276834 - protein, 348 aa, unidentified
MNILAMDLGKSNTVACIYDSESGEHKFQRIKTCPENIESLVRDKAPDRVVFEICSSAGWVYDIVCRLAGEVQVANANTQAWRWKNVKRKTDRDDALKLAQLSAMNQLPTVHMPKPEIRYKRALIQYRQRLVKRRTQIKNNIRAIIEKAGYSMPKCKSGWTLKSLFELGKMSLAIEDCCVEDLWRGSLRVELELLGSVGNCLSDVTSKLDGMGKTDEQVKRLRTIPGVGGRLAEAIAAFLDEPERFASGKQVGCYVGLTPKQYQSGSMDRQGRISGHGNSLLRSLLVEVSWLGLRNNEWMRETYNRLLRGSSSRKKIAITAVARKLLVRCWAMMRDERDWCADVNRGAA

SEQ ID NO: 276835 - protein, 363 aa, unidentified
MQTIERKNTLFIGVDVHKDTHTAVGISPFGEKLFELTVGNYGKDFRSLAEKVGSVSVESKLSPYFGLEDCSGFGERLADFLLDSGYAVVHVPPILVDERRKNETHPEKSDSLDALGVAKVMLTRSDKLLPYTVTEESRKAKQIKEISMDREFLVSERTRLKNQLHTILHRLWNTEYGEKFKDPFSLKALRYWKGRKPKSADAFLVRSMKRKVGRLLDLHEEITELENELEVLLEDSGHTIHTASGCGTTLAAMIVGEIGDINRFRSPAALAKYAGCAPREHSSGKSHRHRKTRSGNRRLNSAFHRMALSQISRSGNDAAKKYYKKKTGEGKSKSQALVCLRRQLVNVVWMMMKHKTEYVYPQE

SEQ ID NO: 276836 - protein, 464 aa, unidentified
MKGKAVSALRSKRGLRPMIEAAEPPVVGLTPQTTVMTERTDTMKTYLLRETKSVEPQSARRAARTRPATATVREVLGPAAQTKKGPVLFIGLDVPTDSIAVSLAAGDGSEVRRYGIIGGTHDDVLRLAKKLLAAHPETELRFCYEAGPHGYPLARCLRAQGYECILVAPSKIPRQPGDRVKTNRRDADQLARLYRAGDVKGIYIPEPQDEAVRDLIRARYQVMKQQHRARQQLKMFLLRHNFRYAGTKAWTAAHLRYLATVKLPFAEQQFLFQEMLNVITEAGERLERYATQLPRVIPGWRWEPVVKALMSLRGVALLTAATLVAELGDLQRFATARQLMGYLGLVPSEDSTGNERRQGGITKMGNGVARRALIEAAWNYRVPARLSRELLKRQEGLSKEVKALSWAAQTRLHHRYQHLTKVKHKKATVAAAALGRELSGFVWALGQLVRPHAKKDEGVKPVAA

SEQ ID NO: 276837 - protein, 314 aa, unidentified
MTQISTTAGIDTSKAKLDAAVHGKPERWQVANDAAGWRQLARAFRTCGVSRVGIEASGGYERGVVAALRKAGFVVLVLQPFRVKAYARMHLRRAKNDALDAMLIAGCAAELDPPSVAPDERLTALAQHLTFVEQIEEDLARLKVRLEHINDARLRRCVLDDVGRLKTRRVAELLRIANALRRHADLADRLALVLSIPGLGERTALALVIRMPELGRISREEAAALAGLAPFDADSGLHKGQRHIAGGRGRLRRSLYAAALPAAFRWNKALIALYRRLIARGKAHKAALVACARKLVIYANTVVQRGTPWRDVQA

SEQ ID NO: 276838 - protein, 312 aa, unidentified
MARTVFMGIDVSKETLDISINNKHQRIENAEKAISEFIKSKIVNVFVELCVVESTGGYEKLVVKLLQEHSIVVHRAHPNRVYAFAKACNHFAKTDKLDAKLLEKYAEFITKNDEVVECIVSQKQEELKELRAIERNLSDDVHANMCRLHNVTGKAREYIVKQIEFAKKQLEQVRQDIEDIIDSDPGLKEKSKLLTSYKGIGRKIASILLIEVPELGRLDNKEIACLIGVAPKTNESGRKVSKAQIIGGRFYARKALYMSAVVAMRHNRKMKALYQRLVASGKAAKVALVAVMRKIIICLNAMVKNNSFYLDA

SEQ ID NO: 276839 - protein, 363 aa, unidentified
MKDYNTYQENICNGKYDLYVGLDVDKSSISVSVNDGHEVISSLKMPYDASNLLSFIEKHYPGKKVRFVYEAGPTGFGLYDSIVGAGNDCLVVSPGSIPNAPNNRVKTNRLDSKKLSILLSGNQLKGIHVPTESIRHLRTLVQLRYTYMQDIRAYKCRIKAELLKEGLDFPPAAKGSQWTKAVVAKLRSLDCAVVINYKINSLLNHLECLSKQMLLAEFALKSHVNGNDDLKCCIEYLTSCPGIGWRIACYTLARFGDWRCLGTSKQAGAFFGLVPTENSTGDRTDRGSITKCGDPRLRSMLIQGAWIAIRRDSELKSIYDRICASHSQRVGARVAIVAIARKLTERMHCVLKSQRKYELRAAA

SEQ ID NO: 276840 - protein, 345 aa, unidentified
MPIVGGLDIHRKQLTFDFLDTVTGEVKRGQVAPADRAHLRAWLARFAGRDDVAFALEGCTGWRYVAEELAAAGVVAHVAEPADTAFARGRKRHAKTDKTDSRHLRELLAEGRLPECWIPPPVILECRALLETYHDLRAEHTAWVQRIHAVFFHQGAPALGDGALRTGKDLAAVRAAAAAHLSPAGQLQVAVALEVLEALDARMHQVRHQLLSAARHLTGAKVLAARLYGVGPVTALAMTCWLAGKDRFSSARKAVRFAGLDITVWSSDRKGPPGRLSRQGPPVLRWAVYEAGKTHARSSAPDHRYYAQVKDRQDGKRAALSEARKLLRQACHILAELGDDALSAA

SEQ ID NO: 276841 - protein, 366 aa, unidentified
MTSVPWAAELIHLGMDTSVNEIVVAVLRPGEEIPVVERIPGDEESVRRLVGRFPDRRLLSACYEAGPGGYELYRLLTSMGVACEVVAPSLVPKGGSDRVKTDRRDSVRLVLTHRAGLLTPVRVPSPAEEAVRDLVRARGDLPDDRKRMQQRLNAMLLRHGRVWRGGTKWTYAHRVWVGKQEFGEPALEEALALYRGALEAREAELAAAETRLSAWAQREPLAEPVARLGGYRGIAQLTGLTLAAEVVDWRRFASARAFMGFAGLIPTEYFSGSRTRRGHITKAGPEGVRTALIEAAWAYRHRPAIGAVLRRRQAGLPPETLARSWKAQQRLHAKYKKMTARGKPSGVAVTAVARELAGFVWAEMTS

SEQ ID NO: 276842 - protein, 351 aa, unidentified
MKQKKFVGLDVHKETIAIVVIDEQGKTLMQSVVATDGDTICDFLKGLSGEIHVTFEVGTQSNWLYRQTKPLVEKVVVCNPRHNNLLMIGNKADLIDAEKLAQLLRLGAIHEVWQHSAEQAYLKELVRTHENLISDCIKVMSRIKAIFRSQAIKCSGTSVYHSSNRAEWLAKLTEPGLRFRAELFFRELDTLTELRKQAKLAMLRQARQDKDFKRLCQIPGLGSVNVSRLIAQVGTPFRFQTKRQFWKYCGLAVTTRSSADHQIIDGKLQKKIKQTNTRGLSRHFCHRLKNVFKMAAKKSARSEAFEQYYENLLNGGTRPALAQVSLARKIAATALSVWKNQTDFDVSQLAA

SEQ ID NO: 276843 - protein, 346 aa, unidentified
MAREGVKKMNEEPMNLNEALFIGIDAHPTTHTALAMNRFEEQKGMLTFDNTREGINQFLYWLPTIEKQAEHIFVGIEGGGNSRHALVALLLKTYQNIYEVNPLYTKHRRSFGTKQDKSDPADAKAIAEVLTKKLSELPKLTTKDLSPFMLCLKKTVWFYEQTTAQGVSLQNQLHQLRRERGLSLDRLEKKTLGIMVTELEKQLKNIRKTQKACKEQLDILLKNQGENLTNMKGMSTVFAAKIVAHSGGIERFTSLDSFIQYAGIAPKEKSSGRTKRHIKNKGGNRKLNHTFYLAAMVQLRWNPKAKEYFDKKVKEGKTKKHALKCLMKRTACIVYGMLRTGENYRG

SEQ ID NO: 276844 - protein, 411 aa, unidentified
MNPVVGLDISKGKSQVQAFLDKGRPYRKSFKVDHTLKGLSSLVAFLEDVKNEAGKKPSVILETTGHYQTSVVQYLEERGYLLIIINPLISHKARGSSLRKVKTDAIDAYLLCELFYKEELEPYKKRGVQLLNLRNLTRQHENITGVMIQTKLQFQAVLEQVFPEYIGVFGDLYSVVSLLTLSEFPSSEDILKASEETISKKIFEVCKSRSIRWAKEKAIELKVAASRNPFEKTVYQSHILSLGMYINMILQYKEHLSKLESEIDALAQEIEEYNIIKSIPGIGKKIAATIISEIGEIDRFNDPKKLVAFAGVDPSVFESGKFSATKNRITKRGSSRLRHALYMAVRCAIRDCHKKKTTDEIIPRNKRMREFYDKKREEGKPFKVAVIACVNKLLHWIFALLKNKTTFQDIA

SEQ ID NO: 276845 - protein, 424 aa, unidentified
MLKVMHHTCCGVDVHNKFVIATIVSTTDTGIASYKTKRFSTFNDELNQLKAWLLENNCVELCMESTGKYWIPVYNILEDKINITLANPKYIKAIKGKKTDKKDSIWIADLHRHGLAPGSFIPPHAVRKLRDICRYRTKLISNKSSEKNRVQNSLTMCNLAIAHVLSDTFGKTAQRIIEYILTCDTFDPKYCKTLIDGRVKADHDEIIRSIVGYQLSVDQITKIRFANEHLKFLDEALLNLDLKIDEFSVPFRHQIGLLSTIPGVTHISATRIISEIGIDMNIFHSDKHLCSWAGLVPQNNESAGKKRSVKISRAGVYLKPLLVQCANAAIKSNQDPYFKIKYQKIKKRRGHKKAIIAIARMILTCAYHMILNNQTFEPSDFNINSQTEPKINKTSSSEQQLQSAIALLQANGFSISNPCSIPVQ

SEQ ID NO: 276846 - protein, 411 aa, unidentified
MRLFVGDDWAEDHHDIEVMTGAGKVLAKKRLPEGVAGIAQLHELIGRCLGEDEQDAEVVIGIETDRGPWVAALAAAGYVVFPVNPLQASRYRERHGVSGAKSDQGDSHMLADMVRTDSHQLRPAAGDSPEAEAIKVVARTHKTLIWERTRGVQRLRHQLREYFPAALEAFEDLDAPDTLELLAKAPDPARAAKLTRAQIAAALKRARRRDIAGKTSAILAALRGEHLGQPPVLTAAYAATARSLIAVIATLNEQVKALEEQVRAHFGRHPDADIYRSQPGMGPVLGARVLGEFGDDPHRYADGKARKNYAATSPITRASGKKKVVAARFIHNDRLVDALNAQAFAALNASPGARAFYDELRARGIEHNDALRRLANRLVGILHGCLKTRTLYDEATAWGHRENLPQSSAAA

SEQ ID NO: 276847 - protein, 340 aa, unidentified
MKNIKYYIGLDVHKEHTTYVVRDKIGNILLENETATLYSELYPRLKPYLATSLIGLEASTSYYTLYQTFLKNNYNIKVANTIQLRQLITKNDKLDAKRLSEMLRLGTFPCSYIPNEKIQHLRSLVQVRHSLMEEKVRCNARIQAFIDKNGVMMPPQEAFSKHWRQTLTKHLITGTVSGELQYEYDHFLFLEKKQRQVEQEMKHYTHINWKKEYMLIQSVTGFGPVLACYIIANVCPIERFPSNRKLRRYAGVIPVTKQSGETISKGHIPKGSSRKQLRWALVQAANTAGRTDTPLGRYYRKKKKQKKITAIAKIAVASSMIDILYKVLTTKQPYQPNMVS

SEQ ID NO: 276848 - protein, 319 aa, unidentified
MASFLGIDVSSLSLDALVRPQGIKISVRNDPAGFEELVKSLRGLSIKRVLLEATGGYERDVMRFLQDASYKVIRVNPTRARSFADSLGIKAKTDAIDAAVLAHFAEVIPDKPTLKTSPERALLRELLQQRDRLVQQRDDDRRRLKQAQSAMVAIFLNTNLQHFASQIKLVEQAIKQQATVLNDERIAKLDEVKGIGMVTATKLVALLPELGHVESREIASLVGVAPFNHDSGKSVGKRFISGGRFEVRRALYMACLVAVKHNPTLKARYEALRGRGKLAKVALVACMRIFIVRLNAMLRTGTPWRDDLPQPENMAQITA

SEQ ID NO: 276849 - protein, 386 aa, unidentified
MQNLNDFSRSRIALKPDGTLIAVIEMSLSSWLVAGIAPGVERQPLKKLTVDESALLKLLHRWREEAEKAGRRIERIAVAFEAGRDGFWLARWLMARSIEAHVIHAASVAVSREHRRAKTDRLDTELLKRAFLGWLRGERDHCKMVAIPSIKNEDAKRPNRERENLVSEQSRIINRMKATLIRLGIRGFNPKLKRAAGRLDDLRTPEDEPIPPNTLAELRRDMERRRLVRDQIRQIEETRLQRLDHAPDDGPHAMVRLLARVIGVGIETADMLVHEVLSRNMRDRRAVARYAGLTGSPDESGRKRREKGLARSGNGRVRRGMIQLAWRFLLHQKDSALARWFRVRTENGRGTRKRMIVALARKLLIALWQLVRQGVVPDGVVLRPAQ

SEQ ID NO: 276850 - protein, 389 aa, unidentified
MLLDHPTDGLSAIRTHIGAIFVSLELSRSNWLVTSLSPGKGEKMSKHSVTAGRVAELLTLFAELKRKVMVRTGQSYPIITIQEAGLDGFWLHRVLQQEGIESHVVDPASIAMPRRRRRAKTDKLDGEALLRALLAYKRGEPRVCAMVVAPSPDEEDRRRLCRERATLIEERIRHVNRIKGLLFSQGICDYAPLRRDRRARLAALRTGDGRELPSHLRAQIGRELDRIELLLGQIKAVEAERDALLAAARKPASKGAMPDPVTTLLALKGLGANFTAALWSEAFYRQFANRRQVAAYAGLAATPWQSGGVRHEQGVSKAGNPRLRTTMIQLAWLWIRHQPQSALTRWFKERSPQGRKRAIVALARKLLVALWKYVAHGVVIEGAVMKPAA

SEQ ID NO: 276851 - protein, 441 aa, unidentified
MSYRIAGIDVHKKMLAVVVSDVEVDGEYQFERVRYGSSPEHLRLLAEWLIAQQVEEVVMESTAQYWKPVWGALERYWKPNCREREGAGPMSGTLHLAQAQSNRGRRGRKKDFPDAERLVKRLVAKELTLSFVPDTEQRLWRTVTRRKYQLTRNHVRLQNQLEGLLEECHIKLSSLVSDLLGASARRMLKALAAGETNPAALAALADKNLRATQAQLCDALGACTELKPIYRRLLKMFLEELQLIDQQISQLDQELASLLSQHHDAVVHLAEIPGLGVDSAQQIIAEVGAGAATFPSAKQLSSWVGACPGDEESAEVSKSHRSPKGNRHMRRILNQTANAAAKSKGTIFEIVYRRLVSRLGHNQTIGAIAHRLCRLIWIILHRGVRYEERGPSVSAKSRRHRTNRMIRELRNLGYRVEPPRLYNLRGEFSTLRSRDATAPIE

SEQ ID NO: 276852 - protein, 414 aa, unidentified
MDVLVERCAGLDVHRGSVVATVRVPGSGKSRRRREQKTRSFGTTIGQLESLADWLESFGVSLVGMEATGCYWKPVFYVLERRFQCWLINAQHLHNVPGRKSDVIDSVWCCQLVEHGLVRASFVPPPEIRRLRDLTRLRTSQVEERTRVIQRLEKVLQDAGIKLTSVASKAYSVSARAILEALLAGERDPAVLAELAKASLRKKIPQLREALANRFQLDHHGVLVASLLAHIDSLEQSLATLEARLEQAFAPYAELVELLCTIPGVGINVARILIAECGVEMSVFGCSARLVSWAGICPGNNSSAGKRRPARSRHGDRALRSALTEAARAAARTKGSYLASHYWQLRGRRGEQKAIGATRHDILIAYYHITRDRVGYRELGPDWIARRHSPEHRTRRLLKQLEALGHKVTLESAA

SEQ ID NO: 276853 - protein, 406 aa, unidentified
MEGPIITVDVSKGSCHYQPFIENGHPMRKPKQLSATIDGFQKLGQTIKDLEAKTEREDIPVIFEATGVYHRPLQKYLDDHKIRYYIISPLLSATYRKTDLHSNKTDALDCAHIAKAYYCEKELRQYQAQPQEYKRLYQLSRIYESELVHLRKRKVSLRSMLDIIYPRIDKTFKGNQNLYDPIPMEILKRYPHPSLLLSHREDTIVKNVGHRTGHLKGYTERIVHKIYEKAKECYSGCEINDIEVLKLPNLIENVQEQKKKCDSLLKEMIEIARTCPYFASVVSIVGIGENLAARIISELGDVSRFDNRAAIVAYAGLNPKIQQSGDIDGLHLKISKKGNKHLRCLLYLGAQCNYRLRKEDPLYEFTKKKRQQTQCPLSSKAAYTASAHKLLVIIYSLCKNGTRYHS

SEQ ID NO: 276854 - protein, 344 aa, unidentified
MSKASMIGLDIAKHVFHVHGADERGRAMFSKRISRGKLLDFFAAQQSCTVALEACGGAHHWARQLTQLGHEVRLIPPAYVKPFVKRQKSDSIDAEAICEAAQRPSMRFVAVKSEQQQAAGLVFRTRDLLVRQRTQLINAIRGHLTEYGWIAPKGPSHVAMLADLIEEEEMVSSLPEAAHAMFRLMLNLLAGLNGKIADLDKEIARRAHEDEVSRRLMTIPGIGPISATAIAALAPPAETFAKGRDFAAWLGLTPLQRSTGGKQKLGATSKMGERTLRRLLIIGSSAVVQQASKRGALKGSWLEQMLARKPRMLVTVALANKMARIVWALLIKRENYRAPVAAKA

SEQ ID NO: 276855 - protein, 387 aa, unidentified
MQKPRDDSKACLTAFVQDNTIVVVLELSLSSWLVAGMIPGLSREPLKKIAPDPEVLLRLLCRWRDEAIKAGKEITRISVGYETGRDSFWLARWLRARGIDAHVIHATSVAISREHRRAKTDRIDTAMLRRGFLGWLRGEPGHCSMAIVPTLAEEDAKRPHRERESLVQERTSTINRMKSILIQFGVRDFNPVLRKAAQKLHAVQTPEGVPLPPNAASALRRHIERLRLINEQIKAIERSRVQHLKRDPTDKYNAMVFLLVRIIGLGVETAEQLVREILSRNLRNRKAVARYAGLTGSPDESGARRREKGLSRSGNGRVRSILIQLSWRLLQFQPDSELVLWFNKRTAGAKGSRKPMIVALARKLIITLWRYVNTGMVPNGFKLRPAG

SEQ ID NO: 276856 - protein, 341 aa, unidentified
MKKFIRIGVDLAKNFFQVHGIVREGAEAVSRKFTRTKFGEFFLSVAPCRVGMEACGSAHYWARELRSMGHDVVLIAPAYVKPYVKRGKNDAADAAAICEAMSRPDMRFVPIKSADQQAALMLHKTRELLVKQRTMIVNALRGHLSEFGLIAAKGIQRVHELVALALGEEGLPEAARQAAALLAEQSEQLEGTIDTLEKKIAEASAKYPMVRLLKEIPAIGPLISSAMAASYPDPGVFASGRDFAASLGLTPSQHSSGGKEKLGSITKKGNRYLRKMLVVGCTSVLRVAHKYKGALAEWIVAIKARKPERVAAVALANKLARICWAMLSTGEGFREELYTRA

SEQ ID NO: 276857 - protein, 413 aa, unidentified
MASSNNHHSNQVLIAIDIAKKNHDVFIAWPSGKTKAIKITNSLAGYKRIMTLADTPPNNIHVAFEPTADYHRNIAYWLHVYGVKCYLVSSLASARAREMLFKSWDKHDRKDARVILYLMQQGMMQNFYDPLVENTLDIQELSNTYHQVCLARTRCQHSLRNHFLTLYFPEMERYFHSSRAEWFCRFLLKYPTVKSITKYKKEIFVKRAWDVVGRKVAKQRFLEELYETAILSIGLPVAINSLAVTTFRLQLNRYLALTLQRNELERTAEEFLNDRNDYKHLRTLPGVGPIIALMIIAESGDLQRFHHYRQYLNFCGFNLSASQSGQQKGRYKLSKRGNARLRYAFWLAAVSAIRQCENSFRYKFERYIQKDPENADLKRKGRVAVASKMARVAHALIKTNTDYRGYYEFGHGT

SEQ ID NO: 276858 - protein, 382 aa, unidentified
MQTIDTVNPTILLAIELSASTWLVAARVPGWEKPHLHRIDGGDTAALLALISSLQARAARGLDATIGVVCCFEAGRDGFWLHRLLTAHGVVCHVLEPTSILVNRRARRAKTDRLDAEGMLRVLAAYLRGDHQACSMVRVPTPEEEDAKRTHREREKLVQERQRIENRIEALLFTQGIRKRPSLRSWERDLAVLRTGDGREIPRHLRAELDRLRRRLVMTLELIREVEAERDQAAKTKPQDRACHKIAALSRIRGIGENFAAVLTREVFYRSFDNRRQIASYVGITPMPYQSGGMDRDRRISRAGNPRARTTMIQLAWLWLRYQPGSELAEWFRERVGTLAGRTRRIAIVAMARKLLIALWRYAETGVIPAGAEIRAEITVAA

SEQ ID NO: 276859 - protein, 346 aa, unidentified
MMIIGCDYHPSWQQICWVDTATGETGEQKLEHASGEAARFYRQLRAPALIGMESTGNCQWFVEMATEKGHDVWIGDAAKIRASDSRQQKHDRRDAALILKLLLEGRFPRIWIPSGEEKDLRQLLIHRYKLVRIRAQVKNELQHLAMNQGVTKKRKLWSKTGEKVLRELPLKPWASQRRKDLFRIREMLNAQIDVLDQAVVEVAEKNEKARLLMTQPGVGPITSMAFVLTMGDVNRFQRGKQVASYLGLIPREYSSGGHQRFGSISKQGNRFMRMLLVEAAQCAVRCDPGMRSEYLHRCHRKAKGVAKVAAARKLAIRLYWMLRTNTGYPGVVRVESSSRVPLVSAS

SEQ ID NO: 276860 - protein, 356 aa, unidentified
MSIVAHTHPFVIGVDAHARTHSLAILACPTGEVIDEGQFPATAAGLQRAVAWVGRRTDGDLDTLWVVEGVGTYGARLARAAADAGYLVSEAARMNARANRGVGKSDPLDARRIAQAVLPLEVAQLRRPRADDGVRAAVRVLIASRDHLSAERTAAINALTALLRVADLGIDARRALTGGHIATVAAWRTREEALAPKVARAEAVRLAKRVLAADHELAANAKQMTALLNDSPARKLLDQPGIGPVTAAVALAAWSHPGRVRSEAAFASLAGVNPIPASSGNTVRHRINRGGDRRLNRALHMAVVTRMRTDARTRTYIEKRTAEGRTLREIRRCIKRYLARQIYRQLNATQTTPQPG

SEQ ID NO: 276861 - protein, 307 aa, unidentified
MNLSVGIDVSKDCLEWAHGFEGKIQSTRNEPRPIAELVRQLVAIDPDRIVVESTGGYERSLVEKLSAAGLLVVVVNPRRVRSFGEGMGMLAKTDALDARLLALFGEKVQPPIRPIVQGKDRLLADLVARRRQLLALVVAEKNRLGIAPPAIRRLIASLLRTLERHLKALDGQIDRALLEDADRAVLYDLLQTVPAVGPGVARTLLADLPELGHLDRREIAALVGVAPFARDSGKIRGSRRVRGGRASVRTVLYLAAMTGARFNPVLRALYQRLRRAGKPPKLAFIAVARKLLTILNAIARERTAWQA

SEQ ID NO: 276862 - protein, 346 aa, unidentified
MHSSKDIILAVDYHAENTEIRWLNCHCGEERRMNIPSARASILRLAEKAVAEAAKVGGKVVWIMESTTGWARVKELIGSRVQFIMANVLQMPLPPKAYRRKSDKIDTGRILREFLNGSLPRSYQPAAWWREVRRLVDSRQDLVERQTAVKNWISHFLHHETWYDRAGLWTQKGMKRLRALRLSASDRMLLNLKIQELEQLEDRREQMETAMQAVYDQWPQAQWVDEVRGIGMVTAVSILAHIGAIERFQTAEDLISYAGLAPGHRQSDDTRHNGKIGGGGTDSNLRYLLIESMQWVCQIPRYHDAFERAAARHGKNIARIIVARMLLRSIFKMLHDGVRFNQVPAA

SEQ ID NO: 276863 - protein, 392 aa, unidentified
MIFVGIDVAKDKHDCFISNSDGKVLYKVFTITNTLEGFHDLYQKISSVMVDASKVKVGLEATGHYSYNLLGYLIDKGLTAYVINPLHTNLYRKSLSLRQTKTDKVDARTIASMLMSDVNLKSYSETSYHNQELKSLTRYRFDKVKERAKLKVSIARLINILFPELEKLVPTLHMASVYSLLSEFPGASHVASAHLTRLTNLLSKASKGHYDKDTAIHFREAAKNSIGSVMPAKSLELKHTIKLIQELTTEIDEIETAVKRIMDEEIRSPILTIPGISYRMGAMIIAEIGDFHRFDSADKILAYAGMSPSTYQSGQLDNGYSHMEKRGSRYLRYALYNATKYVCHWDESFGAYLEKKRSEGKHYNVALSHAAKKLVRTIFAMEKSGQAYKATS

SEQ ID NO: 276864 - protein, 462 aa, unidentified
MTVPKTKGSQTKATPLPTSLPAIRPLVAGLDVGSSEHWICGPARADGQPNVRGFGTTTDQLQALADWLAEQGVESVAMESTSVYWIPIYELLESRGIEALLVNARQLHNVPGRKTDVTDCQWLQLLHSCGLLRGSFRPSEAITRLRALQRQLANLVAERTRCVQWMQKALDQMNVQVHRAVTDLTGTTGLAIVRAIVGGERDPARLALPRDYRCRKSAAEIARYLTGTWRDEHLFNLTSALRLFDALEAEIAAYDAQLLTAVESLQPPDRQADPVPPHPNPAKEKAIKARGEQQARTTLWRFAGVDLTRIDGISAGAAQVVLTEVGPDLAAFPSEDQFVSWLRLCPRTPISGGKPLKKRRNGLGANRIAGVLRMAATSLQRSKTALGAVFRRIARHKGGAVAVFATARQLAQLIYRMLRYGHDYVDIGEQAYDQRFLVRRFAALTESARSLGYTLVPTAATE

SEQ ID NO: 276865 - protein, 341 aa, unidentified
MDTVSLVGIDLGKHCFHLHAQDASGRMVFRKKLTRSQMFALLGNFPSCTVVMEACAGAHWIARRLQALGHEAKLISPHFVKPFRQGNKNDFADAQAICEAASRPSMRFVSPRNEAQQVVSALHRVREALVRERTGTINQIHAFLLEFGISLPRGMAVIRRLPAVLETQALPPRLVAVLERLQAHFKYLDEQIGQLEHELLTQLHEDERSERLLEIPGIGPITASVLMSELGDAHQYGSARQFAASIGLVPRQYSTGGKPTLLGISKRGDKELRRLLVQCARVIMLGIERRTDSLGVWVRSLLARRHSNVVACALANKLARIAWAILAKGTHYRSAPTALPA

SEQ ID NO: 276866 - protein, 385 aa, unidentified
MQKLNDLSRSLTSLEPDGTLIAVIEMSQSSWLVAGIVPGVERQPLKKIKVDESTLLKLLHRWREEAEKAGHRIKRISVAFEAGRDGFWLARWLRARDIEAHVIHASSVAVSREHRRAKTDRLDTELLKRAFLGWLRGERDHCKMVAIPTIKDEDAKRPNRERESLVGEQNRIINRMKATLIRLGIRGFNPKLKKAAERLEGLRTAEGEPIPPNTLAELHRDMMRRRLVSDQIRQIEDARLERLKQAPSDGPHAIVRLLARVIGVGVETADMLVQEVLSRNMRDRRAVARYAGLTGSPDESGRKRREKGLARSGNARVRRGMIQLAWRFLRFQKDSVLSHWFRTRTENARGTRKTMIVAVARKLLIAVWRLVREGVVPDGVVLRPV

SEQ ID NO: 276867 - protein, 355 aa, unidentified
MLYLGIDQHARQLTISLRDDNGDVLLARQVSTRPEKINEFFQRLTRERLSNDEQFIAVVEVCGFNDWLIRMLRDYRCHRVILIQPEERKNCKTDRRDAAALSEVLWVNRDRLLQGKSVRGLRQVDIACTADQENRRLTTLRKDAGRAKTRLILQIKHMLRRHNMQWEMPTKTFPTKPAIAWLKKLVLPEIDRLEMDHLLTDLQHVQTRLAELEKMIAQRCSGSDEAILLGTIPGVGAFTATSLACRVGRVERFPRSHSLANYWGLTPGCRNSGEKTQRLGSITKAGSGMARWLLAQVTQKVLRKDARLREWFKRIKRRRGANIARVAVMRKLTTIIWHMLMKRKSYAECRAFAAT

SEQ ID NO: 276868 - protein, 416 aa, unidentified
MTFKVVRFICGGMDVHKNLIVATIGTTDRQTLITEYIQQSFSTFYSDLIRLKEWFISHDCYDVCMESTGKYWIPIYNVLETELKICLTHPKYVKAIKGKKTDKRDSKWICDLYKCDLVKHSFIPKKEIREMREIARYRCKLVYMRSSERNRYQNCLTVSNISLASAVSDPFGKTATNIMKELMQSEVIEDDKILKLIHKNCKDKDKILDSLQGYHIESDQRFKMDTVMNHIEYLDKQIQACEAELIKRAYPLRDYFQHITHIKGISALSAIQIVSEIGTDMNQFESDKQLVNWTGLSPANNESANKKKSVRISKAGQYLEPLLVQCALSSIKDKNSYFGIKYCRIKKRRGHKKAIIAIARMMLVCIYHMILTGEEFNPCDYESLTNPKPKKEPIMTVESALQFLKDSNFDFSSIQL

SEQ ID NO: 276869 - protein, 402 aa, unidentified
MNFSIGLDWASQTHAVCVLEATGQVGWQGTVEHSAAGLAELLRRLARFGPPAALPVALERPSGLLVDTLLAAGHPVVPIHPNALKASRPRYSAAGSKSDPGDAFILADLLRTDGHRFRRLQPLSDETRALRALVRGRDDLVAERTALANQLRALLERVWPGAAALFAEVESPISLAFLTRYPTAQSAERLGEKRLARFLGQHSYCGRRSPAELLARLRAAPASDVSDLEAEASRDLVHALVAVLTPLGVQIQQLSAAIVAALAQHPDGPLLQSFPRSGGVNAAQILAELGEDRTRFPTDEQLAAEGGVAPVTRESGKHRQVAFRWACNKRLRQALTTFADHSRHASPWAATIYTAARRRGCAHPHAVRILARAWVRVLWRCWQDRRPYDVTLHRAAQRGAAA

SEQ ID NO: 276870 - protein, 344 aa, unidentified
MDQYAGIDVSLERSSVCVVDGQGKILKEAKVASEPGALVEFFETLGFAVKRIGLEAGPLSQWLHAGLKRAGFEVVLLETRHVKAALAAMTVKTDRKDARGIAQLIRMGWFRPVHAKSRGAQEVRALLIARKQLLGRLIDVELSIRGILRGFGLKVGPVTRKNFEARIRELVVGQATLERIATAMLSARSALKAEYGKLHKAVLTIVRDDTVCRRLMTVPSVGPLVAITYKSAIDDPYRIAKSKAAGALFGLTPRKYQSGEKDLTGGITLAGDQMVRTALYEAANVLLSRITRFSKLKRWGMDIAKRRGSKRAKVALARKLAVILHRMWVDGTTYRWAEAAPAAA

SEQ ID NO: 276871 - protein, 412 aa, unidentified
MKVAGIDVHKKVLMVVVVDARTPEEKPARRLFVTMPSELHRLLTWLREQGVEEAVMESTAQYWRSVWLELEPDMRLHLAQAFSNRAPRGRKHDFKDAERLVRRLIANELILSFVPGGEQRIWRSMTRMKLQLTRDRVRLQNQIECLLEEMRIKLSIVVSHLLGASGLRILHALANGETDPQKLAQLGGERLQCTDEQLVDALTGRAQPVHGEMLALQLQRLQLIDEQMARLNGMIAAAMKAHQDAVIRLAEVPGLGVDSAQQIIAEVGVQASTFPSAAELTSWVGTCPGKEESAEQNHSRRSAKGNTYMRRVLNQAAHAAVAKKGSHFQAVFRRLLPRLGYQSAIWAVAHRLCRLVWKILHEGVRFIEQGVQVGPREKKKRAQMLARALRKLGYEVTITPINQVASTAAIHV

SEQ ID NO: 276872 - protein, 344 aa, unidentified
MDTTSRPPTPMPPPPPPGAAAPAGIVVGIDVCKERLDLARSDTGDRVVTFANDAAGIAAVVRLLLAAPAPVAAVVIESTGGLERPLVEALLEAGLPVALVHPGRVRHFAKGLGVESKTDRIDARVLVRFGQLAAPRLAERRSRNEAELRDLLACRRQLTVTRTQQSNRRGATASRAALKAIDAVIKALDRQIASLDEQVRALVDADDDFRDLARRLRSVPGVGPTLAATLLADLRELGGADRRRVCALAGVAPFPDDSGNVRGRRSIRGGRADVRCVLYMATLAAMRFNPVIRAFAQRLRAAGKLGKVTVVACMRKLLTLLNAMARDGLSWDQLDVVKNLAPTP

SEQ ID NO: 276873 - protein, 347 aa, unidentified
MKEPRSFRRSNVVSTRTVIWDTKPAFNKEGKTDMSNSACFIGIDVSKDQLEVAVRPTNEQMSFSNEDDGVDQLIQRLQQLQPDLILMEATGSYHQLVLGRLLASGLAAIAINPRQARDFARAIGRLAKTDSIDANVLAEFADRIRPEIRRVADEATQQLDAICTRRRQLVAMIAAEKNRHHSGPATIRAQIKKHIVWLEKQIQELEDDLDKMIRSTPAWREKDDLLRSCKGIGPTTSHTMLACLPELGSLSRHQIAALVGVAPFNSDTGKHRGQRHIQGGRLDVRCILYMATLAAIRSNAVIRAFHQKLIAAGKPKKVAITACMRKLLTILNAMVRSNTRWNPDFAA

SEQ ID NO: 276874 - protein, 315 aa, unidentified
MNHDVFVGVDVSKARLDVFMSHPAQACAFANDERGVAELVRCLVKAAPTLVLLEATGGLERRLVACLMAVPLPVVVANPRQVRDFAKATGQLAKTDALDAQMLAQFAAVVKPAQRALPEKAALELADQLARRRQIVDMLTMEKNRLQQTHSVGVRKDLAQHIEWLQRQLQGSDGDLRRAVEASPIWSAKRELLLAVKGVGDVTALTLTAGLPELGSLDRKQIAALVGVAPLNRDSGTLRGRRTCWGGRADVRAVLYMATLTAIRWNPVLKTFYERLRRAGKLKKVAIVACMRKLLTILNAMLRDNQSFDPTLHST

SEQ ID NO: 276875 - protein, 412 aa, unidentified
MQTLVERGCGLDVHQATVVACLLHVMRDGRMQKQMRSFGTTTRELVSLREWLRSEGCTHVAMESTGVYWKPVYAILEGGFQIVVANAQQVKKVPRRKTDVKDAEWIADLLCHGLLRSSFGPPKPIRELRDLTRYRRKLVESQAAERNRLLKLLESANIKLASVATDVFGVSGRLMLQALVEGKASLAEMAELAKGKLRNKIPQLQLALEGKLEEHHRFLLQLQQDRLDAAERDLATLEQRIQQKLEPYAAQVSLLQEIPGVDWTLAAVIIAELGVDMSVFQCVSQLASWAGVCPGNNESAGKRKSTRIPKGNVYLKTALVEAANAAARTKGTYLRDKFYRLKARRGYKRAAVAIAHKILVSIYHMFSQQVSYNDLGDLYLDKLNKHHLTRNLVHRLERLGYSVTLSPQQIAA

SEQ ID NO: 276876 - protein, 339 aa, unidentified
MEVTTVGLDLGKDVFQVHGISADGTVVFNRSIRRRQLLRFFETLPSCLVGIEACGSAHHWARELSAVGHDVRLMPAVYVKPYVKRGKTDAVDAEAICEAVTRPTMRFVAVKSKEQQALLTMHRVRQLVVRQKTQMLNVIRGLLREFGHVIGNGPVAAMRFVKAFQADDWPDIPDVARSMLKTLCDQVVDLDDRVTFYDKLIEYHSRIDERAKRIRTVPGVGPITASAIVATIGDGKQFKNGREFAAWLGLTPLNRSSGGKERLGRISKKGDRYIRRLLVIGMTSQVQRARGYPERVHPWIMQLLERKPMRLATIAMANKTARIIWAILTKETYYRQSAA

SEQ ID NO: 276877 - protein, 381 aa, unidentified
MKIYVGIDIAKLNHFAAAISSDGEIIIEPFKFTNDADGFQLLVSKLESFDKNSLIIDLESTAHYGDNLVRYLVTELYQVCVLNPIKTCQMRKNNVRKTKTDKVDTYVIAKTLMMQDNLRFVSFFDLDMMDLKALGRFRQKTIKQRTRLKIQLTTYVDQVFPEIQYFFKSGLHQNAVYALLKEAPSPKEIASMHMTHLANLLKVNSHGHFTKEQAKELRVLAQKSVGANDSAISIQITQTIQQIELLDSQLEKIEAEMTDIMKFNDSVIMTIPGIGYINGGMILGEIGDIHRFSNPNKLLAFAGLDPSVYQSGNFQAKTTRMSKRGSRVLRYALVNAAWNVVRNNATFKAYYDAKRAEGRSHYNAPWSLCRQACQSHLEDAH

SEQ ID NO: 276878 - protein, 392 aa, unidentified
MVVSVGIDVSKDKHDCFIVSSDGDVLADVFTISNTLDGFHDLLQRIQDCATPKDKIKVGLEATGHYSYNLLGFLLDNGLTTYVLNPLRTNLYRKSLSLRKTKTDRVDARTIASMLLSDAGLKPYTNTAYHNEELKSLTRYRFDKVKERAKLKSSIARLVCILFPELEKLVPSLHIASVYALLEEFPGAKQVAAAHLTRLKALLVTASKGHYNQDMALEIRDAARNSIGSRMPAKSLELQHTIRLIRELNREIDEIEEQIQSIMDELHSPITTIPGLGFRMAAMILAEVGDFTRFDSPDKLLAYAGMSPSTYQSGQLKNCYPHMEKRGSRYLRYALYNAAKYVCHWAPAFADYLAKKRAEGKHYNTAISHAAKKLVRLIFAMEKSRQPYCSAL

SEQ ID NO: 276879 - protein, 388 aa, unidentified
MQTVADRPEAPSAIRNDLGAIFVSLELSRSTWLITSLSPGGGAKMSKHSVRGGDVAGLLERFGQLQKKAQARTGRNFPIIVIQEAGLDGFWIHRVLRNEGIESHVVDPASVATSRRRRRAKTDRIDGEALLRTLLAYKRGEPRVCAMVKAPTPEEEDRRRLCRERKVLTNERVQHVNRIKGLLFCQGVSGYKPLRRDRRRRLDELRTGDSRPLSKHLKDQISRELDRLELLLEQIKAAETERDALLAAQKVVAPAPAAMLLDIKGIGPEFAAVLWLEGLFRHFDNRRQIASYAGLAPTPWQSGSVDHEQGVSKAGNPRLRTTLIQLSWLWLRHQPQSALALWFKERVTRNGGRLKKTTIVALARKLLVALWKYVTAGVVIEGAAMKSS

SEQ ID NO: 276880 - protein, 424 aa, unidentified
MKVTYQTCCGVDVHKSFLVATIVKTTGGIEPSYQKKRFSTFNSSILEFKQWLLDNDCHDVCMESTGKYWVPVFNLLEDEINVVIANPKWVKAVKGNKDDTKDSKWIGDLFRLGLVKGSYIPCKKVRILREYTRYRYKLVSCRSSEKNRYQNALTVCNVALDSIVSDIFGKSSTSIIDYLLEQSGTSINHEEIASKLLRSLKSKEDAVIESVEGYQMTDAQKYRMRLVRAHMDYITAEINDVDIMIENMISSNPDFENAVQFLCTIPGVKRDSAITIISETGTDMSQFSSSKRLCCWAGLTPGSNESAGKKKSVRITRAGVYLKPALVQCAHAAVKSDKSPYYKKKYESLVKRRGKKRAIIAIARMILTAIYQMLSTGEQWNPSDLYKIDMPVALVEKQKAKAIKQAKKLLQREGLLPPDEPLAS

SEQ ID NO: 276881 - protein, 382 aa, unidentified
MQAFGNEIFKEQKLTIGVDLGDRWSFYCVLDEAGKIILEQKVPTTPEAMKPTFSRIPQSRIALETGTHSPWVSRLLTELEHEVIVAHAQKVQLITKSNRKDDRHDARTLARLARIDPELLGPVRHRSVQAQIHLTIIRARAELVSARTALVNAARGLVKSYGERLPKCGTQQVSRELAAALSTALRDVLEPLLQEIESLNERIKEYDERMEKIAKEVYPEVFLLKQVKGVGTQIALTYVLTIEDPHRFLKSREVGCFLGLKPGRRNSGESEPQKGISKAGDRYLRTMMVQGAHYILGPFGEDSDLRRWGRKLAERGGKNAKKRAVVAVARKLAVLLHRLWVSGEVYEPLRNSHKAMRAVAWSEELPAKQGMLGVDGVGDRRS

SEQ ID NO: 276882 - protein, 343 aa, unidentified
MSEISMIGLDLAKNVFQVHGIDPSGGVVLRRQLRRGAVEKFFAQLPPCTVGMEACGSAHHWARVIGRYGHQVRLMPPAYVKPYVKRNKNDGRDAEAICEAVGRPTMRFVAVKSVEQQATMAVHTTRALLVRQRTMAANALRAALSELGIVAAQGIKGLRELMAKLETANEEIPEMMRGALLVLARHWQALDTDERALERKITLAARADREARRLMEVPCVGPIIASTVLAKVADAKVFRTGRDFAAWIGLTGRDHGTGGKHRAGRISKRGDRMLRALLISGASGYLRHQKRRGVSDPWLRELLARRPYKVVMVALAAKTARIIWAMLAKGESYRARASASAAA

SEQ ID NO: 276883 - protein, 457 aa, unidentified
MQGTNEGTMQTTIPGAIACGMDVHKDKIDVCVRTGDGSPDGNVIIKTFSTMRKALFELLDWLISLNCYKVLMESTGVYSMPIYSILEEVNCMNIGVGNARDLKNAPGRPKTDKEDAKWLSRLCMFGLVLKSFIVEKPFRELREYTRYHKKLVQERARQINRIEKLLQMNGFKLSSVLSDITGASGMRILKKLANKGELSVDDIRLELDKRCKCKPDEIEFAINGVMKLSSRLLLNMQLKKIERCDSEIKEVFHLMLQMSGGEHEWAVRVIETIPGMSTQSAIYIIAEIGTDLSLFKTANHLAAWAGLAPKENESAGKKRPSKTKKASQYVKSLMIQCAWAATKTRNTRLSIWYWRNVHRLGDKKAITAVARKLVCYIYVMLKNGTPYDKSLDVAYADNDRAKKLDAAQKLVGGRKSDLPYSNKNGNNDTDKSAACHEAKHEEPELARSQAESVTARK

SEQ ID NO: 276884 - protein, 336 aa, unidentified
MIIIGCDFHTRFQQIAMLETETGEIVERRVEHEGGEAQAFYAALPAPARVGMEATGYARWFERMLREQGHELWIGDASAIRAARVRQQKTDARDALHLLHLLLEDRFPKIWVSSPAERDVWQLLRHRDKLVRFRTSVRNQLHALAMGEGVCRKKKLWTQRGRQELEGLALGEWAGRRRQELLEMLDRLDASIQELDQAVAQQAESHPAAVRLMQHPGVGPVTGLAMALAVGPVERFRNSRKLVSYLGLNPREDSSGGKQRLGSISKQGNTLVRFLLGEAAQTAARTDPQLRRVYQRLGFRRGKAVAKVAIARKLAVRLYWLLREATPPARTQGSPG

SEQ ID NO: 276885 - protein, 410 aa, unidentified
MQVLHERCAGIDVHKKNVVVTVLLTDQAGVVTKYTRTFATMTDELLQLDAWLTQLDVTQIAMESTGVYWYPIFNLIEEGRTITLVNAQHMKAVPGRKTDVKDSEWIADLLRHGLLKPSFIPPQPIRALRELTRYRKTLIQERAQEANRLQKVLEGANIKLASVVTDILGTGSREMLELLLAGEQDLNAIADHARSRMRPKIPALRRALQGQLQPQQRIVLRRILAHVDFLDDSIRQLQQEIDAHLKPYQEAMQLLQTIPGIKATSAAVIIAEIGIDMGRFPSAKHLASWAGLCPGNKQSGGKRYQEAITKGSPWLRAVLGEVVWSISHTQSNYLVAQYQRLAKRRGAFKAVVAVAHSVLVIIYHLLSSKQPYRDLGADYFDKLDNARQERHFVHRLEQLGYTVTLTPAVA

SEQ ID NO: 276886 - protein, 463 aa, unidentified
MKQPGQKKQGKARKKSSKKVNLESLPLININAAGIDIGSGEHWVAVPKDRDEEPVRKFSCFTSELHAMAEWLKKCHIDTVVMESTGVYWIPLFQILETQGFDVKLVNARHVKNVPGRKTDSLDCQWLQQLHTFGLLSGSFRPEDSICVLRSYWRHRDNLIRYAAAHIQHMQKALTEMNLHLHKVISDLTGVTGMRIIQAILAGERDPLKLAQMRDPRIKNSAEMIAKSLEGDYRQEHLFTLKQAVELYCTYHQQIEACDQEIEAYLTQLDSKCDPKPKKRKTSKSKNDPSFDLGTHLYRITGVDFTKIDGLNVLTVQSILTEVGLNPEAFGTDKRFASCLGLCPENRITGGRIISNKTRKVVNRASKAFRMAANSLKNSPSALGGYFRRMRARLGAPKAITATAHKLARIFFHLWKNGDTYQDLGADYYEQKYKERVLKNIKRRAQQLGFEITLQPLAGLEVS

SEQ ID NO: 276887 - protein, 411 aa, unidentified
MIKENYIYVGIDLHKETHTAVMIDCYNQKLGEITFPNRPADFPKLVAKVKKCNTDGKTIVFGLENAYGYGRALAVWLIDKGYLVKDVNTAISHRQAKHRGAMYRKSDSDDAEAIALATLNMLDKLPDAYPNDAYWSLGQLVHRRDNIMKQRTRLVNQLHEQLCIAYPSYKQFFNDISRPTALYFWEHYPSRKYLKGKSVEDLRKELVPVSHNRCSTKNCEKILDAVASDKVKNNAYQDARDMVTLSIVSDLQHYDSQLAEVDKMLEQMYKMLGCTLTTIPGVNVITAVKILAEIGDIKRFSNANKLAQFAGIAPLHLSSSGKGKDVATKQGNRRLQATIYFLAIQMVQVSSKGTPRNSVVRAYYEKRKAEGKTSQQALICISRRLISVIYGMLKNGTEYRMPVVENAGEKL

SEQ ID NO: 276888 - protein, 355 aa, unidentified
MNQEKYIGMDVHQATISVAVMDSSGKLIMECILETKAATILEFLDGLRGSLSVTFEEGTSAAWLHDLLKPHVSCLVVCDPRKNALLKDGSKSDRIDARKLAELLRGNQLHPVYHGEHGVRTLKELGRSYQTLTQDGTRVMTRIKALYRSWAIPCSGATVYAPRHRAEWLAKIPQPGVRRRAERLYQQLDLLQPVRQEARRDLLSESRKHPAVKLLRQIPAIGPIRAALLVALLQTPHRFRTKRQLWAYSGFAIETHDSGEYRYVRGKLQRNRERITVRGLNGNHNHDLKNLFKGAALSASTRPGPLYDFYVALLEKGMRPTMARLTLARKIAAISLTIWKKGVAFDAKQLHRQAA

SEQ ID NO: 276889 - protein, 466 aa, unidentified
MCILHATSHFYMCSSALQAQLNMTLSMKAYLCINDSFIECPTVSPCGAILKFDLEVYLMLKIVYPNCCGIDVHKTFVLAVIAITDEHGVTQYFRHRFSTFTKGLGELKQWLEYYSCTDVCMESTGKYWIPVYNVLEDSCSICLAHPKYVKAIRGKKTDKKDAKWIADLFKHDLVAGSFIPPLPIRELRDLVRYHFKLTNFCSSEANRLQNSLTVSNITLSSVLSDVLGVSGSRIIDAILEKPTDEIDLSALIHGRLKSKLSDLELAIDGKITDEQAIKIRIIKSHYDALTLCKSDLEKAIIEVAEEFRAQQELIQTVPGCANQFTTIKIISEIGVDMGQFPTAGHLCSWAGLTPTNDESANKKKSVRISKAGHYLKPLLVQIANGIVKSEKYPEHRNKYLQLKKRRGHKKAIIAIARRILTAIYHVLLKREPYDSSYYSIEIVHPNRVMTINEAISFAKSHGFVVS

SEQ ID NO: 276890 - protein, 376 aa, unidentified
MSSSILYLGLDVHKESVTIAVLPADAPAPTRLERLPYDLKKLQRFCTRLAQGGMALRGCYEASSAGYVLQRAMTSWGHVCEIVASALIPKKPGERRKFDKKDAANLARLYRAGELTPIRIPTEAEERVRELVRCRETLQREILRSRHYLLKLLLRRGLIYHAGAHWTHRHRAWLEDQRRSGVLTGGDVVAFDEYLALLDYKLARRAELDRQIEALALTPLYRPVVARLACFRGINTLGAMVLATELGDWQRFAKPTQLMAYLGLVPTEHSSGPHERRGAITKAGNSRCRHILVQAAWSARRPPSRSGLLTRRQRGQPPALVAHAWKAQRRLYTLFHRIAARRPAQIAAVAVARELGGFLWAAMRQVEVVEHSSVAA

SEQ ID NO: 276891 - protein, 410 aa, unidentified
MIKENYIYVGIDLHKETHTAVMIDCYNQKLGEITFPNRPAAFPKLVTKVKKCNTDGKEVVYGLENAYGYGRALAVWLIDKGYLVKDVNTAISHRQAKHRGAMYRKSDSDDAKAIALATLNMLDKLPDACPNDAYWSLGQLVHRRDNIMKQRTRLVNQLHEQLCIAYPSYKQFFNDISRPTALYFWEHYPSRKYLKGKSVEDLRAELVPVSHNKCSTKTCEKILDAVASDKVKNNAYQDARDMVTLSIVSDLQHYDSQLTEVDKMLEQMYKMLGCTLTTIPGVNVITAVKILAEIGDIKRFSNANKLAQFAGIAPLHLSSSGKGKDVATKQGNRRLQATIYFLAIQMVQLSSKGTPRNPVVRAYYEKRKAEGKTSQQALICISRRLISIIYGMLKNGTEYRMPVVENAGEK

SEQ ID NO: 276892 - protein, 397 aa, unidentified
MIAVGIDISKAKSTVAVIDSDGTVLASPFTMAHTQPEMEAFVTYLKGLGEPTTILMEYTGHYHYPVLKKLQDEGFPVCIVNPYQMKKYGDVEIHKAKTDKKDALRIAAYALEKSYKLVPYSSMEQKYEDLKFLSRQYSQRITYVAKLKVQLIALLDQTMPGITRILPLNSRNPEKCALLLFIKRFKSFDEIQRIGKARFLASYDVLAKKASERSASSKGLSIYELAVDSITTRGEDPYIWLSQNQCVDLLSATQNAADEIISQMRNIAETIPEYKVLRAMRGVGDRLGPIILAEIGDVHRFHSGKALNSYAGNDAPPYQSGQFESRNRHISKRGSSTLRKACYEVMQALKLTKPQDDPVYLFMLKKEQEGKPFNVAKMAGVNKFLRIYYARAMELYK

SEQ ID NO: 276893 - protein, 341 aa, unidentified
MAAIGIDTHKATLAACCVDELGTAVSERTFDNAPAGHRALLDWAAQVGHDTVIGIEGSASFGAPLARFLVAAGLTVREVPPQFSRRERIRTRRAGKSDSGDALAIARVAARESDLPPVRSADASLEVRLLVEAREDVVAEMTRVRNRLHADLRTLLPGYGVTATNLTAIRHQRTVGRLLRPVAGVQADLARGRLAHLRRLGIEERALHARIGTRVAGHPLLELPGAGLLVTAKLVGEIGDIGRFRSSDAFAALAGVAPIPASSGQTQRMRLNRGGNRQLNRALHTIALAQAIHHAPARAYIDRKRAEGKTWREALRALKRQLVRTVFRLLELGACSMPVAA

SEQ ID NO: 276894 - protein, 448 aa, unidentified
MSDIETSSEPKFAAFVGIDWGDKKHAWALQVEGSSQIERGEMPHTPEAIQEWVAELRRRFPTGCVAIALEQSRGPLVFALSKYEHLTLYPIHPASAADYRRVFRPSGAKSDGPDAALHLDMLARHRDKLRPLHPDTPQTRTLQLLVEDRRQLVNERTRYSNRLRADLKSYYPQVLQWFEDLYTPVALDFLERWPTLEDLQKAKPAMLHKFFQQHRCRDDAHHQARLKAMRAALEATTDLAVITAGRAATCTAVRLLSTLHQSIQEYDRQIDQLAKAHPDFVIFDSLPGAGEVLVPRLIAAFGTQRDRYQHAAEIQQYSGIAPVTQASGQQHWVHWRWSCPKFLRQTFHEWAAQSIPQSDWAEAYYRAQRDDKNKSHHAAVRSLAYKWLRIVFRCWKDRKPYDESIYETALRRHKTAPGPKQSSPFELNVRWTSCGSFQKMASKTAQKP

SEQ ID NO: 276895 - protein, 463 aa, unidentified
MAAVMIGVDPHKGSHTAVVVGLAEQPLGELRVRACAAQAGELIAWAAVWPERTWAVEGARGLGRLLAQQLVAAGERVLDVQPKLACRVRLLQAGDTNKNDPNDALSVAVAALRSRACRPVTAEDHPAVLKVWSKRHRDLGRARNQAACRLHAVLCGLVPGGLAKEISAAQADRILEQAAPSGAVAQARAELAAEFLADLRHLDAQLRDTRKKLAAAVKDSGTTLTQVFGVGPVVAGTIIGDVTDVARFPGRGHFAAYNGTAPVEASSGNRKVHRLSLRGNRRINHAIHMAAITQIRHRHSDGRAYYEKKLAEGKTHKEALRSLKRRISDAIFARLQADARRAAEASVTGPGGQPGNDSASSAAGSHPARRLFGQATPGPDTTIRPGTTASTPSGPPSGRTESRDRAGHSPVAATQPSAKRQAQVKRPERSADERPGRTARRQPHPAARKAPAGTTSQKNPPPT

SEQ ID NO: 276896 - protein, 375 aa, unidentified
MEGAPMLDTTTFVGLDVHARSIKAVSLDVMTGEVRAATFGYDAGAVAEWVRSVDPRARCVYESGVTGFDLQKRLSGLGVGCVVGAVSKMIKPSADRRRKNDRNDAEFLARMLSVGNVVEVWVPDDECEAARDLTRALEDARDDLSRSKQRLSKFLLRHGLVFDERTPTGRRKGNWTRAHWSWIESIRFAEGADNDVLAYYVDAVRRAAEEKARLEGLVEAEARKPRWRKRVDSLRCLKGVDTASAADLVFEAGEFSRFRNARSFAAWVGLTPSEHSSGESDRRGAITKAGNKHLRKTLVEAAWHYLTCSGRPKGLAKGQAPDRGARRHAAKGVRRLVERREALLARGVHGNKANVATARELACWVWAVGLMAEEA

SEQ ID NO: 276897 - protein, 462 aa, unidentified
MTLLARLGGQLPERNYLGIDVGYKEHVAVVITLHSFAQDGDRWKRTPCLHFPSTRSGLEKLQEYLDSFSADVGTFFGICEPTGGFYGATMFQYLRDQRYPMWLIENATTRHMREKIMGHIPKTDDIEARVMARIAYLHEAVGEEFTLRPLVLAEPEDADLLALCRDSWRLKTMISRARNQLSQLMAVVYPELKTFFTGSVSSIAPVRLIAAYPTPAELAAASAEEVRALLWQARAYHHAHRVGDLQALARNSSGLLPDPQRAWRLAWVTDFLLANFKADAALDKQIEMLVTQRKEYPWIVNVPYAGPATLGLILAATGDINRFRNYRQYVAYTGYFAGLEKSQTIDRTRMSKRGNRDLKRALFQIAAPLVWFDRSENPYKALFKRKEAEGQPWHRAMPYVCAALARHIYHCLKFQDPYDAERALGAPVSSHPCEDTSVDLRAGLEDRLEVMEAHRSCSLTAS

SEQ ID NO: 276898 - protein, 362 aa, unidentified
MQHQGNELDFNGQNIYVGIDVHLKSWTVTILTETQPHKTFSQPPKPEVLAGYLEKHFPNGNFHSAYEAGFSGFWAHYRLMSLGINNIVINPADVPTTQKEQYHKNDPVDSRKIAKSLRSGLLTPIHVMGNEGLEDRSLVRTRSTLVKDMTRFKIRIKSFLFFFGINYPENFENTRTHWSRNFMQWLKEIKLETWSGRAALDMLIQEAENQRQLLLEIDKKIRVLCRSDRYKHNVELLQTVPGIGITNAVVFITQIENVERFRTIDELASYVGLVPTSHASGEKDNKGEMTFRGQKILKSMLVESAWVAIRIDTALSLSYNTYIKRMQPNKAIIRIARKLLNRMYYTLKNKRPYQTGIVGQNL

SEQ ID NO: 276899 - protein, 391 aa, unidentified
MSMYFVGIDISKYKHDCCIISAVDQQIVSKFTITNDKDSFEQLLISLNSLSNPEDIKIGFESTAHYALNLELFLENANHSFMEVNPVLIKEYKKSTTLRRTKTDSVDCESIARWLMTVEYKPHSKGFYHAYSLKSLTRLRDRLIRQRSFYLVKITNVLDHTFPEFKPFFNERLSKTAIYLLENYGSAEKMAHMNSASYDKLRCISRGKFSIQQFLHLKELAANTVGVNNSIFDIELNSLLTLYNSLCKEIKNLEAEITRLIEEVHPHYMSIPGIGPISAAVIYAEYGDISNFSNPSQMLAFAGIEPGINDSGTESHGGRMVKHGSSQLRYVLLNACLPLIRFDLTFATYYAKKRAEGKKHRVAITHVAKKLIRVIYALERQDVDFNAQKIR

SEQ ID NO: 276900 - protein, 359 aa, unidentified
MAKIISNKQNWFNKINLTKDDRLYVGVDVHKKSYAVAVWLNNALAVDFVMPADNLQLASMLEKLRIALKQVVYEAGPTGYSLARTLRQANLPVQVVAPSKTPRQSAPDSKTDRLDCRKLAEYAAKGLLKPITAPSVQQEADRQLCRLREQLVDKQRKVKLQIKSFLLQHGIDEPAGLASWSLISLQVLSQIRLSGQLRYCLDTLLELLHFLKAQLKLTERQLGRIFIQRPLGTKIRILMTHPGIGPTIARQFATEIFNPKRFKDKTQIAKYIGLTPMVSQSGESFRDGPITKTGRPQLRSNLIEASWIWIRKDAYAYKTYTRLLHNTGHSNKAITAMARRLAIHLWRMSCDNRPYIQPA

SEQ ID NO: 276901 - protein, 465 aa, unidentified
MEVRVIRRLVGVDLGIASAHTVRVLTEDGREVCRRRCEPTVDSLRRVETAALAGAPAGTVLEVVMEPTGPAWLPIAVFFTARGHRVFRVSSAKAADLRRFLSRHAKSNGIDADTLARLPLVDPAGLYPLELPGTEAAALDRRVRATDRLTVLAAQHKVRIKDLTRQLLPCSPLTGDLGVADLAVLERWADPRALLAAGPARLTALIVKASNGHLGADRAQQWRAAAAAAVELYGDHPAIAWTDLAAEVGTEVRLLRATLGELAAHARERETAYRYADLGGLARSLPGVGDVGGPVLVAGMGRPGRFPNGAAFKSYTGLAPRAAETGNTDRKGQPMSKAGSSLLRTTLIRAADTARKQDPQLARIYYTQMVERGAEHLKAVCVVAGALAERIWTVMNRQMPYVICDIDGTPVTPEQAKQIIAQNFTVPDEVRRRRRSSKTPSRKPAQQPTISSKGGRPLSKPHTAA

SEQ ID NO: 276902 - protein, 473 aa, unidentified
MAQIVGAILLANAIATSIFGLHANILPNQDSSGIDFLPNQFRRDIAPMISSRRISAWPAFETRPRRSLPPDEYWRGTSPSQADKPRQPKLKKFSPHALKTSSSHGVIASGTATRPEHSSVNIAFLTAIGVFAMEKYVGLDVSLEETSVCVLDQAGETLFEGISASNPEALDKILRKNAPHAVRITFETGSLANWLWHELNARGYPVICLDARHARAALSMRINKSDKNDAQGLAELARMGWYREIKVKSIESRNVRAKLIARAKLVDLRRDLENQIRGLLKSLGVVLGKSAGHTFSSKIMSCLGDAPNLRSLIMPLFSIHSALIEQIAQYDLELKDFSRSDPTIKRLMSVPGVGPVTALAFISTIDDPHRFKKASDVGAYLGLTPWRYQSGELDRTGRISKRGDSLMRTYLFEAANVLLKVVRRSSPLKSWGMKLAKRIGAKKAKVAIARKMALILHCIWTDGTQFEWSRETQ

SEQ ID NO: 276903 - protein, 289 aa, unidentified
MRSVGLDLGSRKIAYCEVAGEQVVERGMVTGLEGLQRWLGPTTEPARVAIEACREAWVVHDKLSEWGHQVLLVDTTRSKRLGIGQHGRKNDRIDAEVIARAVERGGIPAAHVLSPARRELREHLSIRRTLVETRAQYVMTIRGMIRGRHAKQVVGTCRTKDFVAKLHETALGEPTRELVAPLVAALEVVEEQLRVVDQKVEQLCAREPVVLLLSTAPGVGRIVAAAYVSVIDDAERFDKAHQVGAYLGLAPSEDSTGGNRRIGGITKKGNAYMRALLIEAAHSILRLKD

SEQ ID NO: 276904 - protein, 358 aa, unidentified
MKQFYGGIDVGSSICELSIEDQEGQEVFHRPFSTGEKNLLQVVHEARQQCRGKLHLAIEEGEMAQWLAGILRPQVDRFVICDPKRNAWIARDRYKNDRVDARRIAKLLRGDFIKEIHHTDDTDRMEFKRVVQHYHSITRAESILKCQIKSRLRAQGVIIKVNRAPQPDTREAYIARVPSLHGQQVLRQLYTLLDAALEAKGNAQKLMVAMGRKFPEVALLRSVYGVGPVWACTFSAYIQTPFRFKDKNKLWKYCGLSITDRSSNGEPLGYHRLDRNGVSMLKNLSYHVFMTNMMADTDFRRFFRESLERTQDKTHARLNTQRKILAVLWAMWRKMEVYRSQGGAQKATRYKVKYLAAD

SEQ ID NO: 276905 - protein, 350 aa, unidentified
MDKELYIGVDVSKQTLDLAYYDGESIDWKKAHIKVSNNNAGFKKIGSWVAKVSKGVDIVLFCMEYTGLYTQNFRLWLEEKHYIYRMVEPRKMHRFEPDLDDGLRSLDRIKTDELDSFRIAIYCEQNHRKILRNPSKLPPPVYFKLKRLLAERKQTVKQSVLYKQQLHDICAYDTDLSVERKNGQLKTLNDALKGIDNEIDMYIKEDADISKNFSLLTSIPGIGRVVALETIVLTENFMAIDNPRKYACYIGVAPFKKESGTSVRKGSSVSKKGFKQAKADLSIACLVCMQHIPNIRDYWERKRKEKCSGIVFNAIKFKIILRMFAVIKRGTPYVEMDNYRNGKNKQPGVN

SEQ ID NO: 276906 - protein, 429 aa, unidentified
MYVVDRIRLDDFRQLKKEIRGSKEHLIVGIDVAKNKHNAFMGNANGKTLFKRMVFTNDIEGFTKLLNYAEAVKVKHALDKVVFGLEPTANYHKPLGEYLVNCGLRVVLVSGKVVKNNREMLDNRWDKNDAKDSANIADLISQGKFMYYDHPVLPLRDLRNLLSLKRRLKKQEHGHKVRIRNHLLAQYFPELDRYYGQWERGGLSIVRWCLSPSVIAGMEYEQFKKLISPGSRMNVSRQERLKAIWHKSADSIGCEVGEALGFEAQVMVEGLKQVRDAIGLTDDKIKEVCLHFPEYRYLLTIPGFGPDVSSKVLAAIGNPFRFNSVKQVLKMSGYDLCASRSGKTSETAVPVISKKGKASLRYALYQAAFIASTKNQYFVMYYTNKLRGREKEKGIKTKMKVKLAAKLLVIAWTLMKKEEPFNPGYLSIE

SEQ ID NO: 276907 - protein, 318 aa, unidentified
MNLLEKKSFVGVDCHKNSIACFVNGKFKEFRTDFRGYKKALAWAGNDVHWCIEGAYSFGLSFSTFLLSSGCQVFEFNPLTTSKLRKVESIAGAKNDFGDAKVISLFANQLNLQAVSIETVQLKEKLTARKLLVKQRTELTNSIKSTFVKRGEMLTLKCLYTLKAIKWLSNHQDMIVSSFGKIINELTNTINSIEKEIEELLPKKAQELTKFTGISTLTAAIIYTETKGKRMTKAQFASYTGIAPVDCSSGLTQRHRNNRRGNRQLNSVFYQISLHQCRYDEKGSEYFNKKLAEGKTKRHARKCLSRQLCNLVWNVLVA

SEQ ID NO: 276908 - protein, 395 aa, unidentified
MFIVGIDIAKRSHEAIIIAEDGQVVRKAFSFRNNCTGYNLLLEQVRRLTLVKSQIVFAMESTAHYWLALYARLLKDGYTVMVLNPIQSHSLRELYIRKAKTDARDSLIIADLVRFGRCKASNVPQDKILALRELCRSRAYLVDMAADLKRKLIALLDRIFPEYESLFDSVFSKASIAVLSKYSTPKKVKNANLRKLTDILMESSNGHFGEWKAHQLKEAACSSFGIDDSGGVYSTLLGMFLEQILSLTAQADSLEKQISVFFQEFNNPLNSIPGVGTVLAATILSEIGDITRFSSADKLLAYAGLDPSVKQSGEFKSNQNRISKRGSPYLRRAIWLASTVAVHRDPMFQTYYEKKISEGLHYMNVIGHVSRKMTAVIFAVLRDGQPYQPILQSAG

SEQ ID NO: 276909 - protein, 343 aa, unidentified
MSIVILGVDLGKNACSVVGVDAAGAVVVRRSMRRQTLIDYVAKLPACVVAMEACCGAHHLGRLFAANGHEIRLMSPEYVRPYVKAQKNDDRDAEGIAEAASRPTMRFVNLKSQDQLDIQTLHRVRSRLVAERRSLINQLRAILLERGTIFPVGRRKLELGIDALLADEDTTLSPRLRQLVGELRAEWRELDTRVEALNGEFVELARNDAAARRLTSIPGVGVLNATALIAAVGDASSFAKARDLGAWLGLVPRQHTTGGKPRLLGISKRGNTYLRTLLIHGARAALPSLARSETPLGRWLTGMIERGVHRNAIVVALANKLARIAWAALRKDATFERGYPVAV

SEQ ID NO: 276910 - protein, 397 aa, unidentified
MYIVGIDIAKRKHEAAVIDGEGTVIIKPFSFTNNCSGYNRLLAMLAKAKLPLDEVSFAMEATGHYWLALFTRLQKEGFRVQVINPVQTNSIRSFYIRQAKTDPRDALLIAEVIRFGHFSESTLHPENIYELRELCRGRHAIVSMQADVKRKVVALLDQVFPEYETAFTNLFGDTSMAILQTCPTPKELSEMPLEELCHLIEVSSHKRFRMAKAQELQALARNSFGFAMAGDVFSTMIRLYVKHLDFLKQQVREMDRKIAEIMETLDTPITTITGIGPTLGAYILSEIGDISRFSSAAKLAAYAGIDPTMRQSGEYNGVRNRMSKRGSPYLRHAIWLAASSAVLHDPALKLYFQKKRDEGKPYMASVGHACRKMVSIIYAVMRDNKAYTPCIPNEISA

SEQ ID NO: 276911 - protein, 408 aa, unidentified
MQRYYLGVDWADKSHQLYAADESGKKIKELEVQQTAEGLAEFGRWLDERRSAGTELWAAIEKPQGRIVDFLLDHGVVVYPVNPKALDRARDRFRMSQSKSDGFDAYVLAEFLRTDHTHLRALEPDSAQGQELKMLTRDHQRLLRQKTRLLNQMTITLKEYYPRALEVFDDLETQIARDFLHAYPTPQGLSRMTRPQWKRFAKGEHHLSEARWQELWEKINKPQITIPDHVVRAKAKLLLALVAQLEVGVKAVHDYSQEVERFFAALAAAKIARTLPGAKSATTMPTLWAELGDAKNRWNSFRHLQAEAGTVPVTKASGKSRMVQFRFACKKRLRTAMYWFAFNSLMRCEWANKYYRDQRAKGHSKHQALRALGAKWLKIIFVMWRDHKPYDENYHLANIARHAMRQAA

SEQ ID NO: 276912 - protein, 334 aa, unidentified
MQNVALIGIDLGKHSFHIHCQDQSGNALLRKKFTRTKLMQFLATCPSSVVVMEACAGAHFMARRISDIGHEAKLISPQFVRPFVKSNKNDFIDAEAICEAASRPSMRFVQPRTETQQAMRALHRVRESLIRDKVKTTNQIHGFLLEFGISLPTGDAVIKRLSLVLAEHEIPEYLSRLLMKLHAHYLYLIEQIAELESELNQSIKADATAQRIMTIPGVGPITASLLSSQLGDGKQFSCSRDFAASTGLVPRQYSTGGKSTLLGISKRGDKNLRRLLVQCARSFMMRLEYQQGRLAEWVRKQLDNKHSNIVACALANKLARIAWAITALQKEYQA

SEQ ID NO: 276913 - protein, 398 aa, unidentified
MTESSDYESVQVFIGVDVGKDTHHAVAINRSGKRLFDKALPNDENKLRSLISDLKQHGQILLVVDQPATIGALPVAVARSEGVLVGYLPGLAMRRIADLHAGEAKTDARDAAIIAEAARTLPHALRTLKLADEQIAELSMLCGFDDDLAAQTTQASNRIRGLLTQIHPALERVLGPRLEHPAVLDLLQRYPSPEKLASLGEKKLAAQLCKLAPRLGKRLAADIAQALAEQTVVVPGTNAAAVVLPRLALQLITLRKQRDEVALEVEQRVLAHPLYPVLTSMPGVGVRTAARLLTEVACRAFASAAHLAAYAGLAPVIRRSGSSIRGEHPSRRGNKALKRALFLSAFAALRDPLSRAYYTRKMSQGKRHNQALIALARRRCDVLFAMMRDGTFYTPQGS

SEQ ID NO: 276914 - protein, 423 aa, unidentified
MSLDPHEEPAAIQTHIGAIFISLELSRSKWLITSLVPGGGQRMSKHWVEAGDLAGLLARFWAIRDKVLARTGKSYPIVVIQEAGLDGFWIHRSLVKEGIESHVVDAASIAVSRRRRRAKTDKIDGEGLLRALLAFKRGEPRVCSMVRVPTPQDEDRRRICRERKTLTAERIRHVNRIKGLLFSQGIGDYEPLRRDRRRALEAARTGDGRALGANMKAQIGRELDRLELLLGQIAAIEAERDAMLARQAEAEAVQGAQGAQGAPARVLKPMDPNGPGAETVPEAEAAPGVQKLMDLNGLGAETVAMLWTEAFYRSFDNRRQLAAFGGLAGTPWKSGSIDHEQGVSMGNHRLRQTMIQLAWLWPIHQPNSALTRWYRERTKGATKLQKKKMVVALARKLLVALWRYVDAGVVIEGAVLKRAARAR

SEQ ID NO: 276915 - protein, 309 aa, unidentified
MIGGVDTHKDVHVAAVIDDRGKILDTSSFETTAAGYRQLLAWLRGYGDLQSVGVEGTGSYGAGLAHHLATAGVEVVEVNRPNRQLRRRRGKSDPVDAEAAARSVLNGEATTVPKAGQSLVESIRVLRVAFTSARNSRTRVTLQIRDLIVTAPDQLRRVLNPLSTKDRVARCARFRVGGDLADPTEATRRALRTLARRYLALSEEMDDLKVSLDDLTARAHPALRAVKGVGPDVAAILLVAAGDNPERLRNEASFAAMCGVSPVQASSGKTLRHRLDCGASPGESRALANRDQPADHRRADSRLRGATNE

SEQ ID NO: 276916 - protein, 345 aa, unidentified
MQSRIISVDLAKDVFQVAIASARYRIASRHRLLRRQFAEFLTTQPPSRVLLESCGSVHYWARQAQQCGHAVTIIPAQYVKPYRRRGKSDRIDTEALLEADRCEGIEPVPVRTVEQQQIQQLHRLREQCKRTRTQRINALRGFLRELGYPIREGAVTAQRRAREIIAEVDFPDALRAAFSDSLDEIAALEQRIKSIERALKALTRTNQAVQALRQIDGIGLLTSTALVAAAGSPHHFPTARRFASWLGLTPREYSSGNTRYLGRISKQGDRYLRMLIIHGARSVLGRAKQLHLAGKPLTRLQRWAWQLQQRVGHNKAACGLANKLARICWAVWKHQRVYSANFASS

SEQ ID NO: 276917 - protein, 400 aa, unidentified
MVSDFIKGYNLMKIFVGIDIAKLNHFAAAISSDGEILLEPFKFTNDADGFQLLVSKLESFDKNSIIIGLESTAHYGDNLVRYLVAEFYQVCVLNPIKTCQMRKNNVRKTKTDKVDTFVIAKTLMMQDDLRFITFFDLDMMDLKALGRFRQKTIKQRTRLKIQLTTYVDQVFPEIQYFFKSGLHQHAVYALLKEAPSPKEIASMHMTHLANLLKVNSHGHFTKELAKELRVLAQKSVGANDSAISIQITQTIQQIELLDSQLEKIEAEMTDIMKFNDSVIMTIPGIGYINGGMILGEIGDIHRFSNPNKLLAFAGLDPSVYQSGNFQAKTTRMSKRGSRVLRYALVNAAWNVVRNNATFKAYYDAKRAEGRSHYNALGHCAGKLVRVIWKMLTDEVEFNLE

SEQ ID NO: 276918 - protein, 336 aa, unidentified
MEKYSFFVGIDISKGHLDFCIRNSSVRLGFNRVPNDPGGIKEAIKWMRSFEGFRVKECLACLEHTGIYGLTVLETLHRLDFAVWMEVAACIKNGSGSLMRGKNDKVDASRIADYAHRFRADAKLWEPPRKEITLLADLMASRTRLMAVISKLAVPVNEIKSFKAKGHYEKIKDASKKTIEAARKEAKAIEKQILEIMMGDAVLARLYEVVTSVQGVGFVTATNLIIATNEFKYINDARKLACNAGCAPFEYSSGTSIRGRNKVSHKANKRLKSLLHMCATSALQAEGEFKVYFDRKIAEGKNKFIVINAIRNKIIHRVCACVREDRLYTKFPKTVA

SEQ ID NO: 276919 - protein, 462 aa, unidentified
MNKNKNQRKHKVVEFDVLEQINLNAAGLDIGAEEIYVAVPKGRDKESVQSFPTFTADLHRLASWLESCSVNTVAMESTGPYWIPIYEILESRGFEVYLVNARHIKNVSGRKTDVLDCQWIQQLHTYGLLEPSFRPPEQICAIRSLVRHREMLIKCRSSHIQHMQKALNLMNLKLTNVLSDITGVTGMKIIRAIISGEHNPEILASYRNQKCKHNEADIAKSLEGHYKREQLFSLKQAVELYDFYDQQLADCDSELEKLYEEFEPRDGSSNKPPKKRTSKRRKNQPHFDLSESLFRMVGIDLTQVNGLDALTVQDVLSEIGIDVSAWPTYKHLSSWLHLSPNNKVTGGKVKSSRTQPTQNRAALALRLAAQSLARSDCALGAFYRRIRARSGAPKAITATAHKLARIIYSMLKYRRDYVDPGSNYYEEQYRKRAIRNLQRKASKFGFRLEPTAVLDLDFAVVS

SEQ ID NO: 276920 - protein, 344 aa, unidentified
MENYAGIDVSLELSSVCVVDAQGKILKEAKVTSEPDALVEFFETLGFAVKRIGLEAGPLSQWLHAGLKTAGFETVLLETRHVKAALSAMTVKTDRKDARGIAQLIRMGWFRPVHAKSIGAQEIRALLVARKQLLGRLIDVELSIRGILRGFGLKVGPVTRKNFEARIRELVAGQATLERIATSMLLARSALKAEYGRLHKAVLAIVRDDAVCRRLMTVPGVGPLVAITYKSAIDDPHRIVKSKAAGALFGLTPKKYQSGEKDVTGGITLAGDEIVRTALYEAANVLLSRITRFSKLKRWGMDVAKRRGSKRAKVALARKLAVILHRIWVDGTTYRWAEAGSIAA

SEQ ID NO: 276921 - protein, 326 aa, unidentified
MVDEAGAIQLERTVAADPDAIAALVHAQASSVRRVGMESGPTSVWLWRELAQRGLPVICIDARHAKAALSMQINKSDRNDAAGIARIMQTGWYREVQVKSPHSHAIRGLLNSRSLLVKVQRDLENQVRGLLKSAGLIVGRAKDGVFSARTKQLLAAHIDLAAIALPLLEAREAIHQQLVHLERRVRQLAKEHRQTSAFMTVPGVGPMTALAFMATVDDPTRFRRARSVGAYVGLTPRRYASGEVDWTGRISKCGDTILRTYLFEAAGVLLTRVQKWCALKAWGLRLAKRSGMKKARTAVARKLAIILLRMWRDGTQFHWTAAPAGS

SEQ ID NO: 276922 - protein, 370 aa, unidentified
MPALRREPRPHRRSELNNPVVPGVARRPLQKLKPDQEALLRLLTRWREEAAEAGKPVTRTALAFEAGRDGFWLARWLRARGVEAHVIHANSVAVAREHNRAKTDRLDTILLLRAFLGWLRGEPAHCRMAAIPSLADEDDKRPSREREHLVGERTRLVNRLKAVLVRLGIRGFKPTLRKAAGRLDALRTPDGEPIPPNTLSEMRRDLERLRLVREQIAAIEAARLERLARAPATGPDAMVRLLARVRGLGIETADMLVREVLARDLRDRRAVARYAGLTGTPDESGRRRREKGLSKAGNARVRRGMIQLAWRFLLFQKDSALAQWYRSRTESARGGVRKVLIVALARKLLVELWRLVVAGQVPRGVLLRPA

SEQ ID NO: 276923 - protein, 353 aa, unidentified
MDKYIGFDIDSKKVSVCVIESGKKDVYATIGPDIGAMKHFLLSQRQDGVRINLAYEVSGYSGYIHDQLCESVDRIAVANPTKTTWIFRTTKKTDRIDARKLAVLLSIGELPTVHVPNKEVRQWRQTILHRRTIVKDVCRVKNRIRAVLKSAGYFKAGHKGGWWNRVNVMWMRQMSTGSELWQMQFGQLMDEYEFLNKQLLKVTDHLDGYLTTKPGAVLLMSIPGIGSRTAEAVLAYTDGVERFGGSREYCSYFGVVPKLDQSGDSRRVGHITKHGPSVVRWLLCEAAWKSIRKSAALKSFYERVMNGDVKRKKIAIVAVCRKLLSIMRAMLTTGELFNEELVLMHCTEIEKAA

SEQ ID NO: 276924 - protein, 343 aa, unidentified
MTKITTIGLDLAKNVFQLHGVDGSGAVVLKRQLRRAEVEKFFAKLPPCLVGMEACGSAHHWARVIGRYGHEVRLMPPAYVKPYVKRNKNDGRDAEGVCEAVGRPTMRFVAVKSVEQQATLAVHSTRALLVRQRTMAANALRAALIELGIVAAQGYEGLRKLIVRLEEPNEDIPEVMRAALLVLAKHWQVLDADERVLEQQIAKQARCNQDARRLMEVPSVGPIIASTVLAKVPDAKLFRSGRDFAAWIGLTGKDHGTGGKHRPGRISKQGDRVLRTLLISGASAHLRQQKTRGVTDPWLCDLLARRPYKVAMVAFAAKTARIIWAMLVKGEPYCDRASAPAAA

SEQ ID NO: 276925 - protein, 339 aa, unidentified
MNVKTIGIDLAKEVFQVHGIDEHGKRLFNKQLKRAKMLSFFANIPPCLIGMEACASAHFWAGKLMSMGHNVKLMAPQFVKPYVKTNKHDAADAEAICEAVTRPNMRFVPVKTPEQQAVLALHRSRQSFIKQRTAQANQIRGLLAEFGIIVPRGIQQLHLPEILEDADNSLPSLFRVQLSLLQHHMVYLFDVIATLDKQIEQCYRQNALCQRISKIPGIVPITATALIATIGNASNFENGRQLAAWSGLVPRQHSSGGKQVLPGISKRGDIYLRTLLIHGARAVLQSVKRKKDAVSGWASRLLARRNNNIASVALANKNARIVRALLAKDQEYYAPIMNV

SEQ ID NO: 276926 - protein, 411 aa, unidentified
MDVLYKTCCGIDVHKMKLVACLCKGHKQEIKEFSAKTKDIKAMANWLEENQCEMVAMESTSVYWKPLVNIFEMRGLNYMIVNAKDFKAVPGRKTDVLDSAWLADLLRHGLLKSSFIPSREQRELREATRYRKAITEERARALNRLQKLLEGANIKIGSVLSTITGKTTMNLLDYVLNNDEMMDEKTAETLIISRISASVKEVTEAMEGIMTPFQKMMMKQVLTHLHELSERIEEMDIIIDTYMAEYWGAIKKLEQIPGVGKKSAEIILAEIGLDMNQFPSAGHLASWAGVAPGNNESAGKRKSGRTRKGNKILKSTLAQAAKSAAKNKNSFFHAQYQRIAIRRGKNRATLAVAHSILIAIYHMLKDDQEFIDLGSDYYYQFNTEKKINSYLKKLAALGYRVDEHSTISPVG

SEQ ID NO: 276927 - protein, 423 aa, unidentified
MMKLKYSICCGLDVHKNVIVATIVTTNKDGISEYLQKSFSTINSDIQRFHNWLIENNCYHVCMESTGKYWIPIFNYLENDIDICLTHPKYVKAIKGKKTDKKDSKWIADLYKFDLVRCSFIPPKDFRQLRELSRYRFKLVCMKSSEKNRIQNCMTISNVGIASVLSDPFGKTATEIISYLLEHTADSMDEKAVRKLIKKGAKSKSDEIIEAIKGYTIETDQAKKLELARGHLEYLDDMITQTEVELYVRIKPYYEFVEFVSTMPGMTELSSTIVLAETGVDMDIFDDAKHLCSWCGLSPANNESAGKKKSVRIAKAGDYLKPMMVQCALAAIKSKKQPYFAIKYGRIKKRRGHKKAIIAIARMMMVCIYHMVSEKKPFTPTDYEELMDPQNHVESVVLNENNVFAYLESLGYDSSKLVKRNDN

SEQ ID NO: 276928 - protein, 328 aa, unidentified
MCTLGIDVSKNKIDLCLLTAGPGGKKKHKVLTNEPAVARKVVDWLNAQKCVPESVTVVLEATGIYHENLAYGLHEAGVSVCMANPCRVREFAHGMDILNKNDAVDAFVLACYGELKSPAVWVPPSPEVRKLRALLRQRDALREDVQRTVNRLEKANSTSTPQEVIRSLERMKSWLNEELARIEKLITDHTDNDPGLKADLDLLKSIKGVKDQVGREMLALLKDGTFKSASQVAAYLGLTPVEKTSGSSVRGRPHMSKTGPSGVRAKLYVAALTASRWNKQAKAIYERLVAKGKAKKAALRAVMRKLVHLCFGVLKTRLPWDENYVATA

SEQ ID NO: 276929 - protein, 345 aa, unidentified
MQVYAGLDVSLKTTHICLMDEGGKIVWRGVSASDPASIREALSPFLGQLVRCVLETGSTSPWLASGLLALGVPVVCIDARHAQPLLATMTNKTDRNDARALAGLARVRLFREVYVKPRQAQELRAALAARQQLVEAATAIKNTIRGLLKPFGLIPSKGTGQVFVRQVREKLIGEAALGAVIEPLLSAWLAVRKELARATKALMDFARGNQTCRLLMTMPGIGVLVAVAYFATVCDPTRFGKSRNVGAHFGLTSRRTQSGEVDIRGRISRHGDELVRQYLYEAAGVMLFRWRGCCALKDWAGRLVQSKGVKKARVALARKMAVVLHEMWEHGLAFAPKGRPAALAA

SEQ ID NO: 276930 - protein, 466 aa, unidentified
MTFVNGEVQARFMARIRGVDPQRCLAIPVDVGKATAVALVADHYGEIIVAPFEFALTEAGFAVLSAAITRAQVERDALIVRIGVEAAGHYHRTLVARLRAAGLEVVELNPRAVKDARGQQLLRTLKSDARDCGAMAELLIRGSGRPPQCRDEALAAQAAWVAHRRRKVAAQVTLSNQIHGQLDLIFPGLTGCFANGLDAASLRVLIRDLPDPERVRRLGVEGVLRFVRRRGVRMSRPKAQQVVQAAQLALRLPGAERPAPLVVLAADWALFEALDQQIQDATTQLAALLPDTPAGVLLGIPGVGVLTASSYGAAIGDPNRYRDAAAAYRASGLVPISYQSAGRARSRTGISREGSVELRRAIVELGRGVGLHHPDFIAYRRQLLSRGKPPLVAMIAVGHRAHRLAFAMLHSQRPFDADRWARAVAGHRHPTDEQARHGGTTAPGGPPARRDLPAPPTLTPAEAHSN

SEQ ID NO: 276931 - protein, 334 aa, unidentified
MPIVGGLDIHRKQITFDYLDTGTGQVQRGQISPADREHLRGWLARFTGSDDVAFAVEGCTGWRYVVEELAAAGVAAHLAEPADTAFARGRKRHAKTDKTDSRHLRQLLADGRLPECWIPPARILECRALLELYHDLRAEHTAWVQRIHAVLFHHGAPALGAGTLRTGQGVAALQAVTASCLSPAGQLQISTALEVIEALEARMHAVRHQLLAAARHLTGAKVLAARLYGVGPVTALAMTCWLAGEGRFSSSRQAVRFAGLDVTVWSSDRKGPPGRLSRQGPPVLRPGQGPLQRQAGRAVRSPEDPPPGPSHPGRARRRRAVRRLRPLTAMVTSP

SEQ ID NO: 276932 - protein, 414 aa, unidentified
MNHPKMQYTYVGIDSHKDTHTAVLIDCFFEKLGEITFENLPSKFDAFLAKAETLKVGGTTLLFGLEDVSMYGRLLAVFFRDNNQKMKHVNSLLVAKERKNQNVTQKTDSIDAECAARVLLSKLSSLPDAQPDDKYWILQSLVARREFIVKNNSSLKNHLHSLITQHYPNYRHWFPNIDSHASLAFLMRYPSPSTMAGITHENLAEFIRKASSNRVGGGVNSTVRARKILDTLQDTTVPFQELRDRSVQSTLRQIGVHTQEIKQLEQDIASFMENFACTLTSMSGIDTISAAQLLTHIGDIRRFSTPAKLARYAGIAPVTYASGKSDTQYADKRGNRALNSIIYLLAMRLISTASNKVLNPFLHDYYHRKLSEGKTKRQGLKCVQRRLINIIWRMLMYNEVYKNPPMIDKVVADV

SEQ ID NO: 276933 - protein, 386 aa, unidentified
MQTVADRTEAATAIRTDLGAFFVSLELSRSTWLITSLSPGGGEKMSKQVVRGGDVAGLLERFARLREKTRARTGKVFPFVVIQEAGLDGFWIDRALHNEGIESHVVDPASIATSRRRRRAKTDRIDGEALVRALLAYKRGEPRVCAMVKAPTPEEEDRRRLCRERKVLIVERVRHINRVKGLLFSQGISGYEPLRRDRRERLDTLQTGDGRRLPDHLKAQVRRELDRLELLLEQIKAVEAERDVLLAAQRDAAPAAMLLDIKGIGPEFAAILWSEGFFRHFDNRRQVASYAGLAPTPWQSGSIDREQGVSKAGNSRLRTTLIQLAWLWLRHQPQSALAQWFEERVKRNGGRLKKRTIVALARKLLVALWKYVTAGVVIEGVVMKRA

SEQ ID NO: 276934 - protein, 361 aa, unidentified
MKKLTTTMMQRTLNKQDGRLTIGSSCYCVLDEAGDVLMEQRLSTTPKAIQEIFGAMPRSRIALETGTHSPWVSRLLKELGHEAIVAHARSVRLIGESRRKDDRLDARTLARLVRIDPELLCPVKHRSAEAQADLTVIRARAALVRTRTMLVNAARGLTKSYGERLRGCNARGMKPKAAQDLSPELKSALDPLMSEIESVSERICEYDQLLESMARDRYPEAERLKQIKGVGTLIALTYMLTLEDPHRFRKSRDAACYVGLQPGRRNSGQSEPQMHISKEGDPYLRSLLVQAAHHVLGPWGVDSDLRRWGMKLAEHGGKRGKKRAVIAVARKLAVLLHRLWVSGEVYVPLRQSGRATLPAVA

SEQ ID NO: 276935 - protein, 413 aa, unidentified
MNSESYRIAGIDVHKEMLAVVVADVGGIGEYRFQRRKFGTTDSQLKEMAEWLRSEGVEEAVMESTAQYWKPVWRQLEPQCELHLAQAKSNRAPRGRKQDYQDAERLVRRHVAGELILSFVPDAEQRLWRILSRTRQQLTRDRIRLYNQLESFLEDARLKLGICVTDLLGVSSLRMLRRIADGETDPAQLAKLADANLKASQGKLIDALRAVDSLKPLQRHVLKMFLERMDLIDTQIKSLQQELSVALSEHQDAVMRLAKIPGLGPDSAQQIIAEVGPEAGTFPAAENLASWVGVCPGREESAEVSKSNRSPKGNCAMRRLLNQAANAAIKTKGSWLQIQYRRLVVRLGHKQAIWAIAHRLCTLVWIILHRKEEYIEYGQERSKQALKLRTTRQLRELRALGYQIIPPIAIQLA

SEQ ID NO: 276936 - protein, 318 aa, unidentified
MTKSSTRTAGIDTSKHKLDVAVHGAATQFTVENSKAGWQHLADELTKTGVERIGIEATGGYERDVTRYLQAAGFEVVVLQPNQVKAFAKVQLRRAKTDRLDAELIAACTYIFDAHNKLPPDPRFDALADHLTFIEQIDDDIARSKTRLEHIVNKRLRRIAEAGIRRLELLRAVELKRLLAELRCHADLAERFELVLSIPGIGERTALTLIVRMPELGRLSREQAAALAGLAPFVQQSGKRQGETHIGGGRSRLRRALYAAALPASFRWNRALKALYGRLIGRGKSHSSALIACARKLLVFANTVVARGTPWQDRSATA

SEQ ID NO: 276937 - protein, 405 aa, unidentified
MKHDISAPTGAIDWASEAHVGAVVDSDGGLAACYDISHTAEGLSSMLHRFAQHGVTAVAIERADGPVVETLLAAGFEVFVISSRQLKNLRGRYGSAGNKDDALDAFVLADVLRTDRRRLRPLQRDDDRTRALRVLTRGRKDLIAARVALGNQLLANLQIALPGVIGLFHRLDSPISLAFLRRFTTADKAAWLSAKRLDAWLSRQGYAGGKTGIDLHAKFLAAPAGIRGAEATAREAVTLALVAAIEQLNSQIADLERRIRTDLEHHPDAHVFTSLPKGGTIRAATLLAEIGDARGRFPTDDALAALAGAAPSTRRSGKLHSVTFRFACDKKLRDAIVNFADDSRHASPWAADIYQRARDRNLRHPHAVRILARAWIRVIWRCWQDGTAYDPTFHRGAQRLLDQAA

SEQ ID NO: 276938 - protein, 426 aa, unidentified
MNSTTKFAATIGLDWADQKHDLWIQPADGSKAEHRQLEHTPEALHEWVAKLRERFGNRPVAIGIETSRGAVISALMAYDFIVFFPINPKALKDYRAAFAVSGAKTDRVDASLLEEFVRLHGDKLHALEPDTELTRKLAGLVQNRRLLVDERTRLVNQLHAALKTYYPLAQSLLGAQMNTSMAAGFLARWPELQSLKKATVQTLRAFFYKHNSRGAQLMEERLEAVQKAKALTTDPAIIEPARALVCALATMLKPLHKVIAFLDKQIELAMDQHPDAAIFRSFPSAGPALAPRLLVAFGTNRARFASAAEVAQFYGLAPVVEQSGNSKTVRMRYRCPKFGRQTFHENAACAIRKEPWANCYYTQQKARHDDKHHLACRALAFKLIRIYFACWRDRQPYDPAKYLSALEKNGSPLLARLETSTTTACE

SEQ ID NO: 276939 - protein, 341 aa, unidentified
MTVIIGIDPHKATHMAVAIDGDECPIGRLEVIADRCQTDRLLAWAAPLGDERTWAIESADGLGKLLSQQLLAAGEHVVDVPPTLSSRVRLLGSTKAAKNDDNDALSTAIAGLRHCGLRAVRRDDHTTVLRLLVGRYDDLIALRTQAACRLHAVLRELVAGGTRRRITADRAASVLRGVRTGDPVAAARKRLAGEQLGDIRRLDRDLMASKHQISDAVAASGTSLVELHGVGPVVAGLILAHVGDPARFPTPARFASYNGTAPIEASSGPRKRHRLNPRGNRKLNHAMHMIAVTQVRHDTPGRVYYDRKLAEGKTKKEALRALKRRISDAVWRQLHADLNNT

SEQ ID NO: 276940 - protein, 433 aa, unidentified
MNREVSEMNYNTQNAKIASITEKTLVVGIDVGSEMHYARAFDWRNFEFTKKPLAFSNTEAGFLTFKAWIEEIQEKNGKTAVIPGMEPTGHYWFALGKFLQDNGMKPVHVNPHHVKKSKELDDNNPNKNDRKDPKTIAALVNEGRFSYPYIPTGIYAEIRSLSNLRFQTQEEITRLKNRTARWFAIYFPEYKDVYGDLKAVSGRMILKAAPLPEDIKKLGVDGVNKIWRDAKLRGVGMKRAKTLVSAAEHSVGSKEGPEAARMELQNLLGDMDVYTARMEELLGKIESKLSEIPYIDKLLEIKGIGMVTVSGFIAEVGDIGRFDNPKQLQKLAGYAIVANDSGKHNGESRISYRGRKKLRYVLYEAAISLVGKNAEFRAIHEYYRTRKENPLKKMQSVVAVACKVIRVFYTILTKGVDYDAAKLLGDIRRPQSA

SEQ ID NO: 276941 - protein, 386 aa, unidentified
MQASTVGTPTASRYGTIFITIELSQKSWLVTLHSPDQDKLSRHQLAGGDHAGLVALIDRIRDRAARALGGVPAVASCYEAGYDGFWLHRLLLAAGITNYVFDPASIAVDQRARRVKTDRIDGETMLRTLMAFLRGEPRVVRIVRVPSAEQEDARRASRERDRLVKEQTAHTNRIKALLRLLGMAIGNPRRRDWLSWLATQRDWQGQAVPPQMLGEIRHEHARLMLVRERLDALAKTPAQADPTPAAAQMIERSELLLRLKCLGPAFATTLTNEVFYKDFRNRREVASYFGLTPSPWRSGGIDRDQGISKAGNPRARCAAIELAWLWLRHQPDSKLTQEYRRRTLDAGKRIKRVAIVALARKLVVALWRYLTTGLVPEGAVLKAVKV

SEQ ID NO: 276942 - protein, 409 aa, unidentified
MRIVGMDIHRVFAEAVMLDGERVIRLGRIGMTRDHLGKFARTLTHDDHVVIEATGNATAVAEVMAPHVGRVVIANPKQVRMIAHAKIKTDAIDATVLARLYASGFLPEVWVPDAHTAALRREVTRREQIVRQRTRLKTTTHSILHAHLLPQCPHIDLFGNRGRAWLMAQPLPSDEREAVERHLREYDRLGEDLRVVERELARAALDQPEARRLMTVPGIDMVVALGLLAAIGKIERFKGPDQLVAYIGLNPSVRQSGEGPAYHGRITKHGRSQARTMLVEAAWVASRSPGPLRAFVERVARRRGKPIAAVAVARKLAVIVWHMLSKGEDYGGVRPALHARKLRDLELRAGQPSQRGRRGNAHAYNLERVRVEERRRVEQAETAYRRLTEGWTKRGRRVPTGAAEEERLS

SEQ ID NO: 276943 - protein, 324 aa, unidentified
MNLPSLGIDIAKVKFNVCLLHLSGKLKHKMFANSAAGFAQLQQWLEKHEVAQVHACLEATGTYGEALSHHLHDRGHTVSVMNPAAIKAFAASRLSRTKTDRVDAELIARFGLAHQPPPWTPPAPEVRELQALVRRLESLVEMRVAEENRLSAGLTVVAVRTSVEEMIAHLKHQITRTEKLIRKHIDKHPGLKQQRELLNSIPGIADTTAALLLAEVPHIKHYRSARQLAAFAGLVPRERQSGSSVKGRVRLSKIGNARLRKALYFPAITALRCSPFFQQWAEGLRQRGKSKMSVIGAVMRKLIHIAYGVLKSGRPFDPELAKSA

SEQ ID NO: 276944 - protein, 458 aa, unidentified
MTKNLTKANAKNVVMMPLINPNAAGIDIGDTLLAVAVPAGRDTVCVKQFGAFTCDLQSVSAWLKYCNIETVAMESTGVYWKPLFSVLVQDGFEVFLVNAKHTKNVTGRKTDESDAMWIQKLHSCGLLSSCFLPDEQTETLRTLVRFRRSLTQDSTTYILRMQKSLELMNIKVHTVISDIIGKTGTAIIEAIIAGERKAENFMPFIDGRIKADKETLIKSLQGNWRKEHLATLRMSYEMYNMVQQKIIECEKEIEETLQFYLATKNEGIIEPIEKNETEVCENKKKVKKKNKNHPIFNTRAYIQKIHGVDVVEIYGLSEISALEILGETGTDLSKWATEDRFVSWLNLCPNNKISGGKLISSSRLKKKANLASQAFRSAANSLGRSDHWLGDYFRRMKAKGGNKYAIVATARKLAIIYYNMVRYKKDFNPVDLKDYREKYKAAKISYLERKLEQLKCAS

SEQ ID NO: 276945 - protein, 400 aa, unidentified
MRVVFGIDVSKVSSEVAILVNGEKVHGYTMPNDAIGFARLLGDLKTVHKPEIVFEATGVYSRRLQAFLEDNGYAYTRLNPLEAKKQLDSLRVRKTDQIDAEKLAQSQFVLNRKPTYVQEEVYQNLRDLSRFYQNLTEDIVRAKNRLHKVLQVAFPELENILATPTGEQYWKLVMTFPCKELVLDRDGNELLDSIRQSTSKRISDKRVVYLAEKLTALANQSYCAVKKTSPMFEEIRYYAQELLRLSERRKAVLDQMVTLAKPLPEYEILLSIPGIAETTATSIIGELGDIRRFQSANQINAFIGIDLRHYESGNFLAQEHITKRGNPYARKILFKCIHNIASASHTNPCHIADFYEKRKRQSQTTSTKPHTIASIHRLIRTMYYLITHNKLYDYTSTKNQ

SEQ ID NO: 276946 - protein, 315 aa, unidentified
MDTTSEKPSKNTRDYIALDIGKASLAVCAETLEATLGNNPAGIAALLKICRKHAAPFVVCESGSYTAPLLAALRKHSIPLAIVPGGRVRHFAKGIGIFAKTDAIDARLLRRFAQETQPQPTAAPAPELAQLRQLLDARTDTVSRLTQIAGKLENATGTLRRHLLEERRWQERRRQKTDAQLDIHVKTHPALQADEQRLTAVKGMGSLTARTLLAHAPEVRDIRDKTLAALCGVAPCPNQSGSLDKGSRIRGGRQAIRNILHMAALSAIRHNTILRKFYLHLLSRGKSKSVALVAVMRKLLMLAHRLLSNPHFNLA

SEQ ID NO: 276947 - protein, 383 aa, unidentified
MTEEQVIIGMDPHKSSNTIAVLARNETMLTRRRFENSDDGFVEMLQAVTDYPDRVWAVEGANGMGRSVAQRLVAFDETVVDVPAKLATRVRVYSTGHGTKTDAADAVAIARAAIHSPHLRRVLPDDATVAMKLLSDRRKELVGLRTQAMCRLHRLLRELIPGGAPTAISAETAFGLLNDLKPDDPANEMRLEIAIDHIEDVMRLDRKIDDYTRRIVIEVKASNTTLTRIYGVGPLNAALILGEVGDVSRFPSRDHFASYTGTAPIAASSGDHHRHRLNRAGNRTLNHAMHIAAIVQIRYDTPGRSYYLRKVAEGKSKKEAIRCVKRRISDAVWRQLQIDRSDDRTQDDAWPRRASTRGGVPHYRSPDTPRANGRPMQPKPVSV

SEQ ID NO: 276948 - protein, 415 aa, unidentified
MLFLGDDWAEGHHDVVAQDDAGKTLARRRLPEGADGIARFHEMVASCLGEDAEPDPARVIVVIETDRGPWVKALAAAGYRVYPANPRQAARHKETVANSGKKDDFFDAGCLADMGRTRLHQMRELAAGSDVAEAVKIAARAHQKLVWERTRHLLRMRSALREYFPAALEAYADLTLAGKDALELLAKAPDPESAARLTVTQITAALKRAGRRGDLAQRARDIQAALRAPHLDQPDVIAEAYAASVQAAAAVITALNEQVKIMEAKVSGLFRRHPDAGLHLSQPGIGDITGARILGEFGDAPGRYASAKARKNYAGTSPLTIQSGKKKTVHARYIRNRHLIDALHAQALSALSVSPGARAFYDDLRARETGHDDAMRRVASRLAGILHGCLKTGREYDEATAWSHRAETPEAAEAA

SEQ ID NO: 276949 - protein, 339 aa, unidentified
MEHDSIVGLDIAKSIFQVHRTDPSGQVVECRKLRRGALLKYFAALPASLVGLEACASAHHWGREIAALGHEVRLIAPIYVKPYVQRQKNDAADAAAICEAVSRPHMRFVPVKSVAQQAALMLHRCRELLIKQRTMTINALRAHLAELGIVSAKGRDGVAALIAHVEGNGDAGTGALDALAHVALCGLVAQLRGLQGEIGALDRRISAWHRANEGSRHLASIAGIGVLSASTLVATLGDGSAFASGRQLSAWLGLVPRQSSSGGHDRLGGITKQGDPYLRRLLVIGATSVLKRAQTAARAMPREQGQARIRGPRNCCGASPTVWPQWRSPTEPHASSGRC

SEQ ID NO: 276950 - protein, 357 aa, unidentified
MGKSIRNLSTVTRVGLDLAKRVFQVHAVDAKGEIVVARKLTRSQLIPFFAELPPCVVAMEACSSAHHWGRALIELGHEVRLIPPAHVKPYVRRNKSDQVDAAAIYEAMSRPGQRFVPVRSIDNQAELMRHRARELLAGQRTAALNALRGHLAEIGLIAPQGAHHAYGLKRMAADGFNENGEIVVPDCVRGALRSLVGQIDALDEAIGAIDRELAASVKADETAKRLMTIPGVGPVTASAIRATIQDASAFASGREFAAFLGLTPRQNSTGGKTRLGRITKMGDRYLRKLLVVGACATLRHRRGHSDALRLWASGMLERKTVKYKFNLTAVALANKVARIVFVLMTRGGQYDGRPVAA

SEQ ID NO: 276951 - protein, 417 aa, unidentified
MDHVSWYVGIDWGSESHAVCVIDAMGRRREERRVVHTADAVQACLDWIMTYTDVTPVQIAVAIETPRGALVDACLARSMLVFAVNPKQLDRFRDRHTVAGAKDDRRDAAVLADSLRTDPGAFQAVHQEDPVVVQLRELSHAEDDLDSEFRRLANQLRSQVHRVAPDLLALCPGADEPWFWALLETAPTPAAQRRLTRARVDHVLRAHRIRRWRGADVIARVQAPSFPHAPGVVEAAEAQIRLILPRLVVVHTQRLVCGRQLEQLLQQLRDRPREADERGEHRDIAILESLPGVGRKVAVTMLAEAAVPLAQRDYARLRAHVGTAPVTSASGKRRVVSMRRACSRRLRWAAYHWGRTSLQRDPASAAYYRTLRARGHRHGRALRSVVDRWLRILMAMLRQNTLYDASKFTVATAENGA

SEQ ID NO: 276952 - protein, 340 aa, unidentified
MNTTTFGLDIAKRAFQMYWVETETGEIVNRRFTKQQVIEFLGQRPAGRVALEACGSAHWWARKIVALGHEVVLLHARFIRPFVQNNKTDATDARAIWTAAQQPGMRSVAPKTADQQATLALHRMRSLLVKSRTMQVNQLRGLLYEFGVTLKAGRVAGLAEVRERLHEIEEVVPGTLFDALRDQLQHIERIDGEIRKLERQIVAWQRQEAACQRVATIPGIGPLTATALVATIGDPAAFKSARELAAYLGLVPRQSGTGGKVRLGGISKRGDSYIRMLLIHGARAVMFKSRSKGAWSEQLSLRRPTNVVAVALANKMARTAWSLLAHDKTYQTDYAAQRAS

SEQ ID NO: 276953 - protein, 347 aa, unidentified
MRFYTQQHAHYCGVDLHARTMYVCIIGQDGTVLVEKNIRARPGPFLELIAPYREDLVVAVECIFTWYWLADLCDEEGIPFVLGHALYMKAIHGGKAKNDRIDAGKIAVLLRGGMIPRAYVYPSQMRSTRDLLRRRLHLVRHRARLLAHVQNTNHQCNHDDFRKKLTYKANREGVPEQFDDPSTRKSVEIDLALIAHYDGIIRNLELFILRMAKQHGADMFHRLRSITGVGKILALTILYEVHDIARFETVQQFASYSRLVKCSRESAGKRMGTGGAKIGNVHLKWAFSEAAVLYLRANPEGQKYLARLTRKHGKGKALSILAHKLGRATYFVMTRSRNFDEKKFLAA

SEQ ID NO: 276954 - protein, 402 aa, unidentified
MNAVGIDVSKGKSMVAIMRPFGEVVATPFEIKHTTSDINSLVKFINSVEGESRIVMEHTGRYYEVLAHQLSQANIFVSAINPKLIKDFDNDSLRKVKSDRVDAIKIAQYALDKWQNLKQYSVMNELRNQLKTMNRQFGFYMKHKTAMKNNLIGILDQTYPGVNTYFDSPARSNGSQKWVDFASTYWHVDCVRKMSRNAFINHYQNWCKRKKYNFSQSKAEEIYGKAKELVPVLPKDEITKLIIKQAVDQLNSASTTVESLRTLMNETAFKLPEYPIVMAMKGVGPSLVPQLMAKIGDVSRFTHKGALTAFAGVDPGVNESGTYEQKSVPTSKRGSSDLRKTLFQVMDALIKTKPQDDPVYQFLDKKRAQGKPYYVYMTAGANKFLRIYYGRVKEYLSSLSES

SEQ ID NO: 276955 - protein, 449 aa, unidentified
MKKESRKKVKDTVDLPLIHPNAAGIDIGDTIHAVAVPEGRDKVCVKSFGTMTSDIKSIAAWLSECKIDTVAMESTGIYWKPLFNLLIKEGFEVSLVNAKHARNVSGRKNDEDDARWIQKLHSCGLLKSSYLPADEQESLRTLVRYRKTLTMDCNRFILRMQKALEMMNIKLHTVIRDITGKTGIAIIEAIIDGERIPENFLKYVDKNIRADRDTIVKSLEGNWRNEQLYLLQDCHCNYIHYKQRIDACDIAIENQLKQFYNESISPKTLPASHKPTKRPTKNKPKFNTGQYFRSILGVDVTAIFGISDISALEILSETGTDMSKWESSKHFVSWLNLCPNHKISGGKLISSMLMRKKPNPASQAFRNAANAVQRSDNWLGDYFRRMKAKGGNKYAMVATANKIATIYYKMVSQQVEFSPLELTAYQQKYRQAKIAFLERKLHDLKKEAA

SEQ ID NO: 276956 - protein, 417 aa, unidentified
MKLLFIGDDWAEGHHDVAAQDDAGKTLARRRLPEGADGIARFHEMVGSCLGEDAEPDPARVIVVIETDRGPWVKALAAAGYRVYPANPGQAARHKETVANPGKKDDFFDAGCLADMGRTRRHQMRELAAGSDVAEAVKIAARAHQKLVRERTRHLLRMRPALREYFPAALEAYADLTLAGKDALELLAKAPNPESAARLTVTQVTAALKRAGRRGDLAQRARDIQAALRAPHLAQPDVIAEAYAASVQAAAAVITALNEQVKIMEAKVSGLFRRHPDAGLYLSQPGIGDITGARIPGEFGDAPGRYATAKARKNYAGTSPLTIQSGKKKTVHARYIRNRHLIDALPAQALTALSVSPGARGSYDDLRARETGHDDAMRRVASRLAGILHGCLKTGREYDEATAWSHRAGNPEATKAA

SEQ ID NO: 276957 - protein, 399 aa, unidentified
MNAAGIDVSNGRSTVSVLRPFGEVVKLPFNVKHTPSELSKLADELLAIDGETRVVMEHTGRYYESIAKILHEKGLFVCAVNPLLIKEYGANSLRKVKTDKADSQKIARYALDNWADLRDYTPMDTVRYNLKTLHRQFHLSSKQKTAANNNLVALTEQVFPGIRKCFESPVRKDGTQKWVDFITTFWHADCVRKLSLKAFTERYRKWCKRNGYLFKLSNAEEVYELSKNVVALVPKDSVSKTIVQQAAKQLTAISGSVEAYRAEMNNLASQLPEYEVVMNMYGVGESTGPQLMAEIGDVTRFERKQSLVAFAGVDPVPKDSGDKTSRSNKASKRGSPYLRRTLFNIMSVILQNAPVDEPVYQFLDKKRAEGKPYYVYMTAGANKFLKRYYAKVVEHLNVL

SEQ ID NO: 276958 - protein, 341 aa, unidentified
MEQVTTIGLDLAKHVFQVHGADAAGHVLFRKRITRAKLLGFLAAQTRCVVAMEACAGAHYWAREIAKLGHHVRLIAPAYVKPFIKRQKNDAADAEAICEAAQRPSMRFVPVKTEEQQANGIVFRARDLLVRQRTQCVNALRGHLMEYGYVFPKGITHVEALVALVEDLQSSLPDSVRVILKLLVDTFTALEAQITVLDAEINQRSKSDPTARRLMTIPGVGPIASTAITALVPAAEGFPAGRDFAAWLGLTPLQKSTGGKQKLGAVSKRGERTIRRLLIIGASAVVQQASGRGAPKGSWLAQMLARKPKMLVTVALANKMARIIWALLVKGGTYRTPIAAA

SEQ ID NO: 276959 - protein, 343 aa, unidentified
MEGYAGKQFVGIDLHRRRTVLVRTTEGGEVLESVRIVNDVDRLASVMARAGECPEVVLEATYGWYWAVDALQAGGASVHLAHPLGVKAFEYRRVKNDFRDASDLADLLRMGRLPEAWIAPPPTRELRELVRHRAKLVGLRSHCKAEVHAVLAKCGVQVLMSDLFGVAGTQLLDGLDLPAPYAARIASLRRLMDDLDFEVDLFAGMIRGRMVREPGYTAVQIIPGSDPTLGAVFVAEIGDITRFASADKLTCWAGLTPKHHESDTHVHRGRITKQGSRLVRWAAIESVKAIPKDSPAGALRERVADRRGRNIGSVAAARRQLEFVFYALRDGHVRALEHHPRVA

SEQ ID NO: 276960 - protein, 375 aa, unidentified
MIKDSEVFVAFDTSKLRNAVAIAEAGRAGEVRFLGEIENTAAATTKLVRKLEAKYERITFCYEAGPTGYELQRHIRGLGHECIVAAPSLIPKKPGDRVKTNRRDAVSLVKLSRAGELTAVWVPDRRHEAMRDLTRAREAAVIDLRAKRQRISALLLRQGRPYPADKKTWTKVHMNWLASQRFEQPELGVVFAEMMFATRQAQERVERLEQAIRTAVPDWSLAEMVTAFMAFRGIDLVSATCLLAELGDLTRFPTAPEVMGYVGLGCSEGSTGDRIKRGGITKSGNRRARRTLVECAWSYQHPPRVGIAKQAKVAAAPTKVREIAWKAQCRLNRRYRVLLRRGKLKTVAITAVARELAGFLWAAARELSSPQRVAK

SEQ ID NO: 276961 - protein, 391 aa, unidentified
MIFVGIDVAKDKHDCFILNSEGTALADVFTIANNRIGFETLLSRIQSCSQGESKIKVGLEATGHYSYNLLGFLLDSGLATYVINPLHTNLYRKSLSLRRTKTDRIDARTIAMMLMSDVDLKSYSNTAYHNEELKSLTRYRFDKVKERAKLKSSVARLVNILFPELEKLVSSLHIAVVYALLSNYPGASYIANANTEELAETLCTASKGRYTKSKTAEIQVAAGVSIGSKMPAKSMELKHTIALIRELDKEISEVESAIDKITSQMDSPIFTIPGIGRHMGAMILAEVGDFSNFASADKLLAYAGLSPSTYQSGQLQNCYAHMEKRGSRYLRYALFNAAKYVCLWCPTFSAYLEKKRSEGKHYNVAISHAAKKLVRLIFAMQRSGKAFLADY

SEQ ID NO: 276962 - protein, 317 aa, unidentified
MSKEIIPQVFIGIDISKDHLDLCLMPGDQRLTFGNDTKGLDQLSERLSAEVSPVIVMEATGGYDVPIAAALLSKGLPAAILNPKRVRDFARAMGRLAKTDSIDAHVLARFAQEMKPEIRSLPNEKERFIKELVSRRLQLIDVRTAEKNRLHKAVSQQVKKSIQLVIDTVNQQIREIENQLDDEIRGNPVLHEKDQLLQSVPGVGPNTSRMLLAALPELRKLSGKQIASLVGVAPFNRDSGKMRGRRMVFGGRTSVRNLLYMAALVASRHNKIIREFYSRLRKSGKTGKVALVACIRKLIVILNAMLKKKQPFCELYA

SEQ ID NO: 276963 - protein, 387 aa, unidentified
MAKRTTICAGIDTGKRKLDVALNDSTERLQLDNSPDGYKALLDWLRRHRVKRIGIEASGGYEQPVVVELRRKRFVVVVFQPAQVRAYAKFHGRHAKNDKIDAVLIAACTAAVKKIHAAPDARLLPFAEHLTMIEQIGEDLAKLKNRLESCRDERIRKVWKEDIAQLAKRARGEFKALVKAIREHRDLAARLDLIYSVSGSGLPTAVAILIRMPEIGQLSREQAAALAGLAPYDDDSGDRVGVRHIDGGRKRLRRALYAAALPASFRWNRQLIALYQRLTAAGKGHKRALVACARKLLIFVNTVVARGTPWQDEPPAAMAASATADYDGFLVRPQNRFFVPTCRSDDVARRRRQGWPSPRFLLPAAIARPRLDSGEHGVIFTGDRVPL

SEQ ID NO: 276964 - protein, 353 aa, unidentified
MIVLGADMHKSSHTIAAVGATSGELLGDKTIAVGARGFVAALDWARGLEDERVWALEDCRHVSGAFERFLVVHGERVVRVATRLMAGERRGGRDRGKSDRIDAMAVGRAALREGVDRLPIAELAGVELDIRLLVDHRERLVRMRTALNNDLLWHLHDLWPEQTFPGCALLSKKWTTRIARRLGRAEQTARVRIARDELRHLRELSMTVDALEAEIADLVAEVAPQLLAEPGFGPLTAGKLIGEIAGAQRFSSDAKLARAGGIAPIPVSSGKTNRHRLDRGGNRQINTAIHRVAITRARCHPETKAYIERKRAEGKTNRDAIRCLKRHLARRTWHLLQPPPPDLTNSPNTNLLT

SEQ ID NO: 276965 - protein, 410 aa, unidentified
MPVFCGIDWAEDHHDVALVDEAGILLASQRITDDVDGCQHLLELLAQYGDDSEHPIPIAIETPRGLLVACLRAAGRPIYPINPLAVARYRERHSVARVKSDKADARLLANILRTDRAAHRCLPVDSERAQAIAVLARAHQDAIWGRQQLANRLRSLLREYYPAFLEAFQHVRPGGLTCSDARAILAAAPTPTRAATLTRSQLRAALVRGGRQRNVEAQVKRLQLIFRRGWLHQLPLVEDALGRQALALLKQLEAACQAADELAEAVAAQFSQHPDAAIIASFPGLGDLTGARLLAEIGDDRTRFLDARGLKAYAGAALVTRASGKSLLVLHRQVKNQRLAAVGYLWSFAALRASAGARAHYDQRRASGDRHAAAQRHLFNRFLGCLYHCLQTRQLYAEERAFPVSLDIAA

SEQ ID NO: 276966 - protein, 337 aa, unidentified
MKYSGIDLHSNNSVVVVSDEVDRVLVRRRVANDAAAILALLAAHRAELVGVVVESTYNWYWLVDALQEDGYRVHLANTSAIKRYEGLKHSGDEDDAAYLAQLLRLEILPSGYICPPAARAVRDLARKRMQLVRSRTAQVLSVENMLSRQTGAGMRSYAVQRLTAQAVASFGFHQDVERALCANVAVIQTLNREIDKLEQRLRQCVGLRPEFRLLTSVPGIGPTLATLIMLEVGTIERFAAVGNFASYARCVDSARISNGKKKGQGNVKNGNAYLAWAFVEAANFARRYCVEAQRFYERKKARTNGVVATKALAHKLARACYHMLKEQKPFDVKRCFA

SEQ ID NO: 276967 - protein, 423 aa, unidentified
MKSTSTQPFSAYVGIDWGDAKHDICLQAAGSDQREFACIAHQVPRIDEWAKALYQRFGGRIAVALELTKGPIVYALQKYDFFVLFPINPTTLAKYRVAFKPSRAKDDPTDAEMALDLLLHHPERFKPLHPQSIAMRTLLSLTEHRRELVNDKTRLTNRLTDNLKQYYPQALDWFEQRDTILFCDFVSRWPTLTQVKRARQASLKDFFYAHNGRRPQVINARLDSIKAACALTNDPGVITPCKLRTLALVEQLRVTLQAIDRYDREIADLASTLPDYALFQPLPGAGPHLTPRLLVAFGEDRDRFQSADEVQKYSGIAPVTERSGKKHWVHWRLQCPTFLRQTFIEWAGQTINKSFWAGAYYRQQREKGSSYQVAVRALAFKWIRILYQCWKTRTPYDEAKYLNALRKRGSPLLRNLSLNAENA

SEQ ID NO: 276968 - protein, 418 aa, unidentified
MQTELSQFTAIIGIDWADKKHDVCVQDMATGKRRAGQVRHRAEDLDEWARSLHRRFGGPIAIAVELSKGPIINVLQKYDFFVIFPIEPAGLASYRRTFTLSGAKDDPTDAEFALKLLLSHAEHFKPLQPQSVEMRTLMTLVEHRRQLMNDRVRITNRLRNALKQYYPQALEWFDHIDTPLFCDFIRRWPSLIQARRARGATLEKFFRAHNMNRKTLLERRIKAIKSAMPLTTDQAVVMPHRLRVQTLATQLEVTLECIKQYDTEIASLAPQHPDYELFDALPGAGPSLAPRLLVAFGEQRERFKSAAELQKYAGIAPVTKRSGQSTWIHWRWQCPTFLRQTFVEWAAQTINKSYWAGLYYYQQRAKGCSYQAAVRALAFKWIRILYRCWKTQTPYDEARYLKALQERGSSLLTMADAA

SEQ ID NO: 276969 - protein, 426 aa, unidentified
MCVLSAVAAGGASNTRKEGTYIMTKNERVVIGGVDTHKNVHVAAVIDEHGKILDTSQFATTSAGYRQLLAWLRSYGELAKVGIEGTGSYGAGLLRFLASEGVAVLEVNRPNRQMRRRRGKSDTVDAEAAARAAMNGDATIVPKSHDSIVESIRALRVAFTSARNSRTRVALQIRDLIVTAPAQLRAEIEPLSTPHRVARCARFRPGCPEDPREATKLALRVLARRYEALTEEMDELSGVLDELTYKANPALRSARGVGVDVAAILLVAAGDNPERLRNESAFAALCGVSPVQASSGLTTRHRLNRSGNRQANNALWRIAVVRITHDEETRAYAARRTAEGKTRREIIRCLKRHIAREIFAHLTRPQVVPVGTTLRAERNAAKISLTTASTELGTYPLRISRLERGLDHDREFAEQYQAWLAQKIAA

SEQ ID NO: 276970 - protein, 343 aa, unidentified
MQVITTIGLDIAKSVFQVHGVNAGGQVVMRRQLKRRYVLTFFQKLPPCLVGIEACASSHHWSRELQTLGHKVRLMPPAYVKPYVKRQKNDATDAEAICEAVSRPNMRFVETKTPEQQSCLVLHRTRHLFIRQQTAVINAIRAHLAEFGIIAPVGRNGVEQLLGVVADASDKRLPEVARACVAALGAQLQMLKAQILEFDRMIRAWHRSSEASRRLDDCPGIGPALATALVATVADPKVFRSGRNFSAWIGLVPKQHSSGGKDRLGSISKQGDRYLRGLFVAGALAVIRYAKIHGTKHRPWLTALLARRPTKVAAIALANKMARMAWAMMAKGERYKEPAALAA

SEQ ID NO: 276971 - protein, 294 aa, unidentified
MKQYVGLDVSMEETKVCVLDGAGVVFEGSVASRPAALAKLLNAKAPHAERIALETGSLSSWLWHELKAAGFPVVCLDGRHAKAALSMRINKTDRNDARGLAELIRMGWYREAKVKSMESRQIRALLAARSKLVDLRRDLENQMRGLLKSLGLIIGKSGVRVLPNRIAALLRDAPHLRSLIDPLMTAHSTLAEQIATYDLQVRELAKTDQTIGRLMTVPGVGPVTALAFASTVDDPRRFARATDVGAYLGLTARRYQSAIWIEMAASSNEAISSRAPICSRLPVCSSMWFAVRRR

SEQ ID NO: 276972 - protein, 340 aa, unidentified
MHVGLDLSRTRLDVHVMDEARAPLAVTTAVPDNGGLAALACRIAGFNEPVHAAIESMNGARFVHDQLEMAGWQVTIADAQKVKGLAPLACKTDKIDAWVLAELSRRDLVPAIWLPTPAVRAERERARWRLHLVRHRTALKNRIHATLLAFGHPCPVSDLFGVGGRQLLHRLELPEPWAADTVAAVHLIDQLDAEIAGCERALRKMGADHRYVPLLMTTPGIGWVLGYTIAAEIGDISRFASPTKLAGYTGLCPRVYRSGGKDHRGPLAKNGPKYLRWALIEAAVHAARHPVYAERYRRTKTRLGRQRGPKVAQVDLARRLAEAIWHMLSTNQPFAPAGAA

SEQ ID NO: 276973 - protein, 366 aa, unidentified
MGWMAPLRHRSAKLVFSKNHQEREPSMSEITTIGLDLAKHVFQVHGIDASGRTVLRKQLRRGQVLAFFSRVPRCLVGLEACATGHYWARELGALGHEVRLMPAQYVKAYIKRNKNDAADAEAICEAVSRPTMRFVPVKTAEQQAAQLLHRGREQLVRQRTMLVNALRAHLAEFGIIAAQGLRNVGELIATVRDDGDTRLPDMARSVLQVLASQIEQIEAAITALEKQLLAWHKSNPVSQRLASIPGIGPIIATAIATTVADPNVFRSGREFAAWLGLVPRQNSTGGKTRLGGITKRGNRYLRRLLITGASANLLRSKATNADPWVIGLRRRRPPLVVAVALANKTARIAWAVMLRQNRYQPRTAGA

SEQ ID NO: 276974 - protein, 390 aa, unidentified
MIYTGIDVSKDEHDCCIADSDGVVLSELFTIQNNRTGFDALFQKLTDCSKDLSIIKVGLESTGHFSDNLLEFLITKGLNTTIINPLHTSLYRKSQSLRKTKTDRVDARSIVKMLRTEDLKPHFPTSYHVRELKSLTRYRFSLVQRRAKLKTSYARLCVILFPELEKLVPNLHLTSIYALLFELPTARAIADCHLTRLTNLLSSASKGRYGKDKAIEIRDAAKASIGTYSDVKALELQQTIQLIRMMDTQIEQVEAKINPIVDALESPIMTIPGISYRMAAIIIAETENLTHFGSAEQMLAFAGLEPSVYQSGQLTSTHAKMVKRGSKYLRYALFNAAKYVCHWDTTFRAYLAKKRSEGKAYNVAVSHAAKKLTRVIFHLVKTNQPFVSQA

SEQ ID NO: 276975 - protein, 396 aa, unidentified
MKSNTQNAKIEAITEKTLVLGIDVGSETHYARAFDYRGIEYSKKPFKFSNTEIGFVTFTEWILDIKEKHGKDKVVLGLELTGHYWFNPGGIQDNEMKPVLVNPHHVKKSKELDDNNPTKNDRKDPKVIAGLVREGRYMIPYLPDGVYADLRTVSNIRFQLQAELTRIQNRISRWFNIYFPEYKTVYGKPDAKSGMLILKAAPLPEDILTLGIDGVNQIWRDAKLRAVGKARAKTLIEAAEHSVGSKEGAVAARMEIRMLLEDYESRNIRLQEVMTLIEGLIKQIPMAEKLLEIKGVGIRTVSGFLAEVGDISRFNNPKELQKLAGLALVENSSGKHKGETTISRRGRKRLRYLLFEVAMSLVAKNPEFRELHNYYTTRRLNQLKKMQSLNQAECNR

SEQ ID NO: 276976 - protein, 391 aa, unidentified
MSKRNDLSRSLVPLNPDTTLIAVIEMSQSSWLVAGIVPGIERQPLKKLDVDKDALLKLLHRWRDEAVRAGRDITRIAVAYEAGRDGFWLARWLRAQDIEAHVIHASSVAVSREHRRAKTDRLDTELLKRSFLGWLRGERDHCNVVAIPTLEQEDAKRPNRERESLVAEHSRIVNRMKSVFALLGIRGFNPKLKSAADRLQSLRTPEGEPIPPHAIAALKRDMERRQLIRDQIRQIEQTRLESLQLTPKTGPHAMVCLLASVVGLGVGTADMLVHEVFARNMRDRRAVARYSGLTGSPDESGAKRREKGLSRSGNARVRRGMVELAWRFLRFQKDSALAQWFRTRTEHAHNTRKTMIVAMARKLIIALWHFAKEGVVPDGVVLRSPNLRPAR

SEQ ID NO: 276977 - protein, 344 aa, unidentified
MDHYAGIDVSLECSSVCVVDASGKIIREAKVASEPEALIGWFGTLGLGLARIGLEAGTLSQWLYAAMKQAGLAVELLETRHVYEAFKSMPVKSDRNDARKIAQLMRLGWFRPVHCKSITAQEIRAMLTARKLVQSKLLDVENSLRGILRGFGLKVGKTTRTNFTGRIEELVRRHPNLQTIAAALLRARAVLLAEFNGFETRVRALSRLHDQARLLMSTPAVGPIVSLTFACAIDDPCRFTSSKQAGPHFGLTPKKYQSGETDYTGRISRHGDASVREALYEAAHIMLTKPIKGCSELKSWAMRIARRAGTNKAKVALARKLAVIMLRMLKNNAPFNPAARATMA

SEQ ID NO: 276978 - protein, 437 aa, unidentified
MRRVIGMDIHRTFGEVVIWENGVTRHEGRVDMTCTALEGFGRQLKKTDEVVIEATGNCMAVSRVLSPHVKRVVIANPLQVKAIAHAHVKTDKVDASTLASLYAAGYLPEIWTPDAATERMRRLATRRYQVVRHRTRTKNEVHAILYAHLIPKCPHSDLFNKRGRDWLARQPLPEDEQAAIARHIRELDRLGEDLAQLDCDIAQDALENAAIRRLMTITGVNLAVAAGLMAAIGSIERFKSPQKLVSYFGLNPRVRQSGLGAAHHGRISKAGRSHARAMLVEAAWAAAKAPGPLRAFFIRIRARRGHQIAAVAVARKLATLCWHMLTKSEDYRWARPSLVTHKCRAMELAAGLPQKKGNRRGPSYAYNVKELRHQEARVAEHAEKSYEQFVASWRMHPPRKGGGCAIASNRQELDGLPGDVSSRHATLRREVDRTMKK

SEQ ID NO: 276979 - protein, 366 aa, unidentified
MKKNSTVTTKRNKIFKQPKLTIGLDLGDRSSHYCILDEAGKVILEHNLPTTPKGIHQVFSRIPRSRIALETGTHSPWVSRQFSQMGHEVIVAHARNVRLIGESSRKDDRLDARTLARLARIDPGLLGPVRHRSAKAQIHLTVIRARAALVSTRTALVNAARGLTKSYGERLRKCGTGQMNREIAQGLSQELREALDPLLREIESLNERIAEYDRRIEQIATEVHPEVARLKQVKGVGTLIALTYVLTLDDPHRFRRSRDAGCFLGLRPGRRNSGQSEPQLHISKEGDRYLRTLMVQGAHYILGPFGQDSDLRRWGLKLAERGGNNAKKRAVVAVARKLAVLLHKLWVSGEVYEPLRNNHKVVSAVA

SEQ ID NO: 276980 - protein, 499 aa, unidentified
MFAHARRWRWADRALPTESMRLCGQLSWASISLADRWDESAGTAAGVDSTAASGESEQSSAVSAPVTPLASRDRVDVPTAKRRAGRRSEVEVANLPPRGIPTDSPTRSTGALEPGPKERSAMRKIALDLGSRKTAYCEVREGQVVGRGTVADVQSLESLLGPEQPEAVVAIEACREAWYVYDLLTSWGNQVVLVDTTRSRRLGIGQHGRKTDRIDAEVLALGLDRGGIPVAHLLSPHRRELRRRLGVRRALVESRAQLVTTARGLAREQGVRLPSCAVPHFVRNVRKLSLDPELSTVLEPLLKLLDGINIELEGVEEVLAKLCVTEPIISLLATAPGVGPVVAASFVSVLDEAKRFSSAHHVESYLGLVPSEDSSGGRRRLGAISKKGNKYVRALLVQSAWSILRSTDRQDPLRLWAEAVAARRGKPVAVVALARRLVGVLWAMWRKGTAYEPARLAVAASRGLASSAQTLQFRADALKKAGKKESMKRLTTQEVTAST

SEQ ID NO: 276981 - protein, 412 aa, unidentified
MEVMYPRCCGLDVHKSSISACVLLAQSGKPLKHIRRFGCTTRELRELVVWLQEFDVEHVAMESTGVYWKPVWNVLESHFQIVLANAQPIKAVPGRKTDTKDCQWIAELLQHGLLRGSFIPRLVIRDLRDLTRARTSLSQEHSRIASRIQKVLEDANLKLASVASNTLGKSGRAILAAIIGGEESPERLADLALGHLRVKIPQLQAALAGRVREHHRFLLRSLLRQLQFLEAEIASLDARLDQLGQEQGELADALNRWITVPGVDRVAAWSFIAEMGADVSQFPTAAHLASWAGVCPGNNESAGKRISSKIRKGSPWLRRMACQCAWAAARTKNTYLSAQFKRLAARRGRKCAIIAVAHSILVIGYHLQRRSCSYTDLGSNYFDRLHADGLKRYLVKRLESLGLSVTLQPRTA

SEQ ID NO: 276982 - protein, 385 aa, unidentified
MSAHPIQAEAAAQLQANTLFASLELSKARWLVTVSAPGSDKLSRHDVPGGDGQALLELLWRLQAAAAQRTGASVTIVVIQEAGLDGFWIHRLLVQNGITSHVVDPASIAVNRRHRRAKTDRIDGVKLLRTLMAWMRGERQVCTMVQPPSPEDEDRRRLARERARLLKERVQHTNRIKGLLSGQGIPDYDPLHRDRRGRLAALTTGDGRPLPKRLETEIGRELDRLELVASQLATVERERDALMAQTAEADARAAPAALIRLRGIGPELAALLWLEALFRRFENRRQIAAYAGLTPSPWKSGGIDREQGIAKSGNPRLRRAMIELAWFWVRHQPGSALSRWFVERVGAARGRVRRIAIVALARKLLVALWRYVTQGVVPDGAVLKG

SEQ ID NO: 276983 - protein, 334 aa, unidentified
MHYSFFIGIDISKKTLDFGVRNQKGLLFHIKVDNSLAGLKQFQKECLNRNVDLTQSLICCEHTGVYSQHILSLATENKFSLWLESSLRIKRSLGLQRGKSDKIDAIRISEYAFRYADQATVWQPERQTISKLRQLVSLRKRLLNAKNALKVPVNEVAAFQDKKLQKEMEKLNRKPIEALEKQITEVEKKIKELIKEDDALKHLFDLVTSVDGVGEVVFCEMVIATNEFKLFSCPRKFACYSGVVPFEHTSGTSIRGGTRVSHLANKQMKKLLHMAALSVVSGKGEMADYYHRKVEQGKNKMLVLNAVRNKIIHRVFACMRDNRKYEKIYTPTLA

SEQ ID NO: 276984 - protein, 429 aa, unidentified
MKSLNDSLSLFRVMRASVRGSEKYLLVGIDVAKCKHHAFFGTPNGRTLRKNLVFDNSTKSFESLRSLARDLQNQHGLVEVVYGVEPTASYHKPLAEYLIRQGDQVVYVSNVAVKNNRALLDGRWDKNDKKDAANVADLVGQGRCLYYDVPEESLRELRSLIAYRSKLKKQEHALRMRLRNNLFAQYFPELDRLFVKTGQPDDMVLSIAEHCLDPREIARMEFDDFLKLITTRKIRIEQEKRLRELWEGAKNSAGCLVHDAARWEAKSLVSQLKTLREIVKDNELRMKTAAQQYPEYQSLLSIPGFGPIVSAMVLGAIGDPYRFENQRQVLRLAGLDLSASRSGKNSDSAKPVISKQGKAALRYALVQAAMVSSSSNPTVRSYFSGLLQGRELERGIKLKMKVKLAAKLLVIAWTLMKSREQFKPSCFSG

SEQ ID NO: 276985 - protein, 340 aa, unidentified
MDEYDGRQYVGIDLHRRRSVIVRMTPDGRRIGPPVRIDNDPFNLAQQVASWGESPEVVLEATYGWYWAADVLVDAGATVHLAHPLGVKGFTYRRVKNDERDAADLADLLRMGRLPEAWIAPPQIRGLREAIRHRSKLVALRSGLKAQVHAVLAKQGVRVAVSDLFGVGGQKLLDDLQLDTPYNARVGSLRRLIDAFTFEIDILTKRTSAELKTHPGFQAIQAIRGVGPVLAAIFVAEIGDVTRFNRPEQLCSWAGMTPKHYESDTKVHRGRITKQGSTLVRWAAVEAVQTLREGPLGHARVRIGERRGANIGKVAAARKLLTLVFYGLRDGHIRCLTRAA

SEQ ID NO: 276986 - protein, 382 aa, unidentified
MIAVEARVHPLVASRSLSGLLIPNENGDAPMSYDYHIGVDYHKAYTYLLVQDRGGQVLRSGKVKNDPGSLAGFLTPYLENSHAVMEASRNWTVMYDWLDELCDDVVLAPPLKVKAIADAKIKTDKIDATILAHLLRADLIPESYVPREAARALRQALRERIFFVRLRTMVKNRVVTIFDRYPEQTRALREMTDLFGKIGRGQLELLSVSTIDREHIDRAIAFIDDINQRIHASEKTIRRFSADNADVKRLKTIPGVGEFFARLIAAEIDDVTRFRSAKKLAAYAGLVPSTYASGGKCWNGRLIKTGNKWLRWAFVEAAVPAMRAEPALKFDYEHLKVTKGTNRAKVVIARKLLTIAYQVLRDQRDYECRDALERRSNLSRLS

SEQ ID NO: 276987 - protein, 339 aa, unidentified
MNIIYLGIDLAKNVFQLCGLNQAGKPVYKKRTDRKTLLQTVANIPACLIGVEASTGAFYWQREFEKLGHRVKVISPQYVKPFVRGQKNDSNDAQAIAIALMQPTMQFVPPKSPEQQDIQALHRARQRIVNHRTATVCQIRGLLLDRGITIGSAVSRVRRAVPLILEDAENGLSVRMRRTIAELYDLFNDLGRRISFFDKEIDAVFRQSEACQRIAKVKGIGPKTATAVVAAIGKGTEFKNGRHFAAWLGLVPRQHSSGDKQVLMNMTKKGDKHLRTLFIHGARAVVRVAANNNEGYLNQWVNQLKERRGFNKTTVAVANKNARIIWSILHNETEYRPAV

SEQ ID NO: 276988 - protein, 406 aa, unidentified
MEHQNYVFVGVDTHKNQHTACVLSCFHQKMGSTQTPNNPANFESFIQDINSIKTPDKKLAFGLEDTQGLGHSLSQWLLDQGYTVKEVNPALTKRERHHSSNPDKSDEIDAEAIANVLLTDFNELPDAFYDANFKAIKHVNNQRQTMVKEKTKIKNRLHNLIHQQYSEYQKFFTNPFCKTALAFFEEFPHPANLKYYGEDRLNKFLKNQVKSIRNDKADKILSLVNKDKKKAADAKARITIIKRLIKQLKLLSESLSEINQKLRKTVEKSQYQLTTMPGINFKLAAMFISSIKNIDRFDSASKLARYAGLAPVEHSSGNSKRLSHKKYGCRDLNHAFYILAFQQIGNNKNPISYSYYKKKLKEGKSKKIALICLQRRLVDIIYAMMRDRSAYRLPENIDYKVLDKAG

SEQ ID NO: 276989 - protein, 391 aa, unidentified
MDRAWAGIDAGKEMHWVHVLDVSGEKLLSRKVKNDEADLSALIDEVLSLAEEVVWAIDQPGGGATLLLGLLWQREQRVLYVPGLTVDRSRDTYPGESKTDARDAHVIADQARMRPGLQELTAGQEELAELEILLSRRRDLVTDQSRCVTRLRETLLSAFPALERALDLNRRGALTFISHYQRPAQIRRAGRKRLAAYLRNRSVQGAEDIADKALEAATAQSVTLPAEEVAARIVAELAEEILSLKDRIDTLDEELEQRFFALPEARVLASLPGMGPILGAEFLVAVGVLSAFASADQLAAYAGLVPAAHDSGKRVGNHRRMRGGNKVLKRVFYQSAFASLRSAPESRAFYDRKRREGKKHTQALIALARRRVNVLWAMLRDGTTFEDRSAA

SEQ ID NO: 276990 - protein, 337 aa, unidentified
MIVIGVDVHKHSLTAVAVDELGRALAERSGPVEGTVVAWARSLGADRLWAVEDCRHVTRGLEQTLLEAGERQVRVPPRLTAPQRRRGRVRGKSDRIDALAVARAFLQEPLLDGPRAGEETLRELKLLVDHRDDLVAERRRCQQRLRWHLHELDPTLAVPLGALDRAVWLDRLGRQFARREQTTQVRIARDLVGRCRTLTRSIGELDRELHARTAALAPRLLQLPGCGPLSAAKLLCEIGPIDRFPTDAQLARHAGVAPLDASSGKHQRHRLDRGGNRQLNCALHRIAVTQGRVHAPARAYLERKQSEGKTRREAIRCLKRQLARTVYTTLKNEPLLT

SEQ ID NO: 276991 - protein, 335 aa, unidentified
MKELKSCVGIDVSKDSFEVCIKQLKDERSVIKATRSFQNDYPGFEKLLSWVLSKVSTPIFVMETTGVYHEDLTHFLYSNDQKVSVVLANKMKHFAKSLNMKTKTDKADAQMIAQYGLERPVEWWKPMMPQMKNLRDLCRERLSLKKDLVRGKCQIHGLKHAHSTLDVVLQLKEQQIEFLEKNIQIIENEIIRLTNEDKEFSQRVKNIETIKGLRLLTIVTVLCETNGFTQFNNIRQVVSYAGLDIAERQSGLFKGKTRISKKGNARIRECLYMPALSATSYNKPIKALYERVVERNPTIKRKGVIAGMRKLLILIFVLWKKNETYNAEYRWSALG

SEQ ID NO: 276992 - protein, 345 aa, unidentified
MQPMYYIGLDVHKQKISYCVKDSGGKLFAEGWIPATRHDLDCWMKNLPQPWSAAMEATMFTGWIYDHLKPHATELKVAHPLMLRAIAAAKKKNDRIDASKICDCLRCDFLPESYMAPTAIRERRRTLRYRNLLVRQMVQMKIKTSTLLMEAGVSYNKQKLHKAGYFRELLASNPDIDEGLRSLLRQCREMVVRLGRMEAALIHSLQQDHLLAERVERLLSIPAIGPITALTWALEVGEVQRFSSIKKAVSYCGLCGDQHSSADRVQRTPLSKQRNKHLQTTLIEAAKMAPRYSPTLALLYDKEKQKGNANRATLAVARKLVAYLMAVDRGQTHFLVLDRETCAAA

SEQ ID NO: 276993 - protein, 354 aa, unidentified
MSEKLNTAIAVIGIDIGKNSFHVVGHDQRGAIVLHQKWSRGQVAARFANMPPCLIGMEACVGAHHLSRKLKALGHDARLMPAKYVRPYSKGQKNDFRDAEAIAEAVQRPTMKFVATKTADQLDLQALHRVRERFVSQRTGIINQIRAFLLERGIAVRQGQRFLRAELPRILATPSDVLSPRMVHLIENLAGDWRRLDERIESLSSEIEAIARQDAGCERLMSVPGIGPIISSAMVAAIGSGEVFTKGRDFAAWLGLVPRQMSTGGRTILGRISKRGNRYLRVLFVQAAWVVLIKPKSWERHGLKSWIEAAKKRLHPNVLAIALANKLARIAWGVLAHGRDFEARTNTNGTAQAA

SEQ ID NO: 276994 - protein, 337 aa, unidentified
MERQYVGIDLHRRTSTIYRMSEDGEVLGCVRIPSQPFELAQAIAEAGEAPEVVLESTYGWYWAADLLKELGANVHLAHPLGNNWGNRRVKNDERDAKDLAAMLRLGRLAEGWIAPPEIRELRELVRYRYHLVSHRSSCKTQIHGVMAKNGILPARKEMWGEGGYAQLDSLELPYAYAARIDSLRDLIEIYDREIAVFDQYIHRQLKDDPGYRAIQKINGVGRVIGAIFVAEIGDISRFNSPKKLCSWAGLTPKHRESDEKVTRGRITKQGCPLVRWAAIEAVSKYRGGEKLRADYFRIREHAGKFKARVAVARKLLTLVYYGLRDGEIRSLEAQEAA

SEQ ID NO: 276995 - protein, 355 aa, unidentified
MKTNIPSITIGLDLGDKKHALCVLNQDGEIIDERMMTNHRESLRRLSLKYPSSRIAMEVGSHSPWISRFLKGLGHEVFVANPRKLRAIYASDRKSDKNDARMLAKIARIDPELLYPIEHGAEQSQRDLLQIKLRDNLVRQRVDIISSVRFTLKSLGIALPSPNSACFVKRCRTLLSGAHEDLLVMIEPSLHVIDMMTQKIRELDKAIENLCEEKYPATKRIRQITGVGSITALSFVLTIEDPERFERPRDVAAYLGLVPRRDQSGGLDKQLRISKAGDAYLRRLLVGCAQYILGPFGPDTDLKRHGLMLATRGGGRSKRKAVVAIARKLSVLMLTLWKYEKDYEPLRNETEAQAA

SEQ ID NO: 276996 - protein, 373 aa, unidentified
MPKYSTAFGMDVHLRSATVCALDADTGEAVTRRFPGNPWGEIAGWMDGFPGPSLAAYESGYLGFAPQRELAGLGVECVVAAVSKIPRSAADSASKNDRNDAARMAKAILAHDISPVWVPSPEVEGIRDLAGAYDGATARLATAKQRLLAFLAKRGFVYGGTTPAGNPRKYWTYDFLRWLDKVRPEDDGGVRTLAALRNEVEAAAEARADLLSEYRAAADASPIAAEVAALQSIKGCAFALAAAFSAEVGDFTRFRSGRQVTAYFGLAPSQRSSGDSVRLGGISGAGNALVRKLAVEGSWCYAAARHQPKLMPRDTGVPLEIRMHGRKGSERLLRRREEMLARGVPAAKANAATAAELVRWLWALGMMCREGAE

SEQ ID NO: 276997 - protein, 348 aa, unidentified
MAHFVGLDVSVKETSVCVVDDAGKGILEQKVLTEPDAIIALLTSLGATYGRIGIEAGPLSQWLVNALTAADLPVICVETRHMKALLTAQQINKTDRNDARGIAQMMRVGLFKPVHVKTLVAQEQRMLLTSRKLLQRKLLDVESDLRGTLRNFGLKVGVVSGGRYDARVRELVAGFPRLAAIVEPVLSVRRVMRQQLAVLHKMLLDTVRGDLVCRRLMTAPGVGAVVALTYRATVDQPQRFLHSRAVGAHVGLTPKRYQSGETDYEGGVSKCGDALLRTMLYEAAHVLLTRGAKWSWLKAWGVRVAQRRGMRRAIVAVARRLAVVLHRMWVDGSEFRWSKDSTPVPAVA

SEQ ID NO: 276998 - protein, 353 aa, unidentified
MPKTASTQIAVIGIDIGKNSFHVVGQDKRGAIVLRQKWSRGQIEARLANLPPCLIGMEACVGAHHLSRRLKALGHDARLMPAKYVRPYAKGQKNDFNDAEAIAEAVQRPTMKFVATKTADQLDLQALHRVRERLVSQRTGIINQIRAFMLERGIAVRQGIRFLRTELPIILASRTDVLSPRMLRVIEDLAGDWRRLDERIENLSREIETIARQDAGCDRLMSVPGIGPIISSAVVAAIGSGDVFSKGRDFAAWLGLVPKQISTGDRTILGKISKRGNRYLRVLFVQAAWVVLVKPQSWEPHGLKSWIEAAKKRLHHNVLAIALANKLARIAWAVLAKGRDFEVTRKETSPQPT

SEQ ID NO: 276999 - protein, 343 aa, unidentified
MQAITTVGLDIAKSVFQVHGIDAGGQVVIRRQLKRRYVLTFFQKLPPCLVGIEACASSHHWSRELQALGHTVRLMPPAYVKPYVKRQKNDATDAEAICEAVSRPNMRFVATKTPEQQSCLMLHRTRHLFIRQQTAVINAIRAHLAELGIVAPVGRQGVEQLLGIVADPNDKRVPEVARVCIAALGAQLRVLKAQIMEFDRMIIAWHRSNETSKRLDEIPGVGPALATALVASIADPKAFRSGRDFSAWIGLVPKQHSSGGREKLGGISKQGDRYLRSLFTAGALAVIRYAKIHGTKHRPWLTALLARRPTKVAAIALANKIARMAWAMMARGERYKEPVALAA

SEQ ID NO: 277000 - protein, 311 aa, unidentified
MEHSLFVGIDVAKERLDVHLRPTGETFSIGHDEAGLVALTERLVPCAPAIVVLEATGGYEVTVAAALASARLPIAVVNPRQIRDFARATGQLAKTDALDARVIALFAEAVRPVARPLPDAQAQVLGEFVARRRQLVDMLGAETNRRRLVRDPQLQRRIATHIRWLERALRDLETDLHDTIRSSPVWREAEDLLRSVPGIGPVTAFTLIADLPELGRLSRRKIAALVGVAPFNRDSGTLRGRRMVTGGRAPVRRVLYMATITAIRRNPAITVFYQRLRAAGRPAKVALTAAMRKLLTILNAILRDHRSWQRA

SEQ ID NO: 277001 - protein, 356 aa, unidentified
MSRDIKYIGMDVHQEATVIAVLNGSGKLVMETILETQASSILQFLHGLRGELHVTWEEGTWAAWLYDLLQPQVEQVLVCNPRRNALLKEGNKSDKVDARKLAELLRTGMLRPVYHGENGLRTLRELGRSYQTIGQDLTRVMNRLKALYRGWGIPCAGTQVYAARYREEWLNKIAQAGVRRRAELLYQQLDGLQALRRNLRPEFLAESRKHKAAKLLRQIPCIGPIRAARLIALMQTPHRFRSKRQLWTYSGLGIETHDSAQFRFVGGQLQRSKKPQQLRGLNRNHNHEMKEIFKSTATRASCGRGPFHDFYAALLAKGMKPEMARLTLARKIAAITLTLWKKGERFDAEQLKTQVA

SEQ ID NO: 277002 - protein, 344 aa, unidentified
MDYYVGLDVSLRTVAVCVIDTDGKHVFERTVECEIDDIVRCLEELPASRLRVGFESGAMSQHLYFGLRAAGFDVVCMEARQVNAALSAMRNKTDRTDARGIAQVLRSGWFSEVFIKSREAHALRALLSSRKAIQKKCIDLANEVRGLFRVFGLRLPSRVDQGSFDERVRPLVEADPDLSHALLPLLDARVVLYKTYRELDRRVKQAASHDEICLRFMAIPGVGPIAALTFRAAVDDPARFTSSRTVAAHFGLTPRRYQSGEMDNPGRISKAGDRDVRATLYAAANAMMMRSVASSEIKSWGLRLMRRKGRRRAVVAVARKLAVIMHRMWADNTEFRHGKVEGAV

SEQ ID NO: 277003 - protein, 433 aa, unidentified
MGNCAGIDWASEKHDVLIEDPAGRELLATTFGHSEDGISALCAALECFEVQVVAIERPDGLLVDRLLHAGARVLALHPNQVKAARDRFRASGGKSDRFDCFVLCELARTDSHRFRILEPDSDQTKALRALTRAREDLVAARVAMANQLRAELERFWPGPIGLFNDLDSPISLAFLQRYPSPDDARLLGEKRLAAFLKTRNYNNRKTPAQLLERIRRAPAGRAGEVETATRRQIVLALVSTLQMIVSQIADLATQITRALDAHPDGEIFRSFFRSRNSVICAATLLAEIGDCRARYPHRDAIASDAGQAPVAVESGKRKSAKFRWACNHRLRNALAVLAHSSRMWNPWAADRYHHARARGHNHRRALRTLGRAISRIIWQCWRTHTPYDPKRHTALQQHITVTIPSTSGPRPDPQATQRMAGPNLIPSPNHAPV

SEQ ID NO: 277004 - protein, 387 aa, unidentified
MSQTVAAPIPAAVDHERTLVLAIEVSNKSWVIAAQVPGLPHTKAKRTIDPEAEALLAAIAAYRARAAATGRSIERVIAVYEAGWSGFWLARWLMRHGVEVYVVQPSSVPVDRRIRRAKSDGIDSELLLRTLLAWLRGEPRVCSMVPVPDEADEDARRCVRERSELISERIGLTNRIGAILATLGVSDYNPLLRNRGRRLAELRTALGEPLPANAHAKIKRLLARLELVLTQIAELERERDAVVETEASDGASKMIQQLTALRGIGVQSATVLVREAFVRRFANGKALGSYAGLASSPYSSGGIDREQGIGKAGNRRVRTVMVELAWLWTRYQPGAAQVCWFRERVASTGRRVRKIMVVALARKLLIALWRFVIDGVLPEGAVLKPAA

SEQ ID NO: 277005 - protein, 338 aa, unidentified
MKITTIGLDIAKSVFHLVGVDKAGKLIKKKMLRRKDLLPFIAQIEPCLIVMEACGGANYWAREFELLSHNVKLIAPQFVVPFRQGNKNDYNDALAIAEAAQRPNMRFVKPKGVAQQDVQLLHRMRERLNKQSTALINQVRGMLAEYGIVMTKSKSAFKVQFPDILADETNALTTKGRAIFYQLYEEFSDIEKRLKSCDAQVLTETKNNVICQRFETIPGIGPVTATAFYAAAGDGKDFSNGRHFSAWCGLVPKQHSSGGKDNLLGISKRGNAYLRTLFIHGARAVLQHSCHKQDKFSCWAIQLAERRGFNRACVAVANKLARMAWVIAAHEEEYRLPV

SEQ ID NO: 277006 - protein, 375 aa, unidentified
MKATRLNPEEIERIAAIQNSKGMLPVGVDVASRVFQACWLDPATGRLANRQLTRDKFLDFVRDQSQGPRLFGIEACGACAFTARLMESCGHQCRIMPAFRIKAFLGLDKTDRIDAAGILKALISPSIPSVVPRSRDGQALMALINVRLMLVKLQVQAVNAAHAAIYEMGGLAGYSSVQSPRRVLDALGEAGASLPAGSPAASHFGCLSSSLSSSIEEEAGLIRAVDKHLEQFGEGDEACRLMATIPGMGMRTAVLLRAAMDDPSRFSSARSFAAFIGVAPRVSGTGGRTSVLGVRRSGVPAAKRALYMCAMSYLAHAMKYGTQSSWLKQRLDAGACRKKLVCALMNRLCRIAFAVARTGKPFDKDKSNLIKPLRR

SEQ ID NO: 277007 - protein, 354 aa, unidentified
MAEALKNSIAFVGIDIGKNSFHVVGLDGRGAIVLRQKWSRGQVEARFANMPPCLIGMEACVGAHHLSRGLQKLGHDARLMPARYVRPYSKGQKNDFRDAEAIAEAVQRPTMKFVATKTADQLDLQAMHRVRERLVSQRTGIINQIRAFLLERGVAVRQGLRFLRNELPSILAAPSDALSPRMVRMIEDLTGDWRRLDERVEGLSKEIEAIARRDAGCERLISVPGIGPIISSAMVAAIGTGDVFSKGRDFAAWLGLVPKQISTGDRTILGKISKRGNRYLRVLFVQAAWVVLIKPKSWERHGLKSWIEAAKKRLHRNVLAIALANKLARIAWSVLAHGRSFEASKFSEAAAQSA

SEQ ID NO: 277008 - protein, 359 aa, unidentified
MNRKMQQFIAKGKDIFIGLEDSKKTWKLCVRSEKMVIHETSMPAEYNVLLSYLKNKFPDCKITVMYEAGFKGFNLYDRLVENKHECVVLPPHLMVEPKVNRVKTDKRDARKLAKMLENGDYRSCYVPDKERREDRQICRTLNGIEKEIKSFRNRIRKLLQYHGIEAGVPVKQFWNKGDFKGLSKLELGSSLKISLAALLKELDGVWETQLALRGEMRKLSKKPRYEKAFKIARSLPGVGWLTAIRFVLELGEDFTRFTTSKSIANFLGLTGSEDSTGETVHKGRITKMGNNFLRAWLIESAWVGIRKDPVLLDIFKRVQLNSGSKKKAIVAVARKLAIRLRSCMVNGVEYEVGLVEVVR

SEQ ID NO: 277009 - protein, 402 aa, unidentified
MNAVGIDVSKGKSMVAIMRPFGEIVSAPFEIKHTASDINSLVELINSVEGESRIVMEHTGRYYEALAHQLSEANLFVSAINPKLIKDFDNDSLRKVKSDKADAIKIARYALDKWQNLKQYNVMDELRNQLKTMNRQFGFYMKHKTAMKNNLIGILDQTYPGVNTYFDSPARSDGSQKWVDFASTYWHVDCVRKMSLNAFVDHYQNWCKRKKYNFSKSKAEEIYGKAKELVPVLPKDEITKLIIKQAIDQLNSSSTTVESLRTLMNETATKLPEYPIVMAMKGVGPSLGPQLMAEIGDVSRFTHKGAITAFAGVDPGVNESGSYEQKSVPTSKRGSSDLRKTLFQVMDVLIKTHPQDDPVYQFLDKKRAQGKPYYVYMTAGANKFLRIYYGRVKEYLSSLPES

SEQ ID NO: 277010 - protein, 347 aa, unidentified
MRFYNQAHEYYCGIDLHVKTMYLCILDKAGRVLVHRNVPSTPAAFLEAVAPYRAGVVVAVECMFTWYWLADLCTAERIPFVLGHALAMKAIHGGKAKNDKLDSHKIAMLLRGGMLPQAYVYPAEMRSTRDLLRRRLHLVRKRGQLLAHIQNTRAQYNLPVFEKRLAYPGNREGVVDHFPDPSVRKSIEVDVALIDQYDSLITDLELTIVREAKRHDADAFHRLRSVPGIGKILALTILYEIHDITRFDRVQQFASYARLVKCRHESAGKIVGGGGAKIGNVHLKWAFSEAAVTFLRQNRQGQQLRARLEKRHGKGKSLSVLAHKIGRAVYYMLARETVFSMEKFLAA

SEQ ID NO: 277011 - protein, 344 aa, unidentified
MTYYAALDVSLRTVNLCVIDEEGVLVAETKLDSEVIDIVAYLDGLELEITSVGLEAGTLCQYLTYGLQFAGFEVVCMEARQVKAALSAMRNKTDKNDARGIAQLLRSGWYSKVHVKSMESHRIRALLSSRKAVLCKCIDLENEIRGLFKVFGIKLPAKLGHGAFDAAVRHIIETDATLSHALLPLLDARLVLYHCFRELDNRTRKLAHSDPVCQRLMSAPGVGFITALTYKAGVDDPTRFKRSRTVAAHFGLTPRRFQSGEIDIDGHISRCGDRGVRCTLYTAANALMTRSSKWSSLKVWGLQLAKTRGHRRAVIAVARKLAVILHRMWIDDTQFQWGSEGARS

SEQ ID NO: 277012 - protein, 367 aa, unidentified
MKKGSTTAKQQSRNFSQRQVTIGLDLGDRNSCYCALDEAGQIQLEQRVRTTAKALCEVFGAMPRSRIALETGTHSPWISRLLSELGHEVIVAHARKVRLIGESRKKDDRLDAQTLARLARIDPQLLCPVKHRSAQAQADLTVIRARAGLVRARTGLVNTARSLAKSYGERLRGCNVRNMNPEKAEALSPELQRALQPLLSAIEELSERICQYNERIESLAQQSYPQVALLKQIKGVGTLIALTFLLTLEDPHRFRKSRDVGCYLGLQPGRRNSGQSEPQMHISKEGDPYLRTLLVQGAQHILGPFGVDCDLRRWGLKLAERGGRNGKKRAIVATARKLAVLLHHLWVSGEVYEPLHNSSRATVAAAA

SEQ ID NO: 277013 - protein, 350 aa, unidentified
MAETNHSMTYVGLDVSLAETHVCVLCEDGRVVFRGVVPSEPQSIVECLNHRAPNCQRVAVETGATTPWLWRELRHRDVPVICVDARHASQALSMRRNKTDRNDAEGLAELMRIGWYKEANVRTPEAQVIRSMLSARYQMRMSRRDLMNQMRGIVKTFVLITGSTASLRFPKMVAEVIAKHPSVAPMLKPLLDAHDALVAQILIYDTQLKDIAANNEHARRIMTIPGVSYLVALGFMSTIDDPTRFSSSAKVGPYLGLAPRTRQSGESSYTAGIGHTPNRMVRSYMYQAAVVFLTRSAKWSRLKAWGLRIHKRAGFKRAAIAVARKMAIIMHSIWMDGTEFEFGNQAKANL

SEQ ID NO: 277014 - protein, 344 aa, unidentified
MHSFTHYIGVDISNLDFCASIFTMPNAPIETLDEVENNLSGFEKLEHWLVEQQVETKTSILCLEATGVYGEAFSYYFTAKGYNVAVEPPLKVKRSFPDKRHKTDKVDSREIAEYAYRYSDELRLWRPKEEIVEQIQVLLMTREQLVRQRTSFKNTAQTLEKKIVQTPLANKIYLQNIERFNQQIKNIDKELKKLIDKHPDFKNNLQKLKSIPGIALLAVANFLVITNGFENELARNYRKAAAFISVCPYKHQSGTSVRKKDRIAKYGPTRLRKLLHLAARSVIEHNPTFKKYYLLKKAQGKPNKLILNNVGNKLLKIMCAIIQSQRTYVDNYVSIHPQLTLINS

SEQ ID NO: 277015 - protein, 348 aa, unidentified
MKKLVAGMDLHSNNVVIGVMDLDGLRVASGKVACELKAVEQFLAPFKPRLEQVAVESTYNWYWLVDGLQAKKYPVRLANPAKMEPYSGLKHGDDTSDAFFLAELLRLKILPTGYIYDAQLRPVRDLLRRRMLLVQQRTALLLSFKSLYTRTTGQALALNQLKALAIPEAQKLYTHPANQLIAGMQLEHIEQLNGSIAKLETSVLAAARELPGYARLTTLPGVGRILGMTITMEVGDIQRFADAGNFASYCRTVKAERISNEKKKGENNAKCGNKYLAWAFVEAANFARRYDEQCRKWYDRKAAKTNQIIATKALACKLAKAAWHVMTADVDYDAQRVFGPRPTPALKT

SEQ ID NO: 277016 - protein, 440 aa, unidentified
MANVTTFETVNVQAAGIDIGAKEIFVSVDGEQVVSFRTFTGDYYKCVEYLQEKGIKRVAMEATGVYWMAFYFMLESCGIKVSLVNPKETKQVKGRKTDVKDCRWIQKLFSAGILRESFIPEGKYMEIRQLVRDRLDIIEMGSVYVNKMQKCLELMNIKLKEVISQIHGASGIKMIKAIIEGERDGKYLLSLCDKRIQKNKSQEVLKALEGNYNDTYLFMLKHNMKMWEQHQKHLLEIDEQIEKLLADLSQTKPALEITSAAKRIRFHAPSIEDLHGKMIQIYGVNLSSISGLNDYTLLRLVGETGLDMNRFPSEKHFVSWCGLSPKNHQSGKIKKRVKGTSCNKAGQIFKECAQSLLNSKYTAIGSFMRRLKAKKDSAIAIKAGARKLAEAYYNAQMKGTDYVEQGTKKYEAQIKQREIHALRMLAKKHNIKIVDNQAAA

SEQ ID NO: 277017 - protein, 315 aa, unidentified
MTKHLLPVNVGVDVGKNQLDLYLLERDRALTVPNEEQAILVLVRSLSRYRVERIVVEATGRLEQPFVRAALAAGLPVIVVSPLKIRRFADVIGQLAKTDQIDTRLIAQFAATVKPLPRPASDANAQAIKDLVVRRRQLTSLRTMEKNRREVMPNDLKPSFDRILKALDRELKSLEQLINHAIDQHASSRHKRELLTSMPGIGNCVAATLIGDLPELGSLDRRQIASLTGVAPFNRDSGTLRGKRRIRGGRAHSRTALFLSAMVATRFNPDIKRFYQRLLTAGKHKKVALTACIRKIVTALNAMLRDNLPWRSAIA

SEQ ID NO: 277018 - protein, 373 aa, unidentified
MTRGITFVGMDVHKASINVAVLEHGKSDHIEWKLDNRATLVEKLARRLKRDYGDDVVACYEAGPCGFALMRQLVGLGVKCQVIAPALIPQQAGNKVKTDKRDARKLASLFRAGLLTEVHPPTADQEAVRDLCRARDDARDDNMRSRHRLSKFLLRHGIAYDGQPWTRLHRQWLGTLKFELAAAQATLEEYLRAVDGIEERIKTLDAKIVETAGTDAYREAVGILCCFRGIDVTGAMVILSELGDITRFESPRKLMAYLGITPSEYSSGGKEKRGGITKTGNAFVRRILVEAAWHYRHAPRVGKKLRKRREAQPAWAIAIADKCQSRLYRRHRHLTSTGKTTTKANVAVAREMSGFIWAALVARRQQDKAKVTK

SEQ ID NO: 277019 - protein, 346 aa, unidentified
MKYFAGLDVSLEETAICVVDETGRIVKEARAGSEPQALSEALRKVDLPLERVGLEACSPTAWLHDGLCADGLPAICIETRQASAAMKTMPNKTDRNDARALAQIMRTGWYRQVHVKSRQCRLWRSLLVARRTVLNEMRTIENVVRAILREVGIKLGTPSRTAFAGRVREVAGTDPIVMPLVEPLLTILATMLGEFTRLTKQVLGIVRKEEICRRLMSVPGVGPITALAFRATIDRPDRFKRSRDVGAHLGLTPARYQSGETDIQGKVSRCGDELARTALYEAAHTLLVRSKKWSSLRAWGINIAKRRGMARARVAVARKLAVILHRMWADATEFRYGKAPVSAAAA

SEQ ID NO: 277020 - protein, 402 aa, unidentified
MIFINCLGIDISKSESVVAHYKDEVLVKELVIQNNQNGYRHLENYIKHLDSLFILFESTGIYSRGMKRFCAVHKIDYLEMNPLEAKFKMSSLRSWKTDKSDAHKLALLAFRMKDSKVQRQSEEIYFELRERARFHLEMETNQNRLKVELVETLHQTFPGLEKLFTNRYSKIALNIAKTFPHPDYVSMLSDDELVEKVLHSTDKGISVNKAHKYAQKLTEIKNNSFPNVDKSSFLIKKVQYLCDKLLIAIEEKKVFDQEMIDLAKNTTEFENIISIPGIGELTAALLIGELGDIRNFKTNKQLNAFVGIDIKRYQSGTSKSRDTINKRGNKKARRLLYLIIMNIIRGRNHYQSHIVDYYYKLREQPHGKPHKTAVIASINRLLKTIHYLIVNDKLYDYQKAPH

SEQ ID NO: 277021 - protein, 350 aa, unidentified
MRTSQKTPDTIATIGIDIGKNVFHLVGLDKGGAIVVRQKLSRGQLARRLANIPRCLIGMEACSGAHHIGRELVALGHAVRLIPAQYVKRFLKGHKNDYRDAEAIAEAVQRPTMHFVTIKTPDQMDLLALHRVRSRLVSQRTGVINQIRGFLIERGITVRQGPMPLRKALADILSCGAVSPRIVCLISDLAEDWRRLDDRIATVSAEIEALAGQDESCRRLMSVPGVGPIISSAVVAAIGNGAGFKQGRDFGAWLGLVPKQESTGDRTILGKISKRGNKYLRTLFVQAAHVVLARRPSAAMQRLWPWIEQASRRLHRNMLAIALANKLARIAWAVLARGRDYQPTITANAA

SEQ ID NO: 277022 - protein, 317 aa, unidentified
MNAQNDRENYVGIDVSKAQLDIAIGQEGEIWQAANTATGICATILRLQEHLPSLIVVESTGGLEKPLIRALQKAALPVALVHPGRVRKFAAGIGWIAKTDRLDARLLAWYAFAAQPKPRPKPNPACEVLSELIRRRSQVIEMLTAERNRRSTCPITLSDALEEHIAWLTAERDRLTTQIETMLATQPEFRDKDAVLQSAKGVGPISSATLQADLPELGIYSHKQISALVGVAPFNRDSGGFRGKRRIKGGRSGVRSTLYLATLSAIRYNPVIRAHYQQLVARGKFGKVAVVACMRKFLVILNAMVRDMRTWQPQTLT

SEQ ID NO: 277023 - protein, 430 aa, unidentified
MKSNTQNAKIEAITEKTLVLGIDVGSETHYARAFDYRGIEYSKKPFKFSNTEAGFVTFKEWILDLKERHEKDKVVPGMEPTGHYWFNLGKFLQDNEMKPVLVNPHHVKKSKELDDNNPTKNDRKDPKVIAGLVREGRYMIPYLPDGVYADLRTASNIRFQLQVELTRIQNRISRWFNIYFPEYKTVYGKPDAKNGMLILKAAPLPEDILTLGIDGVNQIWRDAKLRAVGKARAKTLIEAAEHSVGSKEGAVSARMEIRMLLEDYESRNIRFQEVMTLIEGLVKQIPMAEKLLEIKGVGIKTVSGFLAEVGDISRFNTPKELQKLAGLALVESSSGKHKGETTISRRGRKRLRYLLFEVAMSLVAKNPEFRELHNYYTTRRLNPLKKMQSLMAIAAKLIRVFYAMLTKGVDYDPKKMVSDIKRPAVYLQAA

SEQ ID NO: 277024 - protein, 333 aa, unidentified
MVAGTTGSLHKAGSTKMTKTSTWTAGIDTSKAKLDVAVHGLDQRWQIDNDKAGWRRLSRLLSQALVARVGIEATGGYERGVVEYLRAAGFVVFLLQPMQVRTFARLHLRRAKNDALDAVLIAAFAATIDRPNPEPDARLAQLARTLIFVEQIEEDIARLKTRLEQIDEARLRRLVEADIARLKARRKAEMARIVSTLRRHDDLAERLDLVLSIPGIGERTALALLIRMPELGRVSREEAAALAGLAPFDNDSGTHKGQRHIAGGRGRLRRSLFAAALPAAFRWNKALIELYARLLARGKAHNAALVACARKLLIYANTVVQRGTPWVEKAAAT

SEQ ID NO: 277025 - protein, 345 aa, unidentified
MTNRSKPDVEAFAGIDVSAREISVARLRSKEENPKFTTFANSPSRHKALLAFLLEGTDRIRVCLESSGNYSLDLALALHAHRQVEVSVINPRRARRFAESLGERSKTDPVDAHVLCQYAIRMPWVGWQPPSSLALRLRAITRAIESLGVMLTQEKNRAHALGSSQALPALVLRERERHQRYLEHRMRQLRREARRLIARDSELERRFRLMLTVPGIGETSALQILGELVVLSDTMDARQWVAFSGLDPCHFSSGTSVEKRPRISRGGSRHLRHALYMPALVALCHEPHLRAFYQRLLSRGKKPLQAVVAVMRKLLHALFAMFRSNSSYDGSKLSPIELTTKVVAA

SEQ ID NO: 277026 - protein, 317 aa, unidentified
MTFEELLHFVARQQKLAGKVYTCYEAGPFGYHLHRRLEAMGVTNFVVQPQDWDDRGKGVKNDRLDALALCQRLDRYVRGNQKAFSVVRVPSEEEERERAMSRQRQQLVRERQRLAAMGRSLLAMHNIHVTGRWWKGKAWARIKAQAPGWVVERLEVNTAVIVSVEAHEVKLTGAIQEAGRQKKIPRGVGPLTFEVLRREVGDWSRFNNRRQVSSYTGLCPREHSSGGKRRTGSVSKSGNPRVRAMLLEMVWRMIRWQPDYQPLKKWEAVFKSPTATSEAKKKAVVAIARQLAVDLWRVFTGQAAAEKFGLIYQAEAA

SEQ ID NO: 277027 - protein, 356 aa, unidentified
MSESNTSEMTIGIDLGDKHSQSCVLDAVGEVVEEARLMTTPAALRQRFASCPPARIAIEASTHSPWVWALLTELGHEVLVANPRKLRMIFTSDSKTDRFDAAQLARVARLDPKLLHPIQHRGPRARADLGLLRSRDMLVRTRAHLVTHVRSSVKAFGARLSGCSTAAFGRRAARQVPRELRQALIPVLRTIEELSKRIARYERRIEMMCREQYPETRVLRQVDGVGPVTSLTYVLKLEDPRRFKGRSVGAWLGLRPKKKPSGSRDPELRISKAGDRELRRLLVQSAQYILGPFGKDSDLRRFGERIALRGGKAAKRRAVVAVARKLSVLLHSLWLTGEVYEPLRNARRERRCPQPA

SEQ ID NO: 277028 - protein, 416 aa, unidentified
MKIVRPICCGMDVHKNIIVATIGITDKKTRITEYIQETFSTLNTDLLNLKQWLINHKCFDACMESTGKYWIPIFNILEDEINIYLTHPKYVKAIKGKKTDKKDSKWICDLFKHDLIKFSFIPPKEIRALREISRYRYKLVGMRSSERNRYQNCMTVSNIGIGSVFSDPFGKSAQAIMKEVLKSDIIEDEKILKCIHRSCKNKDKILDSIKHCNIETDQRFKMNESMTHMEELKVHIDNCEIEMMKRAAPMFDQFMHITQLPGISTLSAILIISEIGVDMKQFESDKQLTCWAGLAPANNESANKKKSVRISKAGQYLKPLLVQCALAAIKDKEGYFGIKYSRIKKRRGHKKAIIAIARMMLVSIYHMILTGEKFNPSDYESFRNPKPPIKQQDLTEESAIEFLKKSGFDVSKLTKL

SEQ ID NO: 277029 - protein, 323 aa, unidentified
MIMNDYPFSQFIGVDVSKATLDFALTDETSVSIKNTEEQIVSKLIGVITDPSSTIVVMEATGGYEDRLVTLLHQHNIAVAVVNPRRVRDFARGIGIDAKTDPIDATVIFVYGQVVKPAAQVAKSEEDKKLRALVERRRQLLGLVIQERNRLQQTADLEIQDYIRQSLETLQKQVETIDKRLEKCVKANTEHARKIEIIGSVKGLGPVTVSTFVAELPELGELNRGQIAKLVGVAPMNRDSGQSSGRRRIIGGRSYVRRVLYMATLTATRFNPRIKAFYQGLLRKGKPKKVALTAAMRKLLTILNTLLKRDMLWKDLEAKEMCG

SEQ ID NO: 277030 - protein, 367 aa, unidentified
MAMTTMTHPPELAVRVFGGVDTHKDVHVAAALDELGRLLGTGSFATTMDGYRQLGRWLRSWGEVVAVGVEGTGSWGAGLARHLTAAGVDVREVMRPNRQHRRRYGKSDEADAIGAARAVLAGEAVGTPKAGTGQVEAIRLLRIARRSAMKARTQAGNQIHAVIDTAPEQLRRRFVGRPTADIVAETAMFRRRHAPTTPLEAARLSLRTLARRWEYLDNEMVALDDQLDELTATVAPTLRAINGVGPQVATAVLAAAGDNPERLRSSASFAALCGVSPIDASSGRQKHHRLNLYGDRHANWALHVVIISRLRWHPPTQAYMARRLAEGRTHKMIVRCLKRHLAREIYRAITTDLGLQHEHQRPPRIAA

SEQ ID NO: 277031 - protein, 344 aa, unidentified
MNQYVGLDVSLEETKIHVLDEAGGRVWRGKCASHPDELETTICKHAPGAVRIGLETGPLTTWLWTELSKRRLPMVCLDARQAQRALDMRANKTDANDADGLAHLVRAGWYEEVRVKSRDAMLSKAVSAARRQLLDISTNLSNQVRGLMKTFGLVVPKGKGRIFEANVRRLLDEEHALAAVVLPLLEAWRAIRNRAAELDRLLLRKVRDDANCRRLMTAPGIGAVVAASYVAAIESPANFKHARDVGAWVGLTPRRFQSGEMDYDGHISRRGDERLRALLYEAATVILTRVRSASALRSWALALKKRLGFKRAAVALARKLAVVLHVMWKTRKNFDPNHRLAARA

SEQ ID NO: 277032 - protein, 462 aa, unidentified
MPERNDRESGESNRRQLQGLPVIRRNVAGVDLGSERHWVCAPTQDGSGREIASFGATTRELLRLGEWLKARQVESVAMESTGVYWIAPHEVLEGQGLQVLLVDTRQLARVPGRDKKTDPSDCEWMQRLHSCGLLRGSFRPEEAVCMLRTLVRDKANLVAESGDWVRRMQKSLDQMNVRVHRAVSDIDGVTGMAILRAIAGGERDAQKLAQLRDRRCSKTQQEIAEQLTGHWREDHLFSLQQALKMYDAVQERIAAYEQEILRQLEEMEEPGQRGETPPPLNNANKAKAIKRRGQEAKRQALYRMSGVDITQIDAIGVETVEVVLSEYGPDLSRFPTEKEFVAHVTLAPRVPRSGGKPLKKKKRNSASTRVAAALRMAALSLRHSQTALGAYYRKLAQRLGGDVAVFATARKLATLIYRLLRWGQPYVDEGAAAYEHRYLQQRIKSLTAKAKELGYELTAVNA

SEQ ID NO: 277033 - protein, 352 aa, unidentified
MNTLFVGIDVSTKNNQVCAVNFNQDVFFNLSFPNNPDGCDLLITSVLAFVDKEKFDSIIIVTESTSIYDYHICAYLSSQLSIVGTSVIIYSVNAKSIANYKKSYIEMEKTDLGDAFLIADFARVGRCKKLRPFKAAQHIALKRLTRERYHLAEQLIREKNYVLNNIYLKVSGLMTLPHKDLPFSDNFSASNTKFLTDYASPFDLAEKPLDEIIEYFKSASQNRCDDYGKIASLFDKAIRSSYRLDKTAYDPITISITASINLIQCIESQIKMVDKAIEKEMKGLYPNGYQSLMSITGIGPVFAAGILSEIGDISYFKSDASLAKYAGFHWKKNDSGNFIACLLYTSPSPRAS

SEQ ID NO: 277034 - protein, 407 aa, unidentified
MEVLHDVCCGLDVHKETVAACLRVGRTSKVQSFGTTTRELLRLSDWLREAGCVHVAMESTGVYWKPIFNILEGEFEVMLVNAKNIKAVPGRKTDVKDSEWIAQLLAHGLLQPSFVPERDQRELRELTRHRAKLVQQHTAVVNRIHKVLEDANIKLSCVASDIMGTSGRAMLAAIVSGNSDPVSLADMSLRTLRKKIPQLREALEGKVTEHHRFMLGELLGQLAYLEGAMVRVTDRIDELMRPFDEKVQLVNSVTGLGTYLTQSILAEIGVDMSQFPSARHLCSWAKICPGTNESAGKHKSSTTGKGNNWLKSALTQAAWVASKMKGTYLSALYHRIARRRGKRRAIVALAHAILAAIYYILRDNCQYEDLGADFFDKLSTDQVKRHMVRRLESLGFEVTLQPAASAA

SEQ ID NO: 277035 - protein, 368 aa, unidentified
MEKSSTVFVGMDVHKDSIDIAVADAHEARHFGRVGGDAASVDRAVRKLRSRHRNFTVIYEAGPCGFWLYRRLRAQGLGCLVVSPSLTPRNAADRIKTDRRDAMKLARLARAGELTSVHVPDALDEAMRDLVRTREDAVAMQRQARQRLAALLLRNDIRYVGKTAWTAAHRRWIAHLKLPQPPQQIAFEEYVQAVHEAGARLERLNVALHRQLEHWRWRPAVEALQALRGISAIHALRIVAELGDLSRFPSPRGLMGYLGLIPSEDSSGPRRRQGRITKAGNSSARRALVEAAHAYAHPARVSWVIARRQSALPKSVTDIAWKAQLRLCSRFRRLAARGVPRNKVVVAIARELSGFVWAIARGIHPSAK

SEQ ID NO: 277036 - protein, 365 aa, unidentified
MNKCHSNTELSSHEGTRSQFNGGECAIKLGIDVHQDFYVVVEQVDGTNPKPPQRFPKRAFLRWAARLKENTGAEVHAVYEACGFGFSLQRQLSLLGVQCHVVCPQKLDEQNRRVKTDGLDAKALVLKLDRFVQGNRSALALVRVPTEEEEQKRAIHRQREQLVKARKQLEAQGRSLMVNHGLEPVQSWWKPRAFAALPVPQWMKELLANSQPILVALQQKIASLTIQLQSSATPKQPRGLGLMTSVIIDREIGDWRRFSNRRQIGSYTGLCPGEYSSGNTRLQSCVTKHGNPRLRAALVELAWRLVRFQPNYKPIVKWRQILAKGALATGAARKKAIVAVARQLAVDLWRIKTGRLRAEELGLIN

SEQ ID NO: 277037 - protein, 361 aa, unidentified
MTGHKYVGMDVHSATSVIEVMNQQGKAVAKAIIQTRAGEIKDYFRGLSGTVHVTFEEGVHASWLYDLIKPLVAEVIVCNPRHNRLVQSGNKADRIDAHKLAELLRLGSLKPVYHKDCGTRKLREAVRSYQSLTSDSLRTMNRIKAIFRGRGIDCRGTEVYQPAHRENWINRLEDTSAVTRLELLYQQLDLITPLRVQACKEMVTQARSQPAYKVLRRIKTLGPVRVAQIIGVVRSPFRFRTKRQFWAYCGLAVVTTSSADYVIRDGKVCRSSKPAATRGLNENYNRTLKNVFKGAALLGTATEPFKQYYEGLRTRGLRPELARLTLARKVAAITLVTWKKQAVFDPSKVIQASAPLESDPM

SEQ ID NO: 277038 - protein, 357 aa, unidentified
MQITTIGLDIAKNVFQVHGIDAAEKIVVRKQLRRGQMLAFFKALPPCLVGMEACATSHYWARELTKLGHQVRLMPAKDVKAYVKRNKNDAADAEAICEAVRRPTMRFVQIKSVEQQGQLMLHRARDLLMRQRTQLINALRAHMAELGIVAAQGREGVKELLKIIASEQDARLPVDAHASLVVLAAGLQALQTMIGSIERRIIAQHRSDEVSKRLRSIPGIGIVGATAIAATVPDPKVFRSGRDFAAWIGIVPRQDSTGGKQKLGPISKRGDQYLRRILVVGAHAVLKRARHQPEKYPWVTRLLERKPFRVVAVAVANKMARVAWALLARGRLRLRQRRKGSGKSRVSLRLCAYELQG

SEQ ID NO: 277039 - protein, 389 aa, unidentified
MIYVGIDVAKDKHDCCILGSEADKLYPIFTIPNNKTGFDELYEKIFSVTDDKTEIKVGLEATGHYSLNLLGSLIDKGLPTCVLNPLHTNLYRKGLSLRKTKTDKVDAGSIAMMLMTDKTLKPYSDTSYHSEELKSLTRYRFDKVQERAKLKTSVARLVNILFPELEKLVPSLHMASVYALLSEFPGASYIAESHLTHLRNVLETASKGRYGRYMAVTIRDAAKDSIGSVMPAKSMELKHTIHLIEVMTDEIDEIEASIKSIMDTCDSPIMTIPGISYRMGAMILAEIGDFTRFSNADQILAFAGLSPSTYQSGQLDSSYSHMEKRGSRYLRYALFNATKFVCKWDENFGAYLSKKISEGKHYNVAVGHATKKLIRTIYRMELTGEAYRK

SEQ ID NO: 277040 - protein, 423 aa, unidentified
MEAVHLRCTGLDVHKEMVVACVRLVEGGKITREVRTFSTSTSGLLALLAWLLATGCTHVAMEATGVYWKPVWNILSDGPFEMILANAAHIKNVPGRKTDVNDATWIADLLAHGLIRASFIPERDIQELRSLLRARKQMTREQSSHVQRLQKTLEEANIKLDTVITDIMGATGRRMIEAMIAGETNPIKLAQLADCRIKSPRDRLTEALRGRLTEHHRFLLQLYLGQYDSLTAAIITIDREVASLIARMDEKVESGQATIGALIALLCTIPGIGVLAAQTILAEIGRDMSRFPTAGHLLAWAGLCPDQNESAGKRKSSRLRKGAPWLKTLLVQCAWSASRKKDCYFKAQFQRLKSRRGPQKAICAVAASMLTSVYHMLKNGTQFQDLGADYFDRRCTEAKANHLVRQLTKLGFHVQLQPLSDAA

SEQ ID NO: 277041 - protein, 351 aa, unidentified
MPRASTVHAVIAIGIDMGKNTLHMVGLDSCGAIVLREKVSRGRIASRLANLPPCLIGIEAGMATHYVARELTALGHDVKQVPATYAKPFRQGHKNDFRDAHAVAEAVQRPTTRFVPAKTDEQLDLQALHRVRSRLVSERTAVINQIRGFLLERGIIVRQGLRFLRQLLPDILAKRADVLSPRMIRIVAELAGDWRRLDERIETVTDEIEALAKSDDSCRRVMTVPGIGPIISSAMVAAIGNGVAFARGRDFSAWLGLVPKQMSTGDRTILGRISKRGNGYLRMLFMQAARVILLRPANWPKHGFGAWLARAAQRLHPNVLAAALANKLARIAWTVLAQGRGYEARITKPAV

SEQ ID NO: 277042 - protein, 435 aa, unidentified
MSLGTTVPHAERSHMKQHVSEAFAAFVGLDWADAKHDVCLQAAGTAQREFLSLAQSPEAINAWVQTLRTRFNGQPVAVCLELNKGPIVSALRNDDFLVLFPVNPLTVAKYREAFTPSRAKDDPTDAELQVELLLKHRDKLTPLSPQSPAMRALAQLVEHRRRLVGDKVRCTNRLTSTLKNYFPQVLQWFPEKDTAIFCDFLSRWPTLKAAQLARRTTLEGFFRAHHVRSTDLIATRIEAIKSARALTTDDGVIAPNVLLVHALVAQLRVTLQAIADFDKVIAHRAQDHPDFPLFDALPGAGAVFAPRLLVAFGEQRERFTSADELQKYAGMAPVTERSGKKSWVHWRLQCPKFLRQTFVEWAAESTRHSFWAQVYYQQQREKGKAHQAAVRALAFKWIRILYRCWQERTPYDESIYLQALKRRNAPLLHNLANLS

SEQ ID NO: 277043 - protein, 399 aa, unidentified
MTNQQQNIGGVDSHRDTIHVAVITEIGQPVADHEFPTTVAGYRRAVAWLIEHGPLQAVGIEGTSSYGVGISTAVTALGTRVVEVNRTRPAERRKQGKTDRLDAYRAARSVLSGEATTAPKNASIEPLRALNVTRRSAVKAQQAAWRQIGALLINAPAHLRDRYRDLPAAKLIAALANSRPEQLTDLGLCDTMHALRSLARRHRDLGAEIADLEERMLGRATNANPALLAVKGVGAVIGAQLLITAGDNPDRLSTSASFAALCGTAPIPVSSGRTDRHRLSRGGDRQANAALHHIVKVRMSYDPATRAYRERHLAKGWTLKAVFRALKRAVAREVFNALTGHCAVPDYSDLRPARRAKNLTLTAAATHLGVWPARIGELELGRRPNDELATRYRAWLEAA

SEQ ID NO: 277044 - protein, 428 aa, unidentified
MDEINRNRLEEFRQLRKEVRHSEEYLIVGIDIAKDRHYAFFGTATGKTLLRRLVFSNDHEGFRKLLDQAEALRVQHGLKKVVYGMEPTANYHKPLGEYLISLGRTVVLVSGVTVKRNRETLDGRWDKHDGKDSANVADLISQGKCLYYEHPSAELRGLRGLLSLKRRLKKQEHGYKVRVRNHLLAQYFPEMDRDYEGLGAEGLSIVRWCLPASEIAQLDVEPFIERVTSRRIRIEKRRRLEAVWEKAGESSGCDGVPGLDHEAKIMVEGLKQIREMIKETEDKIEELCKEFPEYKYLLTIPGYGPDVSAKVLGAIGDPDRFQNGKQVLKLAGLDLSADRSGKDSAKAIPQISKRGKADLRYALYQAALIASTRNQDFMRYYTRKLQGREREKGIHTKMWVKLSAKMLLIAWTLMKRKEVFDPTYLNME

SEQ ID NO: 277045 - protein, 445 aa, unidentified
MKHARKRYVGLDVHKDVVEYCILDAAGKKVDGGRIICEQSVLQRFATSTLSSKDHVALESTTNTWSVVDILEPHVAKIVVGNPLKTKAIAEAKVKTDKVDAMILAQLLRCDFLPTVWIPDAKTRVLRRLSSFRKSLVQDRTAAKNRIKEILNHLLIKHAVVWSKAGLDELRKLDIPVHERTIMDCEIAILEHLGKQIEQIESEIKKLAYDEENVRLLMTLPGVDYNTAVAVIAAFGDISRFKDADHAASYLGLVPKVKQSANSCRHGAITKAGASLARSLLCEAAQCLSRSESPLGVFVRRLLQKKTWNKAIVAGARKLATIAYHMLKNKEPYRYAAVARTREKLGRLRKSVTGRRPEYPQYRYDKKLSGHIENRSDVSVCFLPPISDVYEKEELPAARSFGELSVGEQRVIKEMGLTEIVRKSETAQVIVKPKKTKINPCIKVE

SEQ ID NO: 277046 - protein, 374 aa, unidentified
MYIGIDVHKNSCYITAMDEAGNILEEKEIETEHMIEWMNTIDTNSMIAMESSTASKPLYHLMKELKLNVLMAHPAGLRVIAESTQKTDKSDSFHLANLLRMNYLPCSYVPDETYERMRNICRYRVSLGRKMTRIKNEIHALLTRNNIKMKQTDIFGKDGLENLKSINLNDVDTLLLKSLLEELNYLAEKAQNIEDIMAGLGKHIPEVTQLMTIPGLGYYSAMTILAEIGDIKRFPNPKKLCNYAGLTPRIRDSGELIIHGRISKKGSPTLRWILVSAAHSVIRCRKGNTKLRKFYKHLIKRGKAKQVAVVALAKKLLLIIYAMLTKKTTYEDGDERITKKKIIAMNERGIMIPITNYQSELYKLKHKNKVLGVG

SEQ ID NO: 277047 - protein, 342 aa, unidentified
MYYIGPDVHKKTISYCVKDASGQVHQEGKVGATRWELDAWMETLPQPWTVAMEATIFTGWIYDHLLPHAQQVKVAHPLMLRAIAAAKKKNDRIDAGKIADCLRCDFLPECHMASTQIRDRRRTLRYRHLLVRQMVQMKNRISGLLMETGVSYNKQRLHKVGYFRELLSTNEDVHESIRPLLKLSRDTIVRLQKTEYALVSSLQRDPLLADRIKRLRTVPGVGPITALTWALEIGEVARFGSIRQAISYCGLCGEEKSSADKVMRTPLSKQRNKHIQRVLVEAAKLAPRQDRDLALVYETEKQKGNANRATLAVARKMVAYLLAVDRGQRDFVPAEDYQRAAA

SEQ ID NO: 277048 - protein, 423 aa, unidentified
MDIIHPRVAGIDVHKKQISVAVRLPGQSPGERRQVVRNFKTFWRALRQMADWLAEQGVTDVAMEATGIYWWPVYFALTATGSIEVCVANAAHMRNVPGRKTDTKDAQWIAQLHEHGLLRPSLIVSHEVRALRDRTRYRKKLIEQRTREQQRLAKVLETAGIKIDSVASTLMTQSGRLMIEALIAGQRDPEQLADLAKGVMRRKLDELVMACDGQFTDQHAEMCQLHLAAYDQLTLSIAELDVLVARHAAPFTALITRLMTIPGIGRRTAEVIIAETGGDMSRFPTPAHLAAWCGLAPANRESAGKRKKAGTRKGNVHLASAMTEAAWATVRTRTRPGARLRRLIRRFGEDHKKKAAIAVAHTLLRIIWAVLTHDTDYREDGADYYDRPLDPVRQTNRHINALRQLGYNVTLAPLDPPPQQPAA

SEQ ID NO: 277049 - protein, 341 aa, unidentified
MKQNESLEIDFFIGIDMSKSKFDVGVLDKFGNRLFHKVFNNNNLGFEDFLHWISNSLDSDKCFFCMEYTGIYSRKLWMFLQDHSCLLWMESGFQIKRKSGIVKTKNDKIDAYRIAEYVLSNRHNLKITPDYEEDIFVLHDLLANRNRIVDCMKKLQVPLKEIQEHGNKKSIEVILEINIEAKKALQNSLKSIDKKIDELISENENWQENIELATSIKGIGKIVCLWMLVYSKNFSEEYNARKFASLAGVAPFEISSGSSIRGGFHVNCYSHRQLKGLFHIAAMTAIKFNPQMKEYFDRKKKEGKKGFVAMNNIKNKLIQQVYAVIRTKKPFDPEYIYKKAA

SEQ ID NO: 277050 - protein, 351 aa, unidentified
MHYIGIDYHKRYSYIVVKDEEGQVERKGVVGNTKEELQHFLGPYRPGMAVLEATRNWGLLYDWLEEVLDDVALAHPLKVKAIAEARIKTDKISADILADLLRAGLLPRAYAPSKQTRDFKNVLRQRMFFVRVQTMVKNRIYDILDRYPEVLLQAPDVSDLFGAAGMQWLSQTALPGEDNKLLTSELELLKFLREKITQSNSTVKELAIKDGRARLLQSIPGIGPFFSVLILYEIDDISRFRDEKKLCAYAGLVPSTHASGGKVFHGRITKTGSKWLRWAAIEAAQTAVRSNPEFHAYYQSVRVRKGTNAAKVATARRLLTIIYRLLRQERLYERRITTPRKTTIPVALVTP

SEQ ID NO: 277051 - protein, 314 aa, unidentified
MIAQDGIAGLDVSKERLDVFVRDVGCGLASPTTEAGLTVLIDRLRRLKVRCIGLEASGGYERRAAHRLGEARFSVFMLDPAQVRAFARAMKTRAKTDPIDAAMIARYIAAAVDRLVPFTPDPHRERLSALTGLRRRLVAEISEHKSLIDTAEDPLVRSTLARRLAALTADRDLVETAIKALIADSRTLKPRFDTLKATPGVGPVLATVLLSDLPELGRINAKRIASLVGVAPHARQSGKVEKAGICSGGRAQVRRVLYMATLSAIKARMGHLFPFYPRLRTAGKPFKIAIVATMRKFITILNAILRDNAPFRPA

SEQ ID NO: 277052 - protein, 355 aa, unidentified
MKQEKYIGMDVHQATISVAVMDNSGKLIMECILETKAATILEFLHGLRGSLSVTFEEGTSAAWLHDLLKPHVTHLVVCDPRKNALLKDGSKSDRIDARKLAELLRGNQLHAVYHGEHGVRTLKELGRSYLTLTQDVTRVMTRIKALYRSWAIPCSGATVYAPRHRAEWLAKIPQAGVRLRAERLYQQLDLLQPVRQEARRDLLRESHQHQAVKLLRQIPSIGPIRAAMLVALLQTPHRFRTKRQLWAYSGFAIETHDSGEYRYVRGKLQRNRERITVRGLNDNHNHDLKNLFKGAALSASTRPGPLHDFYTALVEKGMRPTMARLTLARKIAAITLTIWKKGVSFDAKQLHRQAA

SEQ ID NO: 277053 - protein, 399 aa, unidentified
MNYFGIDISKRTSVIAHYQDDIFQKEFTIQNNKNGYNQLLNYLNEMDQFQFVFEATGIYSRGMVKFCRVNQIDFIEMNPLEARFKTSSLRAWKTDESDAHKLALLAPYLKASTSLDSNPDIFFELRERARFHVEIENDQNRLKIMIIELLHQTFPGLEKLFKNRYSKIALNIIEEYAHPDLVSQKDIESLTSSIMEYTNKNLSYQKAQNYAERLNKIAQESYPNVKHSSFLVKKVRLLIQQLKSSIQQLSQLDKEMIELAQQLECFEVMHSIPGIGKLTVAMIIGELGDLTKFKTNKQLNAYVGIDIKRYQSGKTQYRDTINRRGNKKARRLLFLVVMNIIRGQRNYNNHIVDYYYKLRKQPNEKSHKTAVVACINRLLKTLHYLVNESKLYDYQMSPH

SEQ ID NO: 277054 - protein, 324 aa, unidentified
MKTQNDPEKYAGIDVSKASLDIAVGQEGEIWQASNTAGGIGTVVEHLLRCQPCLIVVESTGGLEKPLIAGLQKAGLPVALIHPGRARKFAAGIGRLAKTDRLDARLLAWYGFAARPEPKPQPQPACEALSELVRRRNQIIEMLVAERNRRSTCPASLLETLDAHIAWLTTERERLTTQIETMITTQAEFHDKDVVLQSAKGVGPILSATLQAELPELGAYSHKQIAALVGVAPFSRDSGRYHGKRQIKGGRSGVRSTLYLATLSAIRYNPVIRSHYQQLVDRGKLPKVAIVACMRKLLVILNAMIRDLRPWQPAPLHAVVSTTP

SEQ ID NO: 277055 - protein, 348 aa, unidentified
MMEQRNKVCGVDIHKKFLIATILSRDGTKIQKRYGTDIDDLFNFRDWILENNCDCVAIESTGVYWYPVNAVLENKVELILANARQIKHTPGRKTDSIDSEWIAEVALNNLIYPSRIFPKEERDLRRLTRTRESLVKMRSQIKNQVHQGLESCSIKLSSVLSDNFGKSGRHILDGLIKGKSIDHIIEEIPSKRVKKNEDQIRAAIRTGLDETQIFLIQSHLNTIDGLTKKLDEIDSEIKHRISRRKDDLQIAMSVPGIGFKAATTILAEVGNYRDFSTPDKLASWCGIVPNVYQSADKLITGSITKHGSKHIRWMLVQVAQAALKKRGSKLRRFFLRIKARKGHNGLHP

SEQ ID NO: 277056 - protein, 355 aa, unidentified
MVMLAEHYDFVIGGDPDRDTIDLAVLDTSAGRVQAHLADSADGPGYDRMLTWAGEHAPGRRIWALEGTGSFAAGLVVVLLDAGETVVEVGALKRARGAKNDRIDAIRAARQALARDEQGAPRAGGLREALRMVFACREGVLVSRTKAINELKSLIVVAPEQIRAELRGRSLAVQLTRIEALQVPTAAPVELRLSVFSLQSITARVRFLSAQLAELDPQLLSLIKQHPAGPALLAEAGVGPVVAAQLLISWSHHGRVRDEAAFASLAGVSPIEISSGQRSRHRLNRGGDRALNRALHTVAITRLRCHPESIAYEIKRSAQGKTHRDIRRSVKRALARRLYRRIEAAIRLENTSVAA

SEQ ID NO: 277057 - protein, 389 aa, unidentified
MAEVLRKLTGRAALDAGVVSGNGKKDGRGNTFGPNRDRLTVGVDLGDRWSQYCILGLEGETLAEGQLRTTQEDVGEFFRGLTTARVVVEVGTHSAWVQDVITECGHEVLVANPRLMEGSKRRKRKSDRIDANKLARLGRVDPQSLYPIRHRSREVRQDLVVLRARDALVSVRTELINTTRGLVKSMGTRLPRCSSPSFAEKVKDAIPVEVGEALQPLVQLVETVNECIERYDERIEELGRKKYGHTTLLRQVKGVGPITSLAYVLTLEDPQRFASSREVGPYLGLVPKQEDSGDSQPQLGISKAGDRMLRRLLVGSSQYMLGAFGPDTDLRRYGLRLCERGGKNAKKRAVVAVARKLAVLLHHLWVTGDVYEPLHHTGVETRTAQATAA

SEQ ID NO: 277058 - protein, 447 aa, unidentified
MAQRNRRYTRKGLEVTNPDAAGIDVGGAMHYVAVREDVAEQPVRQFGCVTGQLQQMIEWLHSCGVKVVAMESTGVYWIPVYEMLERAGFEVLLVNARHVKGLPGRKSDVQDCQWLQQLLMYGLLKGAFRPSDAVCGWRSLCRQRARRIKEQARYVQHMQKALVQMNIQLGTVISDVAGVTGQKIVRAIVQGERDPHELAAYRDCRIKASEEEIAASLLGNWRDEHLFELKQALQAYDFCGQLLAECDQEIERVMLGLAEHEGRLDKGPRRSKNRNAPKFDVRQRLYEICGVDLTRIDGIDASTALVVLSEIGADMSRFKTVKHFTSWLGLCPGTKISGGKELGSATKRSANRARQALKLAAAALRSSKSSLGAYYRRMCARMDKGKAVTAAAHKLARYIYTMLTRGQEYVDQGQQYYEERYRERVLRQMTRRAGELGFRLVPAEAGA

SEQ ID NO: 277059 - protein, 339 aa, unidentified
MKLYTGLDLHSSNSYLGIIDETGKRVYKQKLPNDRERILAALNPYKNDIAGIVVESTYNWYWLVDLLMGEGYHVHLANPAAIKKYTGLKFADDQHDAFWLAEMLRLGILPEGYIYPKEDRPVRDLLRKRMHLVRLRTSLIVSLQNIVSRNNGFKLKTSDVKALSEDRVAPYLAGSEDLALAGMVSKEAIDFLTRQIKKIETVIETKVELKPPYEKLQSVFGIGKILALTIMLETGPISRFAKVGNYVSYCRKVSSKWLSNDKVKGKGNKKSGNKYLAWAYSEAAEHARRSYTQARAYYNRKMQKTNFMAAHNALAHKLARAAYYVMRDKVLFIPDKIFV

SEQ ID NO: 277060 - protein, 369 aa, unidentified
MGDRITYVGLDVHKDGIVVAVAEGGERGEVREYGRIANTPAALRRLACKLGQQGVELRFCYEAGPCGYGIQRQLSALGHECIVAAPSLIPKRPGDRVKTDRRDAASLAKLHRAGELTAVWVPDPGHEAMRDLVRARLDAVRALRRARQQLSGFLLRQGCHYGRPAWTKLYRRWLAGLKFEQAVHHIVLEDYIEAVEAAEARRDRLTAQIAAMLPDWTLAPVVAALQTMRGMALVNAATLVAELGDLSRFANPRQLMAYLGLVPSEHSSGASVKRGGLTKAGNSAARRLLIEAAWTYRFPARVSRELRLRQEEQPRPIREIAWKAQLRLCARYRKLARSGKPANVVTAAIARELAGFIWAIAQRVPPAVG

SEQ ID NO: 277061 - protein, 363 aa, unidentified
MKAEKRRFVGIDLGKREYTMAIIGKNGKTSMHHGKTSIQGRTALYRLLEQSDKVALEAGNLAFIMAREIMERAGCEVRVLHSAKLPLIWSSPTKTDKEDARKLAHLVEERKDEKLPLVPLPSEQEMERRKKLASYGREVRNRTKMINTLHALFIYQGHTTVVKKDLATAQRRRQTVEVLRGHEREDAEHLLKILELHEQRIQELKGHIQREAKTDEAMLRLQTIAGVGPVVAYAYVAHVGDGSRFTTGAQVSNYLGFVPRLYYSGTIQRHGHITKQGNGYLRGLLVQAAWAAVRSKSGGALRERYIQITKFQGASKKKTIVSIGRRLAEIMFSVLKNKTVYELRQWEGMRNKTAVLAEQAMSA

SEQ ID NO: 277062 - protein, 320 aa, unidentified
METPRFVGIDVAKGELVVAALPGEERWTVENDEQGIRTLMERLKRETVALIVLEATGGYELRAVSALANASLPVVVVNPRQVRDFARSTGQLAKTDRIDARMLALFGERVRPEVRVLADEDQHALDALLTRRRQLIEMLSAERNRLGQTLGRGTKLVKKSLKSHITYLERELRVSDTELAEMIRSSALWRERDDLLQSVPGVGRVVSLTLLAELPELGRLNRKEIAKLVGVAPLARDSGTMRGKRMVYGGRASVRAALYMGALVATKYNPVIRDLYQRLLRAGKAKKLALVACMRKLLTILNAMAKNNERWRADTALTTA

SEQ ID NO: 277063 - protein, 343 aa, unidentified
MKHIGFDIHSAITHISVFSERGQEILYTKIPTREADLVAFMMSVSGPKRVALEESQMADFITRTIEPHATKVIRCLPQHNRLISESEQKYDRADARALAELLFLNKLKEVHHAPWAYRQLREGVRAYWAASRDLSRNKSQLKAFYLFNGIHCIGEKVYASRHRSTFKKQAEKRSVNMSILEQHYRHLDFCRNRKAAHIKILKELVHSFQQDDRNLKTYPGVGVIGSATFIAYLENGWRLKNKRKLWQYCGVGVRRHESAGKGCRKASRRGNRYLKNVVMTAAATIASRKVDDNALTKIWRAGITAGISGTRMKRNIARKVAVLVQRSLRFKEGYRDDRVTTTH

SEQ ID NO: 277064 - protein, 428 aa, unidentified
MSITQNSKIRRITDSTLVVGADIAKKVHVARACDVRGVEFGKPLSFDNTSHGFERLRTWIQSLMVEHSCDNVVFGVEPTGHYWMNLAQFLRREGVQVVLVNPLHVKKTKELEDNSPTKNDRKDARVIALLVKDGRYSVPHIPEDIYAELRVGMNERDRLSEDLKRVQGRIHNWLDRFFPEFTSVFKDWEGKSALVCLHQFPCPTDIQDKSASEIVKAWRDGGISRGVGMSKAKELKEMAQQSIGLTEGLRMAHREIAILLSQYDMYQEQMESLMEEVECLVSQIPGTPQMMSIPGVGLVTVAGFLAEVGDLSGYDNPRQIQKLAGLNLRENSSGAHKGQTKITRRGRPRLRSLLFRAVIPLLAKNAQFQELHRYYTQRAQNPLKRMQSAIALSCRLIRVLFALGRKQVPYDPVKVLGPVHMERLQNAA

SEQ ID NO: 277065 - protein, 316 aa, unidentified
MQQQLRIVGVDVAKAKLVVAGLQQPAQVVLNCAPAITVWLRGLPVGTVVAMEATGAHHRLLAQMAHAAGMRVLVLNARDVFFYAKALSGRGKTDRLDAALIARFAAEHNARLHAWRPATGVQQQVQDLLRRRAQVTRLRVALRQTLSDVAQLQEAGQRLCEHFEVLLQEIDRQLLAALDSDPQLQRGVALLRTITGFGPQASVLVAALLSRVRFDNADALVAYSGLDPRPQDSGTKHGKRRLSKRGPAQLRRQLYLAAFGASHSHALGAVYRALKAKGFAPTQALVILARKLLRVAWAVWHSGQPFDAARLTPMHG

SEQ ID NO: 277066 - protein, 327 aa, unidentified
MNQIGIDVSSEMLDVTMQQAGFVRRQFPNTPVGHQTCIRWIMRGTDKARVCLEATGIYHLQLALRLYEHPGIELMVLNPCAARRFAQAHMVRAKTDAIDADGLLLFLQRMPFQPWSAPPESVLQLQSLAHRMGQLKREVVRERCRLHAVRKAGPHTRVAQQDIQAHIKQVQRRLQRIRQHAAKAIQQDTSLANDARLIDTAPGFAELSSIKLLAELAALPDDMTPAQWVAHAGLDPRPMESGTSQRPPRRISKQGNVRVRAALYMPALVAAHHDPHVKAYYEKLLRNGKPKMVALTAVMRKLLHALWGMLHHQQEWDGDKFYQLNPA

SEQ ID NO: 277067 - protein, 336 aa, unidentified
MNFVGIDLHKQTISVCVVSQERKVSSRRTFRCRQPDRIRAYFAALGEFQAVVEATASYEWLWVLLEPLADRIVLAHPGKMRIIAESTRKSDKLDAEVLAAFLALDMIPQAYRPSPRERAHRVLVRHRRYLSKRSTALRNKMRRILSDYNADREDLFTAAGTGYLKQVAVSDSHRFVLDQLLASWLAHQAQLEQINRKLRAFARQAPVREREARAVLSTIPYVGPVTIDVVLSELGQIERFGSQKQVCAYAGLAPGQRESAGRVKQQGITKTGSSLLRWALIETAWRLVSKTRRWRALFEPLAKRRGRKKAIVAIARRLLCMMTAMLQDGRPYRYAV

SEQ ID NO: 277068 - protein, 340 aa, unidentified
MSEDIIIGIDLAKNVFQLHGARRDGQVLFRKKLNRSQFRAFCEKHPKCLMAMEACSTSHYWARELQEMGHDVRLIPPVYVKPFVKRHKNDAADAEAITEAALRPSMSFVAPKSADQQAATMMMRTRDQLLEQRTATVNALRGHLAEFGIIAPVGIKNVVKLRAILADTQDIPALATEMAKLHFDRIDRLSCEIEALTAKINTRCHGSDTAKRLRSMPGIGPIAAMVIEAFAPDMTHFEKGRDFAAWLGLVPKQHSSGGKTRLGQTSKMGQRDIRRVLITGAMSRIAGYARQNSRAEPWLQDKLDRKPKMVAAIALANKMARQVWAMITREERYQPPAAAT

SEQ ID NO: 277069 - protein, 354 aa, unidentified
MGQGNATKTGMTIGLDLGDRYTHVCVIDEDGAVAERQRVLTRPASLRRLLSSYPPSRVVLEVGAHSPWVSRLVSELGHEAVVANPRRLAVIYANESKNDVVDAEALARVGRVDAKLLRPIQHRSAASQVDRTLLRSRAVLVRSRTALVAHVRSSVKSIGARLPRGSTASFGRRMQGELPDELREALAPLLELIQELTRRIRVYERTIERRCATTHPETRQLTQVRGVGDLTALAFVLCLEDPKRFPKSRVVGAYLGLRPRQRQSGERDPRLGITKAGDVELRRLLVGSAHYILGPFGPDSDLRRFGLRLIARGGPGAKQRAVVAVARKLAVLLHRLWITGEVYEPLRQAHAAAA

SEQ ID NO: 277070 - protein, 372 aa, unidentified
MDESSKILYVGLDVHKESIAVAYAPDDRGAEVVSLGAIGTRQSDIDKLVRRLQSKGAATLVFVYEAGPCGYGLYRYLTGKGLACHVVAPSLIPRKPGDRVKTDRRDAMTLARLMRSGDLSAIYVPGVEDEALRDLSRGRDDAMQDLKRSKRRLKSFLLRQDIRYEGRARWNAAHLRWLAHVVCPTPPPQIVFQEYLRAVTEQQERRERLERELHEAVKGWRLYPMVEAIQALRGVELTGAVILMTELGDITRFDTPRQLMSYLGLTPSEYSSGERRRQGGITKAGNSHARRALVEGAWAYRYPAKVSRHLQLRLEKLPAEVQAISWKAQVRLCKRYRQLTARGKHVNQVVVAIAREMAAFAWAIARLVPQAS

SEQ ID NO: 277071 - protein, 410 aa, unidentified
MEVLYLRCCGLDVHKETVVACLRVVSGGKVDTNVRTFETTTAGLIALSEWLAEKGCTHIAMEATGIYWKPVWHILADGEFELILANAAHVKNVPGRKTDVTDAAWLAELLAHGLIRASFVPDTQTQELRTLLRTRKQLVREKASHILRVQKTLEDANIKLDSVITDVMGMSGRAMMEALIAGESDPGKLARLANYRLKTSQEKLREALRGRVTKHHRFLLRLHLNQIDALDAAIATIDRQVEAGIAPFRAAVEQLSSVPGIRDIGAQVIVSEIGTDMSRFPSEGHLISWAGLCPRNDESAGKRRSNRLRKGAPWLKTTLVQCAWSAVRKKGSYLQAQFLRLKARRGPKKAIMAVAASILTAIYHMLKDGTLYQDLGSNHFQNRSKGQQTNRLIKRLAELGYDVALTPRTS

SEQ ID NO: 277072 - protein, 405 aa, unidentified
MVRVFVGHDWAETHHDVHVEDDQGRRLAKARLPEGIEGVARFHELLAGVVEDPDEVLIATETDRGLFVGSLVAAGYRVLAVNPMSTSRYRERHSTSGAKSDPGDAFVLAELARTDGHNHRTIAGDSDLGEAIKVIARGHQSLIWTRQRQLNQLRSTLREFYPAALDAFAELGSRDAVAILSIAPTPALGRTLSRSKIAATLRRAGRQRRIDQRAEEIQTALRTEQLQAIPLVAQAMGATVTALVAVAAELSAQITQLEVELADRFDQHPDAKIIRSLPGLGMILGARVLAEFGDDPNRYRDTKSRKNYAGTSPITRASGKHHVVLARYARNRRLADACYLWAFAALTASPGARTYYDQHRTAGATHNRALRALANRLVGLLHGCLHHGTDYDEHTAWAHRTATAA

SEQ ID NO: 277073 - protein, 338 aa, unidentified
MKLYAGVDLHSNNNYLGIIDQKDKRVYKKKLPNELSKVLEEMEPYRKEMEGVVVESTFNWYWLVDGLMENGYKVHLANPCAIKQYEGLKHSDDTKESFHLARLLKLGILPEGYIYPKEERPVRDLLRKRLLLVRHRTAHILSFQNLVSRTLGTKMNGNEVEKLKEEEVEKIFSEKHLVLSGKANIAAIQFLLERIREIEKAVLQVAKLKGEYKKLLTVPGIGKILALTIMYETGDINRFPDVGNYASYCRCVGSTRLSNGKQKGTGNRKNGNKHLSWAYVEAANFAVWYYPYIKKYYQKKMSKTNKIVAIKTVAHKLARASYYVMKDQEVFIPKKAFG

SEQ ID NO: 277074 - protein, 436 aa, unidentified
MEITRNARKINLNHIVDVSVDVHRNNLCFFFEIDGTEFSDVCRNRTCVIRKRLLAYADIAKEHGRKGLRVICEPTGQYQNKLMRMARRLGFLTCYVNAESVAKFRVVETNDSNKTDKKDPRVIGTLGKLNKVIRFRMIGEQYLMLRKLHKIYDECDVAITSFRCRIHKLLVELFCDYSFKKDFLYSRSGRALVQEYGCNPYRIVSAGWDSFCQNMKKEASGIRVTTLERLWKDAENSCLNDMPPGYVEVLEGYLGDLLDDYYRMKERKEKITKEMIAILEKLRKDDPLIPPPTPNVISEKNLARLLAETGPLSDFENWRKLMRYAGLNLRTRQSGTFQGQHKISKKGRRLLRKVLQCIALPLVKKGRLYGDYYHKKKEVNKMPGNKAMTVIARHMLRKIYGWYRSDQAFDEERFFVCRSRLKCTPLSRQKIALFKV

SEQ ID NO: 277075 - protein, 373 aa, unidentified
MNACLTPKSTVVGVDVHKYSHTAVAMDCFGQEKARLDFSNERLNDYVLWLRELGDKEDIIVALEDVNGYGFHIVERLSKEKISMRYVPAILTERERKKSIHREKSDYEDAKRVGKVILTKFDETLPAKESIADDQERELSANLDLLTAERRILVQEKTILKNQLHAMLHQIYGDHYGEGFPKVFHKKAIKSFRQKLTQTKFDNPIRVALAGSSIRRFDRLALVEKQLKEIDGSINNIGQKSEAVMALSDNIHGCGIITAASIIAEVTTISRFCDKSRFARYSGIAPIDKSSGRHQRLYTSPFGNRKMNRALHTIALCQIACKGDDRGKIYFKKKLSEGKTKLWALRCLKRQISNRVFQALKEQKRRERTIQNG

SEQ ID NO: 277076 - protein, 386 aa, unidentified
MRADGCLPRRDNAQEVTTIWYIGIDVHKKMCNACIKDLEGNIQKELEFPNKSTGTDKLLEAIEGREAKAVIESTGNMWLRLYLGLEEAGVNVVLANPEKTKAIAEAKLKNDKVDARTLADLLRAKLIAHCYVPPESVRELRSLVRHRITITRDMTRVKNRIHAILDKYELEFSGTDMFGKAGMMWLRGITSKLTELDQFIFDAELRHVETLKSLIKEVETRIAKESAESEDVKLLMGIPGVNYYTALLLTSEIGDFSRFSSANKLVSWLGLAPRVHQSVNTIYNGRITKEGAPRVRWALVQAARSAVRWDDHYRTKYQKIKERRGDGKAIVAIAREITVPMYHMINRKEGYRFSTDSFKTEKLKKLEGESKKWAKMMEVPAGGMTA

SEQ ID NO: 277077 - protein, 438 aa, unidentified
MSNKVIFNLDELFISVGIDVGADFSWMSIALPNQQFVGKPYKILHNSIDSLTTAVSKIKEAEELYSLESRIFLESTGIYHYPLFCYLRDKGFNCSVINPIITKNSTNINIRKVHNDRFDSKKAALVGLKPDLKVSLMPSDLALNCRNLCREYYDLMDNRSAYVNKLQGELRMAFPQYLGIFSKVTINTSLTLLETYTSPSAFLKADKQEIIDIIKSTARFGLTYAQNKYNAIIQAATDANQFGYIIDSNIKRIRLYISFIRKYDEEINNILESLHELVDANEDSDFVKQIHLIETFKGAGFLSAVSIMGEIGDFSAFSKPKQLFAYFGLDPAVKQSGKFEGTKVQMSKRGSAIARRVIHTLTLQSISISRNGEAKNPVLREYYLKKCDSKPKLVAMGAVSHKVCNMIFAILRDNKPFKIIAPQEHIKQYNSAKCDIAA

SEQ ID NO: 277078 - protein, 351 aa, unidentified
MSNPTRWIGIDVHRRRSQIAIIDEHGELTLSRRIVNDPGTFKELLGDPDARHVALKATYGWEWLADLLEEAGYDVHLAHPLRTRAIAAARVTTDAVDAPTLAHLLRTGLLPEAYIAPAELRDLRELLRHRAVLTRMRTAVKNRVHAQLARHGIRPEHTDLFGKAGREFLAALELPEGSPWRLDSLMSLSADFDREITATTGEIDARAKADERVPVLCQIRGVGRYTAMLVVAEVGDVKRFPTARHLCAWAGLTPTGRSSDGKARLGHISHQGSPTLRWALSEAAQKIPTGSGPLRVMFERTAKRRGRNVAKVAVARQIPTLCYYGLRDGEIRCLTNQPDTDNHHDELAEAA

SEQ ID NO: 277079 - protein, 295 aa, unidentified
MEIHTIGIDLGKATFHMVGLNEGGEVVVRKKFSRRQLLQFTSNLRVALIGMEACGGAHFLGRALRDQEHEVRLIPAQYVKPYVKTNKNDYIDAEAIAEAVGRPKMRFVPIKSDDQLDLQSLHRVREHWVMRRTAVINQIRGLLLERGITVRKGRCHVEAALPGILEDPDAKLSGALRILLAQLQMEMNQLQGQIDGADAVIKQTAGENEACRRLVAIPGIGPVTATALIAAIGSGTAFKKGRGFAAWLGLVPGEYTTGGKQRLLGISKRGNSYLRRLSYRGPMLCCNRGQSNLPP

SEQ ID NO: 277080 - protein, 372 aa, unidentified
MERCCGLDVHKDSVFMCILTETGEKLEEVFGTLTADLGRLRDTLLGYHVGEVAMESTSIYWIPIWRVLDTDFDVKLVNPYFIRQLPDRKTDVKDAQWIATVLQKGLIKGSFIPEQHIQELRQYNRRITYLNRNLQRADQSIDLILQRCNIRLSNYVSDIGGKSMRKVIKAISMGKTDPVELTELVHTRTKNKHGVQTIKESLSGIVSPTDMDLLGMALDEAEFYQKQLTACKDKLLELCGNYYQEELELLQGIPGIKEHSAASIIAEIGVDMEAFQTASHLVGWAGLRPRNDQSAGKIKGRKTLHGNKYFRMMLVQCAWGASRTKQSSFLIRYNTLKKRMNHNKALMANARKLLVVIWNILAKKQHYRPLAA

SEQ ID NO: 277081 - protein, 317 aa, unidentified
MTMTKRDEIFVGIDVSKDSLDVALSSEKQGNQVGNHRKGIASLVAKLRRIDPCLIVVEATGGYEQAVISALFNAGLPVARLSPQRVRQYARARGILAKTDRIDAGNLADFGEHIRPRLFVAKGEDQEHLSALLTRRKQVSEMLQAEKNRLRTAYPDLRTSLETIIASLKQELERLNKEISSFLENHEELKAQEQLLRSARSIGPVTAATLLAELPELGQLDRKQIAALVGVAPMNQDSGRKRGYRKTKGGRPDVRRTLYMATLTGIRYNPVIQANYERLVGRGKEKKVAITACMRKFLTILNAMMRDQKSFQSPTAV

SEQ ID NO: 277082 - protein, 377 aa, unidentified
MESIIYVGIDVHKDTYSLCSFEMQKDVFFSQHTVKASTANVVSYLNKISESNGNAITVCGYEAGPTGYKLCLDLQQKGFNCVIMAPTSIAKTAKDKMLKTDRADAQILARTLAYHSYKQVVLPTENILAIKEVVRLRASVLKSCKKAKQNLLSFLLYHGISYPGGGRESYWTVKFFTWLKTVTFASDYLTYCFEEYVSEVSRQIQRLEQLNAKLKELEGDKEISEGVKKLKCISGIDTVTAISLTAETGDFNRFKSAKEFASYTGLIPGRHDSGLSVGNSVGITKQGNQNLRHLLVESAKSIKRATALSHGQKSRRLLARQEGMKSEIINYADRAALRIKSRMRKLEIRGLNYNKAAVACARELACFAWGIMTNHIQ

SEQ ID NO: 277083 - protein, 430 aa, unidentified
MKKKNHSNEKLAAITFKTLIVGVDIAKHNQWARFVDCRGIEHNKALKFENNRNGFNAILTRIYEICKNEDFNKVIVGMEPTGHYWKAFANFLLKQAKITVVLVNPYHTKKAKELDDNSQTKSDKKDALTIARLVKDGRYFETYLPHDVYAELRGLTTTRHSMNKKKKAIVNTITAVLDEYFPEFVSVFKHPFKGKASMHLLKVCPIPKFILELGEDGVLDEIRKAVKKTVGRKRAVQLVEAAKESIGVDYGEYAACFKIQQLMEELELITGQLDALEAEMAETLKKTEISEYLLSIDGMGVVSLATCLGELGNPLRFENARQMSRLAGYNLIEDSSGKNKSGTCISKRGRKNLRSVLYQISLTMVANNKEMRQLYDYLKTRENNPLKKMQALVVVSKKVLTLIFTLSRKNEYYQPELVFGEYRKSQLSVA

SEQ ID NO: 277084 - protein, 409 aa, unidentified
MQVVHEVCCGLDVHKKSVTACVLWASGRRRQAREFGTFTKDLLEMSDWLQSCGVTHIAMESTGVYWKPVWNLLEGQFVVLLVNAQHIKAVPGRKTDQKDSEWIAELLQHGLLRASFVPPTPTRELRDLTRYRASLAQEINRIANRIQKVLEDANIKLASVATDTLGASGRAMLEAIVNGEQDSQRLAQMSRGLLRNKIPQLQQALEGRVTPHHRFLLRELLDHHYFVESKMRRIEQEVAERLGPFQSEVARLCTIPGVDRVTAWGLVAEIGLDMSQFPDAQHLASWAGLCPGNHESARKRKSGKIRKGSLWLRRCLCQGAWAVSTKKNNYLSALYRRLAARRGSKRATIAVAHNLLVIAYYILRDKTCYQDLGPDYFDRLNPEGLRRRLTKRLEGLGFKVTLEPVAQVT

SEQ ID NO: 277085 - protein, 415 aa, unidentified
MHTFEQLTHFAGFDWAKEHHDAVILDRQGATVQSVTFAHTAEGWAQWREMIKAYPALGVAIETNQGAAVEQLLQSPVTVYPMQPKAAERYRDRHVPSGSKTDRTDAWCFGDALRVDGQHWRPLAPEDPLTEELRLLCRDEVELITQRTALVNQLQQALYEYYPAALEAFNDWTAPSAWEFVLAYPTAEQLVKAGKRKWEKFLHTHKLWRPDTAPKRLEIFGRADRFCGSEAVIRAKSRLAVSAAQVLRTLQKQLEEYRSAIEKLFAQHPDHDLFGSLPGAGVKLAPRLLSEIGSDREQYPDAQGLQCVAGTAPVSFESGKIRRTKIRWHCNRHLRHAVHLWADCSRKFCAWAGTYYQAQRDEGKSHACALRCLGQRWLKILWKIWQSRQPYDETIHALNQQKHGSWLLQFKPKTT

SEQ ID NO: 277086 - protein, 348 aa, unidentified
MRGAVQMQVSTIGLDIAKNVFQVHGIDANEKVVVRKQLRRSQVLAFFKALPPCLIGMEACGTAHYWARELTKLGHTVRLMPAKDVKAYIKRNKNDAADAEAICEAVRRPTMRFVQVKSAEQQSQLMLHRTRDLLMRQRTQVINALRAHMAELGITAAQGTAGLKELLKIIAGDADGRLPVDAHASLVVLAAELQAMQTLIGSLEKRIMAQHRTSDESKRVATIPGIAVIGATAITATVTDPKVFRSGRDFAAWIGLVPRQDSTGGKQKLGPISKQGDRYLRRILVVGAHAVLKQAKQKPEKYPWLTQLLARKPFKVVAVALANKMARTAWALLAHGGTYRAPLLAAAA

SEQ ID NO: 277087 - protein, 410 aa, unidentified
MDAIVERVSGVDVGQAMVVATVLVGGAHQRPTKATRRFRTVTRDLLAMREWFQEHGVTHVALESTGVYWQPVYALLEDAFEMIVGNAHHIKNVPGRKTDVKDSEWLANLARHGLIAKSFVPPKPVRQLRDLVRYRRKLVESRTAERNRLLKLLETANIKLASTMSDVFGVSGMLMLRALLEGRAQPSEMARLAKGQLREKTEDLELALDGRLEDHHRFLLTLQLRRLDRVESDIAQLDARIDEALAPYQEPHERLQQIPGVGRVQAAVLVAELGTDMRVFRSAKHAAAWAGVCPGNNESAGKHGGTPVRKGNMHLRSALVEAAIAASRKKGSYLRDKFYRLRARRGVKRAAMAIAHKILIAAYHILSDGAAYRDLGDAYLDGLEKRRTTRNLVRRLERLGYEVTIGPKVA

SEQ ID NO: 277088 - protein, 311 aa, unidentified
MNPSLVHAGLDIAKATLDLHLQGQSLSFAHDPPGCAALVARLRALGTPVLVVCEATGGWERPVVAALHAAQIALSITNPRQVRDFARGRGQRAKTDRIDARMLAAFGVANLPEPTPAPSAVQAELSAWVTRREQIQAMLSAETTRQIPGLPKTVARDIASSITRLQKQMAQITARLAALLSATPELAAKAARLCSIQGVGPGTTATLLGHLPELGTRGGRTLAALAGVAPFNDDSGPRRGQRRIAGGRASVRCALYMAAFNAIRYNPVLKPFYQRLRDAGKPFKLALIATARKLLTTLNTLLQKPQFTPRS

SEQ ID NO: 277089 - protein, 397 aa, unidentified
MACLHYETSEGCAGLADAEPHSQGTTMQEISKVFVGLDISKLKISVALAEEGRQGEVRFLGDIDNTPDAMKRLVRKLSGKYLQLLFCYEAGPTGYGLHRQITALGHDCSVIAPSLIPKRSGEHVKTNRRDSLTLARLHRAGELTTIWVPDLGHEAIRDLVRAREAAMEDLREKRQQLQSFLLRHGRLYPGLRSWTLVHARWLSSLIFEHPAQYLVLREYRQAIEDAEARLKRLTQQVADVVSTWSMAPVVEAYQAMRGVAFLTAVTFVAEIGDVRRFETPRQLMAYLGLVPSERSTGEQVRRGSITKAGNPRARRVLIEGAWTYRYPARLSRPLQVRQESLPEVVRAIAWKAQVRLCARYRRLMAAGKRQTLITTAIAREMAAFLWAIGHEVQPCSA

SEQ ID NO: 277090 - protein, 320 aa, unidentified
MSEPILGVDIAKKKFDVALLVNGKLKHKVFTNDQGGFAELTAWLTKQGVDHVHVCMEASSTYGDELAIYMHDAGHTVSIVNPARIKGFAQSELMRTKNDKVDAGLIARFCLAMHPDPWTPAPPEIRQLQALVRRVDALINMRTQELDRLGTAQDTIEHSIREHIAYLDKQIDALKQQVAALIKNDPDLKIKRDLLKSIPGIGEATIAAILAELPVFERCDHVQKVVVFIGLAPRQFISGSSIKGKPRLSKVGHARLRKALYMPALVSIQCNPIIQTFYHRLKGKNGKVIVCGVMRKLVHLIFGILKSGRPFDPNYTPHCA

SEQ ID NO: 277091 - protein, 400 aa, unidentified
MRAVFGIDVSKASSEVAILVNGEKVHGYTMTNDAIGFSRLLGDLKTVHKPEIIFEATGVYSRRLQTFLDEHGYAYTRLNPLEAKKQLDSLRVRKTDQIDAEKLAQSQFVLNRKTTYVQEEIYQNLRDLSRFYQNLTEDIVRAKNRLHKALQVTFPELENILSTPTGEQYWNLVIAFPCKDFVLELSKDKLSESIRQSTSKRISDKRVAYLVEKLIALANQSYCAVKKTSPMLEEVRYYTKELLRLSEQRQAVLDEMVELAQPLPEYDILLSIPGIAETTATSIIGELGDIRRFQSANQINAFIGIDLRHYESGNFLAKEHITKRGNPYARKILFKCIHNIASASHTNPCHIADFYEKRKRQSQTTSTKPHTIASIHRLIRTMYYLITHNKLYDYRSTQNQ

SEQ ID NO: 277092 - protein, 354 aa, unidentified
MLAELVDHVIGVDPDRDWITVAALDSRTSGVIATDRFAATRDGYRNALLWADAYTTASERAWVIEGTASYGRGLTVALQRSDELVVEFDRPTRKATKDGAKSDALDAIRAAREALGRDKLAEPRAHDGMREAIRVHTVARAAAVRAHTAAINELKAFIVTADEQLRGELRGLGTNKVVTRCSRFRDSAARPIDERCTRNAMRALARRAQHLEAEVAEHDAALKALIDQAAPQLIAERGIGYVTAAAFYLAWSHPGRCHSEAAYARLGGTAPIEVTSGQNQDRHRLCRGGDRQLNRALYLVAVTRQRCCPTTQNYIARRTSEGKTKREATRCLKRFIARRVWRLLEHPETHLDNT

SEQ ID NO: 277093 - protein, 401 aa, unidentified
MASVRDNATRIKRFRELKATLRTHRQRLLVGIDVAQADDVVHLRHAHTRVVVPTLTIPNTPRGFTALWARIQQAQRATGCREVVCGLEPTGTYHQAIATFLEAQGADVVLVSSSVAYWNRRTQDGTWDKHDPKDAANCADLLEQGKVLFYSQPTGPLAELRHLVRCLRRARSELAACKARWRTTLRPALAPMGAPLPPRLWAELPAVLQAWERAAPGRPAVPKGRLPLGLATACADLGAQVTAVQARIVALEAACTPVAERLPASALLRSIPGIGPTVGAILLAEIGDIAWFTKFSQLRKLAGLDIIRIQSGQFAGQARISKCGRGLLRWALYQAAVGAARTVAGRAHLAALKAKRRGDRYAGFKAVVELAAKVLRIVWGVWRSGTPYDPMRPGGLQRQAR

SEQ ID NO: 277094 - protein, 466 aa, unidentified
MKHNQRTPVGKRRKSPSLLERIQPAAAGIDCGEKSHYVAVPRERDPQPVREFRTFTTELYHLADWLAQCGIKTVAMESTGVYWIPVYEILEERGFEVILVNARNVHNVRGRKSDVSDCEWLQELHSVGLLRPSFRPAAAIVALRSYLRERATLVKEAATRIQRMQKALTQMNLQLHTVITDLTGTTGLNIVRSILAGVHDPEQLAVHRDPRCKADKAELVAALTGNYRAEHLFSLRQNFAAYEFHLGQIAECDAAVEALLRNLAAQQPSPSAALPPPRRKPTANNHAPHFDIRTPLHRLTGGADLSQIDAIGPQAALQLVAEIGTDMSRWRTAQHFTSWLTLAPNNKISGGRLLSSRTPPSANRAAAVLRRCAMSLTRTRTALGAFYRRLAVRIGKPKAITATARKLALLVYRVLSGDLVYQDPGANAYHQLHLARELKSLRRRATQFGYHLIDRNTGEVLLNPVS

SEQ ID NO: 277095 - protein, 418 aa, unidentified
MTTKAKKVKRINEKTMIAALDIGKSFHYGYFRAPNGQDIKAFRFYNTKKSFNKFWTKICRFKRAHQLEQVVVGFESTGPYAEPLFHFLRKKDVKLVQVNPVHTKRVKELTGNSPNKTDKKDPRVIADVISLGHALTLVVPQGAAAHLRRLSHARQRSLKQRTAMLNQLQDLIFITFPEFLSIMKDIKTKTATYLITHHPSADSIGAIGVEGLAAIMKKISRGRLGHERAQQLVAAAKNSVGICEGKESILLEIEHLNNKIEYENRFIDNLENQMADYLQQIAYSGSILSIKGIGPVTVAGLIGEVADFKKFDTIGEVMKLAGLDLFEISSGSHRGQRRISKRGRPLMRKLLFFAAINAVKSKGIMHDKYQQMLARGMLKMKALVAIARKLLGLIFAVVRDNSKYVENYTGNYHYKLAA

SEQ ID NO: 277096 - protein, 343 aa, unidentified
MQTITTIGLDIAKSVFQVHGVDAAGQVVIRRQLKRRYVLPFFKKLPPCLIGIEACASSHHWSRELQALGHTVRLMPPAYVKPYVKRHKNDTADAEAICEAVTRANMRFVPTKTPEQQSCLMLHRTRHLFIRQQTAVINAIRAHLAEFGIVAPVGRNGVEQLLSIVADSSDKRLPDVARVCIAALGAQLRMLKVQILNFDRQIMAWHQSNEASKRLDQIPGVGPVLATALVASVADPKAFRSGRDFSAWIGLVPEQNSSGGKDKLGGISKRGDRYLRSLFTTGALAVIRYAKIHGTKHRPWLTALLARRPTKVAAIALANKIARMAWAMMAKGECYKEPVALAA

SEQ ID NO: 277097 - protein, 420 aa, unidentified
MKVYNVDDFAVLIGIDWADKKHDICEHPVDSEKYNYSIIKSKPEALHEWAMDLKKRYPNQKIAVVCELKKGPLIYALTKYDHLTLFTVNPSTVAKYRKAFTPSGAKDDPSDAFVQVEILTLHMHKLSVIEPESASVRSLAQLVVYRRSLVQDNVDLSNKITVALKNYYPQALEWFKEKDTFIFCDFISKWPSLAHAKRAKKQTLLDFFNSHNSHYFNVNEARISSIKSAMPLTGDIGVIEPNQMLVEVLIKQFKVLLKGIHMLDKAIKVAYKAQHDKVIFDSLPGAGPQLAPRLLVAFGCNRDRYDDAAELQKYAGIAPVIERSGKKMWTHWRYSCPTFLRQTFVEWAGFSIRYSFWAKAYYEQQKSKGKPHNSIIRSLAFKWIRIVFRCWKTNTPYDESRYLEALKRRGSPLLKFTINS

SEQ ID NO: 277098 - protein, 546 aa, unidentified
MNHVHNDRADRRREGRGGSKPSTGGLLGLIAADISLGVIHDRANRPTLARQSEVVNNSAAGENSAGGRPASARSRSYRSDPQRIKGRLPGEPKALAPTSNRKTPQEGHHISLVDSRAKRRKNQRQQRQTMNDSELWKQYRAFGAVDWASEKHSIVVVDQAGKVIEDFEIEHSALGWKKFREKLQPYGSIPFAIETSQGTAVEQLLEAAMIVYPLNPKSAQAYRERKAPSGVKDDRLDAWSFADALRVDGQDWKALRPEEPLIKELRLLCRDEVALIEQRTAFIQQLRHALAEYYPAALEAFEDWTSVSAWIFLQRFPTPELLAQAGKRRWQKFLHSRRLWGSDQGPRRMEIFAHATELSGSAPTAKAKSLLALSLVQMLFVIEKQLAVYRQRIEELFARHPDHDLFGSLPGAGPKIAPRLLAEIGDDRERFDGDTQNLQCFGGTAPVTKRSGKYRHCHQRWACDKHLRHAIHLFAEQSLSRCAWAQTYYQHHRQKDRSHANALRRLGHRWLKIIHKMWMDRTLYDPELHHRNQLQHGSWIFQLKEC

SEQ ID NO: 277099 - protein, 340 aa, unidentified
MHIRSVGIDLGKTTFHLVALGDNGKVLLKKKFTQRQLIAFTVNLQTCLIGMEACSGAHFIGAALRSQGHDVRLIPAQFVKPFLKSNKNDFLDAEAIAEAVARKNMRFVPIKTDDQLDLQALHRVRDRLVQRRTAVINQVRGFLLDRGITFAAGPAKLRREIPQLLEDSEQNITPRMRSLLAYLWQEWKQLDGDVERVSGDIDRIAESDPACQRLRQIPGIGPLVSTATVAAIGNGAAFRRGREFAAWLGLIPRQHSTGGKARLLGISKRGNVYLRRMFIHGARAVLLIVKYDTGRLGQWARELELRAPRNKVIVAVANKLARIAWAVLSSGNEYRAAAAA

SEQ ID NO: 277100 - protein, 327 aa, unidentified
MEQSVIGIDVAKDSLDVFLLSGSQQAYKQFANDLDGYRHLLAWLKHKRADRVHACLEATGQYSDGVAAYLYEQGLAISVINPARIKAYGRSKLQRNKTDKADAELIARFCAEQNPALWTPPPACFKELQALVRRLDDLQINLTQEQNRLHSGTQSETVIAGLKTHIAFLEEQIKQLQRAIQDHINQCPELKQQQELLISIPGVGKLTAAKLLGEINHITQFEDARQLAAYAGLTPKNFFSGSSVRKKSILTKTGNANLRKLLYMPAISAKRWNPIIKAFCERLLASGHSPMQVIAAAMRKLLHLAYGILKSGRPFDPNYLVNVQAFS

SEQ ID NO: 277101 - protein, 403 aa, unidentified
MLFVGDDWAEDHHDVEVQDEHGRAMRTARLSEGVDGMARFHELVARFLPEDAKPSDVLVCIETDRGPWVRALIAAGYQVYGVNPKQAARHRELLSLSGAKSDKADAHTLADMVRTRRHQLRQVAADSDIAEAVKVVARAHQTLIWERTRHMLRLRAALRDYFPAALAAYQVLTLTGADALELLAKAPTPAAAAKLTIGQISAVLNKARRRDIPAKAAAIQRALRTEHLGQADIVAGAYAATVRATVAVLQTLNTEIRTLEGQVEAHFGQHPDAEVYLSQPGIGVILGARVLAEFGDAAGRYASAKSRKNYAGTAPITRQSGKSKTVHARFIHNDRLVDALHMQASAAVLHDPGSRAYYDELRARDIGHNAALRQVGNRLVGILHGCLKPPPSTTRTLPGHTVS

SEQ ID NO: 277102 - protein, 322 aa, unidentified
MTHPIFFVGIDVAKAKFDVALLISEGKYRSKAFSNDPVGHQRFVDWLDQHRVLEAHICMEATGAYGRNLARFLAQQQILVSVVNPAQIHAFGKTELTRAKTDKADARLIARYCQMHRPAPWVPPADEIVVLQALVQRLEDLRTLQNMESNRLESAEGLARQSIEVHLEFIDQQIQIVRAQIEIHIDNHPGLKKQQELLSSIPGIGDNTATTLLAFLSPLERFHSVKQVVAYAGLNPSIRQSGQWVGKTPIAKAGNALLRKALYLPAVVAKQHNPVLSAFCDRLLLNGKRPMQVVVAAMRKLLHLAFGVLKYGKPFDPKFGVA

SEQ ID NO: 277103 - protein, 305 aa, unidentified
MVFIGIDISKATLDAHRLSDGASAQFSNNKAGFAALQRWLKSHDIARIVYEPTGPYHRAFEVSMAPQFPLVKVNPLQARRFAQAQGVRAKTDQVDARMLAVMGQAFSLEPQASTSNKQRNLKELNVARQALIKDRTRALNRQKTLTLPILKRQAKARITQLNTQLVQVNEAINELLQNTPGTSRAFDIICSIPGLSKVSAAALLIEMPELGTLKESLAGLASMTRQSGRWSGKAFIQGGRKHLRDALYMPSVVAARHNPDMKRFYERLIDAGKPAKVAFTAIMRKLILLANALIKQDRMWTQIKA

SEQ ID NO: 277104 - protein, 467 aa, unidentified
MKETPRKEVNAARAEQRVKGHLEHVNLYAAGIDIGSHSHYVAVPEELDSESVREFSCFTRDLNRMADWLVKIGIQTVAMESTGVYWIPTYDILEERGLAVLLVNARHVKNVPGRKSDVQDCQWLQQLHTYGLLQGSFRPPEETVALRTYTRQREKLGQLAADHIRLMQKSLRQMNLLLENVVSDINGVTGLAIIRSILAGERDPSVLAQFRDKRCKHDEKTIAASLEGHYRDEHLFALRQSVELYDVYQKQIANCDAMIEAQLGRMGHRGDKGDLEASQKPKNKNGPGFDVRGELYKMTGVDLTQIDGINEITALKVLAETGADVSPWPTEKHFSSWLGLSPGNKVTGGKILSGKTKPSASRAAAAFRMAAFGLLRSKSALGAYCRRQRARLGAPKAITATAHKLARIFYSMLKNGKGYVDPGQDYYETQYRDRVTKSLQKKAASLGFDLVQRKTSDREPENVLSMG

SEQ ID NO: 277105 - protein, 317 aa, unidentified
MAQDNAFVGIDVAKHELVVHLYPDGEGWRVTNSASGLRELATRLARVARNRVLRIGFEASGGYERSLAILLESKGFEAYLLDPARVRSFAKAEGKRAKTDPLDAAVIARALATLHTGLKPWRHDPAAQRLAERIRLRDQLMAQMIQSQNLLETTADAAAQRMTRAHVANLKAKIQRLDKIIADLIAENPTLCQRAKLLRSAPGVGPVVAATMLAHMPELGTITGKQAAALAGIAPFDRQSGTSTKPGRCQGGRPAVRRALYLAALSIMRTKKSYLATLGLRLKAQGRPFKVAIIATARKLLVALNAMLKDGQSFLSA

SEQ ID NO: 277106 - protein, 309 aa, unidentified
MSCYLGLDVAKASVVLASEPASQVGQFATDPAGLQTLVAACQAQPVTLIVLEATGGYEAPVAAALATAGLPVTIVNPRQVRAFAQALGRLAKTDRVDAEVLALFAARVRPTPRPLPDAATQELEALLARRRQLLEMLHAERQRLPRARGREVRRNLRAHIRWLEHGGIDAEAELERLIQQSPVWRVQDELLQSVPGVGPMLARTLLGLVPELGQLDRHQIAALVGVAPLARDSGTLRGRRTCWGGRPAVRTVLYMAALTAARYNPVLRTFYQRLRAAGKPAKVALTAVARKLLVLLNAILRDQRPWRYA

SEQ ID NO: 277107 - protein, 421 aa, unidentified
MQVLYARCAGLDVHRDTVVACRRLVLEDQIHSEVQSFATTTTGLVALLDWLTQGQCTHVAMEATGVYWKPVWHILESSFELVLANPQHIKNVPGRKSDVNDATWIADLLAHGLIRASFVPPVPIQELRDLTRTRKQLVREVGQHVQRIHKTLEDANLKLSGVLSNVVGVSGRAMLEAIIQGETDPQKLARLAHPQLKAAPEDLVEALRGRVTKHQRFLLKLHLGQVDATTQAIKQVEEQVGEALAPFRQRAQLLRTIPGVGERVAEVLVAEIGVDMSRFPTAGHLRSWAGLCPRMDESAGKRRSTRLRKGAPWLKTVLVQAAWAAVRTKGSYLRAQFLRLKARRGPKKAIVAVAASILTAAYYMIRDGVEYKDLGADYFERKDKNKAVLRLIKRIEDLGVKVRLDTKPGREGGTQEVVVAA

SEQ ID NO: 277108 - protein, 370 aa, unidentified
MKKKVLYVGLDVHKKTTDVAIAPGRSNGKVRSYGKIDSTVDALNKLIKKLEDGDKQLQFVYEAGPCGYQIYRHLDALGIACSVVAPSLIPRRSGDRIKTDRRDAVNLARLLRAGELTSIYVPTVEDEAIRDLVRCRDDIKRFERKARQRLLSFLLRHGYQYSGKRNWTKGFYNWLATVKFSHSAQQVTLQEYIEATNECSERIKRITEQIQVHVEEWSRARFVKAYQALRGVSLIVATTVVSEIGDMRRFPTPKQLMAYLGLIPSEHSSGKTVRRGPITKTGNSHVRRSLIEAAWTYKMQARVSTILLKRQQGLPKTVCDISWKAQTRLCARYRRLMARGKTKQTVITAIARELSAFIWAIDKEMQVAHE

SEQ ID NO: 277109 - protein, 355 aa, unidentified
MKYYTSTTEYNCGIDLHARQMYVCVMDRQGKKLVHSNVRDNDFDYFLKLVQPYRHDLTVCCECMFGWYWLADACQAAGLKFVLAHALYVKAIHGGKNKNDRIDSEKLTHLLRSNLIPPAYVYPAERRPLRALLRQRIYYVWRRAELLARIHSHQLAHNRIPAKQTRRVRDSWEEQLLGAEDHPLRQIALKNDLAMIRHFDHQIFQLEEELQRQTKKVACREYALVQTVPGIGENLGLTVLYEIGDIDRFPTVKDFLSYCRLVKGTVASAGKIKGLRGAKLGNPYLRWAFGEAAVIAKRDHFRIRPLAQRLEARMEGNKFKANTVVAIKLARAVYFMLKTKTVFDPERLVAALARN

SEQ ID NO: 277110 - protein, 410 aa, unidentified
MPKIVYPVCCGIDVHKSFVVACIANTDATLVTTYKSKRFSTFTGDLRRLADWLTANDCRDVCMESTGKYWIPVWNILEPTCKLVLAHPKYVKAIKGKKTDKRDAKWIADIFKHDLLNGSFIPPADIRQLRDLVRYHTKLTSYNTGEKNRAQNCLTVSNIKLDDVFSDVFGKAASAITQRLLENNEPFDVRPYLTKGIKASPEEIQAAVDGAMCATQAEKLRIIRSHMDSLAVCKANLESEILGLAEKFLPQLNLLLTVPGIQTFSAIAIIGEIGADMSVFETSRHLCSWAGLAPQNDNSAGKKKTTRVSRAGVYIKPMLVQCALAAIKSNKHPEVKNRYNAIKKRRGHKKALIAIARMLLTAIYNILKKNEPYNAELYLQANKPPVQREVSVEQAIFILQRQGYLVKPIA

SEQ ID NO: 277111 - protein, 342 aa, unidentified
MGQVRTIGLDIAKSIFQVHGVDAAGEVVLRRRLTRARVVPFFEKLAPCLVGIEACATSHHWARELRKLGHAVRLMPPSYVRAYVKRQKNDTADAEAICEAVTRPTMRFVEVKTPQQQSILVLHGTRTMLMRQRIQLSNVIRGHMAEFGVVAPIGREGLLTLIDALHEETDDRVPAEARHCLQALAAQLRLVNAQILENDRKIRLSARATDVGRRLMGIPGVGPVLASAFVATVPDPHVFRSGRSLAAWIGLVPRQNSSGGKERLGGITKQGNRYLRQLLFVGAMAVIRYAERHGTRRPWLVQLLARRTTKVAAAALANKTARMVWAIMTTNQTYREPELRVA

SEQ ID NO: 277112 - protein, 346 aa, unidentified
MEFTTIAVDLSKTVFQVSLADHRHRIVGRRRLNRRQFSRLLATTPPSRLVMEACSTAHYWARVALQHGHQVKLLHARYVRPYVRRNKTDAADADALLQADQDRELKPVPVKNEHQQALQSLHRIRAQWQKARTARINSAKALLAEFGMTLPRGRGKLSHCLRLAAETLPYPLQRSFHEVIDDIGTLDEQLKRLDRDLAALCRQEPDAAQLEGISGVGIVTATALIGRVPDIHAFRRGRAFAAWLGITPREHSTGRRRRLGAISKQGDRYLRTLLIHGARSALLAAARASNRGAPLTRLQRWALATQLRVGHNKATVALANKMARIVWAVWTQRKPFNGDDALRFTQ

SEQ ID NO: 277113 - protein, 351 aa, unidentified
MMIIGVDYHPSFQTIAFLMEETGECGEQELNHSDGQAEKFYRDLKQRGISVRVGMEATGYSRWFERLLAELGFELWIGDPAEIKAKRVKKQKFDREDARLILRLMRENNFPQIWVPGPENRDLRQLLWHRHRLVQMRTRIMNQLQALAMNEGYRWKKKLFSEQGRAQLEKLTLAPWASRRRQELLELLDRMNPTIEELTAAVEREARKRPEAMRLMTHPGVGPLTALAYVLIIGTPTRFQRGKQIGTYVGMIPCEESSARKQRLGHISKQGNSLLRFLLVEAAQAAARIHPDWRRRYLHLAMRRHKSIAKVAMGRKLAVRLYWMWRNGCEYSQSLEFGSYAGQLGTGDGVK

SEQ ID NO: 277114 - protein, 470 aa, unidentified
MKKTRHPTPGKPKGRRKKAAPTPSVHSAINPRHHPDAAGIDVGAEEFVAALPPGRCEQTVRTFATYTSGVEALRDWLLEHGIKTAALESTGNYWIMLYDKLTAAGIDVYLVNARHVKGVPGKKTDVCDSQWLQQLHAAGLLRKSFRPALDVVPLRYLMRHRSEMVEHAVTQLHLMQKVLTEMNLKLHHVFSDIDGVSAQAIISAILAGERDAHALARLRDRRCKSPLQDILEALRGDYREEYLFVLRQAWESWQHVQKAIVACDEQLTALAAKVAGEVQTALPAASSKQHHLTKNSPNTGVYQTAWRFYGVDLSNIPGVSAGVLSMLTSEVGTREQMLRAFPSAGAFASWLGLCPDNRVSGGKVLKAKTRKVPSRLARALRMAAFSLQRNDSEMGQMLRRFKGKLGKAEGITATAHKLARVIYGIIKSQRSYDEKEAFKLSPQKLQRRRHRLEQEASALGFALTQLPAAA

SEQ ID NO: 277115 - protein, 334 aa, unidentified
MHESCTMTIDATVGIDVSKDRLDVVLRREEREQPRVSANSAAGFRDLHCWLQGQGVQPQHTRVALVATGSYSDAVVLFLYEQNYLVSVLNPAVLVDYRNSVNVRSKTDALDARLLARYAQERRPRGWKPLPEDVQTLRFLLARREDVQHMLQQERNRLHAGRMDNWIRTRVQQHVTQLDKELQVIWKRTMDHLKAHPFLKSMWRRLQTIKGIGPSGAAYILAEVGEIERFDDPRALVSLAGLAVKRHDSGRSVHGKPRIDRHGRTGLRRILYLCAVSSLRWDPHMQRFAARLQARGKPLKVVQVAAMRKLLHIVYGVWKHEADYDPTLAFPEVA

SEQ ID NO: 277116 - protein, 347 aa, unidentified
MIIIGCDLHTRSEQIAMLNTETGELEERRLEHEDGEARRFYAGLKEPALVGIESTGYTRWFADMLAELGHELVVGEAGKIRAKETRKQKHDRRDAEHILNLLLRGDFPKIWLPSAEERDVRVLLEHRHQLVELRTRAQNGLQAIALSYGLRRRRRLWSERGQEELKKLPLREGMERRRADLLRLVRQLDTWIQELDRRIEQEVAQREEARRLMTHPGVGPQTALATVLVLGPVERFPDDRHLTSYLGLIPQEDSSAGRQHFGHLTKQGNRLLRWLLVEAAQTASRYDPRIARAYRRLTFRKGRAIAKVAIARKLAIRLYIMLRDKIDYAEFCRRGSHAGMLEDVALV

SEQ ID NO: 277117 - protein, 429 aa, unidentified
MNSTQNKKLEQVKETTLVIGIDVGSETHYARAFDWRGYEYSKKAFRFSNTEQGFTSLMTWMQEIKDAQGKEEILVGMEPTGHYWFSLGVFLRDNGIKPVLVNPHHVKKSKELDDNSQSKNDRKDPKVIAGLITAGRFTYPYIPEGVYAELRTATNLRFRIEAELTSVKNRLARWFSMYFPEYRNVYGKADAVSGMMVLKVAPLPEDIVELGAEGINQIWRDAKLRAVGMKRATSLVEAAKRSIGLRDGKDAAKLEFQILIDDYETKHKRLDEVMTLIEKLMEKIPEAKKLLGIKGIGMKTVSGFLAEVGDVRRFTDPKQLQKFAGLAIVDNESGKHKGKTTISRRGRKRLRYLLFEASLSLAATNPEFREIHRYYTTRTNNPLKKIQSLTAIGCKLIRIFYALLTKEVTYDAEKMLTDIRRLPEYQTAA

SEQ ID NO: 277118 - protein, 370 aa, unidentified
MQTIHRSQTLFVGVDVHKDTHTAVGLSPFGEKIFEMTIGNEAEDFISLVDKTKVEAEKTGLIPSFGLEDVHSWGERLSSFLVEEGLPVVAVAPILVDHRRSKTTHPEKNDSLDAAGVAEVMIQRIDTLPTYTLSQEAQKAKQIRELSLEREWLVKERARLKNQLHILLHRIHNSGYRMKFKDPFSKKALRYWMRSTPKDTDAILAARMKRATRRLLDLREEIQEIEDELETMMKENGQTLSTASGCGTVIAAEIIGEIGDIARFHSPGSLAKYAGCAPREHSSGKTIRWRKTKSGNRRLNRAFHRMALSQISRSGNEAARTYFKRKISEGKTKAQALVCLRRQLVNVVWMMLKHRTEYRYPQEKIVDFFS

SEQ ID NO: 277119 - protein, 446 aa, unidentified
MKKSSRMSIVHPHAAGVDIGAEFHVVAVPPDADAEPVRTFQSFTGDLHRMSDWLKTCHITTVAMESTGIYWLPAFEILEAAGFNVILVNARDAKNVPGRKTDVNDAQWLQKLHSFGLLRASFRPEHDISVLRSYLRQRERLTEYRAAHIQHMQKALMQMNVQLHHAVSDITGVTGLSIVRAIVSGERDPSILIQYRDVRCKKTPEVLQQALTGNWQPEHLFELEQSVAFFDFYQEKICECDDQIETSLLQLSTEIKEPEGVLPSARHRTKQPNQLSFDVRPLLWKITGADLTQIHGFGPYLALKFVAECGTDMSRWPDASHFTSWLCLSPGNKISGGKVLSSKTRRSSSRIAAALRLAATTIGRSDTALGAFYRRLSSRIGKAKAVTATARKLAILFYNALKYGQKYVDPGADYYEERYRSRVLDGLKRRAKSLGYSLQQDPELCV

SEQ ID NO: 277120 - protein, 338 aa, unidentified
MTILMGLDQHRAQITADWVDTSTGETWRSRVTPGHRGGVRQFLGRFAGQELEVALEATTGWRFVVEELHAVGARVHLAEPAETSALRGSKKRAKSDRADARHLRQLLMAGRLPESWIPPDHILDLRARVRLRHTLSEQRGEWQQRIQSVLYHHGCPQRGDLMNRDGLAWLAAQPLDACARQQVHVALAMIDALDTQIAPLDQELRAYARRQPGCKALLAHYGIGPITSVTILAELGDASRFSSSREAVRYAGLDITVHQSDQRRAPGRLSRQGPPSLRWALFEAAQCARRRTSPDHAYYLEAAQRLGGNRACLSVARKLLKRSYHTLRELGEEALQPA

SEQ ID NO: 277121 - protein, 377 aa, unidentified
MNEHDPVIVVGGVDAHAETHHAAALDERGALLATESFPTTTPGYAALLDWLCGFGELTAVAIESTGSYASGLVRYLREHNVWVLEVNQPHEHTRRRRGKSDSIDAELAARLLLAGKATAIPKQTDGIVESIRLLRDARESAVKSRTAAILQLGGLIVTAPQELRDQLKSRKTLRGKAALCRRFRPALNELATPTQAARFALRSIARRISALDDEISNVDRQLETLVLAAAPRTTALLGISTGHAGRLLITAGQNIERLRSEAAFAALCGASPVPASSGKTIRHRLNYGGDRQANRTLHLIAVCRLRYCPRTRAYARRRTAEGKTKLDILRCLKRYIAREVYNTLQADLADLHAPHRPTPNTTIICSAGPIGTTRRST

SEQ ID NO: 277122 - protein, 470 aa, unidentified
MRKPQVVPDEDHEVIYERVAAVDVAKASGVVCMRTPDSSRPGRFVNRIWDNVPATRARIAELGRELLRCQVQMVTLESTSDYWRIWYYVLESIGLAVQLVSASQARNLKGRPKTDKLDAMWLARLTQLGMLRPSFVPPAAIRAVRDFTRARQDLVRERTRCLQRLEKLLEDAMVKITSVAKDGMKAKSAVAMVQALIAGERDPRKLADLARGPLRGKRDQLAEALDGMFDSHHEVIAQMLLDQVAFLDQRIADMENQAIAALARVKESWGMDATGETGPGCGTTPDSPVLAAAHRLAEIPGISAWLAIVIIAEIGLNMALFPTPAHLVSWIGLCRSATQSGTRHGKGRQKKGNSYARAAAGQAAIGAVCTATFLGERYRRIARRRGGAIAQTAVARSIVIIVWHLLSDPAARYRDLGPDWHAAHVNRDKKIRNHIRGLQALGLTVTITGEQAHPPPRNVLTRTGTGSLAS

SEQ ID NO: 277123 - protein, 418 aa, unidentified
MNAHYAVLVGLDWADQKHDLCWRETATGAICTCVLEQRPERINEWVCKLIAKYPGERIAICLEQSRGPVVYALMAYAEVDRYPVNPVTLADYRNAFHTSGAKDDPTDAALLLDLLERHRDALQVWCPDTGPTRLLRSLCEDRRRAVDARSALCNSLRARLKEYFPQALPLVGDELSSEMCCAFLMKWPCFESVAAARADTLRRFYYAQHSRSEAHIQERLDLIAASRPLSTDAAVVEAGIRWIRTLVAQIRAFNRSIQGYDLRIAEVFKTHPDAFIFASFPGAGKQLAPRLVAVFGEDRNRYATATSIAAYSGVAPVMERSGKQQWVHWRWHCPKFLRQSMVEFACKSVGFSSWAKIYYKEQLKRGKGHHAAVRALAFKWLRILFRCWQDRTPYDETKYLAALQQHGSWIAQALQDIA

SEQ ID NO: 277124 - protein, 382 aa, unidentified
MRFYTQQHPFYCGIDLHARPMYLCILDQAGATLLHRNMTATPEALLKAIAPYREQIVLAAACMFTWYWLADLCADHGIPFVLGHALSMKAIHGGKATNDKIDAHKIAVLLRGGMLPQAYVYPAEMRATRDLLRRRMHLARTRGELLAHVHNTNSQYHLPAIGTKIAYKANRDGVAERFADPAVHKSIEVDLALITYYDELLRDVELTIVTTATHHDAQTLSLLQTVPGIGKILRLVLLYDMHDIARFPRGQDCASSCRLVTCARESAGKRSGTSGSQIGNAHLKWAFSEAAVLCLRDNPAAQKLLARFEKKHGKGKALTILAHTLARAVYDMLQRQTAFDLDTFLQGEGRGAGALNASLDSHGMNLIHHARYRVNSCVSERP

SEQ ID NO: 277125 - protein, 401 aa, unidentified
MWCLQAAGSEKRESGELEHTPEAVEAWVGQLCQRFGNRPIAVAVEQSRGALVFMLAKYEPLHLFPVPSTMAANMREALYPSGAKDDPRDADLLLDLLLQHRDKLRGLSPDTEATRRVQNLVEERRKLVDEKTAQINRLTSHLKIYFPQILDWFEHLDTELVCALLEHWPTLEELQKVPPPKLRTFFRKQQCRDQELIERRILAIRQAIPAIRDRAVIEAKSTVVKVIVQLIRSLVKGIGDLDEKIEEAAAAHPDFFIFESLPGAGAVIAPRLLAAFGSQRERYGNAGEVQSYSGIAPVTERSGKKKWVHFRWACPKFLRQSFHEWAGHSIAYSVWARSYYQQQRSQGQDHHAAVRALAFKWIRIVFRCWKDGVAYDESKYLASLARRGSPLAALAATAKTL

SEQ ID NO: 277126 - protein, 343 aa, unidentified
MEYYVGLDVSLKQTSICVVNQSGSIVQEGVVGSDPEAIASFVRSRAPGTVRVGIETGPTTTWLWTELKRLGLPVICIDARHAKAVLKMQINKSDRNDAAGIARIMQTGWFKEVRVKDLDSHAIKALLASRALLVKIKRDLENQVRGLLKNLGLVIGRAKFNVSAVRAEELIEDRPELVAAVRPLLDARKAIERQVGDLDRKVHKLARHDVQVRRFMTVPGVGPITALCFKATIDDPTRFRRSRSVGAYVGLTTRRHASGEMDWSGRISKCGDAMLRMYLFEAAGVLLTRVPKWSGLKASGAKLTKRNGLRKAKVAVARKLAVILHRMWIDGTEFNWSTNKAVA

SEQ ID NO: 277127 - protein, 450 aa, unidentified
MSVLRVMLDEKAVSLSNGSELVSEKVYQRKETAMTVNSLMQRRSAIKPDTLVVGIDVAKFNHVARTLVPGGVIGRPVEFPNSREGFVALSAEIEAGKPDPASAVIVGLESTGVYWVNLARWLSEQGYQVVQVSGLYVHHAKELADNSRGTSDGKDALLIADLVAQGKYLSFVRPTGVLADLRQLVRLRQRLLQERTARYSLLHQSVDLLFPEFPAVFKDVTGAGARHVLRRFPTPAVALAHPPEEMRRLLAEDGRVHASIAKLARLQAVARQSIGMSEGTTGMEYTLNDTLLELDSLDARVKQVELDIDRLLAQVDETPILTSLVGRMTAAVILGETGGLRQYSCAAAVLKLAGLNLYQISSGQYRGDRRISHMGRSLLRQALYFTILQHTHPGAPLYPYYAELLRRGKPKPVALVALCCRLVRLLYALVRDGRCYSPQPPDRNQQTQAA

SEQ ID NO: 277128 - protein, 464 aa, unidentified
MPRASKPKRSVKRRHAPVKVELPVELKSVNLNAAGIDIGAKRHYVAVPEGRDTVAVKQFGVFTADLEEMAEWLYQCGVTNVAMESTSYYWIPVFELLERKGFEVKLVDARQTKNVSGRKSDMLDCQWQRELHTLGLLKGAFRPPDEVCVIRGYLRQREMLVQASTMHIQHMQKALTQMNLRLGNVVSDITGVTGLKIIKAIIAGERNPKVLASNRAEQCKQSQKVIAKSLEGNYRAEHLFALKQALELYEIYQEKVKECELELMKVLQQQPHKTEAEPPPAERKLRARDKVRGEVDVRNELYKQTGVDLYRVPGLGPETLLTLRGEVGLDMTPWATEKHLSSWLGLCPGTRESGGKVLSRRSKRSRNRAAAAFRIAAASLRSSPTALGAFYRRIRARAGEAKAVTATAHKLAKIYYRLLKYGEEYVEAGEKAYEEKYQQQRVKALKKQAALLGFMLVTASAVPT

SEQ ID NO: 277129 - protein, 403 aa, unidentified
MKHVIAFDISMGKSYMVIYNAQKQCVFESEIKHSKPEFKKLQEKIHELTDKTGELPKIVFEATGIYSRQLERFMQDNQYTYCLLNPLEAKLQCDSLRIHKTDRSDAHRLALTHFTATRRVFTGTDNLFYQLKSLSRLYSELDSELSIIRGRMHKVIQLTFPELERMFTSKSDLFLNFVQLFPHPDCILGLSKTIIKNRIRANTNKKISNITAEKKAIQILEIAKTSYPAVSQNDVLCDQLKLYARRYQELLHQKECCINKMVYIAEQRAEYNIILSLPGIGPNTAVRLMAEIGDITRFNNNKQLNAFAGIDIRRFQSGKTFFKDKINKRGNKHLRKLLFLIIQNMIKQRRYGQNHIVEYYDKFKTQPYNKCHKVASIACVNKFLKLLFHLITHDIYYDYRLTA

SEQ ID NO: 277130 - protein, 325 aa, unidentified
MELHSVGIDLGKTVFHLVGMKLSGEVVLRKKFSRTQLLRFTANLKVDLIGMEACGGAHFLGRALREQGHEVRLMPAQYVKPYVKTNKSDYIDAEAIAEAVGRPTMRFVPIKTDDQLDMQSLHRVRERWVMRRTAVINQIRSLLLERGVTFRKGKQHLTQALPPILEDATTTLSGALRALLMQLALELDQLALRIDEADAVLKRITHENDACQRLVAIPGIGPLTATALIATVGNGLAFGKGREFAAWIGVVPREHSTGGKQKLLGISKRGNAYLRRLFILGARAVLQHSTKQSSALSAWLAQLTSRTHPNVAAVALANTDPALNR

SEQ ID NO: 277131 - protein, 389 aa, unidentified
MKIFVGIDIAKLNHFAAAISSDGEILLEPFKFTNDADGFQLLVSKLESFDKNSIIIGLESTAHYGDNLVRYLVAEFYQVCVLNPIKTCQMRKNNVRKTKTDKVDTFVIAKNLMMQDDLRFITFFDLDMMDLKALGRFRQKTIKQRTRLKIQLTTYVDQVFPEIQYFFKSGLHQHAVYALLKEAPSPKEIASMHMTHLANLLKVNSHGHFTKGLAKELRVLAQKSVGANDSAISIQITQTIQQIELLDSQLEKIEAEMTDIMKFNDSVIMAIPGIGYINGGMILGEIGDIHRFSNPNKLLAFAGLDPSVYQSGNFQAKTTRMSKRGSRVLRYALVNAAWNVVRNNATFKAYYDAKRAEGRSHYNALGHCAGKLVRVIWKMLTGEVEFNLE

SEQ ID NO: 277132 - protein, 392 aa, unidentified
MICVGIDVAKDKHDCFILSSEGEVLADVFTIPNNAEGFDTLFQIICRCTRPADKIKVGLEATGHYSYNILGFLLNKGLHTFVINPLHTNLYRKSLSLRKTKTDRVDARTIATMLMSDVDLKSYTDTSYHNEELKSLTRYRFDKVRERAKLKTSISRLVCILFPELEKLVPNLHMASVYALLSEFPGAKQIASAHLTRLTNLLYEASKGHYGREKAVEIRDAARNSIGSAMPAKSLELKHTIHLIGELDAEIEEIEKEINSIMDAVHSPITTIPGIGSRMGAMILAEVGDFSNFDSPDKILAYAGLSPSTYQSGQLTNCYSHMEKRGSRYLRYAIFNATKYVCIHDPAFAAYLAKKRAEGKHYNVAISHAAKKLVRLIYAMEKTQQPYRPAST

SEQ ID NO: 277133 - protein, 331 aa, unidentified
MQIIGIDISKKRLHAAWLRDPEQERSRPKAADNTPEGHRHLLAWAERHSQCLPEQLCFILEATGVYHEALALFLHEAGAQVCVVNPYQVKEFARSRGIRTKNDRHDGHVLALFGRERRPRAWQPPPAEVRHLQSLLKRIEALDADRQRESNRLEKATVEQAPAPVRRSLQDMIDILEAEIIRLRRQLDDHIDAHPELKQQRALLESIPGVGPKLSTWFLALFATKRFRSAKQAAAFLGLIPVEYDSGTSVHRRPRLSKAGDGRWRARLYMPALVAIRCNSAIRDQFTRLTGAGKSKMSAIGAAMRKLVQIAFGVFNSQHPFQVDHAQPRMA

SEQ ID NO: 277134 - protein, 349 aa, unidentified
MVTVGIDPHKHVHVAVAVDADGRRLTRPLTVKNDANLIGVLLKWIRTIADGTPVTWAIEDGRGFARRLADGLLLAGHEVVWVPTRLMAAHRKLHAATGSKSDPVAVAHAAIATPGLDRHRIDERVRELRVLVDSRAGLVRRRTMVINQLKAYTHLWLDHTPGDLTRRPGMTSLTALLDTTEMSDHVRRVLIEMIREIDELNKRVRGLENTIRELVTPLAPALLEITGISHVSAAVLLAEIGDITRFTSSAKLARYTGTAPIPVYSSDKERYRLHRGGNRRLNSVLYTTSIVQQRFHPGARALLARHEPTKGAPGARRILKRHLIDVIHRAMVHDRASWQHHITQHQVTA

SEQ ID NO: 277135 - protein, 343 aa, unidentified
MKMVSTVGLDIAKSVFQVHGVDEAGQVIIRRQLKRRYVLAFFEKLAPCLIGMEACASAHHWSRQLQALGHTVRLMPPAYVKPYVKRHKNDATDAEAICEAVSRANMRFVPTKTADQQGGLVLHRARHLLVRQQTSVINAIRAHLAEFGVVAPVGRRGVEELLRIVGDASDQRLPEVARACLAALGGQLRMLKAQILRFDRMIIAWHRGDETSKRLDELPGVGPALATALVASVADPKAFRSGRDFSAWIGLVPKQSSSGGKQKLGSISKQGDRYLRGLFTAGALAVIRYAKIHGTGHRPWLAALLARRPTKVAAIALANKIARMAWAMMARGERYREPVALAA

SEQ ID NO: 277136 - protein, 336 aa, unidentified
MDHVAIDLGGRESQVCVRGPDGQVLDERRMATKALKQWLEGRAASRVIMETCSESFEIADGAIAGGHDVRIVPSTLVRSLGVGARRTKNDRRDAQALSEASCRMELPSVHIPSPAARNRKILCGTRQAIVSARTQLINCVRGWMRQGTRGVSRGYPQTFPRRVREKVEVIPAPIERLLVSIEALSTQLQAADEELEQEAKSDPVCKRLMTVPGVGPVTAVRFVATVDRVDRFADAHALQSYLGLVPGEHSSGDRIKRLGITKAGSTATRAVLIQAAWSVRRYRKDHAMARWSEEIERRRGKHIAVVALARKIAGILYAIWRRDGATYNPFQGARTA

SEQ ID NO: 277137 - protein, 412 aa, unidentified
MYYVGIDIAKRTHVAVIMNEDNSLEIKPFSFNNDKSGFKKLFIHLQTLCCDLSDIVIGMEATGLLFENLYRHLQSLEYNVVLLNPYQTAKFREMDTMKRVKNDNIDSVMIAALLKSGRFSEGYVSQEQLQSLRELYRHRSSIEDQMKSLKRRTSAILTVVFPELETVIHDPFNVTGLALLDKYPTAKHYTNASVERILKTFRGIRGNNFNRNKAQALLDASKRTIYSGIAKDARAFNIRTNIEQIRLLQKQLDQTLEMMQDLFNFKEVKQEDQEVMEELIDNLRTIPGVADKTILALLAECGNLDRFYAPKALIGFLGLYPTLSQSGDSTRNGRLAKRGASLAKKAIYLASIAAIRHNDEMRTIYMNYRSKGRDKKEAIIIVARKLLTIIYTIYTRNIPYDPQRVFVAKPNQ

SEQ ID NO: 277138 - protein, 522 aa, unidentified
MSSTRVRRRSRGRAAEFLQKPRGLVHPRVQKVGPEHFGMVTVDPAKARSKWMLCDFYGKLLIPPQWVAHNRVELEAAVAQVRAAMQQHGLADLLVAVERTGRYHHPVKNAFRAAGFDTRLVHPYATKQFRQPADPGIKTDDTDLAAIHRAAVNGFALVEAEAEELWRRLQLLIRHRRSLVQKSSALSCQIRDHLEAGLPGYAACFGNLWQTKVAFPLLRQFGSAQSMLDAGLDGLARFLHEQGIRHQRRSLVTVLEWAKSAATADVAADMHCRIALAYEDDRQRKTLEIQGLEGESAHLLARTPYILLLSFPGVNVVSAADFAGEMGPIENYANPRSITGRAGLFPSRYQSSLVDRPDGPLVRRANRALRAAILSVADNLILCNHHFNAMAARWRAAGKDVRHSHVKIGMRFCRIAYHMVAGRQVFRHPCLRSRSYILEKLLAFHNEHQTPMPATLEDLNHAAHQVPKKEHQAEARPLLDQLERERHRASGPQPLSELLAIVLARLGVGRIQSEESGASDLT

SEQ ID NO: 277139 - protein, 459 aa, unidentified
MKNKAHHKRDRKRKISINQNWDIINPDAAGVDLGSAEHWVAVPPGRDQESVRCFGVFTSDLEDLAEWLKGCRITSVAMEATGVFWIPLFQILEQRGFKVTLANARHLKNVTGRKSDISDCQWIQKLHTFGLIGGSFRPADAYCVLRSYVRYRDELVSARSTQIQHMQKALQQMNLQLTQVLSDIVGESGLRILQAILEGKRDPLELAALANRRVKSPRSEIAKALVGDYREEHLFQLKIAFELYQTYQAKISECEDRMIGQLEKLPARVDVQAKPLPPKFSEKIIDENLRLGLYLRFGVDITAIEGIGPQVALVLLSEVGADVSKFPTVKHWTSWLGLCPDNRISGGKVLSCRTRRVINRLTDALRMAATTLERSKTALGAYYRRMKAKLGAAEAVTAAAHKLARLLYGILTQGDCYIRESLERYERRHHSSKLEYLKKLAKSLGCEIIEQQTLTHVVS

SEQ ID NO: 277140 - protein, 334 aa, unidentified
MDSSASDYRLFVGVDIAAASFAATWSPAGSPPQRARTFPQTPEGFAAFQVALASTTIPPAQTLIVLEATGSYWITLAVTLHQAGYAISVVNPAHVHAFARSLPRRAKTDALDAQLLTLFAVERQPSRWTPPEQVYHELRQRLLVRDGLLTMRGQARNQRHALEQWPVTIPTALAALDTVVTECERQLETLEREIATVLQEGAWAESAALLASIKGIGLVTSAWLLVSTLNFTACASAEAAAAYAGLVPLARESGTSVRGRGQIGHAGNARLRTALYKATLSAARHNPVIRGQYERLRAAGKPTKVARCAAAHKLLRLAYAVVTKGQTFEPHYSQ

SEQ ID NO: 277141 - protein, 380 aa, unidentified
MNRVVIGVDPHKKSVTFEARDSGEVLCATGSFPTDASGCRLLIRYARQWPDRVWAVEGANGIGRPLAQRLVAAGERVLDVPAKLAARARVFDTGQGRKTDAADAHAIVIVALRDTKLREVSPDAELTVLRLLCDRRDELSRARAQALNRMHRLFLELVPGGAPVKKSAIQYKVLLATVRPHDLAGKMRRRMAAEELADTERLDAKLRAMKAELKAAVLATGSHLMDIHGVGPAGAARILADVGDVARFPSRSHFASWTGTAPIDASSGQQIRHRLSRAGNRKINHVLYMAMRCLRRRLSDVVYRQLVQDATTSARHEAGPGGHSGASVSSSAADLTPVVGSSDQPLPGPANPTLLPPAATNPAGPGTGAVTSSKAFPASP

SEQ ID NO: 277142 - protein, 376 aa, unidentified
METKRYIGIDLHRNCFTACIRLGNGREYLRVWKLKDLPTFLTKLRATDQVAVEVTGNTRLFYDAVAPHVERVVAVNPNQFKVITHSVKKTDPNDSRNLALYLEKDLLPEVRMKDKRRAQIASLSQTRDSMVKLRTALKNKVNNICSAHGVNLAKESLASEKGLKAVLEIRFDPLVNMELKIIVDQIRSLNNSIAELEEIIGREGRKLEGHKHLTSIKGIGSLSGSILLSIIGNIDDFADEGKLAAYFGIVPRVCNSNQTEHSGRITKRGTKLGRTTLIQCALIAQRYNPYLRSYYERMKGRRGTGKAIVALARKFLGIIYRTLKNKWVFADFPNFVLAEQDEMVINAASTSASLSMAMLRLRRARGSHSPGKAKID

SEQ ID NO: 277143 - protein, 404 aa, unidentified
MYNAVGIDVSKGKSTVAVLQPGGTVIRKPFDVSHTSQNLIELAHYLGSLEGSTKIVMECTGRYHEPMLKALYEAGLFVSVVNPHLIKNFGNNSLRKVKSDPADARRIARYTLDNWAELRQYSGMDNTRTQLKTLNSQFSFFMKQKVAAKANLIALLDNTYPGVNKLFDSPPREDGSEKWVDYAYSFWHVDCVRRIGLKTFTERYKAFCKKHHYIFQQDKPEKLFNASKELVAVFPKEKTYKLLIQQSIRQLNLASEHVERLRQEMNALASTLPEYSTVMGIYGVGKTYGPQLIAEIGDVSRFTHREALTAFAGVDPGVDESGQHKSKSNRASKVGSARLRKTLFQIMTTLLQNAPEDDPVYRFLDKKRAQGKPYYVYMTAGANKFLRIYYGKVKECLRNLEQAE

SEQ ID NO: 277144 - protein, 386 aa, unidentified
MPKPNDLSRSFTAFEQDSTLVAIIEMSLTSWLVGGILPGIERHPLKKLDVDEEALLQLLHRWRDEAINAGRKITRIVLAFEAGRDGFWLARWLRARNIEAYVIHPNSVAVSREHRRVKTDRLDTELLKRVFLGWLRGESDHCSMAAIPTLGEEDARRPNRERENLLGERTRIVNRVKACLVRFGVRNFKPTLRKAPERLEALRTPEGGPLPPNSFAELRRDMVRLRFVMGQIKEIEETRLQRLENTPNEGSHAMVRLLARVIGVGIETADMLVHEILSRNLRDQRAVARYAGLTGSPDESGKRRREKGLARAGNARVRRGMIQLAWRFLMFQKESALAQWYRSVTNEARGAIRKTMIVALARKLLIALWRMVRTGEIPQGVALRTA

SEQ ID NO: 277145 - protein, 405 aa, unidentified
MTTLKTGDHPDLKMVNPNAAAIDIGSTMHMAAVNPDTDIMPVRAFGTFTHDLHDLAAWLRSCGVTSVAMESTGVYWIPAFEILEAHGFEVILVNARYAKNVPGRKTDVSDAGWLRQLHSYGLLRGSFRPEAEIATLRAYMRQRERLTEYAAAHIQHMQKALMEMNLQLHHVVSDITGATGMRIIRAIVGGERDTEALAAFRDVRCKSAIDTIKAALVGNDREEHVFALTQSLELYDFYKAQIEACDRRLEAAVTALTVRGHDDLAPLPKARIKGKQHNAPSFDVRAALYGVLGTDLTQIHGLGPSLALKLVADCGTDLRAWKSAKHFTSWLCLAPGNKISGGKLLSSRTRRSSSRAAALLRLAAVTIGRSDTALGAFYRRLSARIGKQKVTPKHPRGRGLLSVSG

SEQ ID NO: 277146 - protein, 346 aa, unidentified
MESTLIAVDTAKLVFEVAEADAGGKVRRRLRLNRPQFSEYLATRERASFVLEACGGAHHWARMMERLGHSVRLLPVPYVCAYRRRNKTDRADCLAMLEAAKNPEILPVPVKTTGHQAIQGLHRCRSAWMETRTARINTLRGLLREFGLILPIGAAAALKLIPEALDEEALPPMLRPTLQTLYDEIRELEQRIASVERQLEAISRQNPVIEHLRDISGIGLLTATALYASANDAKHYRDGRHLASWLGLTPREHSSGHIRKLGGISKRGDRYVRMLLTHGARAVLLRAGQMQRAGHNLNALQRWALALKARTNHNKATCALANKLARIAWATWRHGTVFDPNQAAAA

SEQ ID NO: 277147 - protein, 403 aa, unidentified
MIFVGNDWAEEHHDIWIMDGDGKRLASRRLPEGINGIGTFHALVGEYAEDPEQVLVGIETDRGLWVSALVAAGYRVHAVNPKAASRYRERHHVAGGKSDPGDAKMLADLVRTDAHNHRQVAGDSPAVEGIKVLARAHQNMIWSRVRETNRLRNALREYYPGALIAFEDLDGRDALAVLVKAPDPDKGARLTISQITAALRAGGRRRYLKATAYRIQEALRTEQLSAPSPVAAAYAGTATALVALIQAFNEQIADLEDQLDESFEQHPDADIYLSLPGLSDVLGARVLGEFGDEPERFADAKSRRNYAGTSPLTIASGKKRAVIARYVRNKRLYDAIDQWAFCSLSTSPGARAYYDERRQSEYTHHEALRALGNRWVAILHGCLKHRTPYDEHTAWAHRYPCAA

SEQ ID NO: 277148 - protein, 411 aa, unidentified
MSSLLQEGLPAETLVVAIDPGKVANRVWLASGERGLIGEPVSLPTLRAGVDELERLIAASGTTSEPVIAVEATGSLHRAWTAELERRFPGCVRLLAPSETQAARAQLGSRRFKSDDRDCAALVWLARQGLGRTPEEPAVEALLGVVRHRRQLVSELKVLRQRLHDQLNRLCPGLSAPQGYGRVLDLLQPSGRAVLACAVTFAGRAPTARSLLARAPGRLSRANAEYWLERWRGCLAPPADADLRASRLGLDLDRLDVLLAAVANADGQLTQLLAQTQGQVLTSLPGVAVVRAASFAAHSLPIERFPTAERLYSATGLPPASYQSATINRRGGISRQGLAEHRDALMAIAWGLSLASPAFRERATEYRARGFAPIQVRVALARHACRLCHTLLRTQQPYDEERYRQARRRGR

SEQ ID NO: 277149 - protein, 343 aa, unidentified
MSIVAVGIDLAKNVFAVHGIDETGTVVLRKPRVKRGDLMGIFAALPPCLVGMEACTGAHEWARQLIKLGHDARLMAPKLVAPYRDGGKHKKNDAADAAAICEAVQRKAMRFVPIKSVEQQGRLSVHRVRKGFVDQRTATINRIRGLLAEQGIVMPQKAETVRKMAHEHLENLEGYLNQVMNDLIDELSRLDKRIAGYDVMIKEMARNDPRSKRLMQIDGIAETTASALVATVGNGHDFKDSRQFAAWLGLVPRQYGSGGKVQLGRITKAGDPYLRTLLILGARAVLNAAQGKADKMSKWALELKERRGYGKALVAIAAKNARIAWAMLSKGQDYQRAPAAEQA

SEQ ID NO: 277150 - protein, 338 aa, unidentified
MIIGIDPHKSSHTANALDQTTNTAASSLRIDATLAGYRQLLRWGRTFPERRWAIENARGLGCHLAQWLIGRGETVVDVRTTATARVRELSRGGRRKNDVLDASAAACVAAFQGDASPVAAEDQTTVFALLEERRANVAAQRVRLVNQLHALLRDLVPGGAGAALTAQAASALLRSVRPASAAERMRKELARELVQEIRTVDARLVGVARRMATALIAHGTRLLQVQGVGPVLAARLLGRTGPASRFRSPAAFASYAGVAPIEVASGDHARHRLSRSGDRKLNSALHLVAVTQVRMRSSAGRGYYDRKIGEGKTHNEAMRCLIGRVSGGGLQEGGRAPR

SEQ ID NO: 277151 - protein, 469 aa, unidentified
MDVHSDNVVVCVRRNTINSSGQLVGKTIKTKKVVIKSSQEPLVELLSKYADGQQHIMTAESTFNWYWLADIAEDRGWNFRLADPCTVSQANIKAANDETDAEYLADRLRTGSLKSTSVLPRKLRGVRDLMRHRLRVMQEVSDKKVRLSNLYHNHCAHPMHGKLLTALQDAYDEISVDAVLESGICNNGSELIIGDLLTGLREAEARLAKIEAAVYERIDEVDEYKAERLLLKTSMKGCGDVLSAIIVTEIGDISRFRTMGDFVSYCRLAPTSKLSNGKSKGQGNAKNGNAYLSWALTELATLMARFNEPIRRYLERKQDKTGLRVVAVRALAAKLARCVYQVLRKNESFDLALAFGGKPTRAPTALAEKPAAEVVQSPQEPEVPPITTVPEPHLQAPLSEAPIVVKEPSPVKAKRGVRKKAVSPASSAPAVTAEGRQTARKADRVKARCALTATPPSCAGTSCVKSRRE

SEQ ID NO: 277152 - protein, 343 aa, unidentified
MEQISTIGLDIAKTVFQVHGIDGSGEPVVRRQLRRRQVLPFFGRLSPCLVGIEACATSHHWARELEKLGHEVRLMPPRYVKPYVKRNKNDAADAEAICEAVRRPTMRFVPIKTPEQQSVLMIHRTRHLFIRQRTTLINAIRAHLAEFGIVAGIGRNGVETLLELIAKGEDERISEAACACLMALAAQLELVKRQILEADRRVRAWHRSSKTSKRLEAIPGVGPLVATALVASVPDPHVFRSGRDLSAWIGLVPKQNSTGGKERLGSISKAGNRYLRQLLVVGALSVIRRAKQLGHTRHPWLVRLMARRSTKVAAIALANKIARIAWAMMARNESYRAPLPQSA

SEQ ID NO: 277153 - protein, 345 aa, unidentified
MGPVTWLVSEQSLGSGLFARVPHTGQERTVTTLIAAGVDAGKSFLDIAIVPSGHAFRVPNVPRGIAVVIQRLTRSDVRRVVLEAIGPYAAALVRALDKAGFEVGVVNPRRIKAFRDAEGRRAKTDRLDATLIARFAVFMSDAIRPLPSEAQLAAKALAARRRQLVEMIAMEKTRLKQATDRLILRSHRAAIKALGHERERIEEALENQIALDPDNVRRREILVSIPGIGRQVANVLLTDLPELGSTDRRAIASLAGLAPHPNQSGMAPGKNQIGGGRPCVRAAVYMAALSSARHDPQLRLAYKAMREEGKPAKVALIAVARKVIVLANSLVKQGRKYNPDYVEGA

SEQ ID NO: 277154 - protein, 320 aa, unidentified
MMAQNDRVVVGIDVAKNKMDACIRATSQRRTFESSAQGRRQLISWLRKHKATTAVMEASGGYERDWAKVLREAGLEVRIVDPKRVRSFARSAGRLAKNDAIDAEMIAWFAETFGEAPAQAYDADREQLLYIVNARQALVDVQTELPNRNEHSLPDVVQKVQARLLKRIALELAKLEAAIAAMISATAHFAELAEIIESVPGLGKGTSAGLIAAMPELGQVSNKVAAALLGVAPYDDDSGKRRGERQIKGGRRKVRNLFYMACLGAATLHNPVLKAFYRRLIAKGKEKKVALVACMRKLIVILNIMIGRGEKWDASRYPVG

SEQ ID NO: 277155 - protein, 480 aa, unidentified
MNVKARRTKKQVNVENQAINLLPKEELSKKIEVVEKELRSYTWRDLETNGKFAKNDKLSFITDDMLIVGCDIGSENHYIRAIDVRGRELSRGAFEFSNTSEGFENAKAWVLALAAKHDKKQIVLGLEPTGHYWFALAAWMISNGISVVQVNPYAVKQSKEIEDNSQLKDDRKDPKLIANLVKDGNYGMPYLPEKVYADMRRLSMFRDQLTEDRIRNINRLHRELKIYFPEYMDAFGKIYGAFTLEILKVSAIPADITALGAEAIKNIWHNAKLRGRGYSRANEIVSYAEKSVGLTDGTDAGREEVKWYAEQILRLDEQLAEIESALHEKCREIPYAENILAINGVGENILAGILAEMGDISRFDDVKEIQKLSGMGLVACSSGKHKGQTKISHRGRKRLRYWLFQAAKSAVSHADEFKQLHEYYTTRSNNPLKKMQSLVVIACKILRVIYTILKTGTTYDPQKLLKDIKHPAASQAPMAA

SEQ ID NO: 277156 - protein, 309 aa, unidentified
MDPKYFIGIDISKNQLDVAVIPDGPSASYANNEQGIGKLIGVLKRYQPCLVATEPTGGMEYPLTSALCEAQLPVVVINPRQVRDFAKAAGILAKTDRIDAKVIARFAQTVRPQIRPLKTDQLRQLSELNTRRRQLVKMITAEQNRLASATKATRGNIVAHIAWLEKSLKDVDDDMRTAIRKSPVWRAKDKILKSTPGVGPVLSTSLIAGVPELGQLNRKQIAALVGLAPFNQDSGKFSGRRKIWGGRAFVRHTLYMATLSAIQYNPVIKPFYERLCAAGKKPKVAIVACMRKLLVTLNAMLKNNTHWSY

SEQ ID NO: 277157 - protein, 347 aa, unidentified
MTIVEDTRVITGGVDTHADLHVVAALDPVGGLLGVREFPATAAGYASLLGWLSGFGNLALVGVEGTGSYGAGLARHLAAAGVRVVEVDRPDRQDRHRQGKSDPLDAVSAARAAQSGRAAGAPKGRDGAVEAIRALMVAKRSARQERTQAVNQARALILTGPEELRTRFAGHTTAQLAAAIAALRPRPGDVPGYATRVALRELGRRVQFLEAQLERLDEMIGPLVTARAPGLLALHGAGPDTAALLLVAAGDHPERLRSESSWAHLCGVAPIPASSGKVAGRYRLNRGGNREANQALWRIVICRMSSHPATRAYVERRTKEGLSKREIIRCLKRYVAREVYRHLRDGA

SEQ ID NO: 277158 - protein, 343 aa, unidentified
MQTAATIGLDIAKNVFQVHSIASDGRVVFRQQIKRNRVLKFFGKLEPCVVGIEACATSHHWAREIGALGHTVKLMPPKYVKAYVKRQKNDAADAEAICEAVQRPSMRFVPVKTPDDQAGLVLHRTRHLFVRHLTAVVNALRAHMAEFGIVAAKGREGVAELVAIIKDLKSDRLPESARACLYALSIQLDALSQQIAILDKRLNGWSRTNETCRRLDVMPGVGPALATALVASIPDPHAFRSGRDFAAWIGLVPKQNSSGGKERLGSITKEGDRYLRSLFCAGALAVIRYAQKHGTNHRPWLTSLLARRPAKVAAIALANKLARMAWAIMAKGEAYREPAALAR

SEQ ID NO: 277159 - protein, 341 aa, unidentified
MTAIGIDTHKRTLSACALDDVGGVLDERSFACDAEGFAALAAWARETAPSARIGVEGSASYGAPAARHLVARGFEVREVPPQLSRRERGRTRRAGKSDPGDALAIARVTLREPDLPPVRLDDRAEELGLLVDAREEVVGAQTRARNRLHAHLVVLLPGYARTAAHLVSRRQLAAIEVALAPLTGTRAGLARDLLADVRALGQRADELERRITILVAGHPVLGLPGVGALTAGRLIAEVGDVRRFRSPDAFAMLAGVAPIPASSGESRRMRLNRGGNRRLNRALFTIALSQAWHHPPAKVYLERKRSAGMSWSEALRCLKHRISRPVFRLLQAGQFAWAPGG

SEQ ID NO: 277160 - protein, 339 aa, unidentified
MYYVGLDLHKKYITGCVLDSQGAVVAEQRRLPPVLETLLGWLAPVGQPVAVALEATLYWAWLHDRLTAAGYQVAVAHPQQVKLICHARCKTDPVDARKLADLLRTDLLPAIWIPDAATRARRTLLRGRAWVVRTRTRVKARIQAYLAAENERVPVSDLFSRGGRAWLATVALPPEVRQQVDRLVALVAHLDAQIAEQDRGVRELAQATPEAALLQTIPGIGPFGALLLLAEIGTIARFGSSHELAAYAGLVPSTRSSGGKTAHGSVGPAGSAWLKWLFVEAVQTLKRQPGPVRSQYERLLRAKGKPKATVAAARKLCCYVYWMMKEGRSYDDWTEARVP

SEQ ID NO: 277161 - protein, 454 aa, unidentified
MARNGKMKTQKQKSLPFIQPDAAGIDIGATEIYVGVPEERDIRPVRKFATFTEDLHRLADWLIACSIKTVAMESTGVYWIALFQILERRGLEVCLVNARHIKGVPGRKTDIQDCQWLQYLHSVGLLRGSFRPAEAVCALRSILRHRDTQLKSASRQVLLMQKALTQMNLQLHNVISDITGVSGLAIIDAILLGEREPSKLSGLCDGRIKASRQIVAKSLVGDYRPEHLFSLQQALESYRHFQNQIAACDEHIEQMLARFDSQEQCAEAPSAKYRAQGNQPAFDVPSEMHRILGVDLTAIPGLSAQAVLTFFCEVGPQITRFPSSRHFASWLGLCPDNRISGGKILSSKTRNVRCRLANALRMAATTLYRSHSALGDYFRRLRAKLGSPSAITAAAHKLARILFAMLRDRRSFDPQLLGILNEKHLRRRQNSLRKFAASLGFELVPIQNLADSVS

SEQ ID NO: 277162 - protein, 352 aa, unidentified
MSNVTIAVDTAKNVFEVAISAAAGRIHERRRMTRHQFERFWSTREPCRVVMEGCSGSHHWARLLIGLGFEVKLIPPHYVTPYRRRNKTDRADCEAILEADRCAGIHGITVKSEAQQAIMTLHRVRSQWMATRTARINGMRGMLRELGVACALGAERFLTGLHQVLERNRERLPERIRRMVTLLWEEVRELERRIDEVEEDLEHIAKEEPVIRTLLQVPGIGVLTATALYASVGSVHAFKSGRHLASWLGLTPREKSSGERRRLGRITKQGDPYIRTLLIHGARSALLAAERARRAGRTLTHLQAWALERAGEGHTNRAAVALANKLARIAWAVWRHERQFDGDHTPRLAAAA

SEQ ID NO: 277163 - protein, 423 aa, unidentified
MDVVHQRVAGLDVHKETIVACVRIMVDAKVSRECRTFDTTTAGLQDLLAWLTASGCSHVAMEATGVYWKPVWNILSDGNLELLVANAAHIKNVPGRKTDVNDATWIADLMACGLIRGSFVPDQAFQELRTLLRTRKQLTREQTRHVQRLQKTLEEANIKLDSVISDVMGLSGRRMVEAMIAGERNPQKLAALADRRIKASPKALYDALHGRLTDHHRFRLQLHLAQYDAVAAAIGAVDHEIEAAIDQMDETMKAGQAFFRSLIRLLSGIPGVSTLSAQTILAEITPDMTRFATAGHLVAWAGLCPGQNESAGKRKSSRLRKGAPWLKTTLVQCAASAVKKKDSYFKAQFQRLKSRRGPQKAICAVAAAMLTTIYHMLKDGTQFQDLGAHHFDRRPPEAKARHLVAQLTKLGYTVQLQPLAEAA

SEQ ID NO: 277164 - protein, 347 aa, unidentified
MRFYKHSHAFYCGVDLHARSMFIHILDHEGKTVFEANLPASPDAFRNAIAPYRAGLVVGCECMFSWYWLADLCEDDAVPFTLGHALYMKAIHGGKAKNDRIDAAKIAGLLRGGMFPMAYVYPRAKRDTRDLLRRRCFFVNQRAQLTAHIVNTNSQYNHPPLTKKLCYAGNRSDDLAERFTQASTQASIRADLALIDAYDTQIDEVERTVLQNAKITDPVTLKLLRTIPGIGKILSLVLLYEIDQLARFPAVGNFLSYSRLVRCEHESAGKKTGSGGKKIGNAHLKWAFSEAACLMLRAETDAKKWLDRQARKRGKKKALSVLEAKLGRAVYHVWSKQQVFDLRRFVA

SEQ ID NO: 277165 - protein, 412 aa, unidentified
MEVIYPRCCGLDIHKKTVVACVILSDPGQPPRKETQTFRTMTADLLALADWLSELECTHVAMESTGVYWRPIYNLLEGLFELLLVNAQHIKTVPGRKTDVKDAAWIAELLRHGLLRGSFVPSRPQRQLRELTRYRTTLVQEHARTINRLQNVLEDANIKLASVVTDIRGVSARAMLEALIAGERDVQVLSELARGRMRSKRAELEEALRGCFAPHHSFLLTEHLSHIDYLDEAIERVSATVEQSLAADQDAVALLDTIPGVGQHTAEILIAEIGTDMNRFPSAKHLASWAGMCPGNRESGGKRLSGKTRKGSRWLRQALVEVAHVASKTKGTYLAAQYRRLASRRGKKRALVALGHTVLVIAYHILKQRQPDRDLGAMYFDKLEQHRVEKRLVHRLECLGYQVILQPSAVTG

SEQ ID NO: 277166 - protein, 412 aa, unidentified
MEQIHDWVAGLDVHRDQVTACVRIAGPRGGVRTEKARFGATAGGLAALAERLAGHAVTLAAMEATGVYWKPVYYALEDRFLVWLCNAHHVKNVPGRKTDMSDAEWLADVAAHGMVRPSFVPPPAIRELRELTRYRKTQVDARAAEIARVEKVLQDAGVKLTSVASKVLTQSGRAMIEALIAGERDPAALAGLAKGKLRPKIPQLTEALDGHFGAHHAIVAARILTHLDSLDDAIAVLDGQIAARVARRYQSAARLLAEVPGLERRSIEIIIAETGADMTCFPSPAHLASWAGLCPGNHESAGKRRRVATTPGNQWLRRTLIESARAAARTKDSYFGAQYRQIARRRGPNKAAVAVAHSMLDVIWHMLTTGEVFSDLGADYFTNRQDKEHQTQRLVKQLEKLGYTVQLAAATA

SEQ ID NO: 277167 - protein, 349 aa, unidentified
MRFYTQQHRFYAGIDLHARTISLCVLDANGQVVREATIDATPAAFLAALAPLRDGLVVGCECMFAWYWLADLCAAESIPFVLGHALYLKLIHGGKSKNDKIDAHKLATLLRGGAFPQAYVYPKGMRETRDLLRRRTFLVRQRSHLLAHLVNTNSQYNLPPLSQKVCYARNRVALDLPSRFADPSVRRNVETDLALVDAIDEQVRGLELYLTRSAKVDDPQAYQRLRSIPGVGPVLALVLLYEIHDIKRFAEVGQFLSYARLVRCSHESAGKVKGSGGRRIGNAHLRWAFGEAACLLLRESDAAKKWLARKERKSGKGRALGALAAKLGRAVYHLLRKGEALDAKRFFAS

SEQ ID NO: 277168 - protein, 369 aa, unidentified
MLYLGIDLHTRQLTVCLRDEAGNILQRRQVGTHPEKLKPWFDELQGEANRQGGFAAILEVCGFHDWLVARLRELGCREIVVIQPDRAARKKTDRRDATRLSELLWINRLHLLEGRPAPGLRRVELPTETDGENRQLTALRQRLGVQRTRTINRLKRLLHKHNLIHEQPTKTFVTKAVLAWLKKLPLPYADRLETDLLLEQLANTEAQLAKVSVEIEVRAERDPACRLVRTIRGCGAFTALAITSRIGRIERFARGRSLANFFGLTPTCSSSGESGERLGHISREGSSIVRFLLGQLVTRALRVDPGLRRWYQEVRRRRGAKIAVVGVMRKLATSIHAMLKNQESYELLGVRKVRDRKQRGVVKPGASTS

SEQ ID NO: 277169 - protein, 463 aa, unidentified
MAIVSKNDHSKKSKNKLGYFDPTVAGIDIGARLIHVAVPDGKKGAVVEEFGTETPQLMEIANTLLKAGVKTAVMEATGVYWVPLYEILEDCGLEAVLVDAKSVKNVPGRKTDTLDCQWIQTLWSNGMLNAAYRPPRDRITLRTYLRDRQNIIKIRRDALLQIEKALQLMNIKLSSVLSDIAGVSGMDIIRAIADGEKDPHKLAAKRNSGTKREEADFIEALTGNFQEGHLHTFRRALRTYDYAANEIEVTDKLIEQELEKLPTVVSTPPPERQTKKSPIYQTARKPKKNQLNFDARTLLWQKTEIDLTAIPGIEASTALLIFAELGGFNVDAWKSHKEFSSWLKLCPGNNISGGRRRKCRSQTCVNYITQALRMAAMSAKHSKSSVGQRIRGISGRTDNMRGIKAGAHKLAILIYGMCKHGWAYHEKGEDYYEKKNKERRVKALKKLAKELGYNVAMTFAKTT

SEQ ID NO: 277170 - protein, 375 aa, unidentified
MEHHSEAFVALDTAKLRNAVAIADAGRAGEVRYLGEIDNTEPETRKLVAKLASKHARLTFCYEAGPTGYGLYRLIKSIGHDCIVVAPSLIPSKPGDRVKTNRRDAVNLVKLLRAGELTAVWVPDERHEAMRDLVRARDAAVKDYKIKRQNVSSLLLRLGRHYPGKKTWGRTHINWLTGLKLEHREQRIAFEEMLLAVRQVRERIERLEQAMREAVADWTLAPVIEAVQAMRGIDMVGAIAFLAELGDLSRFENPRQLMAYLGLTPSERSTGESVKRGGITKAGNTRARRLLIEAAWSYRFPPRVSKDMQTRIGAAPQTAREIAWKAQMRLCGRFRTLTRKGKRPTIVVTAIARELSAFIWAINREVVGSHATANR

SEQ ID NO: 277171 - protein, 347 aa, unidentified
MRFYTTQHPFYCGIDLHARTMYVCIIDQNGEILVHRHMKTSPEAFLNLLAPYRQGVVVAVEGMFPWDWLADLCADEGLPVVLGHALSMKAIHGGKAKNDKIDSQKIAVLLRGGMLPQASVSPAPMRATRDLLRRRMHLAHKRAELLAHVQNTNSQYNLPAIGKKIAYKANREGVAERFADPAVQKSIAVDLALITSYDELLRDVELTIVKTARHHDANTLYLLQTVPGIGKILSLVLLYEIHDIQRFPRVQDFVSYCRLVKCSKESAGKRYGTSGTKIGNAHLKWAFSEAAVLFLRDHAAAQKYLARLEHKHGKGKALTLLAQKLARAVYYMLKRQVAFDTETFFQR

SEQ ID NO: 277172 - protein, 324 aa, unidentified
MTVLIDEQDQVVYQKRLPNDLSLIAQQLSGYQDELQGIVVESTYNWYWLVDGLMDQGHRVHLANTAAIQQYEGLKYTDDHSDARWLAHILRLGVLPQGYIYPKEERAVRDLLRKRGQMVRQRTANLLSLQNLITRNTGSSIRSNRIKTLDAEQVDDLLPNPDLALAVKANLAMIKCANGQIEILERTVTERIKLRAAFSFLKTVPGIGQILALTIMLETAEIQRFPTVGDYASYCRCVGSQKLSNGKKKGSGNTKNGNKDLAWAFVEAANFAIRYNARIKSFYQRKKAKSHGVLALKAVAHKLCRACYYIVKDQVAFDVAKAFA

SEQ ID NO: 277173 - protein, 328 aa, unidentified
MDDVTTIGIDLAKSVFHLHGVDAEGRVLLRRQLRRNQMLEFFQRQPPCLIGMEACASAHYRARELNKLGHDARLMQPSYVKGYVKRGKTDAADAAAICEAVSRPSMRFVPVKSEETQARLMTHVAPAVRLRRNAREFLVRQQTRIVMPEACFQHDAMRAHLGEFGIVVPKGIHNGIHNVERLIMACEQADLPAPARKALSMFADQLVDTQRKIADLTTDIHADAKANEAAQRLQTIPGIGPITASALVSALPDIADFQSGRDLSAWLGLTPRPRSTGGKERLGRIFKMGNRYLRRLLYLGAIALANRMARTAYALMKNKTEFRAATTA

SEQ ID NO: 277174 - protein, 379 aa, unidentified
MQPIRTLAGVDVSAKALEAKRRRDDEDESREFSNDGAGHRELLKWIGRGARVCIEATGVYHLQLALMLTAAGVEVMVINPRVARDFGSALGNRSKTDRVDAATLLEYVCRMNFVAWKAPSWAVLELRELGRRLSELVHTGAEEKNRFHAKKAAGISTTVINDVKAHGAQIQKRTKEIEKSAVALIRGDADLREQFEILTNIPGVARRSAVLLLTELAVLDPTMTVKQIVCHAGMDPREYESGSSVQKPTRISKVGNARLRAILFMPALTAIRHDRGARLFFAQVMARGKKKMQAIVAVMRKLLHGIWIVLQRRVPFDSAVLFAASLAKAESSDSAVAANPPEPSKDHPKGRSEAEELRQQLDPGSAEATPSRRRRSKAA

SEQ ID NO: 277175 - protein, 367 aa, unidentified
MSHIIYCGVDFHARQQTICCLKTETGEFTSHELKHDHKEALRQFYSELGAPVIVGLEASGYTPWFEQLLEELGHQVWLGDATEIRRRARRRQKNDRRDAELILELLCHDEFPRIHRPSPESREILRMLRYRHKLVKLRTIIKNSLQSLSIQAGLSLQARLFTRQGTQQLEALALSPVMRQQRQQWLELLQELNQRITETEGWLKQQALPDPRISLLRTHPGLGLLSSLGIVHTLIPVSRFPNTRKLAAYGGFDPMERSSADKKRYLGISKAGSRLLRFLLIEATQTAVKTDPELKRFYRRLAQRRGKPKAKVAVARKLLIRSFIMLRDEINYAEFQQRAIAARLAREFARPNVPVPLIGQPASPAKG

SEQ ID NO: 277176 - protein, 388 aa, unidentified
MNIGADKSEPLTAIHTDLGAIFVSLELSRSSWLITSLSPGGGEKMSKHSVRGGDFAGLMERFTQLQEKTRLRTGQSFRIIVVHEAGLDGFWIHRALQNEGIESHVVDAASIATSRRRRRAKTDKIDGETLVRVLLAYKRGEPRVCAMVKVPTPGEEDRRQLCRERKALTAERVRHVNRIKGFLCSQGVSGYQPLRRDRRQRLEELQTGDGRALPQHLKAVINRELDRLELLLKQIKTVEAARDALLAVEQTAKPAPAAMLLAIRGIGPEFAAILWSEGLFRHFENRRQIAAYAGLAPTPWQSGAVDREQGVSKAGNPRLRTTLIQLAWLWLRNQPRSALSVWFHERVNRNGGRLRKTTIVALARKLLVALWKYVTAGVVIEGVTMKVA

SEQ ID NO: 277177 - protein, 343 aa, unidentified
MCAEKISTKSVKINNDKYEYYIAIDYSQRNMAIATLRNDGNKPRVIDVDSDIDHLKAYLISLKGRKIVTIEETTSTHYLYVELFEYAEKILVCDPYRNSLLSDGPKTDKLDASNLCKLLRSGLLKEVYHSLDKKYELRQLVSEYEQLVKFGVRVKNEKSAIYRSMGKSYQKKEDIGDDTLAWIITQKDKRIDLYEKQKKEYDKMFSKKISHDTELKHLKDVTGIGTIGAVKILATVIDAKRFKNEGNYLSYCGLVKYQKMSGGRNYGQKKTRYSRRLKSVYKTAAMSVINGNSPLREYYDSLLKRGLSEENARNQLSRRIAIITYGILKTGTKYNPYKWRESK

SEQ ID NO: 277178 - protein, 342 aa, unidentified
MKPTSEFTLGVDLAQESFVASLCAAPGDAGRWREQPTAAIAAPPDSPQGVEALCDWLAVQQTAAPGRCARVVVESTGQLSHRFARALAARGGLPRVAIINPRRSKAFGVSLGVRDKSDDVDARVLALYGAVRRVEPAPPRAPAQQRVRDLSRLREDYVQDLLRWQNRRRETTEDADRRQIDRTIRHLQQEIARRERASAHVVRQDPALAQQVRALKKIRGIKQITALTLTAELGDLTRYRRGELTAAAGLFPKRFESGSSVYRKPRLAKGGGGRLRRVLYMCATSLFRSKGALRGHIDRLQERGLSDMSIEGALMRKLLLIARAVVKNAGRYDETKICRQSG

SEQ ID NO: 277179 - protein, 354 aa, unidentified
MSQKLSAAIAVIGIDIGKNSFHIVGHDQRGAIVLRQKWSRGQVETRFANLPPCLIGMEACVGAHHLSRKLQIFGHDARLMPAKYVRPYSKGQKNDFRDAEAICEAVQRPTMRFVATKTADQLDLQALHRVRDRLVGQRTGVINQIRAFLLERGIAVRQGPHSLRSELPNILATRTDVLSPRMFRIIEALAGDWRRLDERIDGLSSEIETLADHDQACERLMTVPGIGPIISSAMVAAIGTGDVFSKGRDFGAWLGLVPKQISTGDRTILGKISRRGNRYLRALFVQAAWVVLVRVKRWERYGLKSWIEAAKKRLHHNVLAIALANKLARIAWAVLNKGRAFECVKTEEMASGPA

SEQ ID NO: 277180 - protein, 369 aa, unidentified
MIYVGIDVAKDKHDCFIVSSEGEVIKNVFTFKNIIDGFKSLLAAIPDIPKNKVKVGIKATGHYSLNLMRFITDNQLPLVVLNPLQTNLFRKAQTLRKSKTDKIDAKLIAHMLQSGNFNPHSELSYHLSELKSLTRHKSRIKENLSKYKISLNRTLHIMFPELASVVYYINQKSTYALLKTFSSKKAIASAHLTKLTNILKKNSRGKYGKDKALLVKETAVNSIGSDSRALSFELSQTISFIELYTTEIAKIDTEIKVIMDELKSPILSIPGISYGLGSVILSEIGDIKKFDSPSKLLAFAGLEPSTYESGRFVATDMRIVKRGSPYLKWALLEAVRLISMRDNTFKTYYQKKRAKGKHYYVANSHVAKK

SEQ ID NO: 277181 - protein, 373 aa, unidentified
MDQDTTYVAFDTSKETIAVAIAESGRRKEVRFFGTIASRPDAVRKLVEKLARQHEGLVFCYEAGPTGYGLYRQIRAMGFDCQVVAPSMVPVRPGGHIKTDRRDAATLAALFRAGELTAIWVPDAAHEAMRDLSRGRQGAMEGLRRARQQLLSFLLRHGRIYPTRSHWTRAHRRWLAEQRFEHAAQQIVFEELIQAIEHAQSRRDRLEQQMVALLPSWSLRGVVAALQALRGVALLSAITLMAEIGDFRRFANPRQLMAWLGLVPREHSSGATTIRGAITKAGNRRARRTLVEGAWTYRLPARVGLELLRRNRTLPEAIKEVAWKAQVRLCARYRRLLRAGKPTNVVTVAIARELAAFVWAIATTVMPPLEPTA

SEQ ID NO: 277182 - protein, 375 aa, unidentified
MTQESPVSPKAAIHDTEVRMITIGVDAHKRVHVAVALDAAGRQLGVWKGANSSRAWQELKDWAAAFGGQRVWGVEGAWSYGRGLAQHLVVSGEVVCEVNSRWTALGRRSARKRGKTDRLDARSVAAFVRQEAATLPRVGEDDETAVLDLLVRERENAMAEVTRLRNQIHALLMQIDSEYEIRLRNRRVRTRMGLLESYEPPVAASTPLQRERVAAVRRLATRARVAFEHAEGLAKRIRALAQEGFAPLTELVGVDLLTAGQLAGILGPGRRFEGESQLAAYAGAAPLEASSAGLVRHRLNRGGHRQLNWILYRIVLTQSQHSEQARAYLARRRQEGKTTREAFRALKRYIVRAIWRLWQLCPGAVRREVVASAAA

SEQ ID NO: 277183 - protein, 345 aa, unidentified
MDQISRIGMDTSKHVFQLHGVNAADVPVLRKKLRRKEMVTFFQKLAPRVIAIEACGASHHLARLLQSFGHTVKLIAPQLVKPYVKRGKNDAADAEALCEAMSRPTMRFVPVKTAEQQAALMLVGVRDRLIRNRTQLANTIRGYAAEFGLSAAKGMAHLVPLLERIAADESLPALARELFAIQAKEYTQLQAQIDEVDAKLTAWHRADECSRRLTKIPGVGPIGAVLLTMKTPDPAQFRSGRQFAAWIGLTPKDHSTAGKVRLGVITRAGDEGLRSVLVVGATAVIQQALRGGKASPWLAALLKRKSPKLAAVALANKTARIAWKMMLTGEAYGTKAAVAASAGAV

SEQ ID NO: 277184 - protein, 418 aa, unidentified
MSIYCGMDWAEGHHDIAIVDRDGKLLAKKRIADNPTGFAELTQLLAETGDTNDDPVPVAIETPRGLMVACLRAAGRPVFAINPMAVARYRERHSVARAKSDHADAMTLANILRVDAHLHRRLPADSELAQAIAVLARAQQDAVWRRTKASNELRSLLREYYPAFLDTFAGRSATNLAKPETRAILAIAPTPAAAAKLTKTRVAAALRRAGRQRGIDQLASGIVTSMRLPQLRQPGPIERAMGQQALALLAMLNAACAGAYELEQAAAEQFRTHPDHAIITSFPGLADLTGARMLAEIGDDRRRFADARALKAYAGSAPVTRASGKSISITHRRIKNDRLAAVGWIWATTMVVLPGPAQQHYRRRRDHGDRHAPAVRNLFNKMVGQLHHCLQTRQTYDPAKAYADHPPRPPAPESATAA

SEQ ID NO: 277185 - protein, 346 aa, unidentified
MMLIGCDYHPSWQQICWFDTATGETGERKLDHASGETEKFYHGLAAPVLIGMESTGNCQWFVEMATTAGHGVWVGDAAQIRASEVRQQKHDKRDAALILKLLMEGRFPRIWTPSGEEKDLRQLLIHRYKLVRIRAQVKNELQHLAMNQGITKKRRLWSKAGEKVLRELPLKPWASRRREDLIKVREMLSAQIDLLDQAVVEAAEKNEKARLLMTQPGVGPITSMAFVLTMGDVNRFQRGKQVASYLGLIPREYSSGGHQRFGSISKQGNRFMRMLLVEAAQVAVRCDPGMRSEYLHRCHSKAKGVAKVAAARKLAIRLYWMLRTNTGYPGVVRVESSSRVALVGAS

SEQ ID NO: 277186 - protein, 417 aa, unidentified
MRIVRPICCGADIRKNLIVATIATTSQDGITEYIQSSFSSQNFDLNRLKAWLKEHHCFEIAMESTGKYWIPVFNVLEDEIKVFVVHPKYTKAIKGKKTDKKDSKWIADLFKHDLLKFSFIPPKEIRELRELSRYRIKLIAMRSSERNRYQNSMTISNIGLASILSDPFGKSSRAVMKEVIRSSSVTEEKISKLLERNAKKKVKEVLQSLEGSHIESDQRLKMSIASQHMDQIDSHVRRLETEMAIRCIPYATLINLLLDIPGISYLSAMTIIAEIGTDMSVFETSKQLACWAGLAPANNESANKKKSVRISKAGSYLKPLLVQCALAAINSKSNPYYRIKYNRIKKRRGHKKAIIAIARMILVNIYHILSTGEVYSPCDMEQIINPKPVKKVMTIQNAIEFLQSQGFDTSKLISSSS

SEQ ID NO: 277187 - protein, 358 aa, unidentified
MESQVKKIDFTNQNIYAGFDAHLKSWKVTVMAEDLVYKTFSQPPRPEVLFNYLKEHFPGGTYHTAYEAGFCGYWIHYRLESFGIKSMVVNPADIPTTDKERVQKEDKRDSRKIARSLSSGNLTPIYILSIKTQRDRSLLRTRAMLVKDLGRYKNRIKSFLYFYGISIDDSFKTTQSHWSNRFMSWLESIDMGEESGKEALCVLISECKNLRTSILNITSQVRRLSQTEPYREQVILLRSIPGIGLITAMTILTELEMINRFRDIDKMCGYIGLVPSTKSSGEKERTGDITPRGHNVLRTAIIESSWIARRTDPSLMRSYLSYIKRMDQNKAIVKIAKKLLSRIRFVLANNKPYICSIG

SEQ ID NO: 277188 - protein, 444 aa, unidentified
MPKCVLERECECARKSDQHLPISGMDDMNAENEIVCGADIHRDFLVATMISRSGLKLQEQFGMDQDGLLAFRSWILDHKCRRVAVESTGNYWYPIFCILEGHVEFILANAFQIRNIEGKKTDRLDSERIAIYCLNNLIKPSRIYPKDYRDLRSITRSREALVNARSKLKNQIHQSLAVCCIKLSSVISDSFGKSGRYIIERLLEGMTIEQIISGIPSKRVRKKANELREAIRNSIDSVQILLIKTNLDAIDYLSEKIKLLEAEIAIKVKPFEKDLNIVLSVPGIGLISAATILAEMGDYRDFQNADKLAMYFGIVPSVYQSAGKLRTGKITKRGSKHMRRILVEVAKAISKTKKNSKLKRFFLRVLTRSGKKNVAAVALARKVLCIIYHLLMKGEDYLEPEVQKRKPKISSCVSPISMMDIDEMIKTISRAGYLVEKDLKGGCG

SEQ ID NO: 277189 - protein, 341 aa, unidentified
MSIITVGIDLAKNVFAVHGIDGNGKAVLVKPKVLREQLLPLIAQLPPCLIGMEACSGAHHWARQFRQYGHMVKLIAPKFVTPYRMSGRRGKNDAADAAAICEAVTRPAMRFVPVKEEHQQIILCLHRTRQGFVEERTALYNRLRGLISEFGIVLPQKVACLRREIGAHLEDLPGYANQCVGDLLTHADRLDGLVADYDRAIAHAAREDARSKRLMQLPGIGPTTASALLASLGAGHDFANGRQVAAWIGLVPGQYSSGGKARLGRITKAGDAYLRSLLVMGARAILSGLGDKQDRFSRWARNLVERRGYWRAVVAIAAKNARLAWAVLKYGEDFRLNPIAA

SEQ ID NO: 277190 - protein, 338 aa, unidentified
MTVAFLGIDLAKNVFQLHGAIADGRAVLKRRIRREGLLAEIAELEPCVIGVEACTGAFYWQRQFEALGHTVKVIAPQYVKPFVKHQKNDQNDAEAICTALMLPSMKFVPTKSEEQQDIQALHRARRRLVNHRTALVSQMRGLLLDRGIPIALSIGRARRAIPEILEDPANGLSAMSREIIGDLFDFMGQIDVRITAFDRRIDAVFKSNEDCRRIARICGVGPKTATAVVAAVGDGREFKNGRHLAAWMGLVPRQHSSGDKRLLMGISKRGDRHLRTLLIHGARSVVRVAQRKTDPFSHWVNSLRERRGINRAIVAVANKNARIIWAMLNRNEEFRAAV

SEQ ID NO: 277191 - protein, 356 aa, unidentified
MNEITTVGVDLAKEVIVVCAADAQGRTRYFKQLSFQGFAEWAMKLPRCTFGMEACSTAHHWGRFLGAHGHTPKLMAAEFVAPFRKSQGAKNDRNDAQAILVAVRQPDMRFVSIKSLDQQAMLAWHRSRSGYQMERTALLNRTRGLLAEFGVWIGRSTAVLVQQLPQLREDPRLPEHFRPILTSTLDHLKCIAQCIAECDERIHSHVRHNEAAKRLCDLTGVGELTASAVLATLPDARDFKNGRQLSAWVGLVPRQNSSGGRQRLGVITKRGDSYLRGLLTQGARSTLQVALKREPLRRSRLEQWIVALHGRVGYHKTLVAIANKHLRILWAILAHGEAYDPNAWRRHSPQRTAICN

SEQ ID NO: 277192 - protein, 371 aa, unidentified
MKKDSSCSQSPKRGKKAQRGRMTIGIDLGDKTSRYCLLNEQGEVLAESGVATTKQALGRVFGTRQRCRVALEVGTHSPWVSRLLERLGHEVIVANAREVRSISHSSRKDDRRDARMLARLARVDPQLLRPIRHRGEQAQGHLLRIRVRASLVEARAKLVNTARGLTKAWGERLPACDTDTMGVRRLEPLPAPLRAALEPLLREVESLTEKIKACDVELEQIARKEYPETELLRQVSGVGALIALTFVLTLEDANRFARSREVGCYVGLRPRRDDSGEHRPQLRITKEGDRYLRKMLVQGAHYILGYRGPDTDLRRWGLKLAERGGKNAKKRAIVAVARKLAVLLHCLWVTGEVYEPLRNNTAGPRRKALAA

SEQ ID NO: 277193 - protein, 354 aa, unidentified
MKRTTKYVALDVHQATTLASVREESGRVIARSILPTDGPALTEFFRGMRGAIHVAIEEGTQAQWLHDLLAPHVDRLIVCDRRGQPRQGNKDDRHDADALSEHLRRGGLRAAYHGGGTGAGLKELTRCYQNLVEDPTRVMLRLKAVFRARAIQTPGRAVYRPARRAEWLAQLPPGGARVRAEALWAELDALVALRPKAKTAMLATAAREPGWAGLRTIPCFGPVRVALLLATMQTPWRFRTKRQLWAYAGLAVVTRSSADYVLVDGQAVRRRRAPLTRGLNRNHHRLLKHVFQSAATAARARPGPLQDLHRALVARGLREPLADVTLARKLAALTLRLWKKGERYDPTQLTQQAR

SEQ ID NO: 277194 - protein, 411 aa, unidentified
MSKMLVGIDVSLRSHHVQFMDAEGRSLASFSVSNDQNGADTLIKKILETSEKANSQHLQIGMEATSNFGWHLAHYLNDQLEGYEPKLEAQIYVLNARKVARFKKGYDTLPKNDRIDAWVIADHLRFNRLPNEMKDTIQYEALQRLTRARFHLMKNITRDKTYFLNQVFLKFSGIRQDNPFSNTFGSTCLAVIQELEPEQIVSMSIEELIDFLKEHGKNRFDNPEEIAEYLQKIARSSYRLNKVMADPVNISLSVTLSVIKHMEAEVKRLDKEIAKLMKGIPETLTSVKGIGPVFAAGIIAEIAGIERFKNHHALAKYAGLVWSQHQSGDFEAEDTKRIHSGNKYLRYYLIQAAESVRKHDSEYKVFYRKKYDEVPKHKHKRALVLTARKLVRLVYSLLSTNQLYTPPERRK

SEQ ID NO: 277195 - protein, 422 aa, unidentified
MLEETHDNDQIIQRVAALDVGKAELTCCIRVSGPGGSGRRLQEVRTYQTMTRSLLVLADRLAELGVTRVVMEATSDYWRGAFYLLEAHGFETWLVNARDVKHLPGRPKTDTLDAVWLCKVAERQMLRPSFVPPRPIRQLRQVTRYRADLVAARTAEKQRVEKLLEDAQIKLSVVASDIFGVSGRAMLAALVAGERDPKRLAQLARARMRAKLSLLEEAFTGFFTDQHAFLLGKMLGRVDALDADLAELDAKLQELIAPLAHAVERLDEIPGVGQTAAHLLIAEIGADMTRFPTAGHLVSWAKFAPGVKESAGKRKGRGSTGHGNPYLARVLGEVAVAASKTDTFLGERYRRIARRRGKKRAIVAVGRSILVIAWHLLADPEAHFHDLGVGFYDTRIDPDRAKRNHIRQLEALGYKVTLEPAA

SEQ ID NO: 277196 - protein, 334 aa, unidentified
MENIALIGIDLGKNSFHIHCQDHRGKAVYRKKFTRPKLIEFLATCPATTIAMEACGGSHFMARKLAELGHFPKLISPQFVRPFVKSNKNDFVDAEAICEAASRPSMRFVQPRTESQQAMRALHRVRESLVQDKVKTTNQMHAFLLEFGISVPRGAAVISRLSTLLEDSSLPFYLSQLLLKLQQHYHYLVEQIKDLESQLKRKLDEDEVGQRLLSIPCVGTLTASTISTEIGDGKQYASSRDFAAATGLVPRQYSTGGRTTLLGISKRGNKKIRTLLVQCARVFIQKLEHQSGKLADWVRELLCRKSNFVVTCALANKLARIAWALTARQQTYEA

SEQ ID NO: 277197 - protein, 422 aa, unidentified
MNSQPQSLSSVEPSFGAFVAIDWADQQHVWSLQAADSDQREHGEIQHTPEAIEAWVGGLFSRFPAQPIALAVEQSRGALVFMLSKYEHLHIYPIHPRAAAQFRAALYPSGAKDDPVDANLLLDLLVHHRGHLRRLSPDTEQTRLVQQLVEARRKLVNEKTRQGNRLTSKLKLYFPQILTWFDELDSALVGALLKRWPTLEALQKARQATLRSFFTQHNCRRAELIEQRLEQIRQAIPAIRDAAVIQSAVAMVSVLVSLIATLRQGIAALDRQIEQAAAAHPDFAIFDSFPGAGPVLAPRLLAAFGSQRDRYQSAAEIQQFSGIAPVLVRSGKTAWVHYRWACPKFLRQTFHEWAGHSIGFCDWARAYYEQQRNRGAGHHAAVRALAFKWIRIAFRCWKDRVPYDDSRYLQSLRQRGSPLAVR

SEQ ID NO: 277198 - protein, 355 aa, unidentified
MDKYIGFDIDCKKTVVCVFKKDGSCKYDTIGPDIDSMKKFLLNQKKGFSGKTHLVFEVSGQSGFLYDSLIDSVDSLTVANPSKMTWIFRTAKKNDRIDAYKMAKLLCMDEMPAVYMPSKEVRQWRETILHRKKTVTRLVQVKNRIRATFKGQGYNKPLHKGGWWKKSNLLWMREICLQDMSEFDLWHLHLSNLLDEFDLLNMQIKNITAYLDRYLDTQPGGKLLMSIPGVGPRTAETVLAYTDDVSRFDNFKQYCSYFGMVPKLDESGSCRRLGHITKHGPSAVRWVVCESSWMAIRKSKALNAFYERVRCGQDGRKKIAIVAVGRKLLSIMRAMLISGELYNEELVERMLKQAA

SEQ ID NO: 277199 - protein, 518 aa, unidentified
MDVLYSHVAGIDVHKKQVTVTVRTPDPRRPVVRREKTRTFRTFYADLLAMGAWLAGHGVTRVAMESTGPYWWPVYVALREAGGPGLSIDVVNAAHVKAVPGRKTDVKDSQWLARLLEVGLLRGSFLPPDDVREIRDLTRYQSKLTEERSREKQRLLKVLEAAGIKLDVVASDTFGVSGRSMLDALVAGQRDPVVLAELARGRLRSKTDDLRLALSGRFTAHHGQMIGLHLARLDHLDQMIAQVQEKIGHCGMAGTGRPVPGAPAGLVAPFAEQIRLLCSVPGIGERVATVVISEIGVDMSRFPSAKHLAAWAGLAPGNNESAGRRRRAGHRKGNTHVQSILIEAALAASRTRTRVGARFHRLHRRFGGKANKTAAKKAAFAVAHTLIKVIWTVLCTGQPYTDLGHDYYTRRVNPEDHTRRLIAQLEAVSGKKIVLVDHDDGPSNGPGDSSGRDSPDTGHNSRSSHRRPSLPHPGHQRQACHHARKPSYPGCAGTLPPTWPRFEFRLSSPGVCGRARTA

SEQ ID NO: 277200 - protein, 427 aa, unidentified
MNHSTYPPVLCVGADVHLDEIVLRAVDKALGHEVVEPFRVTNNLPGAQLAAAIIAETAAELGYTRIAFGCEATGMLWIPFHRYLSTEPLLQPFELELVCFNPKLVAKFKDGLVLRGPKNDDRDALDVAARLRFGELPVSYVPSDFWQGLRRLTRYRYRLSKALSREKMRFQSHAFLKCSDWKRVNVFSDIFGATSIALLTEFTVAELQEMTHDQLADLISHRGHGRFGDPNATARAVRQALHTSYPIDPQMDEMVTAALAAGWDHIRYLKRSMKHLDRLIAHHIDLIPNPIITIKGLGAIITAGILAEVVDILRFSEEKHLAQYMGLTWHKSSSGRFVSQDTRLTKVGNVYLRYYFILGANLLRQHNLEYKAYYWRKYQEVSKYQHKRALVLTARKLVRLVHALLTKNEPYVRPRTTRQDREDDGLQ

SEQ ID NO: 277201 - protein, 343 aa, unidentified
MQKPYHYIGLDIHKLSIAFCEKCSDGQTMASGSFKARRDYIREWAAERTTPWIGGMEATLFTGFVYDVLQPYAVDLQVGHPLQLKAISWAKHKSDRIDAEMLANLLRADLFPACYMASPLVRELRRILRYRNFLVRQAVAMKNKTTGILMETGIEYDSSRIHRQGYFYELLDNLEETPSSVRKLLRTTRSGLEMFQGAQKQLLDALKKHEHLRERVTRLMTIDGVGEMTALTWALEIDDPARFSNLKKVQSYCGLCSGRNESAGKNKRAPLSKQRNPHLQTILIEAAKLAPRWNAQLAHVHAEALARGYNRNRATCAVARKLVAYLMAVDRSGEDYEMRPTIV

SEQ ID NO: 277202 - protein, 343 aa, unidentified
MKLHVVGIDLGKTVFHLVGLDSTGKVVIRKKCSRTQLLAFTANLQVQLIGMESCSGSHFLGRALREQGHEVRLMPAQYVKPYVQTNKSDFLDAEAIAEAVQRPRMRFVPIKTEEQLDLQALHRVRERWVMRRTAVVNQIRSLLLERGLTLPKGRSYVDRQLPRILEDGELRLSGSFRVLLAQLKLELEQLSVRIEEMDRVIQKTAKENEDCQRLTEIPGIGPVTATALIAAVGNASAFQKGRNLAAWMGIVPGEYSTGGKQKLLGISKRGNKYLRTLFIQGARSVVQQRHKQSPGLSHWLAQLLGRTHQNVVIVALANKLVRMAWAVLCKNERYRAPVLAVTA

SEQ ID NO: 277203 - protein, 358 aa, unidentified
MEEDNRCALLEGKVDAVIGVDTHRDAHAAAILDRNGGLVAQLEVPSSQDGYEMLLSLVAERAPGRRCWALEGTGCYGAGLASFLADQGEWVVEIDRPKRPRGRNGAKSDALDAIRAGREALSREQLASPRQRGHREALRVLQLTRSGAVKVAADARRQLKALLVTAPEPLRAALRGGTWLTQARACAALQAEPAGSVEDRATVQALRLTAQRALSAYAEAEALEKELRGLVKAMAPVLLAQPGVGPVTAAQVLISWSHPGRLRSEAAFAMLAGVAPIEASSGQVVRHRLNRGGDRQLNRALHTIVMIRQRYHQATKTYTTRRTAEGKSEREVRRCLTRTVARQLFRLLEHKVGHLAAG

SEQ ID NO: 277204 - protein, 326 aa, unidentified
MDQICRIGMDTSKHVFQLHGVNAAEVPVLRKKLRRKEMIAFFEKLAPTVVAIEACGASHHWARLLQSLGHTVKLIAPQLVKPYVKRGKNDAADAEALCEAASRPTMRFVPVKTADQQAALMLVGVRDRLIRNRTQLANAIRGYAAEFGLTAAKGMAHMGPLLDRIQADERLPALARELFASQAVEYAQLQEQIDKVEAELTAWHRADECSRRLAKIPGVGPIGAVLLRLKAPDPTQFRSGRQFAAWLGLTPKDHSTAGKVRLGVITRAGDEATRCVLVVGATAVIQQVQRHGKASPWLIALLKRKSPGSVKNLGQAACLSRADRPG

SEQ ID NO: 277205 - protein, 335 aa, unidentified
MEIVISNLAGIDVAAKTLDLVVRKKGKNHKAKKFENSPDGHASLVSWLVKHKVSHLCMEATGIYHLDLAVTLDQTPNVSLMVLNPKIAIKFAESTMTRGKTDAIDAGVLAQYVDCMEFVNWISPKPIVLEIRSFSRRLAALTKLKVVAKNQLHALQAIIHTPSQIIADAKLTIKQLETQIEKLEDYALQLILTDEETNNVMTLLISVKGIAEKTAIQLIGELLVLPKDMTPRQWAAYAGLDPRIIQSGTSVSKKSRISKAGNHYLRRALYMPSLSATCHELHVSAYNQHLVNDNGLTKLQAICAVMRKLLHAIHGMLKSGKPFDGIRFYAIPVKS

SEQ ID NO: 277206 - protein, 413 aa, unidentified
MDVLHPRCCGLDVHKSSISACIFLREAGRVQKHQRRFGAMTQELQELAEWLRQFGVSQVAMESSGVYWKPVWNILEGQFTVVLANAQHIKNVPGRKTDQKDAEWIAQLLQYGLLRPSYVPCEIIRDLRDLTRMRASLSQEASRISSRIQKVLEDANVKLASVATNVLGKSGRAMLEDIISGEDDPEHLASLALGHLRVKIPQLRFALEGKVRSHHRFLLRRLVDQIQFVEHEIGLLDERLEEIAQQRPELSQAVARWDTIPGIDRVAAWALLAEIGDNMAQFPTAGHLASWAALCPGNHESAGKRLRGTTRQGSPWLCRMACQCAWAAARTKNTYLSSQFRRLAARRGKKRAVIAVAHTIIVIGYHLQKNQSNYEDLGGNYFDRIHSDGLKRYLVKRLQQLGHKVTLEPMEAA

SEQ ID NO: 277207 - protein, 337 aa, unidentified
MATSKAMRMVGVDVSATWVDVSRGAADEAVATRQCANTAGGHRELARWLTQGGRRARVVLEATGLYSLDVALTLERTPGIEVMVLNPRVSKEFAGAWGQRARTDATAAEGLREFAARMPFTPWTPPSAAALALRALMRRVVALIEMRVQEQNRLHAVSVTGALPAVLRADIRQHIGALGRQIARLERAARALVEPAPALRAGYHHLRSVKGIGQRSALLILSEVAVLPGSLTVRQWVAQVGLDPQPIRSGTSVHPPVRISKRGNVYLRRALFMPALVAVRCNPAVQRFGLELAAKGKAPLQVLVAVMRKLLHAIYGMLKTDTDFDGEKFRRSASTAT

SEQ ID NO: 277208 - protein, 413 aa, unidentified
MTTNPEPQSINSVVCLHMSIELAATSWKLGFADQLGRNPRVRSIAAGDLFKLRVEIAAAKKVFGLDPKAPVISCYEAGRDGFSVHRCLVTMGIESHIVDPASIQVTRKKRRAKTDRIDAQKIVNALMRFKAGDQFACRMIRIPDAQAEDSRNINREMRTIKTERTAHTNRIKGLLVTQGIPKVAIDGSFPRRLKRMQTAEGKPLGENLRSQLLREFDRLALATAQIRTLQMQQAKMMREAAKEVKKSDAERTLPKCAVTAEFLARLSGIGPVTAWTLSSEVFSWRDIKNRRQLAALAGLTPTPNSSGDEEKEQGISKSGRGELRVLLIEVAWGWLMHQPQSELTKWYHKRFDDGTKRNRKIGIVALARKLLVALGKFIRFGEVPAGAKLKSELTFNYMRLLKIPGTELDCLAA

SEQ ID NO: 277209 - protein, 363 aa, unidentified
MPTIADAGRLVTGGVDTHAEMHVAGVADQAGRVLGTGEFPATTAGYAAALAWMRGHGELVRVGVEGTGSYGAGLARYLAAEGIEVAEVIRPNRQARRRRGKSDAADAAAAALAALNGEAPGQPKSGDGAVESIRALQVARRGAVKARTQAGNQLGGLIVTAPEAMREKLAGLSTRKRVTLAARFRPGDLTSPAEAARAAMAAVARRHQALTAEIAQLDTALETLLAHAAPAGFLARKGVGTQVAATLLVTAGDNPRRLRTDASFAALCGASPVDASSGKQRRHRLNRGGDRQANSALWRIVFTRMVTDPRTQAYLARRTTEGKTTREIMRCLKRYVAREACKALTGPHPAARPAHHIKNFMIT

SEQ ID NO: 277210 - protein, 318 aa, unidentified
METQSKSWIGIDVSKAQLDVYIHPAGQRYCFKQEDEALITLGQQIQSRNPALVVLEASGGFESAVASVLADMGIPVVVVNPRQVRDFARATGTLAKTDTIDAQILARFGEAVRPEVRPLPDDCTQRLRAVVRRRQQIVEMLTMEKNRLAQVSVPIASSIKEHIAYLTQCLKDLDKDLRNLLRSSPIWRERENLLRSVPGVGPVLAATLLAQLPELGRLNRKQIASLVGVAPLNRDSGTMKGKRSVWGGRGHLRAVLYMGVVTAIRCNPIIKAFYERLRKAGKAPKVALTACMRKLLIILNAMSKHKLLWNPKIYLFTP

SEQ ID NO: 277211 - protein, 458 aa, unidentified
MDKEEKILMEIVNPQAAGIDVGSRSHFVAIGQQEKDVREFGVFNQDLYQMAQWFEENKVKTVAMESTGTYWQNLYAVLLSKGFKVILCNGKFTKNIKGKKSDVMDCQWIQKLHSLGLLSSSFLPDEKTEQLRTYCRHRSNLLHNAASTSKKMQKYLRLLNLRLDVVVRDICGLTGLNIIRAVCNGEVEPKKLAELRHGNCRKSEEEIALALQSNGRSDYLFALKQELETYDYLQEKIKQCDIEIEKALDDIIGSDDNKKQHYIDPKPHKRVNKNTPENIDLNLKSYQMFEGTDLLAIEGMSYSTVLSLMSEVGIEGIKKFPTAKHFCSWLRLAPNNKVSGGKVLSSRVPKGSNRLKIALRNAANAIGNLKDSTPLRDFFQRINFRKGRVSAVSATARKLAVIIWNLVVKMIPYSNPEGYLYLDQKRKLGLVKRLKKQINKFGLTNEDLGFSTSSFSVK

SEQ ID NO: 277212 - protein, 347 aa, unidentified
MKFYTQTHQHYCGIDLHARCLYVCILDREGKVLVHQNIKADPKALIRVVTPYRDDLVIGVECMFSWYWVADLCRDQQISFILGHALYMKAIHGGKAKNDKIDSHKIAVLMRGGMFPQAYVYPREMRGTRDLMRRRIRLVRQRAELFAHIHNTNSQYNLPPISQDLRHSGNRDGIAERFADPGVQKSIELDLNLVGFYDQQLKRVERVIEIHAVDCDQHSLILLQTVHGIGRILSLVILYEIHTIERFPTVQDFASYCRLIKCQRESAGKSYGTSGKKIGNPFLKWAFSEAAVMFLRNNPEAQAWLKNMANKHNKARAMTILAHKLGRAVYFMLKRKTVFDQERFLNS

SEQ ID NO: 277213 - protein, 469 aa, unidentified
MFLTRRSNQQSNSISKRILRDCRPRLSIRPARNEIKAHSIPNLTRRSLKMKAYNVDDFNVLIGIDWADKKHDICEHPNHSDDYHYCVVQSKPEALHDWAMDLKKRYPNQKIAVVCELKKGPLIYALSKYDHLVLFTINPSTVAKYRKAFTPSGAKDDPSDAFIQVEILSLHMDKLSVIEPEPASIRALSQLVEYRRSLVQDSVDLSNKITATLKNYYPQALEWFGEKDTIIFCDFIQKWPSLSKVKKAKTQTLLKFFIDHNSHYHDVNEARIIKIKNALPLTADIGVIAPNQILIEVLIVQFKVLLQGIETLNKAIKSSYKEQRDKPIFDSLPGAGAKFAPRLLVAFGSDRSRYSDASDIQKYAGIAPVIERSGKKMWTHWRYSCPTFLRQTFVEWAGLSIRYSFWAKAYYEQQKSKGKPHNTIIRSLAFKWIRIIFRCWKTNTLYDESTYLDALKRRGSPLLKFAINS

SEQ ID NO: 277214 - protein, 357 aa, unidentified
MPSSNVKYVGLDVHTEATTVAVRDGAGKLVMESIVETKARTLVDLLEGMRGELHVTLEEGTWAEWLYDVLKPHVQEIVICNPRRNALLKEGSKDDRVDARKLSELLRTGMLRAVYHGQHGLRALRELARSYEAVSKDVRRVMNRVKAIYRGWGIPCRGMQVYSRRHRQQWLEKIQETGVRRRAELFYQQLDALRDLRHTVRGELLVESRKHHAVKILRQIPFIGPLRAAQLVALMQTPHRFRSKRQLWTYSGLAVVTHDSGQYRYVNGQLQRSKKPQQVRGLNQNHNHTMKEIFKSAAESASRRAAPFQKFYEGLLAKGMEPELARLTLARKIAAITLTVWKKGESFDPRYVKPQAA

SEQ ID NO: 277215 - protein, 423 aa, unidentified
MTDDRGRISVDSMGAGGEGCGTIAGCDELQQMEIAPMQRNDLNRSLVAFDQNSTLVAVVELSLQSWLVAGIVPGVKREPLKKLSADRERLLALLERWRNEAIKAGHAISRIAVAFEAGRDGFWLARWLRERGIEAYVIHASSIPMPREHRRAKTDRLDTASLKRAFLGWLRGEAHHCRMAQIPTLEAEDAKRPTREHESLVGERTRVVNRMKATLVRLGITGFNVKLRKAAEKLAALRTPEGAPIPPNTLAELCRGLERLAMINAQIAAIERARLLRLKAAPQHGTHPMILMLAKILGLGIETADMLVHEVLARGLRDHRAVGRYGGLTGSADESGSQRREQGLAKAGNGRVRRGMLQLAWRWLMHQKDSALTHWYRERTANGRGDTRKTMIVALARKLLIALWRYVTTGELPAGVVLKAKAI

SEQ ID NO: 277216 - protein, 347 aa, unidentified
MNQIIRIGMDTSKHFFQLHGVDAAERPVLRRKLRRKEMVAFFAKLPLTVIGMEACGASHYWARELCKLGHEVKLIAPQHVKPYIKRNKNDGRDAEGLCEAMSRPTMQFVPVKTEEQQAALMLAGLREQMVARRTQLSNMIRGYAAEFGITAAKGLDKIEPLLAGISANQTLPVLARDLFMMHGREYAQLQAELKKIDARLVAWHRSNADSRRLAQIPGIGPIVATALVMKAPDPRLFPSGRHFAAWIGLTPKDHSTAGKTRLGTITRAGDERLRSVLVAGATAVIQQARRGRGHPSPWLLALLARKSSPKLAAIALANKIARIAWKLLVTGESYHAGAKSIVSAHAA

SEQ ID NO: 277217 - protein, 390 aa, unidentified
MTKRKTETVNDLSRCLDPLDMDATLIAVIEMSQSSWLVAGIVPGVERQPLKKIAIDEHALLKLLSSWRKEAEKKGHKITRVTVAFEAGHDGFWLARWLAAFGIEVHVIHAASVAVTREHRWAKTDRLDTELLKRGFLGWLRGERGHCKMVLVPTLAEEDAKRPSREREALVGEASRIITRLKAAFVRLGIRRFNPKLKAAAERLATLRTPEGEPIPPNTLAALKRDLERNNIIKRQIREIEQTRLDHLAQAPAKGPHRMVLLLARVVGVGVETADMLVHEVLSRKMRDRRAVARYAGLTGSPDESGAKRREKGLARSGNARVRRGMIQLAWRFLWLQKDSALAEWYRQRTLAAPATRKTLIVALARKLLIALWHLAYDGIVPEGVQMRPA

SEQ ID NO: 277218 - protein, 399 aa, unidentified
MPNTPEALDAWAAELNVRFGGRPIAVCLEQSRGAVVYQLSKYPHLVLYPVHPTTSARFREAFYPSGAKGDPEDTDLLLELLEQHRNRLRRLDPDTPETRLLQMLVEQRRAWVDEKTRHSNRLTAWLKIYYPQVLDWIDDIDSPLGCDLLDRWPTLEQLQRAHPGTLHAFFTEHNCRSEKRIQERIQAIYQATPAIRDTAMLEAGPAVVKQIVAVIRALRANIEAVEKRIEPLVDAHPEKALFAGLPGVGPALLPRLIVAFGTKRERYQCADQLEAYSGIAPVTQQSGKSKWVHFRWACPKFLRQTFHEFAAHSIAKSVWARAFYDMQIAKGKGHHAAVRSLAFKWIRVLYACWKNRTPYDEQIYLRALQNNRSRLSQILATQLTWKPVGGFQKLSLENA

SEQ ID NO: 277219 - protein, 356 aa, unidentified
MGNCNKLDFTGQPIFIGLDVHKKSWSVSIHSAVCEHKTFTQPPEVDILVNYLRRNFPGATYRSVYEAGYSGFWVHDQLIEKGVACAVANPADVPTKDKERRTKRDRIDCRKLARSLRAGEIEGIYVPCRTKLEDRSLVRTRQSMVRKQTRCKNQIKGILFFYGIPLPEDWAERRWSGPFVRWLENLPMERASGEVALRMHLEELKHLRQILARLDREIRLLAQTGEYGVQVRLLRTIPGISTLTAMILLTELQEISRFRSLDELTSYVGLIPDTHSSGETEHTGNITQRRHAQLRASLVEAAWTAVRKDPALLMAFQESCKRMRKTRAIVKIARKLLNRVRYVLKNQTPYRMGVVQ

SEQ ID NO: 277220 - protein, 355 aa, unidentified
MEKPRITIGIDLGDRFSHYCMLNEDGDAIESGRIQSTEEAMRRHFEGEPTMRFAIECGTHSPWISRLLEQLGHQVIVANTRKIRAITASESKNDKNDAEKLARFAFCDPRLLSPIHHRSPERQQDLNLIQARATLVRARTMIVNALRGLVKSAGGRLPACSPQGFEARVEASIPPSLADAARPLLNQIVALNAGVQQMDRAIEQLSNRYPEIPVLRTVPGIGPLIAAAYVLTLDRPDAVQHSRQAGAFLGLRPRQSQSGDSDPQHRISKTGNVYLRSLLVQAAHYVLGRFGPDSELRRWGLKLAASGGKRGKKRAIVAVARKLAVILHRIWQTGNSWQAFPQSRNNTASKDVCMA

SEQ ID NO: 277221 - protein, 355 aa, unidentified
MSRDIKYIGMDVHKEATVIAVLNANGNLVMESIVETKAGSLLQFIHGLRGELHVTWEEGTWAAWLYDLLKPQAQVLVCDPRRNALLKEGNKSDKVDARKLADLLRTGMLRPVYHGEHGLRTLRELGRSYQTISQDLNRVMNRLKALYRGWGIGCAGTQVYAPRYREEWLQKIEHAGVRRRAELLYQQLDGLQALRRTLRPELLAESRKHKASKLLRQIPCIGPIRAARLLALMQTPHRFRSKRQLWTYCGLGIETRDSAQYRFVRGQLQRAKKPQQIRGLNRNHNHEMKEIFKGAATRASCGVGPLRDFYEALLDKGMKAEMARLTLARKIAAIALTLWKKEERFDAEQLKTQAA

SEQ ID NO: 277222 - protein, 346 aa, unidentified
MMIIGCDFHPSWQQVCWLDSETGETGERKLVHAEGDAEHFYRQVPAPALVGMEATGNSHWLVDLLAEIGHELWVGDAAQIRASYVRQQKTDKRDAAHIMKLLAEGRFPRIWMPSSEVRDLRQLLLHRYKLVIIRTRVKNELQHLCLNQGVQRKRKLWSQAGQKLLRELPLRPWAARRRDDLLRLMAMLNQQIEPLDAALKAGALRDKMALLLQSQPGVGPVTSLAYVLTMGDISRFPRGKQVASYLGLIPREHSSGGRQKLGAITKQGNRMLRMLLVEAAQTTVRLDPGFRKQYLHRCHQKPKGVAKVAAARKLAVRLYWMLRTQTRYPEIVRIESSPRVPLVGAS

SEQ ID NO: 277223 - protein, 329 aa, unidentified
MDSQQSALVVGIDVSKATLAVCYQVEQQLKHLEVSNSKTGFQQLVNTCGAHCLFVMEATGTYNLALAYYLHEQGGQVAVLNPLVIRRFIQMHLSKGKSDRKDAQWLLRYGQQQPVKVWQPEETVLVECRQLEQVTEQLLKQKTMISNALEALRQQPRVSPRAVKPLQQTLQALTRQVAVVEAELLALLEQRFAPEMRLLCSIPGIGRKTAGMLLLFAGGFTRLDNYRQLIAMAGLSPREHSSGTSIRGKARITKMGGGLIRGKLFMCSFSAKKTNAACHALFDRLVAKGKNKKLALIAVCNKLLKQAFAIVKSGVPYQADFCSKISLNP

SEQ ID NO: 277224 - protein, 353 aa, unidentified
MSHSSEATALFPSVTIGLDLGDRQSQLCVVDAAGTVLEERKVATTPDAVRHAFAERAPARVVLEVGSHSPWISRQLASYGHDVYVANPSAMYGARRRTKRNDRMDAAYLARLGRVDVQLLHAIQHRGEQTQAHLAQLRARDQLVKARTQLINHVRGAVKSVGHRLPATSAEAFATRAAASLPEALTDALTPLLTLIATLTTQIRGFDTQLERLATTAYPETQRLRQIPGVGPLTALAFVLLVEDPSRFATSRQAAAYFGLVPKLDESSQSTPQLRITKRGDALGRRYLVGAAQYILGPFGPPCDLRRFGEALMVRGGPNAKKRAVIAVARKLAVLLHALWRTGTAYRPEHRAA

SEQ ID NO: 277225 - protein, 338 aa, unidentified
MKVYAGIDLHSSNNYVGIINEKDQRVYQKRLPNQLEHILEALEPFKESMEGVVVESTYNWYWLVDGLQAHGYKLHLANPSAIKQYEGLKHTDDKWDSFWLAHMLRLHILPEGYIYPKEERPVRDLLRRRLLFVRHRTAQILSLQSSITRNLGYKMSARDIKKLDKPDADKLFEDPFLILAAGNTISTIRFLKIRIAEIEKAVKAHIQLTPQFRYLLTTPGIGEILGLTIMLEVGDIRRFPKVGNYSSYCRCVKSERFSNSKKKGEGNRKNGNKYLAWAYVEAAHFAIRHYPEIQSFYQRKKVKTNGIVAIKALSNKLARASYYIMRDQVPYDPKKLFS

SEQ ID NO: 277226 - protein, 377 aa, unidentified
MKRIKFVGLDVHAETIAVAVAELDGEVRSIGVIPNRCESVRKLVKKLGPVEELRFCYEAGPTGYVLYWQLTALDAKCEVVAPTLVPVRAGDRVKTDRRDALKLARSYRAGELTAVWVPDAAHEALRDLVRAREAAKRDQLRARNRLTKFLLRHGKRPPEGVNPWTLNYMNWVRKDVHFEPLAQQATLLDYLHDVEHMAARVTRLEQAIEEAVQLAPQQMREVIEALQALRGIAKVSAVTIVAELGELSRFGEARQLMAYSGTVSREHSSGESCKRGGITKTGNVHLRRIVVEAAWAYRHAPAVTACLRKRQERVSEEVKEIAWKAQHRLHGRYRKLTARGKNTGKVITAVGRELLGFIWAIGVKVEAEQRKALGQAA

SEQ ID NO: 277227 - protein, 425 aa, unidentified
MKITQTAQKIKVNFAMDVSVDVHKDTLNFFFETKGREYVDECSNRTTVIQKKLKAYHEVAHEHGLKTLRIICEPTGEYQNKMFRIARKMGFLTCFVNAESVSKFRMVETNDNGKTDTKDPKVIRTLGQLNKTIKHRILDDDYLTLRKLNKVLDEVDEIKKDIRCRISTLLVELFCDYSFEKDFLYGSSGKALVDKYGCNPYLIVKAGQKRFSTYMKKTVPRIRQTTLKRLWEDAQSSALNEQPEAYIEVIETQLKQLLEDYDRHEGRGNEIVEKMVEILNRLRRKDPKIPEATKGVINDKHIARLLGETGPLDDFADSRMLVRYGGLNIRMRQSGKFRGQNKITKKGRPLLRKVLQRIIFPLVRKNFLYGPYYHGKKEIDKMPGNKIMTCVARQFLKKFYGWYKSGEAFNQQRFFSCETQYREAA

SEQ ID NO: 277228 - protein, 316 aa, unidentified
MDQPPLAGAVFVGIDISKDRLDVHLRPSGRAFAVPRDGPGLDRLLADLRNCAPTLVVMEATGGFEVTVAAALAGAGLPLAVVNPRQIRDFARATGRLAKTDRLDAEAIALFAERVRPEPRLVASAEAAALAELVARRRQIIEMIGMEANRRRQARTARVARTIAATLQVLEAQLADLDRDIGTALRASPAWRQADDLLRSVPGIGPIASRTLIAEMPELGRLDRREAAALVGIAPLNRDSGQMRGHRAIAGGRVTVRNALFKATLSAVRWNPPLKAHYQQLVERGRPKKVAIVPCMRRLLGILNAILRTGQPWRPA

SEQ ID NO: 277229 - protein, 363 aa, unidentified
MTDGICFVGLDVHARKTVAAAVQLGSGEVFKAQLPGSPAAALQWLATLPGPVRAVYEAGPTGFGLARAARAAGVQMMVCAPGAIPRQPGDQIKTDTRDALKLARLHAAGQLRAVVVPAPELEGLRDLVRAREDLRGDLMSARHRVGKLLLRRGLVWEGPGDAWSQRHLRWLGTIRFDDALVELVFGEYLAHHEVLLARRDRLDAILLEQSTQGSWAPTVARLRCMRGIDTLTAVGLVAEIGDITAFKHPKQLASYLGLVPSEHTSGTKRRQGAITKAGSSHARRLLVEAAWHYRRPPRASETLRRRQVGQPAAAIDAAWRAQLRLHRRWAHLDAARAKKRTTVAVAVARELACFVWEIARQPD

SEQ ID NO: 277230 - protein, 344 aa, unidentified
MIYVGLDVHKRFSRMGSFDPATGDLQDLGEVSNDREALEMRLEQVASPRTVVLEAGRSSYYVAALVEALAEEVWIVDPTELRRLQHRVAKTDRRDATALAWWAAKGALKPLWRPDPQVMELRELTRGRTALTRLSTQLRNLIRSLLARHGYECPHRDVLSARGRAWLENVRLEGYAGELLAAFRMLLSLVQGKVDDLESEVEAVCVGFPAAQQLRTIPGIGPVLGLSLAVEIGDIRRFPSPSHLRGYSGLTPAVSQSGEKDARGPITKRGNKWLRHAAVLAAQRMSQMHHPDPSIKRTFLSVAFKHGRNPAKVAAARRLLDLSYYLLRKEEAYQAPRARTVTKR

SEQ ID NO: 277231 - protein, 345 aa, unidentified
MQTMYYIGLDVHKSTISYCVKDGSGTIHAEGTIPATRFDLDRWMKTLPQPWTAAMEATVFTGWIYDHLQPHAAALKVAHPLMLRAIAAAKKKNDRIDANKICDCLRCDFLPECYMASTAIRERRRTMRYRNLLVRQMVQMKNKIGMLLMEAGVSYNKQRLHKAGYFRELVATNPDIDEGLRSLLRLCRETVVRLGRTESALVRSLERDRLLLDRVERLMTIPAVGPITALAWALEVGDVRRFSSIKKAISYCGLCGAEQSSGSTVQRTPLSKQRNKHLQTTLIEAAKMAPRYNPDLAMLYDKERQKGNANRATLAVARKLVAYLMAVDRGQRNFQVMETSSCIAA

SEQ ID NO: 277232 - protein, 366 aa, unidentified
MLYLAIDQHRKQLTVNLRDEDAQVLVQRQVSTRWQAVREFLQDIQQRGRQAGGWLAIVEVCGFNDWLLKLLVDYGAKEIVLLHPEERRRQKTDRRDANRLGELLWLNRHRLATGLRVQGLRRVVIPTADEQLDRKLTTLRWRIGRERTRLLNRIKNILRRYNVEQECPTKSVTCQTGLRWLRQLAVGELDRLDLDQLLARLETVNTERAALEQKIRERQARNPAAARIASVPGMGAYISLGLACRIGDIRRFPRPRSLANYWGLTPSARNSGENKQRLGSITKQGSALARFLLGQAVLHVLRKDSVLREWYKGIKRRRGSKIARVAVMRRLATIIWQLLRKEQNYVPGGPRRQEKRRAKAAQAAVA

SEQ ID NO: 277233 - protein, 337 aa, unidentified
MSKVTTVGIDLAKSVFQFHGIDASGEVMLRRQVRRAQMPQMLAQLAPCVVVMEACGGAHYWARLSRELGHTVKLLAPRYVKAFVRGAKNDRNDARAICEAGCQPGMPTVAVKSETQQGCLALHRVRALAKKQRTMVANQVRGLLAEQGIVLAKRIGTIRRELPGVLPRLEPHLRRALELQWQQLQALDRQIAVLDQELTELASGSATCQRLMRERGVGPVIATAITAEVPEPRVFRNGRHFAAFLGLVPGQDSTGGRAKLLGVTKRGDAYLRTQLVHGARSALRRAAHHDDELSRWAQAVAQRRGFNRAVVALANKLARRLWAILRYGEAFRATAAA

SEQ ID NO: 277234 - protein, 464 aa, unidentified
MDQEVRLGIDVACTAAHQASLADERGEFVWQGWRFRTTTEDLERLWAKIPAGARVVAVMEPTRNAWVPLAAWLQARGVEVSVVPPEQSADLRDYFNKHTKTDRLDSKMLARMPMLHPEGLRTIDSLGPADPFKRATRHRSSVQKRRVAAAMRLDALLELLGPGWAELFGTVSYGKTAVAVLERYANPHAIKKLGRSRLTKLLIRASRGHWREAKADEILAAADETLALWAAGGLDFDELADDIAIEVRLIKALDAEIGALDDRIEALYEQADPAGIVASAPGIGVTLAAGILSRTGDLNRFDSLAGVRSFTGLVPKIDQSGASDHHNGPTKTGDPGLRQALFLAADLARKVDPTLAARYQRLYVDAGKHHNSAICTLAAVLVTRIAACWRNGQLYELRDTDGRPITEAEGRAICAERYKIDPATRAARRNPTTSKTPQRAGRDKKESQSAPVTDPPTTNATQAA

SEQ ID NO: 277235 - protein, 339 aa, unidentified
MNEVTLIGIDLGKHSFHLHAQDATGRMVFRKKLSRQQLLRTLANVPSCRVVMEACAGSHWLARQLAGMGHEPRLISPQLVRPFVAGNKNDFGDAQAICEAACRPSMRFVSPRNEAQQTVSAMHRLRERLVRERTATVNQIHGFLLEFGISLPRGAALMSRLPTVLDHETLPPRLVALVVRLRAQVHYLEEQIRQVEQDLKASLREDDKSRRLLEIPGIGPITASALAVELGDARQFANARQFAASIGLVPRQYSTGGKPTLLGISKRGDRNLRRLLVQCARALMQHTDSRTDAMSLWVKTLSTRRHSNVVACALANKLARIAWAVLARGTHYEARALTT

SEQ ID NO: 277236 - protein, 348 aa, unidentified
MTLTIVETRAVTGGVDTHADTHVAAALDSIGGMLGVREFPATPVGYAGLLGWLGGFGTVHLVGVEGTGSYGAGLARHLGAAGIRVVEVDRCDRQDRRRQGKSDPLDAVSAARAALSGRALGVPKGRDGAVEAIRALMVAKRSARGERTQTINQARALIVTGPDELRAKFARHSPAALVAELAALRPRAGDVPGYATQIALRELARRVEFFDAQLQRLDALIVPLVTTHAPGLLAVYGVGPDTAAMLLVAAGDEPARLRSEAAWAHLCAVAPIPASSGKVTRRRFNPGGDRQANHALWRIVITRMSAHPPTRAYVARRTAEGLSKKEIIRCLKRYIAREVYPHLRPAGG

SEQ ID NO: 277237 - protein, 352 aa, unidentified
MQEIRRKNWAGQRLFVGLDLHKKTWVATVRSRDLHLKTFTVPSGKEAFWKTLNHQFPGAQFIVAYEAGCFGYHVAEYINSHGGKAVIFPPHRIPTPPGVFVKTDKIDSRKLALELSKGLGGIYQPDRIRLYHRSVNRKRNQLVRRKVMIQNQIKSDLLFYGIRIDTLGRYWSTEFIRRLWGLEFVEPGYTRIFQIILQEYEEIVRKIKETTDFIKEMAQSDLYKERVCLLKSIPGIGDLSAMTILLEIFHITRFPSAEKFASYIGLVPSEYSSGEKIRKGSLSGMGHKTLRSLFIEIAWVTIRKDPVLFEKYNRIRKGKTGSEAIVSVANSLARRIHYVLTNRSPYCLGVVA

SEQ ID NO: 277238 - protein, 353 aa, unidentified
MIVIGTDTHKRTHALAAVNADTGQVLGEREITATEQGHLEGLRWAHELGQEIVWAVEDCRHVSQRFERSLVSAGERVLRVAPKLMGASRRGERAPGKSDQIDARAIARAVLREGIERFPAAFLDEQAVEIRLLCDHREILVAERTRLINRLRWNLVVLDPELEAKIPSRKLDYPGQLQRITRRLRALPQTARVRVAREQVKRIAVLTREAEALKRELRDLVRAHRPELLAETGCGPLTAAILIGQTAGAERFASDAHFARMAGVAPIPASSGRRDRHRLHRGGNRQLNRALHIIAITRGRIDPETREYLRRKEAEGKSRIEAMRCLKRHLARRYYRLLSKRSRSTGLLPIAGC

SEQ ID NO: 277239 - protein, 323 aa, unidentified
MKAHLGIDIAKASFDVVLLVDEQSDVHAQFSNDKAGFKKLQTWLVHRQVSELQACMEATGNFSEGLATFLYEQGYTVSLVNPARISGYAKSQMRRNKTDKLDAALIADFCRNQQPPAWTPPDPAWKELQAMVRHLQDLDKARQQARNRLSALPNSAAVLAQLHDQIAFLDQQMNDLKKLINDHIDQHPDLKKQRDLLTSIPGIGDLTAGKLLGEFRHIPAFDHPNQLVAFAGLNPRQHVSGSSVRGRTVISKQGRASIRAALYMPAVVAKRFNPILARFAARLKANGLSGTQIVVAIMRKLLHLAYGVLKSGLPFDPNRSFSA

SEQ ID NO: 277240 - protein, 423 aa, unidentified
MEAMHERVAGLDVHKDNVVACVRTMSGDKTTRECQTFDTTTDELLTLLEWLKRCRCELVVMEATGVFWMPVWKILSDGAFKLVVANAAHIKAVPGRKTDMNDATWLADLAAFGLIKASFVPDEEQHELRALMRTRKQLVREQTRHVQRIQKTLTEANIRLDSVISDIMGRNGRRMIEAMIAGMRDPRKLAALADQRLKATPKQLYDALHGRLTEHHRFLLQLHLGQWDTLDATIRNVDREVATRVSCMDTEVMADKAKFSKLIDQLVTIPGVSRLSALTILSEIGSDMSRFQTAGHLVAWAGMCPGQNESAGKRKRTRLRKGAPWLKTMLVQCAWAAKRKKDSYYKAQFFRLQSKRGPQKAICAVAASLLTAIYHMLKDGTLHQDLGAGHFDQRAPHLKVKRLVNQIAKLGFEVTLQPITKAA

SEQ ID NO: 277241 - protein, 338 aa, unidentified
MRYYCGIDLHSTNSVVVVIDDEDRVLFRQRLANDLNAILGALSPFAAELVGVVVESTYNWYWLVDGLMAAGFELHLANPAAIIQYSGLKHRDDDDDAAWLGHLLRLGLLAEGYIYPREERGTRDLLRRRGQLVRQNTANLLSIQNQVTRATGLRISGNRVKQLQPDEVAALGMGADAALGIGANLAVMASLKAQIQGLERTVLGRLVADDMYRMLLTVGGIGKILGLTIRLETGDPERFASAGNYASYCRCVTSQRVSNGRNKGQGNRRNGNAHLAWAFVEAAHMAIRFDEGAKRFYQRKKAKTKMVVARKAVAHKLARACWHVMRDRVPFESKRCFG

SEQ ID NO: 277242 - protein, 403 aa, unidentified
MNAVGIDVSKGKSMVTILRPFGEIVSSPFEIKHTSSDIHSLIKLIHSIEGESRVVMEHTGRYYEALAHQLSAADLFVSAVNPKLVKDFNNDSLRKIKSDKADSVKIARYALDKWQSLEPYSITDELRAQLKVMNRQFHFYVKQKTAMKNNLISLIDQTYPNANTYFNSPTRSDGSQKWVDFVSTYWHVDCIRKMSLNAFVEHYQNWCKRKKYAFNKSKAEEIYTKTKELVPVFPKNEITKHIIRQAIDQLNSTSVTVETIRTLMNETASKLPEYSIVMQFKGIGPSLGPRLMAEIGDVTRFTHKGALTAFAGVDPGVNESGSYAQKSVPTSKRGSSNLRKTLFQVMDVLIKTMPQDDPVYQFMDRKRTQGKPYYVYMTAGANKFLRIYYGRVKEYLSVLPDPS

SEQ ID NO: 277243 - protein, 558 aa, unidentified
MGWSRCESKVSLRCVYSGSIEPVCALTEPEISRANPTEPPPSRHAHRALQLRSKPGLNPVVTRLQRTGAWRRWDESGEGTPSVMPNIGKTDRSHQGTAPVTALASRDPVEVPTAKRRARRRSVAVQAIVADQQVLDELTLNLPPPGGKPDDAPTRSATQITRGAKGRMTMRIVALDLGVKKSSYCELTGGQVVHRATVSDVTAMKPLLGPEQAPARVAIEACRQAWFVHDLLSEWGNEVILVDTTRSRQMGIGQHGRKTDRIDAETLARALEAGRIPVAHVLSAERRELRRVLAVRRCLVETRAQMVTTIRGLVREQGGSLPSCHVDRFVAKVRERKLTSEISQYVEPLLEVLQKASDQLVGVEEQLAVLCAKEPVIARLTTVTGIGTVIAACFMSVVDDARRFHGAHQLESYVGLVPGEDTSGGKRRLGAITKKGNCYLRALLVQAAWTILRGTDKSDPLYLWAKKVAERRGKRIAVVALARRLVGVLWAMWRDGTVYDAKHLAQQGIRGLRGAVQSLELQKEKLAQAAKKDSVKHPRNQSMATTRRTTKTSAAKAA

SEQ ID NO: 277244 - protein, 348 aa, unidentified
MESMPAPESAVTVGVDTHLDTHVAAVIDQAGRLLGTQAFPASTRGYVALVTWAEHFGAVERIGVEGTGTYGAGLARFVHAYGLQVVEVNRPDRSTRRRQGKSDPIDAQAAARATLAGVAATTPKTREGQVEMIRVLRVARRGALKARVAAAEQLHGVLYSAPEELRQPLLGLKTKTLVELCAAMRPGSLTSTTAATKTTLRTLARRWQQLQAELDQLDTQLQMLVAAAAPTLVALPGVAVDSAGQLLVTAGDNPQRLRSEAAFAHLCGVSPIPASSGRTDRHRLNRGGDRRANNALWRIALVRMHCHPPTRAYGERRTKQGLSKPDILRCLIGGLSRSRLVGRAVASR

SEQ ID NO: 277245 - protein, 344 aa, unidentified
MEYLGIDVHKVESQICILTESGEIIERRIRTERERFAAVLGERPRAKILIEASTESEWVERCLEELGHEVIVADPKVAAMYATRSRKVKTDLRDARTLAEACRLGAYRPAHRTSNRQRHVRAQLSVREALVQTRARYISLIGALLRREGLRVASGNAVGFTKRVARVAMPGQLKSEIAPLLAVFESINRQLVWVDTRLEQLAKSDETVERLCTAPSVGPVTAAAFSSTVDDVQRFQSAHQVEAYLGLTPSEWSSGEKQCKGHITKAGNNRMRRLLVQVAVSILRLRSPRTEALRKWATGIAARRGKKIAIVALARRMAGVLFAMMRDRTRYFQAALPEPSAQVA

SEQ ID NO: 277246 - protein, 396 aa, unidentified
MISVGIDVSKGKSTVCIMKPCGEILESPFDIGHTADELDSLISLIKSFDEETRIVMEDTGHYHLPVATYLSSHNIFVCCVNALRMKKFCSQSIRRAKTDKIDSIKIASFGITYWNELVKAYPSNVIYDELKFLARQYYQVTGMLVKSKVNFSNLLDQVMPKINDVLSNQGENHKLTEFVSRYIHFQNILDMGEMKFTSDYCKWAKKKGYRLNERKAAEILALAQNGIPTLPNSQSVKIAVSEAVKLIHSIEESRNTILAQMQDLCNTLPEYSVVKEMDCIGDTLAPRIIAEIGDVRRFKNKHSLIAYAGIDAPPYQSGAFHASERHISKRGNSYLRKTGYEIMQSLIKHKPADNAVYDFIQKKRSEGKCGKEAMIAGLNKFLRVYYGKVMEFYSEH

SEQ ID NO: 277247 - protein, 360 aa, unidentified
MAKITQLDFTGTTIFCGLDVHKVSWRVNLRDTELELKDFTQPADATLLYRHLTKNYPGAKYKAAYEAGFCGFGIQRQLTALGIECLLLNAADIPKGDKDRRQKNDKRDARSISQQLSTKKDLKGLYIPSTDWEHARTLVRNRQQQISDSTRCKCRIWHFLHFSSLPAPQKEETGQYWSRKFIKKLEDMDCGGSPELKAALQIKLQDHLYKRNLLLQSTRAIRSLCKQQAYANSIQLILSIPGIGEINAAIILFELQDIRRFKTFDNLCSYVGLVPDTDDSGETKRTRGITHRRNTYLREALIESSWVIIKKDPAMLLKYKNYCKRMHKNKAIIKIARHLLARLNFVLKNKVPYENGLLAG

SEQ ID NO: 277248 - protein, 337 aa, unidentified
MGLYCGIDLHSNNHVVTVIDEGDRRLYERRLPNDLAITKAALEPFRAQLVAVAVESTFNWYWLVDGLMDAGYEVRLVHTGAVVQYDGLKHTDDEHDAFWLAHLMRLGILPTGYIYPKSERGLRDLARQRMRLVQHRASHITSVQNQVWRSTAVRLSGHTIKGEGKQPWPELRDADLALSVETGRAAIDALTVQIERLEEVLLKRVGLSPQFRVLKTVTGIGPILALTIALEVGDIKRFPGVGEFASYCRCVDSQRLSNAKKKGEANRKNGNPYLAWAFMEAAHFAIRYLPAARRFYERKCRQRNALLAVKALAHKLARACFYILRDQVPFAPERLFV

SEQ ID NO: 277249 - protein, 315 aa, unidentified
MMNEQTYCGIDVAKRHFVIGLSTQKRTKTETNNPKGIAHTIEYLRRFSVDLIVLESTGGLELPLAKALHRTGFRVVIANPRQTNQFAMSQSLAKTDNKDAKMLAFYAQMLAMRDNVAQQLYIPPTPEQEQLEALVSRRNQLIEMRFAEKNRLEQVHSTQVFSVEQHIDYLSLRIDELDREIEQHLKHFDDTIKKFKDIKGLGTQTIAVLMSMLPELGQYTHKQIASLVGVAPHPKESGNTKWKSRCSGGRKAVRNALYMATFVCVRFEPKLKQFYERLRANGKAFKVAINACMRKLLTILNAIVRDDSQWDAHAL

SEQ ID NO: 277250 - protein, 391 aa, unidentified
MVCVGIDVAKDKHDCCILDSDGMVRADCFTIPNNMDGFKQLLQTIRNCTKKSDKIKVGLEATGHYSYNILGFLLDNDLAVYVMNPLHTNLYRKSLSLRKTKTDRVDARTIATMLLSDVDLKSYTDIAYHNEDLKSLTRYRFDKVQERAKLKQSVSRLATILFPELEQLVSSIHGTSIYALLGEYPGAKQISEVHLTKLTNLLTTASKGRYGKEKAIQIREAARTSIGSVMPAKSLELKHTIKLIQELASEINEIEDSIQKIIDELNPPILSIPGMGVNSAAVILAEIGDFSNFSSPDKILAYAGCSPSTYQSGKLTNCYAHMEKRGSRYLRHALYNATKYVCYWNPVFAEYLAKKRAEGKHYNVALSHAMKKLVRLIYALQKSGKAYLAAA

SEQ ID NO: 277251 - protein, 340 aa, unidentified
MEKRYIGIDLHRNRFTCCIRLENERTYVTGWELADLGKFVKKLRPTDEIAVEITGNTRLFFDAVAPRVARVVVVNTNQFKVICESVKKTDPHDARALALYLSKDMLPEVRMKDKQHGQLASLTQTRDTLVKLRTALKNKINNILSARGLNLAKEALSSEKKLAQVLELPFDDIVRIELRVIVEQIRSLNRSIAELEKTIGEEGSKLDGHKGLSSIKGIGKITGAILLSVIGDVNDFADEGHLASYFGIVPRVSNSNETQHSGRIHKRGTKLGRTALVQSALIAANYSPYLKQFYEQVKARRGAGKAIIALARKFLGIIYRTLKNKWVFEDFPNFVLAEKA

SEQ ID NO: 277252 - protein, 404 aa, unidentified
MGWTPPPASMCQGRGVLNRYEGASYGEGYHHRVDLAKHVFQIHGACADGSVAFRKKISRVKLLPFLSSQPRYVVAMEACAGAHGWARDIQAQGHEVRLIAPAYVKPFVKRQKNDMADAEAITEAAARPTMRFVAVKSAEKQASGMVFKTRDLLVRQRTQTINALRGHLTEHGIIAPQGVFHVGRLAAEVENVNNHLPSIVIELCTLLLRHIATLDEQIAALDRRIRDRAREDETARRLMSIPGVGPVCATALEALAPPPETFTRGRDFAAWLGLTPRQNSSGGKARLGRISRMGQRDLRRLLIIGAMAVVRCSQAGRSCRIVAGPYDGEKAPNACGDCARQQDCSHRLGFDGERRGLPESGRGRLRAEAAGAAWMWWGQRRIMGKRSRRRGRENQLTGWRLERG

SEQ ID NO: 277253 - protein, 480 aa, unidentified
MKDQQLVGRPRKTGKRKRLSPALLERIEPNAAGIDCGASSHYVAVPSDRDPQPVRQFRTFTADLRRLADWLVKCGIKTVAMESTGVYWIPIYEILEERGLQVVLVNARHLRNVRGRKSDVTDCEWLRDLHSVGLLHPSFRPAAEIVELRAYVRHRHKLVEAAATAIQRMQKAMTQMNLQLHHVLSDLTGLTGLAIVRDILAGVRDPQALAAHRDRRCHASKGEIAAALTGNYRAEQLFVLRQNFEAYEFNLRQIAQCDAAIEALLATLAARCQPPASALPAARPRKKPSKNEPRLQLRSPLHRITGGADLSQIDGIGPYGALQLIAEIGTDMSRWATAKHFTSWLTLAPNNKISGGRLLSSKTQPSANRAAAILRRAAMSLSRSASALGAYYRRLAYRVGKAKAITATARKLALLVYRVLHGDITYHDPGAAAYQQHNRTRVVRNLRQRAQQLGFALMNIQTGEVLGQTASKRVAPSPVS

SEQ ID NO: 277254 - protein, 368 aa, unidentified
MGSVAVVAMDIHKKFSKAVVMDEAGQILWECEVEHGDLAVMSEFFSRFEAGAHVVMEATFNWPWIADLAQGAGLCVHLVDSMRAREMAKGYAKSDRKDAIYLGKLFLSSEIFPEVYLAPVDVRDKRYLFRQRSLLVRTRTAVKNAVHGQLFRLGYVTDEEVSDLFGVSGRQYLAGLEVGEKERFLLEEKLKVIDVLALHMGILEGKIAVQLEEDPRAAILMSVPGIGKLVAYAILAEMGQVERFADRRALSAYAGLLPLEDRSGGKANPKHTGQKYNRWLRHAALEAVSGALRSSGRMKSLYMRVKLRNRSTPGKARVAVAREILELAWLLLTRGQYYQEYPPGRPGSRIEVSSRPNRASQTALCARS

SEQ ID NO: 277255 - protein, 358 aa, unidentified
MNNVKSSRIDFTGQPIYVGLDVHKKSWSVSISTQYGQYKSFSQPPEVDKLVHYLQQHFPGAQYWSAYEAGYCGFWIHDRLTEKGVGCLVVNPADVPTKNKERKTKRDRIDCRKLSRSLRNGDLEGIYVPLREKLEDRSLIRTRLSMGRKQTRCKNQIKSMLFFYGVVIPEEKEMGHWSRRFIRWIEGIRMERASGDMALQIHLEELSHLRQIIAKLNRAILALSRTEQYRPWVLLLRTVPGISTLTAMILLTEIGEITRFPSIDELSSYVGLIPDTEASGEKEHIGGITQRSHSQLRWMLIEASWKAVQKDPALMMAFDQYCKRMRKTKAIVKIARKLLNRIRYVLKNRSEYVPAVLE

SEQ ID NO: 277256 - protein, 343 aa, unidentified
MAKTPIAVLGIDLGKNSCSLAGLDAAGAVIMRRRMTREGTIKFVATLPACVVAMEACCGAHFLGRTFACQGHTVRLMSPEYVAPYVKAQKTDNRDAEAIAEAATRPTMRLVTLKSEAQLDLQVLHRARERLVAGRTRLINQLRAMLLERGVILPKRRAPLIKRLDELMAGELPISQRARQLLQDLRDEWMEQDRRIKAYDDELMALTREDGAARRLATIPGIGVVNATALLAAVGDASAFAKGRDLAAWLGLTPRQHSTGGKTKLLGISKRGNKYLRTQLIHGARAAIVHFAKKATPVGTWVRQLLTRAHPNVVVVALAAKLARIAWAVLRHGSNYDHRTATV

SEQ ID NO: 277257 - protein, 345 aa, unidentified
MKKVVAGMDLHSNNVVIGVMDMDGHRLASRKMPCELKEVVKFLTPFKKRLERVAVESTYNWYWLVDGLQALKYPVVLANPAGMAQYSGIKHADDTNDAFFIAELLRLAILPTGHIYDAELRPVRDLLRRRLMLVHQRTALMLSFKSLYTRTTGQGLTLSALKNLEIKAAQALYEHPANQMIAGMQIKHIEQLTESIEKLEKAVLGSARELPYYEKLATLPGVGRILGMTITMEVGDIKRFAEPGHFASYCRTVEAKRMSNSKKKGENNSKCGNKYLAWAFVEAANFARRYDGQCQKWFERKVARTSNIIAIKALACKLAKAAWYLMAEGTDYDPKRMFGQPAKTK

SEQ ID NO: 277258 - protein, 421 aa, unidentified
MLIMGMFGTPAARCGPYSGQRLNEGSAWGPGYRRGEDDRKRLVVDGEAAGLSGLVRTLQNLDGDIRIVMEHTGMYWRPIALALKEAGFFVSVVNAILIHDFSDNSLRKVKTDKADSMKIANYALSFWAELRDYSPEDETRQMLKMQNRLYLRTQKSSVTLRNGLISLLDQAFPGVNTLFDTQPKRSNGHFKWVDFVRRFWHRDCVAGVSLAAFSDAYHKWCTKSGYRFSQSDAEKLHAAARNSVATFPKSDSAKLLVAQAVDSLNAVYDALYVLRGEMLRLASLLPEFDVVMAMQGAGEVTGPQLMAEIGDVRRFTHKGALVAFAGMDAPPFQSGTFDSKSRRISKRGSPHLRKTLFMVASTILQHSDPDNPIFQFMDKKQAEGKHFYIYIVAGAAKFLRTYYARVNAHLAMLGSGANTAA

SEQ ID NO: 277259 - protein, 312 aa, unidentified
MEKLSYGGIDVSKDCLDVVVLPEGWFFSVSNDTAGWAELVARLRPLAVCAIGLEPSGGYERGIIRALLAAGLSVRRINPNKLRQFARARGVLAKNDRLDARLIAEYVAIMPTRVVQRNDAVERLAEIVTMRRQLCDEHVAVENQAAHLEDAMLRRLSKRRLIRLEADIRLLDKRLAEMVATNAAFAQLYELLTSMPGVGPVLAFTLIALLPELGKMSRKQIAALVGLAPYDFDSGKLRGHRSIYGGRMPIRNVLYMAALSASRHNPALKAFSNRLADANKKSKVIIVAVMRKMITTLNAMLRDNAAWQPQSA

SEQ ID NO: 277260 - protein, 355 aa, unidentified
MTSTKYIGMDVHKESISIQVMNSVGKVVMECVIETKASTILQFIDGLRGDLRVTFEEGTWAAWLYDLLKPHVTEVVVCNPRKAALLKDGSKGDRIDAHKLAELLYMNKIKSVYHGEHGLRTMKELARSYLTITKDLTRVMNRLKALYRSWAIPCGGKEVYAPRYRAEWLGKISEAGVRRRAEHYYQQLDVLRLLRQEVRRDLLVEAKKHKPWKLLRQIPGLGPIRAALLVALMQTPHRFRTKRQLWTYCGLGLETHDSAQYHAVEGQLQRSRKPATVRGLNKNHNHDLKDIFKGAATRVSSSHGPLHDFYEALLAKGRKPTMARLTLARKIAAITLIVWKKEVGFDANYLKQKAA

SEQ ID NO: 277261 - protein, 353 aa, unidentified
MKKLVKQVVGIDVAQDELVVCIGRMYDDWTPELYGHKSFANSSKGFISLTEWVTKLSDCTIELRYVMEATGVYHESLAYFLSERGDRLSIILPNKISNYSRTLDVKTVTDKTASEAITRFGLERKLDNWEPPKGIYKTLRQLTRERDQVVEMRTVTKNQLHAEESEAKPNKGSLARIKKHIAFLDKQENEIKEELKELIKENAEVKRVVIILCSLPGIGLLTAATILGETNGFDLIRNKRQLASYAGFDVKEKQSGTSVKGKPRISKRGNKYLRKAMHMPALTAIRHDERFKAIFARIVSKNGIKMKAAVAVQRKLLEMTYTLYKKQEEYDNAYLTKNQIELERSIQELIIKN

SEQ ID NO: 277262 - protein, 348 aa, unidentified
MKIVGCDLHARQQSIAMLDTETGELTEKVIRHEGNGVREFYAALGNSVVVGIEATGSMQWFLELLEELGIESRVGDPAKIRAAETRKQKHDRRDARLILDLLERDRFPAIWMPTSGQRDLRSFLRDRHQWVQMRARLQHTLQAIALNHALRKGPALGSGRGQEALRKLPLPPYASQRRNELMSLYAQLQRRIQELDKQVEEQAQQRPQARRLLTHPGVGPVTALATDVFLGDPSRFTTANQVASYIGMIPSEHSSGKRQRLGKMSKQGNSLLRYLWTEAGMHATGKDPELKRFYRRKLIQKGMGKARVAAARKLGIRLWIMMRDEIDYEEFCRRGKLRQIGESPCGNA

SEQ ID NO: 277263 - protein, 318 aa, unidentified
MSQGYDKFIGIDVCKDNFDVCCATSGPKGRFENTADGVSRLLPLLPPAGACLIVVEATGGYERQLVADLKTANHQVSVVNPRQVRDFARAFNILAKTDRIDAAVLARFAEKVQPIPREKAGRIDELRELVARRRQLIEHRTAEKNRCLQGASPLVRKSLLRSIEVINKDIKVIDKALLSLVQSDDDWRNKFDKIKEVTGLGPQTATTLVAEMPELGQVNRQQAAALVGVAPFNRDSGQFKGRRMVWGGRQSVRNVLYMAALSAMKHNPVIREFAARLYAKGKPSKVVITACIRKLVVILNAMLKANQSWQPRLAAATP

SEQ ID NO: 277264 - protein, 370 aa, unidentified
MKKDTLFVGLDTDKKHIDVAVAEPLPRGEVRYWGRTANTPASVDRMVKKLGHGRRELVACYEAGPCGYGLYRQLTGKRGVRCLVVAPSMTPQRPGDRVKTNRRDALKLARLLRAEELTEVWVPDAAHEAMRDLVRARSSVVSALTRCRQHISGFLLRQGIPYAGKPWTNKHRAWLGTLKFEHAAHRLLLAELLLALDQAQARRDRLTDHIRELVPTWSLAWLVEALQALRGYDLINAAVMVAELGDPRRFAKPRQLMGFVGLNVSEASSGETVRRGRLTKTGNMRARKALIEAAWTYTRPAATTSKPAAARLPAAVQQIADKARHRLSRRYRHLLRRGKLKQVAIAAVARESLGFIWAIAHAAAPLPVQS

SEQ ID NO: 277265 - protein, 388 aa, unidentified
MTGNRRCIGLDVHREFAQVAIWQGGTVTQAGTFATTPEGVREFAAGLGPADEVALEATGNTWAIATVLASRAGRVVVSNPARTRAIAEAKVKTDKVDAAILAQLLAADFLPPVWMPDAATSALRRQVLRRAHIVRQRTRLKNQVHAILHRNLVPRCPAADLFGIKGRTWLAQQDLPPDEQAAACALLRQLDFHAQELTLIDRDPGQAALGRPEVLRLMTIPGVDATVALSIVAAVGDFTRFRTPERLVSYLGLNPRVRQSSGQPASHGRITKAGPAHARGMLVEAAWSASKAPGPLRAFYQRVRARRGMQVAAVATARKLAVLCWHLTIKGEDYAFALPSLIARKQRKLELRAGAPPARGRKGDAAPYSLAAVRAACFRWSDGQSDRR

SEQ ID NO: 277266 - protein, 354 aa, unidentified
MKILAIDLGKSKSVACQYEVGTDQHEYETLETTAEALRALLTKVSPDRVVIEVCSQAGWVADVVRELGIELQVANPNHEGWRWRNVKRKTDRVDALKLARLSAVNQLPLVYMPAKDIRQWRSLILYRQSLVKRRTGAKNRIRSLLDQQGLRVLASGKKGWTEKSLEALRVLARPLEETEREEFWRGELWEELRQLDALEETIRRVEEKLDGVGQQDRRVQLLDTIPGVGPRLAEMVAAVIDEPSRFARGKQVGSYVGLTPRQYQSGNTDRQGRISGQGHRELRAMLIEVSWLGLRHNPWMHEVYERVRRGSKTRKKVAIVAVARRLLVRCWAMLRDGTPWRRPPLEDTSAAQAA

SEQ ID NO: 277267 - protein, 357 aa, unidentified
MTGTEKYIGMDVHKESISIAVMNSTGKFVMECVIETKASMLLQFIDGLRGDVRVTFEEGTWAAWLYDLLKPHVSEVVVCNPRKNALLKDGSKSDRIDARKLAELLRGNQLKPVYHGEQGLRTLKELARSYLTISKDVTRVMNRLKALYRSWGIACAGTQVYAPRHRSEWLGRIREAGVRRRAEHCYQQLDVLRLLRQQIRRDLLLEGKKHQAWRLLGLIPGIGPIRAALLIALIQTPHRFRTKRQLWTYSGLGLETHDSAQYRVVEGQLQRSKKPVTLRGLNQDHNHDLKDIFKGAATRVSSSSHGPLHDFYEHLLSQGRKPTMARLTLARKIAAITLIVWKKEVHFDASYLTSQAA

SEQ ID NO: 277268 - protein, 413 aa, unidentified
MTTLFVGIDVSLRENKARFLDACGNDCFGRLAFPNDADGAVALVRESCRALTANKLERVYFGMEATSFYAWHLALYLNKAPELAFFAPQVFIFNPKGIKAFKKTFNSLPKNDWTDAWVVANRLRFGQLPRPFDPDERYLPLQRLTRHRYHLVQQLSREKNYFLSYLFLKYSRLAQACPLSSPLGASAAALVTEYYSVEEIASTPLEDLAKFLAQKSRNKIADPLSIAQELQKAARHSYRLPDKLKDPINRILASTLQNIRHLERQIKEMERAIAYEMSGLNCPLSTIPGFGLVFTAGILAEIGNIHNFPDDDALAGFAGLTWNEYQSGDFQAEETPMAKTGNVYLRYYLVEAANSVRMHDAVFQRFYQKKYQEATKHQHKRACVLTARKLVRLIFALLRENRAYSPPREGVLI

SEQ ID NO: 277269 - protein, 346 aa, unidentified
MVEYVGLDVSKEATAYCVKDEKGKVLARGKAVSDPDALFEVLKEHCLCPERIVLETGTLSHWLGRELVERGLPATIIDAREAHAVLRLQHNKTDDNDATVLADLARTGFYRAVAVKSEGAQRCRILLKARSHLVEQRRSRQNVIRGLLGTLGHRFAKGSGKFARRVRTVLIERPDLAVIFEPLVSELEALERSVKQLDRAVEAEAKAEPACRLLMTVPAVGSVTALAYLATIDDAGRFAKSRAVGAYVGLTSRRKQSGEMDYSGRISKRGDSLLRALLYGAANSLLTRVRRAHPLKTWARRVKARTSHKKACVALARKLAVIMHRMLISGEAFAWPQPTTKETATA

SEQ ID NO: 277270 - protein, 342 aa, unidentified
MKEASIIGLDLAKRSFQAHGALADGSVAFRKKLTREKVLGFLAEQPRCVVAMEACGSAHHWGRAIRDAGHEVRLIPPAYVKPFVKRQKNDAADAEAIAEAASRPTMRFVAVKTEEQQARAMLFRTRDLLVRQRTQLINALRGQLSEHGVVAPQGPANVVILAQAIDDLTPSLPLLVVELARVYLDQIDRLSEKVAGLEKAIACEAKRDAMTRRLQTMPGVGPITAMAIETFAPPMEVFRRGRDFAAWLGLVPMQHSTGGKQVLGKTSKMGQRDIRRLLITGAMVIVRWACRKGAREGTWLHRMLGRKPRMLVAIALANKMARSIWAMLTKGEDYRVPAAATI

SEQ ID NO: 277271 - protein, 432 aa, unidentified
MIAVSEPVAPDASLFAAFVGLDWADRKHDLVLYDPRGGRPEHVELPHTPEAIDQWAAGLRQRFGGRPIAVCFEQTHGAIAYALLKYDFFLLFPLPPARLAAYRESFSNSGAKDDPSDAALLVDYLLRHRDQLRVWRPDTPATREMLLLAEARRDAVDQRTRLSNQLTAVLKRYFPQALVLVGHDVDTPLACDFLGKWPTLDAVQRASPATLRKFYYAHFCRSEERIVERLELAKSAIPLTTDTALIQAGILQVQCLIGQLRALHKAIDRYEARLRELLAQHPDAALFNDLPGAGAALAPRLLAAFGTDRERFQSAGELQTLSGVAPVTKRSGRRWIVHRRWACPKFLLQTFHEFAHCSTKRSSWAKAFYLQQRAAGKGHHAALRSLAFKWIRILYRCWKTSTAYCEQRYLQSLRRTNAPLLAFLPVATAAGV

SEQ ID NO: 277272 - protein, 374 aa, unidentified
MSKDTLYVGLDTDKKHIDVALAEALPGGEVRCWGKIANEALSVGRLVKRLQAGGRPLEMCYEAGPCGYGLYRLLNSKPGVRCRVVAPSLTPRRSGDRVKTNRRDAMMLARLLRAEELTAVWVPDATHEAMRDLVRARGAAVADLVRCRQRIAGFLLRQDIRYAGKPWSKKHRAWLGQLVARLALPAHRLVLGEALQALDEATARRDRLTDHIAELVPGWSLAWLVEALQALRGFALINAVTLAAEIGDPRRFAKPSQLMAYLGLVPSEHSTSDRVRHGGLTKTGNGHTRKALIEAAWTYSRPARAPRDASPHTPAVAAIATKACHRLSRRYRRLTARGKRPVIAVAAIARELSGFVWAIAQAAGPATPERSPGR

SEQ ID NO: 277273 - protein, 391 aa, unidentified
MNQLIKYVIGIDVSKDKLDACLISVDVQLNYKVKATHKFNNALSGFKELLQWFSKFCKEKVPVQTLMEASGVYHEKLAIWLTEREMEVFVVLPNKARKYMQALGLKTKNDKIDAQGLALMCAQHKFDKWQPVVKFYYELRLLTRHYQSTQELKTSLMNQLHALEYSGYPSKQVSKQLEKTIAFFKKQIKESKQQIAEHINRNDEVKRKVTQICKIKGVDTLTVATILAETNGFELFKNQSQLISYAGYDVIENQSGNHIGKTRISKKGNSRIRRILHMPAFSVATHKEPIFLNLYERIYSKTKLKMKAYVAVQSKLLVIIYSLWKKDEEYNKDYHPKTTSGNDESRGLFRLSAEINDENLIKKVVLPESSTTRDELQYNESPEVLFRLVQT

SEQ ID NO: 277274 - protein, 323 aa, unidentified
MNPAPTTARQAVAGIDVSKDRLDVFLLPEGEAFAVANDPEGIDSLLERLEVARPELVVLEATAGYERPAAAAIAASEAGIAVSVVNPRQARDFAKATGTLAKTDRIDAEVLARFASAVGPRPSVIPDEEARALQAILVRRRQLSGMIVAEKNRLLMAPEAVAKRIAAHVRWLEKELIRTDRELDEAIGESETWGRNEALLRSVPGVGPVLARTLLAELPELGTLSHRRLSALVGVAPFNRDSGALRGKRAVWGGRAHVRASLYMGALVATRFNPAIREFYERLVAAGKPKKVALVACMRKLLSILNAVLRDGVPWHSTHLLTP

SEQ ID NO: 277275 - protein, 338 aa, unidentified
MVYIGCDQHKQFCQLAVLNESGTLVEEKKFYHSDPHALREYFASLPANSQMAIEASGFESWLADFAQELGIHVTLSHPLKTRAIAEAKIKTDKVDARTLAKLLQTDFLPTAYLATPEIRRRRYFLRFRLCLNHYRSSLKNRVHSLLHHLGIQPPAVTDLFGVRGRQFLDSLELEEGYREALHGYLALLHMIEARINCLKKRLAAYVKESPEAQLLQTIPGVGVLLAQVILAEIGTLSRFNSAGRLCSYTGLVPSLHQSGQTRYQGPCPQQGNKFLRWAMVEAAHIAARKDPLLKAFHDRIKRKKGSQKATVAAARKLLVIVYQILLKKEPYRYTTFPR

SEQ ID NO: 277276 - protein, 395 aa, unidentified
MFYCGIDIAKYRHEASVIDSDGKPLFDSISFTNSKEGCEKVLALLQKLEITSDSVVIGMEATGHYWLSVYEHFSGLGYDVKVFNPIHSEALRKMYLRPTKTDSKDSFVIAQVMRFGQYSSSTMSDENIIALRQLSRYRLALVDSCGDCKRRIIALLDQVFPEYGKLFSDTFGATSTEVLLNCQTPEDMLDVSTEKLTELLRKSSKGRFKEAKAMELKTAAKNSFGVSFAKDAFSFQIKQLVEQLVFIENQVKELEAEISILLNKINQVITTITGIGETLGAIIISEIGDINRFDAPNKLVAFAGLDVRVNQSGEFNGTRNKISKRGSSYLRRAIWIASTRAAFCDPVLSEYYQSLRARGKHHLTAIGAVARKMCNIIFVILKENRPYESLSPKKS

SEQ ID NO: 277277 - protein, 344 aa, unidentified
MNITTIGFDIAKNVFQVHGANERGKPGLDRRLKRGQVLEFFAQQNPCLVGIEACGGAHHWARKLASFGHTVKLMAPQFVKPYVKSNKNDSADAAAICEAVRRPTMRFVPIKNVEQQAILSVHRARQGFITARTAVVNEMRGLLIEFGIVIPQGIRNVAPHLAGILEDAANDLPTLFRSLLHRLSEHYKELDRQVLELEHEIKIWHRESENSRKIAEIPGIGPLTASALVASISDAREFKSGRQMAAWLGLVPRQNSSGGKEKLLGISKRGDSYLRMLLIHGARAVLRHLGEKKDATSLWLRELSKRRHPNVVTVALANKNARIVWALLVRGTRFEARAGSLAVA

SEQ ID NO: 277278 - protein, 482 aa, unidentified
MKKKNIYVNQSQELLRLFEEAGNGSKVMCVPMDYAKKDHVVMFCNGYGHILRKPFSIKNSPKGIEYLTEQVTRSCSHRQIDPNHVFFGGEDVGSYAENFINTLRSGGWVVAGVNAHDAKKQRANIQASTDRLDLMGIASMLLNRRANCSPAQSGIYRNLRTVVRHRRKLVAMSTEVKNRIHTIVDRLFPNFLDEKKSGIYPFSKSSLYLMEDRFSPPQIRRRKRQNLIKILQLHGTAEPETAAAKLRKYATQVLNAPHEYIGTLQLSLTQHVKHLRCLQDSINQLEHEVAVWLSQTQGAFLTTIRGIGIVLAAGVSAEIGNPHEQKPLNNLVSYTGIIPRVKQTGGPEGKTHTGKVAKRCNRILKDYVVQSANHMGLHGPEDLMADYKRREAAGQHADFGIGRRYLRTAMCLMRTSQIYMPQRLRNTEVKPEERAGYYLTTWPSLRGKWYKAGALEAAFEKDRPLGRWRRMVQELYGIKLKL

SEQ ID NO: 277279 - protein, 355 aa, unidentified
MTRLASTIDGVIGVDTHRDTLAAAATDMVGGVLAQTSVSADAAGYQRLLAFAQAQVPGRRCWAVEGAGSYGAGLAAFLQVHGERVVEVGRPKRPTRRGGAKSDALDAVRAAREVLAHDHPLAPRRRGEREALRVLLATRRSACRAKVCAINQLKALIVGAPEELRAELRGLATKQQVRRCATLRDRPTRSLEHRMTVRALRLTAQRIQLLAAEAAELRAELDRLVAAVAPWLLELPGIGPISAAQVLASWSHVGRLRSEAAFAALAGANPIPASSGQVTRHRLNRGGDRQLNRALHTIVLARLRDDPDTRADAARRRAEGKSSRDVRRCLKRAVARQLFKLLARHDRPAVEVIRA

SEQ ID NO: 277280 - protein, 421 aa, unidentified
MGKLIERCAGIDIGKRFLVCCVMTGAAHEEPRSETRRFDTTVPGLKRLRNWLNEERVTDVVMESTGSYWIPVFNLLEGHVTVVLANPEEVKNRKGHKTDRKDAEHLADLLRHNHVRSSYIPAQPVRQLRDLTRRRVQLTQDATRERNRVQKLLEQVNVKIGSVLTDVFGVSGLHMLLALLDGRAAPEEIAGLARGSAKRKTPQLIEAIEGNRMSDHVRFLIRGCLRHLACLEEEVEELDAEILRRMQLSTFQKAFTLLQTIPGVGQLSAATILAETGPDLDSFPTIEKMASWAGLCPGNRESAGIQKGPQTTHGNPYLCTALVQCAWAATRKRDSVFRSRFQRLAPRRGEKRAIIAVAHHMLIILYCMLKRGVPFLGAEHAPKQRRRERRAHHHLRCLRRLGFSVEIRLSSESTPPDTISR

SEQ ID NO: 277281 - protein, 375 aa, unidentified
MEHHTEAFVALDTAKLRNAVAIADAGRNGEIRYLGEIDNTEVETRKLVAKLASKHARLTFCYEAGPTGYGLYRLIKSIGHDCIVVAPSLIPSKPGDRVKTNRRDAVNLAKLLRAGELTAVWVPDERHEAMRDLVRARDAAVKDYKIKRQNVSSLLLRLGRHYPGKKTWGRAHINWLTSLKLEHREQRIAFEEMLLAVRQVRERIERLEHAMREAVADWTLAPVIEAVQAMRGIDTVGAIAFLAELGDLSRFENPHQLMAYLGLTPSERSTGQSVKRGGITKAGNTRARRLLIEAAWSYRFPPRVSKDMQIRIGAAPRTAREIAWKAQMRLCGRFRTLTRKGKRPTIVVTAIARELSAFIWAINREIVGSHATANQ

SEQ ID NO: 277282 - protein, 412 aa, unidentified
MANKIAGIDVHKKVLMVVVLDGAAPGEKPERRRFSTMPTELRHLATWLRERGVMEAVMESTAQYWRSVWLELEPHMSLHLAQAFSNRAPRGRKHDFKDAERLARRFIAEELILSFVPGGEQRMWRNLARMKLQLIRDRVRLHSQIECLLEEMRIKLSVVVADLFGASGLRILHALALNETDPKNLASLGDERLKCSEEQLIEALTGESHPVHRQMLGLQLERLRQINDQIAVLNTMIAQAMRPHQDAVVRLAEVPGFGIDSAQQVIAEVGVTAETFPSAAEFTSWVGTCPGKEESAVENRSSRSAKGNKYMRRILNQVAHAAARSKGTHFQAVFKRLLPRLGYQSAIWAIAHRLCRLVWKILHEGVRYIEQGISCQPKLLIYRAQSLAKQLRKFGYDLRVTTTNPQMHESVS

SEQ ID NO: 277283 - protein, 392 aa, unidentified
MKTTAKGVLQTGGEQVAVGVDPSRNALQLAILAPHGTTTKRFPLVPASLASIDAVLGQGQGVRIGIEGAATCGAMVLLHWLRQGYDIREVNPQISKRLRECLTESHTDISDAQGLAWSVRFHPHLPKVRLTVTTAAWKRLSRLRARLVKARTGLYNRLHSLLAESYGAVYKRLFPNLKSKRALEFFQAFPTLDDALDDLPQVRSLLGEERARLLEEAGRWGEGLYLETLRLEICLTIQLIFAHRTAIEGVGAKMAELSQADPQVGRLRAVPGMGTTLALTILGHSGDFSRFESHDAYAAYCGLAPAVWQSGQSRVYAKRRRRYSRPLKQAFLQLALTQLRLNPESRAYYERKRREGKPHWVALIALARQLCKKVYKLMAEKAPPNPPLDIDG

SEQ ID NO: 277284 - protein, 421 aa, unidentified
MRSIGLDVHRDFCEVAIVEAGEVRSAGRIETTPAALELFAQSLCSTDRVALEVTGNAWEVARIIEPHVGQVLVVHPGDTGIRQARAKTDRLDARALARLLAAGSLEGLWMPDERTRAMRRRLARRSQLVRARTRAKNECHAALVRRLIAKPAVSDLFGLAGREWLRGLELPLEERETVDGCLRQIEFLDVEVAEVEKQVAADALGTPEIKRLMTVPGVNVIAAATFLAAVGDIGRFRSPRQLVGYLGLDPRVRQSGAAPATHGRISKQGSSSARHALVEASWSAVRQPGPLHAFYQRIRARRGHQVAVVAAARKLACLFWCMLTRQQDYAYGQPSLTRKKLRRLELAAGAPRYQGGRSVWSTNDAMRRAERELALQAERAYQRTVADWQSTRGASATPGRASQTPSKGKQRGKASVPDPAL

SEQ ID NO: 277285 - protein, 350 aa, unidentified
MVQYHIGVDLHLEVAQIAVVDASGELVHEARVKIPDLPAGRAMLDRLAPYLEAGRLAVEALGCNRWFVDECHVRGWDVLVANATKLQLKRDGRKTDRRDAREIARRLFLGDLDRCARTYYPTQAEYAHRKLLRTRHGQVEKRTCAELEIHAILTAYKLRSPAKQLRSRESIRWLRSVALPHPDLRVVLDVLIEDLVSAMARIRVLSKAVAAAARSVPAARLLEEALPSVASQTSLTLICELGDVKRFSGARAVASFAGLVPRVTASADTSHHGKLTKHGNPELRWILGQLAVRLLSRDPVVKAWGARMRRRVHKNKVRVALARRLLIGIWVMLSRGEVFSMERCLGARAA

SEQ ID NO: 277286 - protein, 343 aa, unidentified
MKLMRVGVDLAKAVFQVHGVDRNEKVTLRRKLTRANWLEVLLDAVEPGCVIGMEACGGAHHWARALQAHGIAVKLIAPQFVKPYVKSNKNDANDAEAICEAMSRPNMRFVAVKTIEQQDIQAVHRVRFELSNQRKAKGNQIRGLVAEYGLVAPKELGHLRAAIPVWLEDAENGLSARFRHLLNGLWQDLLALDQRMTELDREIALIANADPVAKRLQQLRGVGPMIATALVATVGDAKQFANGRQMAVSIGLTPRQNSSGGKERLLGISKRGDTYLRTLLIHGARSIVRTAKGKDDRLSQWVTRIAKTRHYNVAAVALANKTTRIAWAMMKHGTEYQADQTAA

SEQ ID NO: 277287 - protein, 316 aa, unidentified
MTTSEATQRIGVDVGKVEVWLSVNGETAQRCANTPAAIRRWIRSLTGPVDFALEATNDYHLVLALEAIRQGHRVYLINGYRLNRYRESIGGRAKTDAGDARLLVRYLEREHNDLRPWTPPPEGYHTLQKLLRRRATLVRARVMLEQSLRGVPELRASLKALIRQIGQIDAALQRLLRETVGSAGWSEHRRRCQQVEGIGPLTATALTMAFQRGAFRNSDAFIAFLGLDVRVRDSGQKRGRRRLTKQGDPELRRLLYLAALQAKSKAAWQTYYQRCLDRGLATTQALNALARKLARVAFALMKNQTDYQPRNPCPQT

SEQ ID NO: 277288 - protein, 339 aa, unidentified
MKLYGGMDLHSNNSYRVLIDESGAVVQRSRVGNEMGRVLQTLEAYREQIDSLVVESTYNWYWLVDGLKAAGYQVRLAHPSALQPYEGLKYSDDRSDAHWLAEMLRLGIVPSGYIYPEAQRPLRDLLRQRSFLVRQCTSQLLHMGNILSRNRGRKTSRQQLRQMTVAEVRELFPDRERTLAVESSLRVIEVLEQQIRAIEKQVLERIKPEAGFRNLQTVYGVGPILAMTIWLETGEIGRFKQVGDYASYCRCVTSTRISNAKKKGQNNRHNGNAYLAWAYVEAATYAARFYGQAARFVERKTAQVNRTLALKALAHKLARACYYVLRDQVRFEPARLFGG

SEQ ID NO: 277289 - protein, 319 aa, unidentified
MHCIGVDISKQELVTYDGVSERVFANTPGLTAFRRFVGSAADVVIVFEPTSTYWCRLETLCRTERIACCQLNPRVVPHYRLVGRGRSKTDKTDAELLYRYGIERGQEEAKELTNDALAQTVAARLACHRVVQKARVAYQGLLDALEHDPATSKGLLGGLRREIAELKAREACQLEEAQATVAADVDAAKRLDVLLSIPGIGPMTALTLLALFRKYPAVSRQQLVALGGLDPIQVQSGTSVHGKSRISKRGNREVRKCLFEATLSAARFNPGIRAIYRRLKEEGKPDKVARIAAARKLPLLAHAIYESGQPFRAPVEEVS

SEQ ID NO: 277290 - protein, 407 aa, unidentified
MEVLYPRCAGLDVHKDTVVACVRSVTAPKVHEVRTFGTTTRELLVLSDWLDSCGCTHVAMEATGVYWKPVWHLLEGHVELVLANAQHVRNVPGRKTDVNDAMWIADLLAHGLIRGSFVPPTPIQQLRDLTRTRKQLVREISQHTLRIQKVLETANIKLTGVLSDILGQSGRAMLNAIIAGEDDPQRLADLAKGTARKKRSDLVEALRGHVTAHHRSMLKLHLDIIAAIESALEQVDAAVGKALAPISQAADLLKTIPGISDVTAHVLIAEIGADMSRFPTAGHLISWAGLCPRNDESAGKRRSVRVRKSGTWLKTTLVTAAWAAVRKKHSYLQSQFLRLKARRGPKKAILAVAASMLTAAYHMLRDNVEYRDLGPHYFNRLDKTKAISRLIRRLNQLGCQVEVTPAA

SEQ ID NO: 277291 - protein, 349 aa, unidentified
MIVVGIDPHKQTHTAVAIDAATGRVLAELTVRARNPGFERLLTWARDLDAERLFAVEDGRHVSGHLERHLITRGERSIRVPPRMMGESRRTDRIRGKSDPVDATAVARAALAHPDLPEATLAGREREIGLLVAHRESLVRERADKICKLRWLLHDIDPDLAPAPRSLGRFVTLRRLAQVLEAMDASVEVEICLDLIARCTEITTRANELERRITSLMRSHAPALLQIPGCAALTAAKIVAETAQVGRFPTEGHFARYAGTAPIPASSGARHRQRFNRRGNRQLNTAVHRIAVTQIRIHPPARDYLAKKRAEGKTKTEAIRALKRHITRVVFKTLISIEQPTDRLTAVAA

SEQ ID NO: 277292 - protein, 386 aa, unidentified
MSVIVGIDIAKSKFDYRIITEGNDQLSKGSCKMNHEGFSGFISDPEITKDAMFVMESTNFYHIPLFSFLQRSGFDVRCVNPLLIRKQVMADSLRRTKTDSADALSIAKYGKLHYDSLKGQKSRMDDEVKAIVRRRQQVVEDVVRTKNQLKGDLSATWPEILAVDVFSETMLAFLSKYGCAQEVLATPDDELRKALVYRGGGKGLSYGIEDIKKFAKSSIGVSYRSEMVKDSAEKLISLKEREKRLTQTLLKHEESLHSKDIEILKSIPGIGDVTACHFMAEIEDISKFGSYQKLIAFVGTDPGIYQSGQQSSTGHITKHGNSNLRRVCYIMATRCVTYNPIIGDYYNKKRAEGFSHRKAMIAAANKLIKLIYVLLSRGEMFKIPER

SEQ ID NO: 277293 - protein, 333 aa, unidentified
MPERLLVHRMEKVTMAEQERADEVLVGIDVGKDFLDVMCTGDGAPSRCRNDEEGIGRLVSQLCDRAPSLVVMEASGGYQRRLLIALVEAGVAAVAVNPRQVRDFAKAVGLLEKTDAIDARMLLLFAERMRPEVRALPDETTRLLEELLGRRRQMVEMLVSEKNRLHQALSSRVRKDIEAHIVWLKKRIKDNDEELGRQVESSPSWNAKVQLLDDLKGVGRLTALMLLASVPELGTLDRKKIAKLVGVAPLACDSGRHSGHRRTWGGRSAARLALYMATLVATKHNATIRTFYQRLIAAGKAKKVALVACMRKLLIITNAMLRTHLEGQRPALA

SEQ ID NO: 277294 - protein, 360 aa, unidentified
MTETMTWVGLDVHARSISAAALTLPGGELHRSRFAADSEALLAWLGRLPHPLHACYEAGPSGFVLYRTLEAAGIPAEVVAPTKTPRASGDRVKSDRKDAELLARLLPTGSLRPIVVPSREREGARDLARAREQLRVDLCRARQRVSKLLLRYGRVYPGKTTWTQTHRRWLAGQSFENASTELAYLDYLAAVDGLVARRQALDERLSRLALEPDWWPTVARLRCFRGIDTLSALVLALEIGDFGRFRSPRQLASWLGLVPSLKQSGESSSQGPITKTGSRYARRLLVEAAWQYGRRPRVGATLAARHEGQPAQVLQIAWRCQHRLYRLHRLLGERRKPANVVTVALARSLACFLWAAAMAP

SEQ ID NO: 277295 - protein, 338 aa, unidentified
MTEYKLIAIDTSKHVFALHGINERDEVMLRRELRRHQLETFLQKLPPTEIVLEACGGSHHWGRRLAALGHRVRLIPPQYVRPFVKRGKNDRIDAEAISEAASRPAMSFVPVKSAAMQADAMVLSVRELLVKQHTQLVNALRGHAAEFGVIAAKGTGQVAALLERIAADPAIPAAAQAMFVELGERIAELATRLGELDRKLAKLHRANPLSRQLAEVPGIGPVGALTLALTVDASQFKSGRHFAAWLGLTPRQHSTGGKTRLGGISRQGNERLRTLLVLGATSVVKLARPGHRFGTTWLLGLLQRRPKKLAAVALANKMARVVWAMMTSGEAYRHQPAA

SEQ ID NO: 277296 - protein, 262 aa, unidentified
MSDSVFIGIDVSSQTLEIASSDQGKTWQLANDVAGIEQLVNRASALAPALVVLEATGGYEFEAACALQAAGLAVAVVNPRTARDFARAMGALAKTDALDARMLAAFARVLHQHPERERFVKPLADAELQQLQALVLRRRQLVQMLTSERQRLRLAHAAARPSIERVIEFLKQELGDSEAEVAAHVQRHHARLAQALASVPGIGAASVAVLLAELPELGKLDRRRIAALVGVAPLNRDSGQMRGQRCIWGGAPMCGEPCTWPR

SEQ ID NO: 277297 - protein, 409 aa, unidentified
MELTPIYRRVIGLDVHQAKISACALIEHEDGRREVIQREFGAFKRDRRALAQWAQELAPQVVVMESTGIYWKSPHAALEAVGIGAWVVNARHVKAVPGRKTDVADAQWLATLARAGLLHASFVPPLAFRQLRLVARQRQKLVGMCSAEKNRLHKVLVDAGIRLNVLVSDVHGSSARAMVKALIEGKPMHEILDCKGRLRSTREELFEALSTDQFSADHRFVAAEILDHIEDLERRVAKLDEYLLQGLQPWQAQLNLLQTVPGVDRIGAAMLLVEITPDMSAFGSAERLASWVGICPGNNESAGKRASGRIRKGNAWVRRLLCEFAQAAARTRCAFKAKFDSLSIRKGHKKSVVALAHKMLRTIHAMLANGTHYQDRSVDYEAMNVARNAPRWIKMLRKHGFIPAAAATA

SEQ ID NO: 277298 - protein, 341 aa, unidentified
MDKELYFGVDVSKKTLDLAYYDGETIDWKNAHIQVSNDDAGFKKIGSWVAKVGKDFDTFLFCMEYTGLYNQNFRLWLESKEYIYGMVEPRKMHRFEPDLDDDQRSLDRIKTDELDAFRIAIYCEQNHKKILRNPSKLPSPVYFKLKRLLAERKQNTKQSTLYKQQLHDICAYDTDLSVERKKLLLKNMKENQKAIDKEIDSYMNEDASISKNYDLLTSIPGIGRIIALETIVLTENFTAISNPRKYACYIGIAPFKKESGTSVRKRTSVSKKGFSEAKADLSIAVLSAIKNNPSTRDYWIRKRKEKCGGIVLNAVKFKLVLRMFAVIKRGTPYVETDAYKN

SEQ ID NO: 277299 - protein, 357 aa, unidentified
MERYIGLDPHGTSCTFGVIGPSGRRLRHDVVETSGAALVNYLRSVPGKKHLCLEEGTHSAWLYEILSPHVEEIVVAGIRESRGQKSDVLDAFRRAEELRTGTIKTPVFKAPRQYGRLRELARVHSMLVRDVVRVQARLKVMYRARGIATPGASVYTPRKRDQWLKRLPVSSRWATEKLYEEYDHLVNLKREAERELVAEARRHRISRVLATAPGLGPIRVAQLLPIVVTPHRFRTRSQFWAYCGLGIVMRSSSDWVQTPTGGWTRAQVRQTRGLNRNHNSTLKGIFKGAATTIVTKLHADPLYEHYLRLTSAGTKPNLAKLTIARRVAAIVLRMWKDEKEYDPGKLRQQASLASVES

SEQ ID NO: 277300 - protein, 347 aa, unidentified
MEQMQLYAGLDMHTESITGTIKDEQGNPVRVLKVETSKEGVKKLFERLRKKQITAVFEASRNWPRYAELIQPYCSKVLMAHPLKVRAIASARIKTDTIDSNVLSDLLRANLIPESYMPPLDIVELRELLRYRAGLSRMRGELKTKAKNILSREGKKCDFDEVTGKRARLWLNNLVINDLNRKELDYTVALIDNLSAEIAKFDKIIERLQYKYPEVEILKSVVGINTFSGMMILAEMGDIARFPSPNKLACYSGLVPSTYQSSQVQYSGRITKQGNSHLRWILTQCTHASIKSRKSHKLKSFYLRIERRRGKQKAIVATARKMLTTIWHLLNKNEYYAYRDIPSKNGL

SEQ ID NO: 277301 - protein, 313 aa, unidentified
MSQNNSVILHAGLDIAKDSLQLHLAGHFHTLTNDSKGHAQLLKLLRVHPTVQVICEATGGYERGPLRALHAAAVPVSRVEAGRIRHFAKAQGQRAKTDPIDARVLSDYGAALRPAATPPPTAQQERLRELNTRRRQLLETLVAERNRSAHYNDALCVRQGRALLKTLEKQLDQCEAAITELVAADETLAANAQRLDAIRGVGARTAAVMLADLPELGTLTDEAAAALAGVAPYHQDSGAHAGVRHIAGGRAPVRCALYMAVLSAVKHDRILKEFYLRLRAAGKKPKVALVACMRKLVVLMNRLLKNPEFTLAN

SEQ ID NO: 277302 - protein, 346 aa, unidentified
MKRTTIGLDLAKRIFQVHSVDPDSGEISRQTLKRSQVLRYFANRAASVVAMEACGSSHYWARELVKLGHEVRLISAQFVRPFVKTNKTDAADAEAIWEAAQRPGMRFVALKSEEQQAALGLHRLREQRVGMRSALVNQVHGLMAEFGIALPRGWREMLHQAGELLAEECAVPELLRGALREQIEQIRALSEQIKALERQISSWQRRAEDCQRIGEIPGVGLLTATATVATIGDARSFRSGREFAAFVGLVPRQSGTGGKIRLLGISKRGDRYLRTLLIHGARAVLRWQSRPGRELDPWLKSLLSRRARNVVIVALANKMARMIWALLAHGRTYQRGYGGPIAATVA

SEQ ID NO: 277303 - protein, 364 aa, unidentified
MLGVSYAIYDDGRPLVEAYDGPQIVGMDLHRRRSVLVRMTEDGRKLGTSRIANSPARLAAEIARAGQRPRVVLEACYGWYWAADALAAAGAEVHLAHPLGVKAYAYRRVKNDELDAGDLADLLRMGRLPEAWIAPPEIRELREITRYRCKLVRTRASCKDQVHGVLAKLGVEVTCSDIFGAWGSAWLDELALPQPYAGKVASLRSLTAALSAEITVLEQVTGELLSSHDGYRAIQALPGIGPVLGAVIVAEIGDITRFGDPARLCCWAGLTPKHYESDTKVVRGRITKQGSRVLRWALIEAIQRAPAGTPMREAKDAIIARRGTQARNIAKVAAARKLLTCVFYAMRDGQARCLAARAAAKQAA

SEQ ID NO: 277304 - protein, 343 aa, unidentified
MSEVIIIGLDIAKHVFHAHGADERGRAVFSKKIGRGKLLDFFAAQPICTVALEACGGAHHWARQLTQLGHEVRLIPPAYVKPFVKRQKNDAIDAEAICEAAQRPSMRFVAVKSEQQQAAGLVFRTRDLLVRQRTQLINAIRGHLTEYGWIAPKGPSHVAMLADLLEEKMARSLPEAARAMFLLMLDLLAGLEGKIADLDKEIARRAREDEVSRRLMTVPGVGPISATAIAALAPPAETFVKGRDFAAWLGLTPLQRSTGGKQKLGVTSKMGERTLRRLLIIGSSAVVQQASKRGAPKGSWLEQMLARKPRMLVIVALANKMARIIWALLVKQENYRAPVAAKA

SEQ ID NO: 277305 - protein, 410 aa, unidentified
MPVFCGIDWAEDHYDVAFVDDAGAVLARKRIPDDSFGYQLLLELLAEHGDNQDDLTPVAIETPRGLLVACLRRTGRKIYAINPLSVARYRERHSVARSKSDRVDAELLANILRTDRNAHRPLPADSALAQAIGVLARAQQDAVWNRQHIANQLRSLLREYYPAFLEAFQDRRPHGLAHPDACAVLAIAPTPTQAARLTRPQLAAALKRAGRLRGIAAACIRLQAIFRRTWLQQLPLVEQAMGHQALALLLQLNAAAQAEHELAEATRVAFQQHRDAVIFTSFPGLGELPSARLLAEIGDDRTRFADGRGLKAYAGAAPVTRASGKKLVVLHRTVKNNRLAAVGYLWTFAAIRLSTGARAHYNRRRLAGDRHAAAQRNLFNRFLGCLYYCLQTGQTYSETVAFPVVNAVAA

SEQ ID NO: 277306 - protein, 352 aa, unidentified
MRTITTIGIDLAKKVFQVHGVDAEGKVVVARKLRRKEVLAFFAKLAPCLVGMEACGSAHYWAREIAKLGHTVKLMPPKYVKAYVKRGKTDAGDAAAICEAVTRPSMSFVPVKGLEQQGLSMLHSARSQLIGQRTQLVNAVRGHLSELGIIAERGLLGLGELAAIVRDESDQRLPAAARAALMILVRQIEAVSAGIAALDSTLRKENKASELGPRLKTIPSVGPVIASALRARVTNAKLFENGRHLSAWIGLVPENDSTGGKVKQKGLSKKGDRYLRSLLVNGAMAVVQQAQKRPDKHPWVTKLLGRMSAKQAAIAIANKTARIAWAIMVHGGVYEAGHRAPQYRAEACAAAG

SEQ ID NO: 277307 - protein, 347 aa, unidentified
MDEIIRIGMDTSKHVFQLHEVNAGEEPVLRKAFRRKDMIAFLERLPPTVIGIEACGASHHWARLLGSLGHEVKLIPPQYVKPYVKRGKNDAADAEALCEAMSRKTMRFVPAKSAEQQAGLMLMKVRDRLVRNRTQLANAIRGHAAEFGLTAAKGMAHVMPLLERIAADEMLPALARDLFALQRDELVQLEAEIDALDARLMAWHRADECGRRLAEIPTIGPIIATMLTMKTPAPELFRSGRDFAAWIGLTPRDHSTAGKNRLGIITRAGDEALRSTLVVGATALIQQIRAGRSKHASPWLLDLLKRKPPKLVAIALANKTARIAWKLMVTGERYQPRSASAPIAKAA

SEQ ID NO: 277308 - protein, 388 aa, unidentified
MPAAEAPVAYLGIDVGKSSHSACALGAGGGVAFRAELANRPDDIDRLLERAGSGALVVVDQKRNIGALVLARAHAHGNPCAYLPGYAEKQARGMFPGIAKTDAIDAEVIARTALGVPRALRPAPEEPEGATSLRILSSQREFASSARTRAKNRLRATLLEADPALEGAVDPSSRWQMSMLAEFGGAAGCSAAGWRRFSNAARRAGAPAAGARRLWEALLASSRSGRRLPAGEDVAVRILAREIASLDADIEELDSLVADSLAGDEVYECLLTVPGIGPKTAAALVTSIDISAFRGHDELASYCGVAPSDRRSGSSIRSTSPQHGGNRQLKNLLIFSCNSLIGTDNRFGRYYGECRARGMRHSKALKAVARKRLKVIYAIMRDAVPYAA

SEQ ID NO: 277309 - protein, 400 aa, unidentified
MRAVFGIDVSKTSSEVAILVNGEKVHGYTILNDTIGFNRLLGDLKTVHNPEIIFEATGVYSRRLQAFLEEYSYAYTRLNPLEAKKQLDSLRVRKTDKIDAEKLAKSQLVHNRKPTYVQEEVYQHLRDLSRFYQNMTEDLVRTKNRLHKVLQVTFPELENLLSTPTGEQYWNLVMAFPCKEFVLSLSQSNLCEIIRQSTSKRISEKRIAYLTDKLIKLAKQSFCAVKKTSPMLEEVRYYAQELLRLSERRQVVLNDMVALAQPLPEYDILRSIPGIAEATATSIIGELGDIRRFQSTNQINAFIGIDLRHYESGNFLAKEHITKRGNPYARKILFKCIHNIASASHTNPCHIADFYEKRKRQSTIASTKPHAIASIHRLIRTMYYLITHNKLYDYSLTQNR

SEQ ID NO: 277310 - protein, 385 aa, unidentified
MQKLNDLSRSPSPLDPDGTLIAVIELSLSSWLVAGVVPGVERQPLKKLAVDESALLKLLHRWREEAAKAGHRIKRIAVAFEAGRDGFWLARWLSARDIEAHVIHASSVAVSREHRRAKTDRLDTELLKRSFLGWLRGERDHCKMVAIPTTKDEDAKRPNREHESLVGEQSRIVNRMKAALIRLGIRGFNPKLKKAAERLDGLRTPEGEPIPPNTLAELRRDMVRRRLVSDQIRQIEDARLERLKQAPSDGPHAMVRLLARVIGVGVETADMLVQEVLSRRMRDRRAVARYAGLTGSPDESGRKRREKGLTRSGNARVRRGMIQLAWRFLMFQKDSTLAQWFRARTESARGTRKTMIVALARKLLIALWRLVREGVVPDGVVLRPA

SEQ ID NO: 277311 - protein, 391 aa, unidentified
MINIGIDVGKFKHCASVMDDKTGEILLKPFFFNNDQKGFNLFYSKTKQYIHRKHAVGMEDTGHYMINLTDFLLDKKFTVKFINPRSTCLRRKELGMSAKNDRKDSILIAEMLSEKKFWRSVTRTTQETDKLREITHLYHQLQEQQNEDMNRLQRALDIVFPEVNKLSWTRYSKVYMQFLASYPTAASIASEDIRNLRNALKTDGRGRQCKLTAENIKEAAKCSVGEDNIAVALEVQSIIAIINTRKQQIENLENKIEEFSLKLNSPIISIPGISHITGMTIIAEIGDIHDFSDAAHLISYAGMEPLVHQSGKYDAAHMPISKHGSRYLRKALYQAVFTVCKYCPTFNAYYTKKRNQGKTYRCAQGHCVRKLLRVIYKLLANNIAFDENLVK

SEQ ID NO: 277312 - protein, 401 aa, unidentified
MKGENKRACIAIDVSKGSSHFQGFYSAGVPASEVTRFEHTKSGFARVTDLFNLLNEKNNQKPYIIFENTGTYSKPVEVYCQSNNFSYMAIPPLLSAKMRKSDIRPTKTDKIDCATIANVYYLKRLKVTKSGSHIYSDLKTLCSYYNFKMQLMVQMKVKYREHLDMVYPRIDTLFGVYTGTFLDLMTRYPSPHKLKQKSKKQLTDFFIKRDYCGLPKAQRLAILVKEYFKDVEIPVTEDDVLITIFSNHLKELRIMMVDLGNHLDRIITLGMKTKEYPYLMSIPGIQKNTAARIAAEIQGIERFESASKLCAYAGIDPTVHSSGNYLGKHLSITKKGNHRLRSLLYLVVAGTSKSQALNNPVRDFVQKKKSDGLAPKAAIIAGCTKLTRIIFAVCSKEEFFV

SEQ ID NO: 277313 - protein, 355 aa, unidentified
MPNKADSAVARTIGIDTGKNTLHMVGLNEKGAIVLREKVSRTRIAARFVNLPPCLVGIEAGMASHHVARELVALGHEVKQVPPAYSKPFRQGHKNDFRDAHAVAEAVERPSTRCVPIKTDGQLDLQALHRVRSRLIGNRTAVINQIRGFLLEHGIPVRQGYRFLRQQLPQILAARTDVLSPRMIRIIADLMADWKYLDERIEGITDEIEALAHADEGCQQLITVPGIGPIISSAMVAAISNGAAFCKGRDFAAWLGLVPKQMSTGDRTILGRITKRGNRYLRMLFVQGARAVLLRPASWAKHSFGSWLTAATRRLHRNVLAIALANKLARIAWTVLAQGRRYEARIEPRVEPAAA

SEQ ID NO: 277314 - protein, 470 aa, unidentified
MLRCYLASRLHYKPFGGTRTARRGKDGNELMKEQDREPQWAAFTAIDWADQKHFWRLVPAGSDRQEHGELENTPEAVEVWAMGLHDRFGGRAIAVCLEQSRGSLVCLLAKYPHLVLFPVHPKTAADYREAFCPSGAKSDSGDTASLLDLLLRHRQQLRQLQPDSVETRLLQILVETRRCIVNEKTRQKNRLTACLKLYFPQVLKWFDEVDSPLVGALLQRWGTLMELQRAHPGTLSRFFHEHNCRGEERLRERITAIQQAMPATEDPAIVEGVSRKARALVAVIETLRNSIGEYDRRIAELVASHPEGSLFGSLPGAGPALVPRLIVAFGTRRERFEAASEMQNLSGISPVTEASGKTKLVHMRWACPQFLRQTFHEFAAHSLAQSAWAKAYYDLQRHNHKDHHAAVRSLAYKWIRIIYRCWKNRQPYDEQLHLRSLQHRNSPVIGAFVPTTAGEWKLVSGFQKFSRNNS

SEQ ID NO: 277315 - protein, 394 aa, unidentified
MYYCGIDVAKHKHAVVVLDEKGQVHKPAFTAENTHAGMDTLLEALKPFAEHICIGLEATGHYWLSLYDVLTRQGYPVVVLNPLQISAYRRSGVRKVKNDKTDAVWIADFVRISNLPASSRDIPTLLQLRELSRFRFWLSDQIGDCKRKLLTILDRVFPEYESLFSSVFVQSSKAMLKEAVSAQEFADFDLQELTELLHKTSRGRFGKEKAQEIQAQARQSIGIGFLTDAVRVEMRCLLTQIDLLEEQQEEVETAQETLMASMDQYITTIPGIAIPTGAAILAEIGDVSRFESEEKLVAYAGIDATVHQSGQFNAGKMHMSKRGSPYLRLALWQAASMAIRHNEELKIYYQKKRAEGKAHGTAVGAVCRKLLIRIYVILKERRPYLVHKPAPANP

SEQ ID NO: 277316 - protein, 355 aa, unidentified
MKQYIGCDTHARYSVFVSIDEKGCIGAPVRIEHGGRDLRDYLGSLEKGTPVAVEASGGWYWFMDELEKAGLDARLVNPLEAKHRMGGKNKTDKLDAKGLAILLRNGTLPEVWIPSARLRDLRGLMRTRRATRSHTTVLKNRIHAAFRRYGAMEGEPPADLFSPKNRLRLSVAIGRLPEETQRATLHEWEMLDLINRHIGELEVRIRERIGKLGWVRLLKSMPGVGEILGATIYLEIGDVERFPTAAHVASYAGQTPTVHASGGKSWHGPTSPQANHYLRWAFVEAANAVLMHRHTYADQHVIELYDRLKKHKCHGKAAVAVARHLAEASWWILKKRQQYRPPHAQVVAESSSKNG

SEQ ID NO: 277317 - protein, 424 aa, unidentified
MNCNQNFKISQVTEGTLVLGIDVGSNTHYARAFDWSGLELSKVFKFKNSFEGFQSFVLWVNDLCCKYNKSKVIAGLEPTGHYWFSLGELLKENNITIAIVNPYHVKQSKELDDNLQTKNDSKDPKIIAKLVIDGRYSFPYIPEGIYGELRVADKLKNDITQQIISIKNKIHRWLSIYFPEYENIYSSIDSKSGFLLLKETPLPKDIVELGSEGIVERWKQTKLRAVGLDKAKKLEEAAKKSIGCKNITSSARFEIKLLIEDYEYKQNQLNSITEELNKLCEKIPMIKEIAEIKGIGIATAISFVAEVGDIRRFKSAKQVQKYAGLALKENSSGKHKGLIRISKRGRKKLRTILFRATIPLIGFNKEFSSIYNYYIERKDNPLKKKQALTAICCKMIRIFFTILSKGIKYDETKMLHDIKRPVAA

SEQ ID NO: 277318 - protein, 421 aa, unidentified
MRKADTGKVKVVRDDALIVAVDIGMEMNRGYCTTPDGRSTKTFKFENTREGFDTLWGMIMASKNRFKCNEVIVGYESTGPYGEPMVHYLMKKPVRIVQVNPMHTKRVKEINDNSPLKTDEKDPRVIADIIRWGHALSIVIPEGDAAYLRRLNNSRERHVKERTALVNQLQQLVFLLFPEFRTVIKDIKCKTPLYLLKRYPTPEAISVLDKQLLGEEMRKRSRGKFREHHADMLINLARNTVGIREGVSGLSMDIRHILVQLEVLKTLVAEIESEMEIALEMIPYSSKLLSIKGLGVVSVAGIIGEIGDFKKFGTQSEIMKLAGLDLFEISSGKRKGQRRISKRGRSLLRKILYYAAIQTIRKNGILHDYYTRLTDRGMKRMMALVAVSRKLLGIIYAIVRDDSEYSANFESIKRQVIKKAA

SEQ ID NO: 277319 - protein, 349 aa, unidentified
MPHKLNSAIAVIGIDIGKNSFHAVGHDNRGAIMLRQKWSRGQVERRLANLPPCLIGMEACVGAHHLSRKLRMLGHDARLMPAKYVRPYSKGQKNDFRDAEAIAEAVQRPTMKFVATKTAEQLDLQALHRVRERLVSQRTGIINQIRAFMLERGIAVRQGLRFLRAELPRILTTPCDVLSPRMVRVIEDLAGDWRRLDERIEGLSSEIEVVARRDCGCERLMSVPGIGPIISSAMVAAIGSGDAFCKGRDFAAWLGLVPKQISTGDRTILGKISKRGNRYLRVLFVQAAWVVLIKPKSWQRHGLKPWLEAAKKRLHHNVLAIALANKLARIAWSVLAHGRTFEASRIQVA

SEQ ID NO: 277320 - protein, 423 aa, unidentified
MPYRIAGIDVHKKKLAVVVADVEVEDEYQFERRWYGSNPEQLRVLSEWLIEQQIEEVVMESTAQYWKPVWGSLERYWKPRCQSRAGASRMSGTLHLAQALSNRGRRGRKNDFRDAERLVKRLVSQELVLSFVPDTEQRMWRTLTRTRYQRTRDKVRLQNQLEALLEEAHIKLSSLVSDLLGASARRMLKALADGETDPAAVAALADQRLRATPAQLHDALGACTELNPVYRRLVNMTLEGLQFVEQQIGQLDQEMASLLRQHQDAVERLAVVPGLGVDSAQQIIAEVGAKAATFPSAEKLSSWVGACPGEEESAGVNRSRHSPKGNRQMRRVLNQAANAAVKHKGSIFEIVYRRLVPRLGHNKTIGVIAHRLCHLIWVILHKGVRYEERGPAVSEKSRQRRTARMVRTLRILGYRVEPLANPA

SEQ ID NO: 277321 - protein, 416 aa, unidentified
MLFIGDDWAEDHHDVELVDDEGRRLARARLPEGLEGITRLHGLVAEHGAASWGDLPPEEVAAQVVIGIETDRGPWVTALRAAGYQVFAINPLSVARYRQRHSTSGAKSDAGDAHVLAEIVRLDRDHHRAVAGDSDLADAVKLLARAHQTAVWERTRHVLRLRSTLREYFPAAIEAFEDLAAQDALKFLERAPDPGRAAKLSRSQLMVLLRAARRHHVEAKADVLLAVLRAPALRQQPTLEGAYASVVAGQISIITALNEQIAQLQKVVAEHFGRHPAADIYLSQPGFGVVLAARALGEFGDDSSRFTDAKSRKNYSGQSPITRASGKKTVVLARYAGNRRLGTALHLQAFAALGASPGARAYYDALRGRNIGHHAALRQLANRLVGILHGCLKSGTAYSEETAWQHHQKEVPAAAA

SEQ ID NO: 277322 - protein, 351 aa, unidentified
MTPSKRSIIGGVDTHTATHHAAVIDLNGRLIADAEFPATPAGYASMLTWMSGKGKLGQVGVEGTGAYGAGLARYLHDQGIDVLEVPRPDRRIRRQRGKSDPIDAEAAARTVLAGKASGAPKLADGPIEAIRMLRVARNGAVKARTAALNTLRSMVITAPEPLRTQLRPLSSAQLVVACARLRPDLANLAEPVHAAKLALRSIALRVQHLDSETRTLRKQLDELTQAAAPTTSAVFGLGPDTVSALLITIGDNPDRLRSEAAFAHLCGVAPIPASSGKTNRHRLHRGGDRAGNSALHIAAVVRLRYDPRSRAYANRRTTEGLSMPEIIRCQKRYLAREIFHALRADYAKLST

SEQ ID NO: 277323 - protein, 333 aa, unidentified
MDTETGECGERRLAHREEAEQFYQDLRQRNATARLGMESSGHSRWFERMLRDLQFELWIGDAAEIRTRRVRKQKTDRQDAQLLLRLIMEDRFPRIWVPDAENRDLRQLLWHRHRLVQMRTRVMNQLHVVALNEGLRRKKALWRPTGRNELESLKLAPWASRRRQDLLDLLDQLTPKIQDLTGKLEQEVESRPVTRLLMTHPGVGPLTALAYELVIGTPERFHCGKQIASYVGLVPTEESSGDRRRLGHISKQGNVLLRFLLVEAAQVTVRSHPEWRSTFFHLAMRRGRKIAKVAMARKLAVHLYWMWRQGLDYGQMQKLGSHAGEPGNRHGAQ

SEQ ID NO: 277324 - protein, 394 aa, unidentified
MNVQKESAACGRVVGLDLHPDLFSAAALVGREPVTATIAQQWDRRPTAQLEQWAAQLAPGDLVVLEASGNSFEACERLRRCGLQPVVLESQRAGQIRKTYCSNDRVCAVKLARIYLSGLAHPVWQPDAQTRERREVLHAYRKAVTTATRTRNRLQSFLSDHAVRLPPGVRLTEASGQQTVRTARPWSARQELLIGQMLEDLQLAAQRRRQLSALMAQDVAADPKLLQLIRLMGVRHIVAFAIAAVVGDIGRFANPKKLVAYLGLAPAVDQSGNGPRGQQGLVTFGRGDLRALLTQAAHNALNQRHSPLHTWGWKLCLRKSHKNVAVAAIARKLTVSIWYLLRGLFTPLAKLDETLQVKLSKLASAIGLKTIRHLGYKSKTAFIEEKTLWLLKTA

SEQ ID NO: 277325 - protein, 487 aa, unidentified
MATTRKQPHRKNGSDARCSALKRKASSHCHPGKGNRQRSKLTISNPDAAGIDVGAEVHYVAVPEDRAEAPVRSFGAYSAQLDELVQWLKECGIKTVAMESTGVYWIPLFQKLEEAGLEVLLVDARQAKHVPGRKSDVQDCQWLQQLHSYGLLRAAFRPEDSICRLRTLQRHRKDLVECAAMWIQHMQKALNEMNLHLHHVLSDISGQSGLAILDAIVAGERDPSKLASLAHYRVQKSQAEIEAALRGDYRPELLFVLSQSLENYRQLQQQLLKCDLSIEKKMATLAGRATISQGAEPTQQSQDSDGKPPKRKPKDALELSLASHLKRILGVDLTTIPGLNVLAVLTLLSEIGTNMTKWRNEKAFASWLGLNPNNKISGQRVLSSRTRKVANRAATTLRLAAMLSGKTNTPLGSFYRRKRAQLGAPKAITATARKLACLVYRLIKNGQAYKPTDLRTYELKYKQQTLDSLRKRAKNLGFDLVQLPKAA

SEQ ID NO: 277326 - protein, 349 aa, unidentified
MAMTIIVEPTRAVTGGVDTHLDVHVAAVLDEIGGLLATEAFEANQGGEHRLVRWLGSFGPLARVGVEGTGSYGAGLARLLAASGVDVVEVDRPNRQVRRRQGKTDTLDAIEAARAAQSGRAAGRAKSRDGNVEAIRVLVVARRSARTTKTKSLNQIRHLGFTAPNPLRERLSGLTAARLAVEAASMRPRAGTDAVTFATKTSLRILGRRVLAIDAELVELDTLLSALVTATAPRLLELHGVGIHTAALLLVTAGDNPQRLRSEASWAHLCGVSPIQASSGKVTRHRLNRGGDRQANHALWRIALTRMSSDPRTRVYVERRTADGKSKAEIMRILKRYIAREVFALLPRN

SEQ ID NO: 277327 - protein, 379 aa, unidentified
MTATSHDPRCYVALELSQAKWLVGAFLPGRAKIILHTVRGGDAASLVEVLDRVSARASNEAGTQVPLSVCYEIGYDGFWLARYLIDRGIDTHVLDSSSFRVSRRGRRAKTDRIDVEAMAVTLRAFMAGDKGACREVAIPEPEVEDAKRMSRERTQLARERTRHVNRIRGLLTLHGIRRVKGIWGGEWRSALKGLVTADGRRLGPFLCAEVAREFERLHLLLGHMKQLEAERRAATATATAFPSAPKVKLLVTLAGVGEIGATVLVTEVFHRSFKNRRHLASYLGLTPSPYASGESSREQGISKAGNKPARTLLVELAWCWLRYQPGSGLAEWYRRTYGEHSSRVRKVGIVALARKLAIALWRFVEHGVVPAGAVMSPER

SEQ ID NO: 277328 - protein, 383 aa, unidentified
MPKKTVVACVLVSAGGRVHKEVRTFGTMTRDLEALSAWLTEQAVTEVALESTGVSWWPVFNLLEEGGHPTLLVNPQHVKQVPGRKTDVKDSEWLADLLRHGLLRASFIPPAAIRDLRDLTRYRATQVRLRSAEAQRLQKVLEGANLKLAAVAAGEENPETLAQLAKAGLRNKLDELEQAFIGRVKPHHRVLIRASLDHLRLLERTIEALDREVARATAPFAAQLAALDAVPGIGEVAAAAIVAEIGAAMDRFPTAGHLTSWAGLCPGNKQSGGRRLSSATTKGNVWLRRILGEVAWAAIRQRDSVFRARYYRLKPRLGAQQALVAIMHQLLKVIYHILKTGERYRELGADYYQPADLQRTARRLTKRLERLGYAVTLAPAPAA

SEQ ID NO: 277329 - protein, 366 aa, unidentified
MPQPNDLSRSPIALNQDGTLIAIVEMSRSSWLVAGIVPGIARHPLKKLAADAAALLGLLERWRGEATQAGRPITRIAVAFEAGRDGFWLARWLRARGIEAYVIHPTSVAVSREHRRAKTDRLDTALLKRVFLGWLRGEPGHCTMAAIPTLEEEDARRPNRERESLVGERTRIVNRIKANLARLGIRGFKPTVRGASERLEALRTPEGAALPPNTRAELRRDMARLGFIVGQIKEIEDARQKGLATQPDEGPHAMVRLLARVIGIGLETADMLVHEILSRNLRDRRAVARYAGLTGSPDESGARRREKGLARAGNARVRRGMVQLAWRFLLFQKDSALAQWYRARTADARGGTRKTMIVALARRGIA

SEQ ID NO: 277330 - protein, 347 aa, unidentified
MRFYTKQHQFYCGIDLHADAMYVCILNSVGEVVVHKNLPTKPKAFLRLINPYRERLVVGCECMFSWYWLADLCADEKIDFVLGHALYMRAIHGGKAKNDKIDSHKIAVLLRGGSFPLAYVYPKELRATRDLLRRRNHLVRKKSELIAHIQNTATQYNLPPLGRIAKPTERDGLLDKFIDPVVRRMVEVDLLTIEHYEQLLATLEWQLERITQRQAPVELALLKSISGVGRILGMVMLYEIENIARFPRVQDFVSYCRLVKPEKQSNGKSYGHSGKRIGNAHLRWAFGEAVILMLKGNKPLQAKRQRLVSKHGKGKALAILSHRLGRAVYFMLKNQEPFDPEKFMQGL

SEQ ID NO: 277331 - protein, 317 aa, unidentified
MDKPPAATCFVGIDVSKGHVDVHVRPDGTAFSCTTDPDGLANLITRLAPLQPQLVAMEASGGYEAVIAAALTEAGLPVAIVNPRQVRKFAGAIGRLAKTDAIDAGVIAHFVDAIRPAPKPMPDALMLRLRELLARRRQLVVMVNAEKQRLGKAADKLAQRSFKTILRSLEAERARIDRAIDTLIQQSPLFCAKQDLLKSVPRIGDIVARTLIVELPELGSVDRHQIAALAGVAPMNRDSGRYRGKRRIQGGRVEVRAPLFMACLTAIRHNPPLRSFYRRLRDAGKPARLAIVAVMRKLLTTLNAIIRDNTAWTHVHI

SEQ ID NO: 277332 - protein, 411 aa, unidentified
MHNRQNYLYVGVDLHKEHHTAVMINCWQEKLGEIQFDNKPSAFSKFLLEVETYVSDGLSVVFGLEDVGGYGRALAKYLVDHEQVVKEVNPALSFLERKSQVMIHKNDSWDAECVARILINKFNQLPDAKPNDLLWSIQQLVSRRNALVKAQSALKNQLHIQLNHHYPSYKKFFSELDGKTALAFWQQYPSPSCLEGVSIKKLTAFLLDVSNNTCSVKKASDILKLVKEDGQTMKEYQEMRNFLVRSIVREIEFKKKEMKYIERELKQLVNLLDYQLETMPGIELVTASALIAEIGDVRRFPNANKLARFAEIAPVYFGSGGKGKTHKSKQGNRALHALFYNLAVQQVQVAKGSKTPRNPVFHAYYQKKLKEGKTKGQALVCIMRRLVNIIYGMMKYKTAYELPVVEGKEVV

SEQ ID NO: 277333 - protein, 403 aa, unidentified
MIFVGDDWAEQHHDVYLMDGAGKRLASRRLPEGLAGIRQLHELMATHAEEPDQVVIGIETDRGLWVGALTGAGYRVFAVNPLAVARYRDRHHVSGAKSDASDAKLLADLVRTDRHNHRLIAGDSPQAEAIKVLARAHQSLIWTRNRHTNALRNALREYYPAALEAFEDLAHGDALGVLHRAPTPTLGAHLDVAAIQSALKRGGRKRNIAARAREIRATLRTEQLSAPAPVADAFGATTRATVGILTELNRQIGELETSLAAHFETHPDADIYRSLPGLGVVLGARVLGEFGDDPNRYTDTKSRKNYAGTSPLTIASGKKRAVLARHIRNRRLYDAIDHWAFTALTKSPGARALYDQHRAAGDLHHQALRALGNRLVGILHGCLRHRTLYNEHTAWAHRMPAAA

SEQ ID NO: 277334 - protein, 418 aa, unidentified
MRVWAERCAGLDVHKKTVVACVIIPDADGDELVEKRTFGTTTAELLRLADYLVEANCTHVAMESTGVYWRPVYNILEAHEGLDLWVVNAAHIKAVPGRKTDVRDAHWIADLLRYGLLKKSFVPDPEHRDIRELTRLRTKFVQERTSMINRVQKTLETANIKLSSFASEVHGVSGRAMLAAMINGESNPAILAELAKGRLRNKRDELKAALSGYVRDHHRIILSELLTQVDNLDESIGRLSQAIEDAMKAATGPFEEAVSLLLTVPGVQRTAAEKILGEIGVDMNRFNSPRQLAALCRLAPGSNQSGGRNRSGRICQGSVPPRQAMLEVAMSAVKAKGMYPYAQYQRLNNRIGKGRAIVAVAHALLEAIYFMLKDLVPYKDLGGDYFTAGREDNIVNKLTKRLMEFGYYVTLEPIPTAA

SEQ ID NO: 277335 - protein, 320 aa, unidentified
MRNAVGLDISKLTFDASAMVGKTEHSAKFDNDSKGLDQFSDRLKSLGCQNLHICMEATGNYYEEVADYFAQYYSVYVVNPLKISKYAESRFKRTKTGKQDAKLIAQYCRSAQESELVKRQKPTDEQYRLSRMTAAYAQIKSECAAMKNRYHAAKDEEAAKAYAEIIKAMNEQLEVLKEKIKEQTEKPNCKEGVKRLETIPGIGRMTAAVLFHHLTSSKFETSNKFAAFAGLSPQQKESGTSVRGKGKLTKFGNRKLRAVLFMPAMVAYRIRAFPDFIKRLEEKKKPKKVIIAALMRKLAVIAYHVHKKGGDYDPSRYKSA

SEQ ID NO: 277336 - protein, 424 aa, unidentified
MKSTKLTPAVQLDQVLDICVDVSKSKLNVYFELGDQAIDDEWANTTRQIEKKLGACRRLARAHGFKSLRVICEPSGGYQDKLLRTARRLGHLTAYVNGEAVAKFRVVESNDAGKTDLKDPHIISTLARLNKVLRHRDLPEEYELLRKYGFLYERADRALMAVRGRMHRVLMELFCDFSFSKEFLYGNSGRALISKYRCNPYRIVRAGRTRFERAMRRRAPRIWQRSIERLWDDATSSARHQLTPAYVDLLEFELSQLWEEFLLYEQRKATLEKRLTSLLRRLRQKDPSLPAPTPGVISAKNLARLIGETGPLSDFTSWRMLMRYAGLNIQMRQSGQYRGQYRISKKGRPLLRKILGQVIFPLVRRTGLYGDYFRSKRLSMPGQKAMTAVMRHFLRKLHGWYRSGQAFNAERYFTSAASYERQAA

SEQ ID NO: 277337 - protein, 401 aa, unidentified
MQDTQQRDAVDVFVGVDVGKGQHHAVALDRNGKRLYNKALPNDEVKLRALIAELKTHGRLLFVVDQPSTIGALPVAVARAEGVLVAYLPGLAMRRIADLHAGEAKTDARDAAIIAEAARSMPHTLRSLRLADEQLAELTMLCGFDDDLAAQVTQTSNRIRGLLTQIHPALERVLGPRLDHPAVLDLLERYPSPAALAAASEKTLAYRLTRLAPRMGKNLAAEIVQALNEQAVIVPGTQAATIVMPRLAQQLAALRKQRDEIAAEVERLVLAHPLWPVLTSMPGVGVRTAARLLTEVAHKAFASAAHLAAYAGLAPVTRRSGSSIRGEHPSRRGNKVLKRALFLSAFAALRDPVSRAYYSRKIQQGKRHNQALIALARRRCHVLFAMLRDGTIYQPKSAPNA

SEQ ID NO: 277338 - protein, 384 aa, unidentified
MKESSTLYVGLDVHKDSIDIATADAGREGEVRHVASLGGDLVGLDKALRRLISKGHRLHVVYEAGPCGFVIWRHLRAQGIECEVVAPSSIPKRSGDRVKTDRRDAMMLARLARSGDLTAVRVPGAADEAVRDLARSREDAVRECRNARHRLKALLLRNGIGYAGKSAWTAAHLRWLATLKLEHAAQQIALQEYLHAVTDATARIARLEQAMRDTLPEWSLAPVVQALQAMRGVQLVAAMTLVAELQDFLRFDNPRQLMAYVGLVPGEHSSGPKRRQGSITKAGNSAARRMLVEVAWHYQHSPRVSPIIAKRHDELPKAVTDIAWKAQLRLNANFKRLVARRMLKNKAVVAVARELTGFVWAIGREVQTCGWQGIKTELAGNTAD

SEQ ID NO: 277339 - protein, 350 aa, unidentified
MNHKCKIIIGIDTHKATHVAVALDTQGTRLAALSIPTNPKGYLELERWSQSFGEVHAFGIEGTGSYGAGLSRSLLAQGHNVVEVTRPNRQLRYTQGKTDTLDAEGAARSVLSGQATARPKTQTGISEMIRHLKVARDTAVKSRSQAMVTLKTLIINAPADLRDVLDKIRGKVALIRHIAAFRPGEINNTMASAKAAMRALARRWLWLHEEIITHDKELERLVTERAPDLMTSHGIATLTVAEMLIVVGDDPTRIRSEAAFAKLCGVCPIPASSGKTHRFRLNRGGNRQANAALYRVAIVRMRSHEPTLAYVRKRTKDGKSKSEIIRCLKRYIVREIYSQLCVPKSAQIAT

SEQ ID NO: 277340 - protein, 404 aa, unidentified
MSQAPCSCQPDLFDSPQPASLPAWLGCDVAKQTFEAAVYPPVPAGAPPRPLESLCAATFPRTAQGVSRCLEWAEGQLDVFARAERLEAAPPLRVAMEATGRYSVELIAWFVEQRPTAARPSLLDPTVSHHFLKSLRLRNKTDRMDARAIARLGAERVPASHQPRPAHYEMLRELSRERDAIVQIHVSVRNRTQELTDLPAVAKIHQRLVRDVQKALEKVEQAIVAHVQKHDDLNGIVTRLQTIPGVGLWTATVVLAELGDLARFARARQITAYAGVSPRRYQSGTSVQGGTHLCKQGSARVRRALFLSGMSASRGDNDLGRFYRHLVEDAGKPKMVALGAVMRKQLVLMRSLVIHEETYQDHRGDPRPTSTTAQTEKTPEKKKKNPRPCGKPVKKNRGKEAFSA

SEQ ID NO: 277341 - protein, 329 aa, unidentified
MIHLGPLKEMMERFVGIDVSKATLDLAARTTAGPLPDVLEQVMNTDRGVAQLVAALQVLAPALIVVEATGGYERLVVAGLLAAGLPVVVVNPRNVRDFAKATGQLAKTDRLDAALLALFGERIRPEVRLAAAFDTRPLAEHVLRRRQLVDMLTAEQNRRALVSRSLRKRLDRHIAWLERELASVETELQELIEASDRWRARDDLLQSTPGVGPRISYALVALLPELGTLNRQHIASLVGVAPFNDDSGGHRGIRRIKGGRTAVRNVLYMGALVGVRFNPVLKAFYQRLRAKGKPAKVALVACMRKLLTILNVMVRTQTPWQPNVVTQSP

SEQ ID NO: 277342 - protein, 466 aa, unidentified
MRKKRSRSKKKGNAESETNNSIGLPVLRPNVAGIDIGSQEHWVAGPPKADGAPNVRVYGTVTSDLNKLAQWLKSQGVESVAMESTGVYWIPLYELLESRGFEVLLCNSKQTSNVPGRKTDFEDCQWIQLLHSCGLLRGSFRPSDEICQLRALLRECSNLIEERTRCVQRMQKALDQMNVQVHRAVTDITGTTGMSIIRAITAGERDPIVLAGFRDKRCKKKIEQFAEHLRGTWRQEHLFNLKMNLELYDKLNEMIDTYHQKINELMLALEPDDRKDRQPPQHPNKAKRKAIIKRGEESMRQGFWRFAGVDLTRIDGISTGVASVVFAEAGLDLDAFPTEKHFTSWLRLAPNRSISGGKVLKKKRNATGATRLANALRMAASSLKNSPTALGAQFRRIARRKGFTVAVFAMARRLATLIYRMLRYGEDYVDKGAQAYEEQFKQRRLRSLATTAKQMGYELKPVGAAA

SEQ ID NO: 277343 - protein, 362 aa, unidentified
MFVALELSKSSWLVALHSPVADKVSLHRFVGGDVAGLLALIARKQTQAKARLGRTIRVLSCYEAGYDGFWLHRLLCARGIDNRILDAASILVDRRSRRAKTDRLDAAGLLRTLMALDRGESRVCRVVRVPSVAQEDARRRSRERTRLVVERGQHSNRIKGILMTLGVRDFEPTRRDWQQRLGGLRTADGRELPACLKAEITRECRRLHQVIVMIAEVEAEQAAALDAEESQAARLIRLRGIGLVSATVLADEVFFRDFRNRREVAGYLGLASSPWASGRVQRDQGITKSGNPRARRTAIELAWLWLRHQPGSFLTQWFRQRVGTTRGRMRRIMLVALARKLIVALWRYLSDGLIPDGAELKA

SEQ ID NO: 277344 - protein, 424 aa, unidentified
MNNTQNKKIAQVSDGTLVIGVDVGSNTHYARAIMARGYEVSKKPFDFENTRDGFDRFVSWANHLAVVYQLKKIFVAIEPTGHYWFNLADYLKAYDVTLVMVAPQHVKHSKEMDDNTQMKNDQKDPLVIARLVAEGRYMIPYIPEDVYAELRSAFNRRCDLVEALTRNTNRMIRWFDMYFPEYRTVYGKADAISGLVILKRAPLPSDILKLGVDGICRIWREAKLRGVGINRARKLVAAAESSIGLKGGEAIRQELWQHMEAHELFKKQLGDIMQMIDGLIAKIPGADRLLKVPGAGIVTVAGFLSEVGDISRFTDPKQIQKLAGLAVVENSSGKRKGKPGISRRGRSRLRLVLFQLAMTTVKSNNEMKAYHQYYTTRKENPLKKMQSLMAIAGKMTRIFYGILKNGTEYNPAIVMKDFKKEVAV

SEQ ID NO: 277345 - protein, 348 aa, unidentified
MVMTIVEAPRAVIGGVDTHLDVHVAAALDPIGGVLGVESFPTTARGYRGLLEWLQSFGAVERVGVEGTGAYGAGLARFLARAGIEVVEVDRPNRQARRQKGKSDPEDAVEAARGVLSGRSKGRPKTRTGKVEAIRVLLVAKRSAREGRLRAVHQMRQISYTAPEQLRSRLKGLSTEDLVAETAAMRPRRGADPVDYATKVALVSLGRRALELEEEAAHIDSQLAELVEDVGSGLLGVYGIGIDTAATLLAVAGDNAERLHSEAAFARMCGVAPIEASSGRVVRHRLNRGGDREANQALWRIVMTRLSFDPRTRNYMDRRTKEGRSKREVIRILKRYVAREVYRHLRPA

SEQ ID NO: 277346 - protein, 350 aa, unidentified
MKIVGCDFHPSYQQVAVFDTLTGEVEERKLIHADGQAEQFYRELEAPALIGMESVGNAQWFVRLVESLGHQLWIGDAAKIRASYVRKQKTDKRDAGHILKLLLENRFPRIWVPNQQQRDLRQLLLHRHKLVGVRTRLKTELQHLALNLGVQKKRQLWSVRGRAELEKLPLQGWTKRRRQDLLALLKVVEPQIEELDKAAAEAAAAHPQARLLMSQPGVGPLTALAFVLTIGEVARFARSKQLASYLGLIPSEHSSGSKRRLGSISKQGNVFLRTLLVEAAQSAVRHDPLFRKEYKHRCHHKPKGVAKVAAARKLAVRLYWMLKTSKPYPEVLHIEGSPRHPVAAKANPSC

SEQ ID NO: 277347 - protein, 347 aa, unidentified
MQVITIGIDLAKNVFQVHGVDTNDKVVFNKPLRRSQVLPFFAKLAPCLIGMEACASAHYWARELKKLGHDVRLMPAKDVKAYVKRNKNDSVDAAACCEAVRRPTVRTVPVKTPEQQAELMQHRVRDLLVRQRTQAINAVRSHLAELGIVAAQGYDGLRVLLAVIADCRDIRLPENARASLSALVAQIASCQAEIGAIEKRLLAQHRKNADSKRLETIPGIGVLGASAIVATVPDASIFKTGRDFAAWIGIVSREDSTGGKQRLGPISKQGDRYLRRILVVGAFAVIKQARAHPEKYPWLTQLLARKPAKVAAVALANKMARIAWAVLTKKEIYRVHPISTTPASLGG

SEQ ID NO: 277348 - protein, 371 aa, unidentified
MEHTRFIGLDIHKERISVAVAQSGRSGTVEYLGEIANEPGAISKLCDRLRRPGKPLAFCYEAGPCGYGVHRQLTSLGHRCDVVAPSLIPTKAGDRVKTNRRDATMLARLHRAGELTPVWVPDADHEAMRDLIRLRSVIRQIVTRARQHLQGFLLRHGRKHGGGTAWRMAYRRWLSTLAFEHPAQQIAFQDYVDAVTDAERRLKRVEEQIFSLLPEWTLRPVVDGLQAMRGIALINAVVLVTEVGDFTRFSNPRQLMAYFGLVPGERSSGETVRRGAITKTGNTHARRALVEGAWAYRMKARIGRHKVDRIEALPKAVRDIGWKAQVRLCARYRRLSARGKTANVVNVAIAREMVGFIWSIACMIQSAPKAA

SEQ ID NO: 277349 - protein, 389 aa, unidentified
MTYFVGIDIAKYKHDCFIHDHNGVVIHHSFTFSNNLSGFNQLLLTLDSLDKNQKIKIGFEATGHYGTNLKQFLKANHFDFMEINPLLIKQFSKASTLRKTKTDKIDSTLIARYLSTIDYKPTSNQSYHIQALKSLSRLRDSLVKNRSQILVRLTVVLDIIFPEYKPFFDNKLTSSTCIYILENYDSPEKISRMNTESYNKMKKKLRHTISYARFTSLRDLAKNTVGTTDNIYLFELNALLEIYKNINNKIKDIEVKIIEKYRQTHSHIHTIKGISEVSAAGIYAEFGGIHKFTNPNQMLAYAGLESSKNESGQDNFKGHMVKHGSSHLRQIIMNVVDTFALNNPVIYDYQSKKIKEGKHWRVAQTHVARKLIRIIFHIEKIISILILIY

SEQ ID NO: 277350 - protein, 345 aa, unidentified
MEEVTIVGVDLAKNVFHVHGARADGHPVFRRKLSRLQFHRFMMDLPRCLVVMEACGGAHHWAREMIRLGHEAKLIAPRYVKPFVKRHKNDANDAEAIVEAATRPTMRFVEVKSEAQQERAIVFRAREQLVNQRTELVNTLRAHLYEFGYIAPYGIHHIGRIEEIIADENTDIPIAVREICRGLIEQIADLTVRTDKLKKHIDAMSREAETTRRLQTMPGVGPILSLAIEAFAPPMESFRRGRDFAAWLGLVPLQKSTGGKQRLGKMSKMGQRDIRRLLIIGAMSVVYGATRKRPPEGSWLARMLARKPRMLVAVALANKMARSIWAMLTKGEDYRGHPVTPPQMA

SEQ ID NO: 277351 - protein, 418 aa, unidentified
MQMELSQFTAIIGIDWADKKHDVCLQATETGKRQVYQIEHKTDKIDEWARSLHREHGGPIAVALELSKGPIVSALQKYDFFVIFPIDPTTLANHRKTFTPSGAKDDPTDAELALDLLLKHTEHFTVLRPQSVEMRTLMTLVEQRRRLMNDRVRITNRLRSTLKQYYPQALEWFDRIDTQLFCDFIKRWPSLVQAKRARRSTLEKFFREHNMNRKALLERRMTAIKSALPLTEDEAIILPYRLQATTLVAQLEVALASIKIYDDEIAALAPQHPDYSLFDGLPGAGPSLAPRLLVAFGEQRERYSKAAELQKYAGIAPVTERSGQSTWIHWRWQCPTFLRQTFVEWSAQTINKSYWAGLYYYQQKAKGCSHQAAVRALAFKWIRILYRCWITRTPYDEAKYLKALQERGSPLLKMAEAA

SEQ ID NO: 277352 - protein, 432 aa, unidentified
MAEGKTGSEPEFAALVGIDWADRKHVWCLQAAGSRKREAGELEHKVETVEAWVAELCRRFGHRPIAVAVEQVKGALVFLLNKYEGLHIFPVPSTTTAKMRAALYPSGAKDDPRDADLLLDILGQHRDKLHRLSPDDETTRRVQNLVEERRKLTAERTAQSNRLTSYLKIYFPQMVEWFEKLDMPLVCDLLERWPTLEELQKVSPEELRTFFCQHHCQRGLRERRILAIGGAIPAKGDRAVIEAKSAVVKVIVQLNRSLLEGIAELDRKIAEAATEHPDFFIFDSLPGAGAVMAPRLLAAFGSQRDRYLCAAELQTYSGIAPVTERSGKRKWVHFRWACPKFLRQSFHEWAGHSIAQSVWARAYYQQQRDRGSDHHAAVRALAFKWIRILFRCWKDRVAYDERKYLAALAKRGSPLGKLLVVDMAACEIPCGS

SEQ ID NO: 277353 - protein, 303 aa, unidentified
MLYAGVDVSKDRVSMAVLTSGGTKLTSGEFDITTEGLRLLELTLKHLKDEISMAIEQTGTYSMPVILYLMERVEGLRIYLVDGLNFSRFIKLEGRKKQDKADAVSLAEYLRRGLPARLITDKDIKAYGLKVLISEREHLLKVKNQIENRLRQLIETIFPDSKTLTKQVFWTEIRKGRAIIDWKRLTDKAEVLSTILRERKTWLEIVHSLEETEREINAFLRAYYPEDLNILKSFGFSEATIAYFISVYVDVERFKDVKAFKSYMGLGLRIYQSGKKEKNVVNSYTDKYIRRRCQLLVSIDWGG

SEQ ID NO: 277354 - protein, 380 aa, unidentified
MRKPKQLSATIDGFQKLGQTIKDLEAKTEREDIPVIFEATGVYHRPLQKYLEDHKIRYYIISPLLSATYRKTDLHSNKTDALDCAHIAKAYYCEKELRQYQAQPQEYKRLYQLSRIYESELVHLRKRKVSLRSMLDIIYPRIDKTFKGNQNLYDPIPMEILKRYPHPSLLLSHREDTIVKTVGHRTGHLKGYTERIVHKIYEKAKECYSGCEINDIEVLKLPSLIENVQEQKKKCDSLLKEMIEIARTCPYFASVVSIVGIGENLAARIIAELGDVNRFDNRAAIVAYAGLNPKIQQSGDIDGLHLKISKKGNKHLRCLLYLGAQCNYRLRKEDPLYEFTKKKRQQTQCPLSSKAAYTASAHKLLVIIYSLCKNGTLYHS

SEQ ID NO: 277355 - protein, 371 aa, unidentified
MVWTAPYGIECARMRLLQSQTREPSVNQIIRIGMDTSKHIFQLHGVDSAERPVLRRKLRRSEVLAFFAKLPPTVIGMEACGAAHYWARELRKLGHEVKLMAPQHVKAYVKRNKNDGRDAEGLCEAMSRPTMQFVPVKTEEQQAALMLAGVRQQLIARRTQLSNAIRGYAAEFGLTAAKGLDKIEPLLARIAQDETVPALARELLAIQGQDYAQLQIELKAIEVKLMAWHRANACSRRLAQIPGVGPIGATALVMKTPDPRAFPSGRHFAAWLGLTPKDHSTAGKTRLGKITRAGDEVLRSLLVAGATAVIQQVRNGRGRPSAWLLALLKRKPPKLAAVALANKIARIAWKLMTTGESYDGARMPGTQAFAA

SEQ ID NO: 277356 - protein, 340 aa, unidentified
MPIVGGLDIHRKQITFDYLNTVTGEVKRGQIAPADRGHVRAWLARFAGHGDVAFAVEGCAGWRYVAEELAAAGIAAHLGEPADTAALRGRKRHAKTDKTDARHLRALLAEGRLPECWIPPAQILEYRALLETYHDLRRAHTAWVQRIHAVFFHQGAPPLSEGALRTEPGLAALRDLSPAGQLQVATALDMLAATEARLGPLRHQLADAARHLTGAKVLAARLYGAGPLTALALTCWLAGKDRFSSSRKAVRFTGLDITVHSSDRKGPPGRLSRQGPPVLRWAVYEAGKTHARTSAPDHGYYATVADRKNSKRAALSEARKIVRQACHILTELGDDALTAA

SEQ ID NO: 277357 - protein, 396 aa, unidentified
MLRENEGTISTQDQPTGSDIFVSVEMSRSKWVVGIHTPLADKIGLHTMACGDVEALMALIDRARVKLVASGSNSPAAMICYEAGYEGFWLYRRLIALGIRVVVIDPASLLVDRRAKRAKTDRIDARAMVRALMASARGERQVLREVRVPTVEQDDARRGLRERQRLVKERTGHGNRIKGLLKTQGIMDFDPRAADAAARLDAIVTGDGRPLAPCLKREIVRELERLALVMRQIDQVETERDAVVQACDAGAGTDALAAEPEREAAMIGELNRLKGIGMNDATILVREAFWRDFRNRREIGGWSGFAPTPWASGSVLRDQGITKAGPPMLRAHMIQMSWRWLLWQPDSDLAQWFRKRTEGATGRMRRIMVVALARKLLIALWRYATTGMVPHGAIVT

SEQ ID NO: 277358 - protein, 287 aa, unidentified
MERQYIGIDLHKASFHACAISDDGTRRWEAQFPRTAEGVVAFAARGIDEAQLAVEATGRTWPFVDAVTAAGVHACVVDPRKTKLKAGFAAKTDRLDARRLADALRRDSVVSVYVPPPAIRERRELCRGRQQLVRTRTRVIQAIRALLLRQDAPEPPVTSVIGKRGLQGLARMHLTGASEQALRRLERVLRAVHGEAQAADAAVTVEAARDSIAIGLRRLPGVGPVLSLVLRAEIGTIDRLARGPALACYAGIVSRLDASAGHRRYGRITRTGSLGCGGLSWKSRCER

SEQ ID NO: 277359 - protein, 400 aa, unidentified
MGKTIPICCGVDVHKKFLVATILTGDYLIPQCKQKHFGTSFRNLLAFKQWLLDNNCKDVCMESTGKYWVPVWNVLEGIGNVVIANPKWVSAVKGNKDDKKDSKWIGNLFRMGLVPNSYIPGKDIRILREFTRYRSKLVSMRSSEKNRYQNAFTVCNLTLDAVVSDMFGKSAMAIENYLLDTDVVDPEFCTTLLQRSLKKKAAEIIEAVEGFNMTQEQKERVRIIQGHFTDIDKRISQIDEIIGRLTAEYEGTISLLCTIPGIDRRLAITIISEIGTDMSEFGSSRRLCSWAGLVPGNNQSAGKKKSVKITRAGVYLKPALVEAAHAAVKATEKSPYFRIKYEKIMKRRGKKRAIIAVARMILTAIYAMVSTGEVFNPSDLLKYDMPEELQICRKVHLTEP

SEQ ID NO: 277360 - protein, 365 aa, unidentified
MTDHSTKQVGVTIGIDLGDRHSHLCVLDGEGQIIEEGRVVTNRAAFERRFAGEAPARIAFETGTHSPWVLALLTELGHQVIVANPRKLRMIFKSDSKNDRVDAQQLARVARLDPQLLSPIQHRSQEVRADLHLLRSRDVLVATRTKMVNHIRGCMKGFGLRLPCVATTTFPRVAAPMIPRNLRSSLVPMLRMIAELTTRIRDSKRRIERLCAERYPQTEVLRQVNGVGPVTALTFMLTLEDPSRFAKSRDVGAYLGIRPKQRQSGHSDPELRISKAGDRELRRLLVQCAQYMLGPFGKDSDLRRFGLRLAARGGASAKRRAIIAVARKLAVLLHRLWVTGEVYEPLRQASLRAPGMESTREVARV

SEQ ID NO: 277361 - protein, 346 aa, unidentified
MDYYAGLDVSLKEISICVVDADGKSVARGVSPADPEGVAGWFRTRSLSPVLVVHESGQLSIWLQRGLSRLGLPAICIDARKAHKSLSARPNKSDAADAEGLAQLARTGWFTPVHVRSEDSDRLRCLIGARAQLISLRKDLEGHIRGILKTFGIRLKGIGKGGQRQVFRDQLAAAGERDPVLRSIADGFISVHATLCQAAADLERAVKEKAAQHSVARRLMTIPGVGPTVALNFIALVDDPSRFRRAENVGAFLGLTPRRHQSGEMDWSGHISKCGDGAMRSLLFEAASTLIGRVQKFSALKSWAVRLAGRRGFAKAAVATARKLAVLMLTLWKKETDFKWKEEAIA

SEQ ID NO: 277362 - protein, 414 aa, unidentified
MDTIFENVAGLDVHQKTIVACVRRSQPQGGIVEQVRSFGTMTGDLLDLSDWLEKEGVTHVAMESTGVLWKPVWNILDGRFELLLVNPRELKQVPGRKSDVNDSQWIAHLLQCGLLRSSFVPSRPQRDLRDLTRQRTQLIREQTRIANRIHKTLEDANIKLGAVASDILGKSGRAMLNAIVAGERNPRKLAEMAEGRLRGKIPQLKQALRGHLTEHHVFLLQTLLSHLDFLEQQIAVFSQRIAVCLSPFLNPEQMRRLDAIPGMNCRTIENVVAEIGTDMSRFPDAEHLSSWAGMCPGNEESAGKRVRHRTTKGNSWLRCALTEAAWAASHTKHSYLGAQYRRFAARRGRKRALTAVGHTLLVIVYHMLKAEVSYKDLGPDFFDKLKPEQYRRYLVKRLESLGFTVELKPKDTAA

SEQ ID NO: 277363 - protein, 482 aa, unidentified
MKKRNIYQNQSQELLYLFENAGSNDKVMCVPMDYAKNDHLVMFCNGHGDILRKPFSVKNTPKGLAYIEDQVIRSCTKRGIKKEHVFFGGEDANSFAKNFVSTLRSKGFLVANVNAHDAKKQRGSVQASTDRIDLMGIATMMLNCRANCCPAQSGIYRNLRTLVRHRRKLVQMLTEVKNRVHSIVDEIFPGFLSEKNSGIIPFTQSSLYLMEARFSPKQICRRRRQTLIENLKRFGTSKVEKTAVKLQQYAAKVLHAPVEYVDTMQVSLAQHVKHIRCLKESIAQMDKEIALNLAQTQGAFLTSVRGIGIVLAAGVTSEIGDLNEQKPLNNLASYSGIVPRVKQSGGINGKTYTGPVAKRCNRILKDYVVKSAYHLGLHGPQDLMADYKRRDASGQHADFGMGRRYLRMATNLMRTSQVYLPPNLREGDYTLKERAGYYLMSWPYIREKWKKIGVLEAAFANNRPLGQWRQIVQELYDIKLKL

SEQ ID NO: 277364 - protein, 337 aa, unidentified
MGVDVHLSSWHVTIRSRSELIRQATIPGSWEVLREMLSQWCPEQVLIVYEAGFSGFWLYDAVQSWGAACIVVPPSRIPVESGNRIKTDRRDSVKLAQLAAQDQAVRVWVPALSGRYEREVLRERRRLLRQVRQVQCQIKALLHCYGLKIASRPGRWSERFVSCLYQQRFDNRFMQESFERLLERYQFLRGQIIAQNGLVRDLAGCQEYREKVKWLTSLPGIGVLTALELLTELGDIRRFKRADQVAAYVGLTPSEYSSGAAVRRGHISRCGKAALRSRLVEASWVAIRFDPQLADIYQRIRARQGGKKAIVAVARRLLLRVRRLLLDKRCYQLNAAA

SEQ ID NO: 277365 - protein, 389 aa, unidentified
MLPNGDKHSNFSVANSHEGSTLLVKKIYSALTSHSLDTVLIGLEATSVYGDNLVYFLREDATLAPFNRKIHVLNPKQVKKFHDTYNDLPKNDYVDSFVIADCLRFGRINKEVYMGDYRYKALQNLTRARFFAVQNLVKEKQRFMNVLFKKYSTMTQEKVFSDAFSTTALAVYDEFESAEALANMDLHELTDFIIEKGKNRFPDPDAVAKAIQKAARSSYRLPKTVNDSVNQVLSISITSMKALESQIKEFDKAIKALMELLPNVLISIPGIGPVYSAGIMAEIGDINRFDNQASLAKYAGLAWKQHQSGGFEAEVTRLIPSGNRFLKYYLCEAAFSLVRCDKKYSDFYHLKYKEVNRCQHKRALALTARKFVRLVFRLLKDNRLYCPAK

SEQ ID NO: 277366 - protein, 339 aa, unidentified
MEQISRIGMDTSKHVFQLHGVNAAGVTVLRKKLRRKEMVAFFQTLPPTVIGIEACGASHHLARLLSSFGHTVKMIAPQLVKPYVKRGKNDAADAEALCEAMSRPTMRFVPVKTAEQQAALMLVGVRDRLIRNRTQLSNAIRGYAAEFGLTAAKGTAHLIPLLERTESDESLPALARELFVSQAEEYRQLQAQIDDIDAKLTAWHRADACSQRLAKIPGVGAIGAVLLKMKTPDPAQFQSGRQFAAWIGLTPRDHSTAGKVRLGGITRAGDEGLRSALVLGATAVIQHALRSGKASPWLAELLKRKPAKLAAVALANKTARIAWKMMLTGEAYNAKSAAA

SEQ ID NO: 277367 - protein, 416 aa, unidentified
MKLFVGIDVSSEKLDVCFLTDDNQLSILSEISVANDIEGASFIRETILEFNNSYHFDQIVIGMESTSMHSFHPSMFFHEDEKLKKLNTLVTIENPFRVKQFSRMFDENKTDRNDALRIADFLRIQRFTTSPIKEEKYMALQRLTRTRYQLIKQLIRTKQHFLENLTYKCNTLAREMRDESTSLFSATLISLMTEDFTLDELAELPLEAFCDLLQEKGKGRFKQPEKIAKAIQRAITMSYRLGALAQESINVVLSVLVREIRALEKNIKELDKAIEQVIVVIPEYQCLTSIPGVGKVYAAGLIAEIGQIERFEDQTKLAKYAGLSWKVNQSGNYQSQNTPLTKQGNRYFRYYLVEAANSVKNYLPEYKAFYQSKYKEVPKHQHKRALVLTARKFTRLVDTLLRKHQLYTPPRSVIEK

SEQ ID NO: 277368 - protein, 344 aa, unidentified
MEHFAGIDVSLEQSSVCVVDGAGRIVRETKVASEPEALVRFFRELGIGMTRIGLEAGPLSQWLHAGLVAAEFEVGLLETRHVKAALSAMVIKTDRKDARGIAQLLRMGWFRPVHAKSPGAQEVRALLVARKLLQTKLLDVECSIRGILRGFGLKMGEVSKGRFVARVRELAAGHPMLERITEPMLRAREALRTEYARLHGEMLAIAKPDPVCRRLMTVPGVGALVALTFKSAVDDPGRFTRSRALGAYFGLTPKKYQSGEKDVTGAISRVGDPMVRVTLYEAANIMLSRVTRFSSLKRWALDVAKRRGLKRAKVALARKLATVLYRMWIDGTTFRWGKQADAAV

SEQ ID NO: 277369 - protein, 346 aa, unidentified
MRYSTTVGVDLAKNVIQISVVSGRGKEVSNRSLTRKRFGEFLGKQKPSLVAFESCATAHYWARVAGRHGHEARIIPAKAVAPFRQGHKTDSNDALAVAEAARRPNIKEAPIKTVEQQGLQAILRARDRLIQECIAQSNHMRGILLEFGIAIPQGFASLLRALPEILEDGDNELPDFYRPTLHRLYHRMLELREDIDAMTKEVGELVKNHPVCSRLTDIEGIGPIGAMSLYATLGSGAAFAKGREASAYVGLTPRQYSSGGKANIVGLSKRVGNRKLRSVLIQGALAYVYRMKEPRSTKDRWLKELIERAGPRRAAVALANKNVRTAWALIAQGTEYQRRLQLEMAA

SEQ ID NO: 277370 - protein, 358 aa, unidentified
MIVIGTDTHKTTHTAAGVERASGQLVDELTAAARTQGFEQLLAWGRALGRERVWAIEDCRHVSGRFERFLVGRGEPVVRVAPRLMGAARKGPRAGGKSDSIDALAVARAALKEGPETLPAAQLDGDSLAIKLLLDHREDLVHQRADDQRRLRWHLHDLWPELEIPAGALDRDKWLDKLSRRLARAEQSVRVEIARELVRAIRARVRRERELERELALRVQAKAPRLLALPGCGPLTAAKIVAETAGVERFATDAKLARLAGVAPVPASSGRRDRQRLDRGGNRQLNCAFHRLAVAQGRFHPEARAYLERKQAEGKGRMEALRCLKRHLVRRVWQLLRASTAIPSTSIPIAATCGIGLT

SEQ ID NO: 277371 - protein, 419 aa, unidentified
MSFKILKFNCCGLDIHKTWIYACIGITDSNNRTEYKQARFSSFTKGLNELCDWLAKYNCTDVCMESTGKYWIPVFNILEQHNLWVTLSHPKYTKPMKGNKTDRKDAKWICDLYMCGMVKPSFIPPADIRELRDLVRYRYKLTCMITGEKNRAQNCLTVSNLKLDDVFSDVFGKSSRSITEQILQHPGEKFDVAPFVHGLCKTPIEEIQAAVDGAISKEQAIKLRQCLDHIDELNKHISEVEQEILCLSDKYEAALNLIRTVPGFNKNPMTAIQVLSEIGCDMSVFPTDKHLVSWAGCCPRNDKSDRKIKSTRISRAGSYFKPVLVQVANALIKSKKHPEFITRYKRIKVRRGHKKAIIAICRMILTAIWHILSDLKPYTPEGFLESRPVKKEKILTTSQALNLLKLRGYVIKDDPLPTS

SEQ ID NO: 277372 - protein, 424 aa, unidentified
MKVTYQTCCGVDVHKSFLVATIVKTTGGIEPSYQKKRFSTFNNSILEFKHWLLDNDCLDVCMESTGKYWVPVFNLLEDEINVVIANPKWVKAVKGNKDDTKDSKWIGDLFRLGLVKGSYIPCKKVRILRKYTRYRYKLVSYRSSEKNRYQNALTVCNVALDSVVSDIFGKSSTSIIDYLLEQSGTSINHEEIASKLLRSLKSKEDAVIESVEGYQMTDAQKYRMRLVRAHMDYITAEINDVDKMIENMISSNPDFENAVQFLCTIPGVKRDSAITIISEIGTDMSQFSSSKRLCCWAGLTLGSNESAGKKKSVRITRAGVYLKPALVQCAHAAVKSDKSPYYKKKYESLVKRRGKKRAIIAIARMILTAIYQMLSTGEQWNPSDLYKIDMPVALVEKQKAKAIKQARKLLQREGLLPPDEPLAS

SEQ ID NO: 277373 - protein, 405 aa, unidentified
MICVGNDWASDHHDVCVMDEHGTTLATRRLPENAAGVTAMHDLLARFAHDPSEVVVGIETDHGMWVAALVAAGYQVYAINPLSVSRYRDRHHVGGTKSDKADAKTLADLVRTDRHNHRLVAADTVEVKAITVMARTHQNLVWARSAQQNVLRAQLGAYYPAAVDAFGGDLAHKDCLAVLRRAPTPRQGAALTVAAIRSALKKGGRQRNTDTRAREIQQALRGGGHLSAPEALTAAYAATVTVTVNMLTTLNTQIDQLETSMAQSFRAHPDAEIYLSMPGVGDITGARMLGEFGDDPERYATAKSRRNYAGTSPRTIASGIGHVVLARHIRNTRLNAAAMAMAQSALTGSPGARVYYDSLRDQKKSHPQALRALANRLIGILHGCLKHRTLYNEHTAWNHRANLAA

SEQ ID NO: 277374 - protein, 338 aa, unidentified
MYYTGIDLHKRTSFITTIDQNGKVIFRRNFPNVEELILDYFRNLDGPTKIVIESMCSWYWLYDLLSANNFTTLISNPLKTKAIASAKIKNDKVDSHMLAQLLRADMIATVHVCAIKTRKLKELIRHRRRLVQDSARMKNRIHMLLMKNNINIPVSDLFGKRGMKLLKEVSLPGYHQQQFNSYLALLRYLTEQIEPLTEQIRDLAKKDPMARLLMSIPGIGFLTAMTIIAEIEDIGRFPSYRNLASYAGLVPSLDASADKCRTGRITKQGSPYLRAALVEAAQAIPRTKQSRLNIFFRKRIVRAGYRKAIVATAHKILQYVYYVLKNQVFYSEEYLARA

SEQ ID NO: 277375 - protein, 410 aa, unidentified
MSLFVGIDVSSKDFKVKVMNDRGDEAAKRFQASNDRLGVESLALYLVNACKNNAENRLVVGMEATSVYSWHIQMFLAEEPSLAPFSPQVYSFNPKIVEKFKESYLDLPKNDWIDAWVIADRLRFGRLPENCQVDFRFLPLQRLTRFRCHLVETITREKNYFLTNLFLKFSTLAQGDVFSNTFGATSESLILEFFSPEEVAARPLDELIDFLVDKGKSKFKDPEGTAAEIKEAARKAHRLRGNLLQPVNLILATSFETIRTLQLQLKKIDKAIEAELEHFPNTLSSIPGIGPVFTAGIIAEIADIRRFPNEAALAKYAGLTWKTHQSGNFTADDTPLSRSGNRYLRTYFVQAANLVRLHEPEYKAFYSRKFKESKTHHHRRALVLTARKLVRMVDALLRTNQIYQPKGNWG

SEQ ID NO: 277376 - protein, 311 aa, unidentified
MSKAETGRLCVGVDLHKTQFTICALNEDGEYLLEKQYPTKEEGYREFAREMHRFEEQGCSIELAVETTGNARFFKNRMESEYFAVKVVNTNRFKVITMSTKKTDANDAATLAYYLMKDLLPEAHLCSQTSEEIRRLLKTRSVLVQSMVKIKNQIHGMMLGYGIETKAAQLQSKRKRQELINDLEDHNFSAYTAPSLKVMLKILDDLSAEIKGIEKLLEEMVASNEDVALLMTVPGIGINTATVIAAYTAELERFDGNYKKFASYVGIIPSVHNSNETTHYGRITKHGPQELRTAFVQAALGMIRLTNVSSE

SEQ ID NO: 277377 - protein, 427 aa, unidentified
MFTAAFASLTKMNFNKLLSGNITKYQKEGFIMISVGIDVSKGKSTVCIMKPCGEILESPFDIGHTADELDSLISLIKSFDEETRVVMEDTGHYHLPVATYLSSHNIFVCCVNALRMKKFCSQSIRRAKTDKIDSIKIASFGITYWNELVKAYPSNVIYDELKFLARQYYQVTGMLVKSKVNFSNLLDQVMPKINDVLSNQGENHKLTEFVNRYIHFQNILDMGEMKFTSDYCKWAKKKGYRLNERKAAEILALAQNGIPTLPNSQSVKIAVSEAVKLIHSIEESRNTILAQMQDLCNTLPEYSVVKEMDCIGDTLAPRIIAEIGDVRRFKNKHSLIAYAGIDAPPYQSGAFHASERHISKRGNSYLRKTGYEIMQSLIKHKPADNAVYDFIQKKRSEGKCGKEAMIAGLNKFLRVYYGKVMEFYSEH

SEQ ID NO: 277378 - protein, 365 aa, unidentified
MSTPLRYLGVDVSKDTLVVASERRRWQFANSQDGHRQFITQLQKLPGPVQVVCESSGSYHLRLCLALQEAGFAVTIGHAARIHYFGLSEGLIAKNDSLDAELIERFAQAKCPPADPPLCREQLALSEAVTHRQQLVEMIKMLQTSGQQVLHAALRAEIHRSITVLQQRLEALDQQLRARIEAQPLWKEKFTLLTRTKGVGFVTALSLLAKMPELGTLNRGQCAALSGLAPYDDDSGQHQGKRSIRGGRHAVRTALYMAALSAARFNPILKTFYQRLRAQKKPAKVALTAVNAQTAHLPQHPPQTRHPPSHSPPPHKTSHPIPHPLQKPPPEKNTVAERSVTQSKNPVTQPATTAGYSTALRLRSE

SEQ ID NO: 277379 - protein, 334 aa, unidentified
MALLLEIESAKKRFGFPADSAVVSVYEAGRDAFWLHRWLTAQGVDNVVVDPGSIEVDRRAKRAKTDKLDSEKMVRCLVRHHAGEQKVWRVVRVPSEEDEDMRRIHRERKRIQEELTSVTNRSHSLLATIGVKVENMRRLESYVGRLRTANDEEVPPHLRRELVRIVERINLLVEQLGEVEADRRTFLQSSSKRAEMVLLLGSLRGVGMETAWYLVMEVFAWREIRNRKQLGALAGLTGTPHNSDTTVRDQGISKAGNSRLRALMVEVSWQWLRYQPDSELTLWFQQRFANAGGRARKRGIVAVARKLLIALWRFVELGLVPAGADLKAEGAALR

SEQ ID NO: 277380 - protein, 353 aa, unidentified
MEQFIGCDAHKKFSVFVAVNEKGHAGEALRVAHERELYREFLARLPPHSTIAVEASGSYSWLVDEMERSGHCPRLCNPVEAKRRMGLTNKTDKLDARGLAILLRNGTLPEVWIPPSGLRDQRELLRLRIFLVRLRTRVKNRIHGTLARHNVQVPGADLFGVAARLELAARLPELPVHSREAVEQELATLDFLEMQIESAEQRLEAIMKVSVEADLLKTLPCVGKILSMVLMLEIGRVDRFPTAAHLASYAGLVPRVRSSGGHTRMGQVCGNVNRNLKWAFVETGNLVVINQRRLAGTHVVRLYQRLKRSKNHQKAVVAVARHLAEAAWWVLTKQEVYREPQGPRQKALSSTHG

SEQ ID NO: 277381 - protein, 345 aa, unidentified
MEHYAGIDVSLESAGLCIVDATGRIIREAKVASEPGVLIDWFRGLGLAVTRIGLEAGPLSQWLYAGMREAGLPVELLETRHVRDAFKAMPVKTDRKDARGIAQLMRLGWFRPVHCKSLPAQEVRALLTARKLLQTKNHDVEMSLRGVLRGFGLKVGPTTPRTFAARIRELVAGHPTLSTVAEALLAARSTLFEQWQQLEKRLRSLAREDRRVRLLMTAPGVGAIVGLTYVSAIDDHSRFRSSKAVGAHFGLTPKKYQSGETDVTGRISKIGDGSVRTALYEAANVILTRPVKGSTLKGWGMRLAARAGMRKAKVALARKLAVVLHRMLADDTEFRADKTAAAEAR

SEQ ID NO: 277382 - protein, 355 aa, unidentified
MNSEKYIGLDVHQATISVAVLDSTGKLVMESILETKAATILEFFAGLRGTLSVTFEEGTWAAWLYDVLKPHVAKLVVCNPRKNALLKDGNKSDRIDAHKLAELLYLNKLSSVYHGETGVRMLRELARSYLTIVKDLTRVMSRLKAVYRSWAIPCAGRDVYYTRHRDEWLGKIKEAGVRRRAERLYQQLDMLQYLRQQARRELLAESRQHAITVQLRQIPSRGPIRSALAVALIQTPHRFRTKRQLWAYSGLALETRTSAEYCYVKGGLRRSKKQISIRGLNKDHNHDLKGLFKAAATRASVLPGPFQDFYQRSLAKGIKPTMARLTLARKIAAITLTLWKKGENFDADKLKSQAA

SEQ ID NO: 277383 - protein, 343 aa, unidentified
MEHYAGIDVSLEESSVCIVDATGTIMREVKIASEPEALVRYFDELELSVSRIGLEAGPLSQWLQSGLVAAGRDAVLLETRHVKAALSAMTVKTDRKDTRGIAQLLRMGWYRPVHAKSVTCKDGRALLVGRKLLQGKLLDVELSIRGILRGYGLKVGEVSRGKFETRIRELTAGHVTLETMIGAMLAARMALWCEFTKLHREMLKIARADKVCRRLMSTLGVGALVALTYRSAVDDPMRFGKSSTVGAYFGLTPKKYQSGETDRDGGVSKVGDAMVRTALFEAAHIMLTRATRFSSLKHWALDVAKRRGMKRAKVALARKLGVVLDRMWVDATDFRRSKAATTV

SEQ ID NO: 277384 - protein, 428 aa, unidentified
MSSADKPKEERPIAAFVGIDWADQKHDIAFRATSSQGKLERYQIESQPEALNDWVLQMRERFGSQGKILICLEQSRGALIHFLMGFDSFELYPINPKQLDNYRKAFRPSGAKDDPLDAELLCQFLSLHHEQLRPWRPDDEQTRKLALFCEKRRQAVDARTALSNQLKSELKQYFPLALVVLNNDLSTVLAADFLLQWPTFESLKKASAHKLRKFFYAHQCRSEQKIQARIERIQSALPLTKDSAIIAASSLTVEMLARQLKDLAPYIARYEKQIEQLFSHHPDRGLFENLPGAGEQLAPRLLSAFGSDRDRFPSAGEALTFFGVAPITERSGKTTWIHFRWACPKFLRQSFHEFAGHSVRFCDWAAAFYEQQRARGKGHPAAVRALAYKWIRILFRCWKTRQPYNPDLYLAALSRRSSPLATAVKNSP

SEQ ID NO: 277385 - protein, 347 aa, unidentified
MTRYKRIGIDTSKAVFTLHGIDETDRPILRINLKRGQLLPFFRKLPRTEVALEACGGSHHWARELSALGHTVRLIPPQYVKPYVKRGKNDRNDAAAICEAAGRPGMHAVPVKSAEQQGQALVLKVRETLVDQRTQLVNTLRGHAAEFGVIAGKGLTNIAPLLKKIAADTAIPSEAKAMMAVLGEEIERLETRVREMEVRLKHAHKANAVSQLLATMPGIGPITALTVAIDVDPAAFESGRHFAAWLGLTPKEHSTGGKQRMGGISRAGNERLRSLFVLGATSVINATARPGNHCTTAWLMNLLRRKPRKLAAVALANKMARIAWTMLSRGEPYRGVARSEKLAAAVS

SEQ ID NO: 277386 - protein, 369 aa, unidentified
MTFFIGVDLHKTQFTVHVRSEEESESLEQIRKYPTTQDGYAEFLARISRYKAAGADVKIGVESTGNTRFFKNQVEKAGAEVTVINTLKFKVINESAKKTDRHDASTISEFLSKDMLPESYLCGKETENIRRLLKSRERLVRSTVGQKNEIHALLVSLGLSDELRSLQSKKGRQRILDTLESNNDYVLEAQSVKLMLEIIDAFAEKIKLIEKQLAELTKEDEMVNRLLTIRGCGKITAWTIRAYTEDISRFASAKKYAAFCGLVPWVQDSNETIHHGKITKRGPQELRTCFVQLVLGIRRCKDTSNWRMMQRYEYMKTNKGSGKSIVAAARKMAEIVWAMLSDKKDFDAQKMIGKYKPMSLAEKTFIAMN

SEQ ID NO: 277387 - protein, 338 aa, unidentified
MRYVGLDVHWRQSTICVLDHRGRKLSTQTIREGWSKVLEEVGKLRKPFSICFEASSGYGFLFERLATVARRVVVAHPGQLRLIFRSKRKNDRVDAEKLAKLLFLDEVPPVHVPSVEVRSWRSMIEHRRKLVAEQTRTKNGIRSLLRSHGVEAPRGLWTRRGLAWLASVRLATEMDELQRDIMQERLQLVAGMIQRVERVLNRMAEAHAGVRLLRTIPGVGPRTGEAVVAYIDEPGRFHRNKAIGSYFGLVPKQDASGRSNRLGHITREGPASVRGLLVEAAWQGIRRCPRIRQVYERIQRGDKERKKIALVATAHHLLRAMLAMLQTGEVWRYSEEAA

SEQ ID NO: 277388 - protein, 414 aa, unidentified
MEVLHLRCAGLDVHKDSVVAAVRLAEPGGAPTEVRRFDTTTPGLLALSAWLAACGCTHAAMEATGVYWKPVWHVLSDGDLVLILANPAHVKNVPGRKTDVADAAWLAELLAHGLIRPSFVPEPATQALRVLLRTRKQLVREQASHVQRLQKTLEDANLKLASVLTDVMGLSGRAILEALVAGERDPDRLLALVHPRVKAEPARLRAALTGRLTDRHRFLLRLHLGQHDALAAALAEIDAEVERDLGPFRDAVRLLRTVPGIGDLAARMIVAEIGTDMGRFPTAGHLVSWAGLCPRSDESAGKRRSNRLRQGAPWLKTALVQCAWAASRKKDGYLRAQFQRLRQRRGPKKAICAVAASMLTAIWHMLRDGTFWRDLGPDHFHKRSPEQQAEHLARQIAKLGFACTITPQAEPVSV

SEQ ID NO: 277389 - protein, 334 aa, unidentified
MLYAAIDIHKSVLQVALLEPATGEVSDARMPATREALRGWALPLRESVVAVALEATSGWRWVWRELSVLGFEVQLAEPAQARALRGRKRKAKNDRLDARWLALLLAKQMLPQSWIPPEEIQRLRDLTRLRQALRHDRTRWLQRLHAVLAHEGWPCGRGELTSASGQRWLAGLKLDPHVRALVDAQLAMVRASAEQINAIDVELRRLARSDRRLLALQTLPGVGPVLACHLLAELGEARRFRRARQLVRAAGLDPVVHDSAETKRRGKLSKQGSPQLRWALVQAAHGAARRAGSDEQRRQRALTPRVGSQRAALTNARAIARHAYHVLAAAETAA

SEQ ID NO: 277390 - protein, 315 aa, unidentified
MNEVKQQVFIGIDVCKRELEVALRPTGNRSVFSNDDEGIAHLVDFVRSNSPSLVVLEATGGLETGVVGALAARECPVVVVNPKQVRDFARATGKLAKTDSIDAHVLAHFADAVRPEVRALKNVEAQNLDALNTRRRQIVEMLTAEKNRLLIAPSWTRGDIRSHIDWLEKCLHKVNKEINKLLKNSPVWREKDNILQSTPGVGPVLSATLLAGLPELGVLNSKQIAALVGVAPMNRDSGMFKGRRTVWGGRSNVRCILYMGVMSAIRFNPSIKMFYQRLRAAGKVHKVAATACMRKLLVILNAMLRDGRCWNVAGS

SEQ ID NO: 277391 - protein, 372 aa, unidentified
MPQRSKVFVGLDTSKLKISVALAEEGRQGEVRFLGEIDNTPEAVRRLVGKLASRYSEVLFCYEAGPTGYGLQRQISALGHECVVIAPSLIPKRPGERVKTNRRDALTLARLHRAGELTAIWVPDPGHEAVRELVRARDAAMADLRAKRQHLQSFLLRHGRLFPGRKPWTRAHARWLSELAFEHPAQYLVLREYRQGLEDAQARLERLTQQIAEVLTTWSMAPVVEAYQALRGVALVTAVTFVAEIGDVRRFESPRQLMAYLGLVPCESSTGERVRRGSITKAGNTRVRRVLIEGAWTYRFPARMSRLLQERQANLPQIVRTIAWKAQVRLCARYRRLMAAGKRQTVVTTAIAREMAAFLWAIGHAIEPRSAA

SEQ ID NO: 277392 - protein, 413 aa, unidentified
MVDVLHERCCGLDVHQQTVVACLITPGAGGPPQKELRTFGTMTADLLELADWLRAAACPTVAMEATGVYWKPLWNLLEDEFTLLLVNARHIKAVPGRKTDVRDCEWIADLLRHGLLRASFVPDRAQRELRALTRYRSALVRERTAEVNRLQQTLEGANVKLAAVATDVLGQSGRAMLEALVGGATDAAALAELARGKLRAKRPQLVQALTGRFGPHHRFLVAEQLGHIDELDERIARVSAEIAERMRPFAATLAQLDAIPGVGQYTAEVLVAELSTDLSRFPSAAHLASWAGMCPGNHESAGKRQSGKTRKGNPYVRAALIEAAQAAGRKKGCYLAAQYRRLAHRRGKKKAAVAVGHSILVIAYHLLTRGTPYEELGGNYFDERERQAVKRRLVQRLEDLGYEVTIQPATPAA

SEQ ID NO: 277393 - protein, 265 aa, unidentified
MDIAKNCFQLAVAEAGYRIQGRHRLTRTRFAQFMSNRPASLVVMEACGSAHYWARALQAQGHEVRLLPAQHVRAYVRRNKTDAADAAALIEASRSEDIKSVPIKSVEQQVLQQLHRLRTQWQGGRTARINALRGMLREFGIDIPKGAERGIAAIREALEIADNGLADALRPFIAQVLKEIEDLEQQVKNTDRALKILSREDTVVQRMQQTPGVGLIVSTGMRAAVVDIHRFASGRNFASWLGITPNEHSSGERRRLGKISKQGDV

SEQ ID NO: 277394 - protein, 412 aa, unidentified
MSSAYRVTAAIDVHKKWLYVVVAQPDAAEREFSRCRTGSTSQELAVLANWLHERDVSTVVMESTAQYWKPVWAALEGEFTLLLAQARSNAAPHGRKSDYADATRLMKRLWADDLRLSYVPDAEQRSWRLLTRTRVQHTGEITRLRNRIEGLLEECRIKISGLLSDLLGASGRRMLRALIAGKTTDPQQLAELADKRLRATPEELQRALNGQLGPAHRLLLGQLLEEIELLEDHMAKLDQCLLDQLASQREVVRRLCAVPGIGIEAAQLILAELGPRAATFPTAAHAASWVGVCPGRNESAGHSTSDASPKGNRQMRRILNQCAWAAVRSKNTYWQQLFRRLTPRLGMNKALWAVAHRILRVIWLVLHEGMEYQERGPCAPDPERLRRRIERMLYELRKRGVNFQLTAVATSA

SEQ ID NO: 277395 - protein, 391 aa, unidentified
MIYVGIDVAKDKHDCFITNSDGEVLFKAFTITNNLDGFNDLYQKIETVMKDITKVKVGLEATGHYSYNLLGYLIDKGLPTYVINPLHTNLYRKSLSLRQTKTDKVDARTIASMLMSDVNLKSYSDTSYHNEELKSLTRYRFDKVKERAKLKSSVSRLICILFPELEKLVPTLHMASVYALLSEFPGAKQVANAHLTRLTNLLSEASKGRYSKDTAITFRDAARTSIGSNMPAKSLELKHTIKLIKELDSEIDEIENEIKIIMDEINSPILSIPGINYRMGAMIIAEIGDFSRFDSPDKILAYAGFSPSTYQSGHLYGAYAHMEKRGSRYLRYALYNAAKYVCHWDPTFTAYLAKKRAEGKHYNVAISHAVKKLIRVIYHLEKTNQQYIKAS

SEQ ID NO: 277396 - protein, 339 aa, unidentified
MNITTVGLDLAKNVFHVVCLNEHNKEVRKKMLRRNQVRQFFAQLPVCTVAMEACATSHYWGRELIALGHEVKLIPPQQVKPMVQGNKNDYNDALAIAETVNRPKTTFVAVKTVEEHDIQAIHRMRSQCIRDRTALSNSTRGLLGEYGISFSKGLATLRKKIPELLEDADNGLSFRFRNLLARRYDQLVELDEHIAFYTKELEILSRQDEACQRLQTIPGFGPIVASAFRSTVGDGSAYARGRHAAASLGLVPRQHSSGGNNLLLGISKRGDRYLRKLLVHGARTVVRHAVDRDDPFSRWINRVSERRGKNRAAVAVANKLARVGWAVLRYNTEYDPAMA

SEQ ID NO: 277397 - protein, 344 aa, unidentified
MSEVITIGLDIAKNSFHAHGADERGETVFSRKLSRSKLLEFFANQPACLVAMEACGGAHHWARQLAQLGHEVRLIPPTYVKPFVKRHKNDAVDAEAICGAAQRPGMRFVAIKTEEQQAAGMVFRTRDLLVRQRTQLINALRGHLAEYGWVAPRGVAQAAMLADLLDEDEMASSLPEPARAMLRVMTEMLDQLDHRITGLDKEIARRAREDEVARRLMTIPGIGPIAATAIVALAPQATTFRKGRDFAAWLGLAPLQHSTGGKQKLGRISKMGERTIRRLLIIGGSAVMRQATVRGAPVGSWLEGMLARKPRMLVSVALANKMARIAWALMTKQEDYKALVVVAA

SEQ ID NO: 277398 - protein, 318 aa, unidentified
MTVPACFVGIDVAKATLDVAVRPSGEHWSAPNDDAGIRTLVERLRPLAPALLVCEATGGFESATVAALAAAGLTIVVANPRQVRDFARATGQLAKTDVLDAHVLALFAERVRPEPRPLPDAAAQALDALLTRRRQLLEMLTAEKNRLGFAAGPIRRGITQHITWLKRRLVDVDHDLEQTIQASPLWRAKDDLLRTVPGVGRVTSRTLVGELPELGRLTHKQVAALVGVAPRARDSGTLRGKRMVWGGRAPVRAVLYMSALVATRYNPVIRAFYQRLRAAGKPAKVALVACMRKLLTILNAMVRTNTIWRAPLGVGATS

SEQ ID NO: 277399 - protein, 364 aa, unidentified
MEYIAFDAHKHYTLASVVTPDGQLVREERIEHERGAVRDFLKRCERGSPVAVETIGNWYWIVDEIEAAGCLPRLVNARKAKLMMGEINKTDKLDVRGLNRLQRSGTLPTVWIPPGELRDQRDLPRTRMVFVRQRTQLKNRIHAALAKYALHDLAVSDCFGVRGRALLRERFELLPPHTAYASQQLLGQVEELDRQVHAFEQRIQATFKATPAIQRLLTLPGVGYTLAVVIALEVGDVARFASAERLAAYAGTTPRVHASGGKSRFGPARPDVNRYLKWAFVEAANAICLHRGRVAHRHASRLYERLARRKGHAKAIGAVARHLAEATYWMLSKQEAYREPKSVGRFVRGGISARGPMSSSKLDR

SEQ ID NO: 277400 - protein, 410 aa, unidentified
MEPVLLSCAGMDVHEEKVDVCIAHGPFDKPPKFEIRTFSTMTSDLEDLKIWLKKYEVTAIGMESTGVYWKPIFNVMEGEFKIVLANAQRLKAIPRKKTDIMDSKRIANLLRYGLLPNSFIPPKEIRELRDLNRTRRKLVGMMTSEKNRLVKVLEAANIKLSSVVTKIYGVTSLALIRSLLEKDKLSREEISKMAKGKLKKKANLLEKALNGKLTDHHRFLLKMHLQNIDYLAKQIEKIDEEIKRKMVPFQKESKLIQTIPGISEVNASAILAEIGVDMSQFPDAAHLSSWAGVCPGNNESAGKKKSGKTQKGNSFLKGALTESAWAASKTKDSSYNAIYHNIVKRRGKKRALVAVAHRMLIDIYIVLTTGEPYLDKGAKAVHERTIMRKERSMIRSLEKAGYSVTRAVAA

SEQ ID NO: 277401 - protein, 312 aa, unidentified
METQKNVVEFEQIVKRGCGMDVHKETVVATVSGIGIKPTTRTFSTFTSSLIELKEWLKSLEITHAAMESTGVYWKPVFNVLEEDFEILLVNARHIKNVPGHKTDKKDSKWIAKLLLSGLLKGSFIPPKEIRELRDLFRYKRKLVGQISSEKNRLQKILEDANIKLSSVVSDTFGVSSTRIIEALLNGQNDIEELVKLCHGRLNSKKAELKEALVGKLTEHHKFMLRTIKKSIANIEDIVSEVEKQIDEQTKSYQIEMELLQTIPGVGKDTAIGIVAEMGVDMNVFPNEQHLASWAGMSPGNNESAGKKKVQE

SEQ ID NO: 277402 - protein, 482 aa, unidentified
MKKPSIYPDRSQELLALFEQAGNNKKIMCIPIDYAKKDHLVMFCNGYGEVLRKPFPVKNSVDGVKYLLDQVSHSCHHRHIRPEHVFFGGEDVNSYAENFANTLRAKGWLVANVNAHDAKKQRENLQASTDRIDLMGIATMLLNRRANCCPAQSGVYRNLRTLVRHRKKLVKMKTEVRNRIHTIVDRLFPGFLNEKKSGITPFSSSSLYLMQERFSAPQICRRQRPALIRNLEKRGTKKAEQAAAKLQDYATQVLTTPDEYAATLQISLSNHVAHFRCLLDGAQQLVKEMALLLAQSQGAFLTSIKGIGIVLASGVTAEIGDPLAQRSTDRLASYAGIVPKVKQTGGSQGRAITGHVSKRSNHLLKDFVVQSAYHIGLYGPKDLQDDYSRREAAGQHADFGMARRFVRMTMCLMRTSQIYLPPDLRCTHVEPKQRADYYLKMWPYLKDKWSKTAALDTAFAKNKPLGQWRYIVQELYGIKLKL

SEQ ID NO: 277403 - protein, 343 aa, unidentified
MWYVGCDIGKRWHYLVVMDTQGRISQQQRLPNDPGLIQRFFETLEGPTRVVLEATGNWMAVYDRIEPYVQEVVLAHPLKVRAIASARIKTDKIDATTLAHLLRSDLIPRAYVPPPQVRDWRELVRHRAFLVRLRTRLKNRLHALLAKRGVAPPAVSDLFGVIGLRWLKTLALAEPYGAMRTRYLAVLERLTQQIREAEQTIDQTVAAQPAAQLLETIPGVGRYLALLILAEIGEICRFPDSPHLVSYAGLCPATYASGQTLRHGRLTKQGSPWLRWALVEAATHVHHYPHSRLARIAQQLTQRRDAKTARVAVARELCTAIFHILRKHEPYREPSSVRSTMVA

SEQ ID NO: 277404 - protein, 423 aa, unidentified
MNHTLNKKIEQVTDKTLIVGVDIGSETHYARAILVRGYEISKKPYRFENTEEGLSGFIAWVNDLAAYNNLNKIMIGVEPTGHYWFNFAEYLKKYNVQLVLVAPQHVKHSKEMDDNTQEKTDRKDPLVIARLIPEGRYMIPYMPEGIYADLRIAFNRRCELVDALIRNANRMNRWYDIYFPEYKTIYGRIDAISGLMVLKRAPLPSDILELKEDEICRIWREEKVKGVGCNRAKKIVAAAGKSIGMKGGEAARREFWQLLEEHDLLAKQLHDMMVLIEEYLHQIPGADRLLKVPGAGIVTVAGFLSEVGDIKRFTDPKQIQKLAGLAVVENSSGKRKGVSEISRRGRSRLRWVLFQLARTMVQFNQEMRTYHHYYTNRKENPLKKMQSIMAIAARIARIFYGMLKNGTQYDPAIVMKNFDKAVA

SEQ ID NO: 277405 - protein, 341 aa, unidentified
MEPTVIAIDIAKKVFQLHWVDPETGHIERLQLKRAQMLPWFANRDCAQIVMEACGGAHEWGRALCQLGHDVRLLSPRKVRPFVQRNKTDAADAQAIWTASRQPGMRFVPIKTETQQIVLSLQRLRAQLMKTRIMQTNELRGLLYEFGIVLPEGHAALLKALPAALADAKSRLPAMLMDSLDDQLRRVNQLQADIGAIERRLAQQMREIPACKAVAEIPGVGLLTATAVVASMGTPTAFKDAREFAAWIGLVPRQTGTGGRIRQLGISKRGDAYLRTLLMHGARAIVAKTKDAPTWPWLAALLQRRPYSVAVAAVANKLARTIWAVLARGQAWRPQAWQAAH

SEQ ID NO: 277406 - protein, 353 aa, unidentified
MTRAMIAVLGIDLGKSSCSLVGLDAEGAVVLRKRMRRETVIAFATKLPTCVVAMEACCGAHHLGRLLAGLGHEVRLMSPEYVRPYVKAQKNDDRDAEAIAEAATRPTMRFVELKREEQLDLQTLHRVRDRLVGLRTMLTNQLRAILLERGLVFPKGRRKLELAIDALLLETHPALGVRMQKLIGDLREEWRGIDQRIGSLDTEFVARARADSATRRLMTIPGVGTLTATALVAAVDDAAAFRRARDLPAWLGLVPRQHTTGGKPKLLGISRRGNSYLRRLFIHGARSALPTLSKTDTPTGAWLRALLSRAHANVVVVALAAKMARIAWAMLRRSTEFTPEPGLAMTRLVAPPR

SEQ ID NO: 277407 - protein, 427 aa, unidentified
MAKVKHTLDARVLVGIDISKHRHEVLIATPGKSRRRRMTVLNTADDYRRLIAALIEYGLPVTVGFEATGNYHRALMFALGAAGFELKLVSSVALARTREALHNSWDKNDPKDAQVILRMLEIGAVQVFHDPLVAGTCDIQELSKTYEMVARSKTELWHRLLTHYLPLYFPEADRFHRSSRGDWFLAFLEAFPSPYMITAMDKDAFIEAAWPVIGRRVGKAALLADIYETSKTSVGLPVAPDSDAIRMFRLVLAQGRSLVQQRNAIEDRAAELLADHPDYQLLRTIPGIGPVNALAVLAEAGDLRRFRHHRQFLKFCGMDLATVQSGVFRGRSKISKYGNARLRRTLWLASQAAVLKPANSFRDKFERYIAQDRHNPDLRRKAYTAIAAKMARTIHAVIKSGEPYRPFFEGTSPGGRTPLCRAVEAAS

SEQ ID NO: 277408 - protein, 424 aa, unidentified
MKVTYQTCCGVDVHKSFLVATIVKTTGGIEPSYQKKRFSTFNNSILEFKQWLLDNHCHDVCMESTGKYWVPVFNLLEDKINVVIANPKWVKAVKGNKDDTKDSKWIGDLFRLGLVKGSYIPCKKVRILREYSRYRYKLVSCRSSEKNRYQNALTVCNVALDSVVSDIFGKSSTSIIDYLLDQSGTSINHEEIASKLLRNLKSKEDAVIESVEGYQMTDTQKYRMRLVRAHMDYITAEINDVDKMIENMISSNPDFENAVQFLCTIPGVKRDSAITIISEIGTDMSQFSSSKRLCCWAGLTPGSNESAGKKKSVRITRAGVYLKPALVQCAHAAVKSDKSPYYKKKYESLVKRRGKKRAIIAIARMILTAIYQMLSTGEEWNPSNLYKIDMPVALVEKQKAKAIRQAKKLLQREGTLPPDKPLAS

SEQ ID NO: 277409 - protein, 387 aa, unidentified
MTQADDLSRSLAAFDQNSTLIVVVEMSAANWLVAAMIPGVDRQPMKKLEPDPNALLQLLERWRAEAAKMGRTIGRVVLAHEAGRDGFWLARWLRARGVEAHVIHSTSVAVSREHRRAKTDRLDTGMLMRVFLGWLRGERGHCGMVAIPTLDDEDAKRPSRERENLVAECTRISNRLKSALARLGIRGFEPLLRRAPQRLAALRTPEDLPIPPNMLAEMERDMARLAVVRAQIKQIERTRLQALQQAPEGGPHAMVRLLARIVGVGIETADMLVREVLSRNLRDRRAVARYAGLTGSPNESGSKRREKGLAKSGNGRVRRGLIQLAWRFLLFQKDSALAQWFRSRTEGANGARKTKMIVALARKLLIALWRMVTTGEVPHGVVLRPTA

SEQ ID NO: 277410 - protein, 343 aa, unidentified
MEDTITVGLDIAKSVFHVHVADSSGRVLQSRKLRRSQVEPFFAKLPRAIVGIEACGTAHYWARQLRALGHEVRLIPAAYVRPFVKRNKNDARDAEAICEAVRRPTMKFVTIKTIAQQAARGLERARDLLVKQHTQLRNCVRSLLAELGFTAAQGERGFAELVQQMEAAEAEVVPEAMKAALRPLVRQIGLLAAEIAALEQQIVAAARHDPLMRRLATIPGVGPITAHAMVTAVGDGRQFRSARDFAAWCGLTPQERSSAGKRRDKGISRQGERRLRKLFALGASTVMRNARARAERATEWQRGILARRPVKVAVLAQAAKTSRIAWAVLTSGETYRRPAQVAA

SEQ ID NO: 277411 - protein, 445 aa, unidentified
MAMRKRADEVFPNAAGIDVGGSTHWVAVPPHLAEQAGCQSVREFGAMTDDLSAMADWLSQLGVEYVALESTGVYWIAVFEVLEARGLKVWLVDARQTRNVPGRKSDVLDCQWIQKLMSLGLLRAAWRPAAEVCEVRAIARLRDVLTSEQSRWVQRMQKELVQMNIQLGEVLTDVMGLTGQKIIRAIVAGERDAGELAKLRDRRVKASQEEVRRALTGTWKAEHLFVLAQALSMYDDHARRLADCEAKLRELVGARSERLVDIGALPRAGSKARQEFDARQMLANWAGVDLTRIDGLGVNVVLTLLTEIGPDVSRFATVKQFCSWLALCPGTKISGGKKLSSKTKLSANRARQALKMAAQSLSRSGSALGAFYRRLCGRMDKPRANTAVAHKLARMVYFMLTRGEAYVDQGQQRYEEQQRKRSIVALQRRAASLGFLITPVAATSP

SEQ ID NO: 277412 - protein, 395 aa, unidentified
MKHILSFDIAKGKSVYCFIDELKNTIIDATTIEHNKTDFDNLFNLIKNYPNLTVIMESTSIYHLPVENYFRSKGIETIVINPKLVKQFKDTLNKSKTDKLDCFKIARCYLGTIDNFYYKNDEYFMYNPLARQYWSLLEGQTRLKNRYRQLIEIVFPEFALIFNDLYDDLTLNFIHDFPHPSLFVNRRSDYLMNYLKDKNGTTKAYRFKNKVLKMKQLASNSLCSESFNFINVQNLVQITEMIQYHKSEINKIKSQLINGMKDKKLFKIINSIPGFGSFSTALFLAEVGDITRFDNKYQFISFIGIDSVTSQSGISSYHGPISKTGCKLGRTILFNVITTLLQISARTDKTNPIYLFFRKKQSEGKHHYKCIIACETKLCKIIYKLCSSNCLYTNK

SEQ ID NO: 277413 - protein, 320 aa, unidentified
MDAVLGIDIGKAKFHVTLRFDDGTRRRKACANSPAGCAELLAWMARHGAGRVHACLEATGAYGELLATTLVDAGHQVSILNPAIIHHYAKSRLSRAKTDPVDADVIADYAAKEHPPLWTPLPRDVRDLQALVRRLDALIGMQTDERNRAQAGALTPAVQQSIETVLAHLEAQIDTVRQQIRQHMDQHPGLRAQRDLLITIPGIGEATAALLLAELFNKAFTSARQAAAFAGVVPRAHDSGLHEGRRVMCKLGPGRLRKGLYFPAIAAIRFNPSLQPLARRLRGAGKPPMLIIGAAMRKLIHLAFGVLKSGRAYDPDLVKA

SEQ ID NO: 277414 - protein, 348 aa, unidentified
MVIGIDAHKKTHTLVGVDAAGRPVGELTVAATTEGHLKALGWARREFGADLVWGVEDCRNLSRRLEHDLLDAGQRVIRVPPHLMARTRASARTRGKSDPIDALAVARAVLREPDLPIAGHDEFSRRFKLLVDRRDNLVAHRTAVINRLLWRLHELDPEQAPKPGSLRRINQQKAVQARLADQPGLVAELAGEELIEVMALTTQIYALDHRIEAEIHAANPLLLGIYGCGELTAAKIIGETAAVSRFRNEAAFARHAGTAPVPRWSGTNSTRVIGKRWGNRQLNNALYRIAMQQIQRNGPGRGYYQRRRDSGDSHLQALRRVERRLARKIFGCLCADEAARTPQGEKRG

SEQ ID NO: 277415 - protein, 387 aa, unidentified
MSDRWGDWGLTRMIRVAAPLGMIGRGPVCIGHKHRGEAAVGYFAGLDVSLEETAICIVDDEGRILREARVASERYALVAFFNALGMTMERVGLEACSLTAWLHQGLSEAGIPAVCIDARQAKAAIGAMPNKTDRNDARGLAQIMRTGWYRAVHVKSPSCRSWRALLTARRMLLNKRRDIENGVRALLREAGLKVGAPSRKDFPARVRELASGDAVLTGLVESLLSVIKVTTDEVARLTKRVLDEVRVEPTCRHLMTVPGVGPLTALAFRATVDRPDRFRKSRDVGAHLGLTPRRYQSGETDVQGRISRCGDELARTALYEAAHSLLIRSRKWSALRAWGMQVAKRRGIARARVAVARKLAVILHRMWVDKSEFRWGKQAATAAKAAR

SEQ ID NO: 277416 - protein, 358 aa, unidentified
MAASSLTHRRASGVVVGVDTHKDLHVARAKDELGRGLGEITIPASAKGYRALLSWSRGLGEVRAFGVEGTGCYGVGLARHLRAHGQVVIEVIRPNRQARRLRGKSDPADAEAAALAVLSGEASGIPKASDAAVEMIRALRVARSTANRARTQAINALHALVVTAPEELRRDLRGLPGPRLQRVCAGLRPGELTGPVDATKMALRSLARRHQALSAEVRELDKDLRNLTAQACPALVGIFGAGSDTAGALLLAAGDNPGRLRSEAAFAKLTGVSPVQASSGKTTRHRLNRGGDRHANAALHRIVLVRLRWRHPPTIDYVERRTAEGKSKREIIRCLKRYVAREVYRALIDVPADASSPA

SEQ ID NO: 277417 - protein, 336 aa, unidentified
MSSDCNMFIGLDYHDQSVQVCGLDGEGGQQFNRRCRNDWQAIVASVGAGVPVEAAIEATPGAADLAEQLVEYAGWSVHLAHARYVAKLKQSPDKTDFSDAKLLADLTRVGYLPRVWLAPHGVRELRRLVNHRRQLADRIRALKLRLGALLRDHRVSIEGRRWSQDWRRRLAEQMPTLPGETSWIIGEHLAELAEQARRLKSAEQRLHQVTADDAVTDRLLAQQGVGLVTATALRAAIGRFDRFRSGKALARYCGLSPRNASSGMRQSDGGLISEANKPLRALLIELAWRLIRYVPRWRAMAAQMRRRGKAGSLIAAAVANRWVRRLHHVMKEPTMA

SEQ ID NO: 277418 - protein, 391 aa, unidentified
MERPMPQRNDLSRSLLALDQNSTIIAVIEMSRSNWLVAGVIPGVDRQPLKKLEPDEEGLLHLLRRWQDEAARAGRTISRIAVAFEAGRDGFWLARWLRARGIEAYVIHPASIPVSREHRRAKTDRLDTELLKRAFLGWLRGEPNHCSMAAVPTLEQEDAKRPNREREVLVGERTRIVNRMKGTLARLGIRGFKPALPRAPERLETLRTPEGATLPPNTRAELQRDMARLRFVTDQIRELEAARAERLEHAPETGPNAMIRLLARVVGVGIETADMLVQEVLSRNLRDRRAVARYAGLTGAPDESGAKRREKGLAKAGNARVRRGMIQLAWRFLLFQKDSALSQWYRARTTDARGATRKTLIVALVRKLLIALWRFGATGEVPQGVVLRPAA

SEQ ID NO: 277419 - protein, 357 aa, unidentified
MGEGSWVGLDVHARSTVAGVLDGASGELRTVRVSPRGVETVAWLRTLAGPERVAYEAGPTGYGLARACAEAGIACLVAAPSKIPRGPGDRVKTDRRDAERLARLLRLGELVAVHVPTPLEEAARDLVRAREDARGDLMRARHRLSKLLLRHGRVYDGSAWTLAHDRWLTQQRFTARPLTLAFEESYAVVAQAKARRDALDQAIIELAAEPPFRDVVARLACLRGVSTLTALALTVELGDWRRFHPAALGPFLGLTPSEDSSGPRRRQGAITKTGNSHARWLLIEAAWHQRRPPRPSATLERRRAGQPALVRLQADHSAHRLHRRWQHLEQRGKPRTVIAVAVARELAAHCWTLATMS

SEQ ID NO: 277420 - protein, 372 aa, unidentified
MYYNTIYVGMDVHKSSFTLCSYTIEAEKASHFQRTEVDYKKVLKYLEFLRTVYGDDARFVCGYEAGCLGYTLYHQLTEHHVECVILAPTTMLEQRSRKRIKTDKRDAEVIARCLAQHNYSAVHIPTATDEETKEYLRMRNDHKLALKRIKQQILAFCLRHGHIYGGKSNWTISHLKWLKELELNSMHREILDEYLLTYTTLTDKLERLDSRIEEIASKPEYNESVKKLSCFIGIKTHTALSTLVEVGDFHRFATASKFASYLGLVPGEDSSGDDQTRLGITKAGNRHLRLLLTEAAQCYARGQIGYKSKALKARQSGNPPEIIAYADKANERLRRKYYKMVLQERKTHNVAKTAITRELACFIWGMMTDRIA

SEQ ID NO: 277421 - protein, 328 aa, unidentified
MCEFTGIDVSKEKFDVCWLRDIKTGKKKTKVFKNTRAGHQQAQDWLLNNLKVPAQDIVITLEPTGVYHEALMYFLHDCGFQVLLVNPGKARKYAQSLNQIHKTDKLDAVTLAWYGHAQQHKLTLWQPEAPEIRELKVMIRRLDALEKDLQREQNRQEAAQVSLSSDRVAQSLKDMIETLKAEIERLQQDIDNHIDRFPELKRNRQLLQSIKGIGTVMSRELVYLFASKRFKSAKQAAAYIGLIPKLRESGKLKGRTMLSKIGSARIRAKLYMAAVCASTHNPDIKAQKARLLKAGKVKMQALGAAMRKLIQICFGVIKHQCEYQPQLV

SEQ ID NO: 277422 - protein, 355 aa, unidentified
MNQEKYIGMDVHQATISVAIMDSSGKLIVESILETKAATILEFIQGLRGSLSVTFEEGTSAAWLHDLLKPHVTDLVVCDPRKNALLKDGSKSDRIDARKLAELLRGGQLKPVYHGEHGLRTLKESGRSYLTLTKDVSRVMTRIKALYRSWAIPCSGATVYAPRHRAEWLAKISEPGVRLRAERFYQQLDLLEPVRQEARRDLLNESRKHPAVKLLRQIPSIGPIRAALLVALLQTPHRFRTKRQLWAYSGFAVETHDSGEYRYVRGKLRRNRERITVRGLSDNHNHDLKNLFKSAAISASTRPGPLRDFYAALVQKGMRPTMARLTLARKMASITLTMWKKGVDFDAKQLQPQAA

SEQ ID NO: 277423 - protein, 419 aa, unidentified
MSFKIFKFNCCGLDVHKTWIYACIGITDSNNRTEYKQARFSSFSKGLHQLCVWLAKYNCNDVCMESTGKYWIPVFNILEQHKIRVTLSHPKYTKPMKGNKTDRKDAKWICDLYMCGMVKPSFIPPADIRQLRDLVRYRFKLTCMITGEKNRAHNCLTVSNLKLDDVFSDIFGKSSRSITEQILQHPGEVFDVAPFVDSRCKTPIEEIQAAVDGAISHEQAVKLRQCLKHIDELEMHKAEIEREIFRLSQKYESVLDLIRTIPGFDKNPLTAIQVLSEIGADMSVFPTAKNLVSWAGCCPRNDQSSRKIKSTRISRAGSYFKPVLVQIANALIKSKKHPEFTTRYRRIKARRGHKKAVIAICRMILTAIWHILTDLKPYTPEDFLESRPVNKEKVLTISQALNLIKQRGYIIKDDVGPVT

SEQ ID NO: 277424 - protein, 411 aa, unidentified
MSPVYTAILRINPWRWAVQANRTGIYERVIRVEKKRFPNWNGKLITLLTSNRRTTTVFYLGIDQHARQLTISLRDEEGDVVLSRQVSTQPEKVNAFFEQLTRERLQEGESFLAVVEVCGFNDWLIQMLRDYRCGKVILIQPEERKRRKTDRRDAAALSELLWVNRTRFLQGKPIRGLRQVDIASTSDQETRRLTMLRQHAGRERTRIVNRLKHLLRRHNLQWEIPTKKFPTQLAIAWLKTIKFSEIDQLEVDYLVADLESVQQRIKELEQVITDRCEADQSAMILTSTPGVAQFTAVSLACRIGRVERFPRSHSLANYWGLTPGCRNSGENNQRLGHITKAGSGMARWLLAQVTVKVLREDKKLREWFKRIRRRRGSGVARVAVMRKLATIFWHMLTKNKTYAECREFATG

SEQ ID NO: 277425 - protein, 350 aa, unidentified
MSIIGCDLHTRYQVIAMLDTEGGEIVTRRLEHEHGEAKAFYAGLPKPSLIGIEATSYTWWFERMVAELKHELWVGDPAEIRARAVRRQKTDTRDAEHLLDLLRSQKFPRVWVPTPEERDLRQLLKHRNKLVQIQTSVRNQLHFLAMSEGLCRKQKLWSTPGRAKLEGLSLGPWASQRRKELLELLDGLEPRLEELNQAVKAEAARRPEAGELMKQKGIGPVIALAYILTIGPVDRFPNSRALVSYLGLNPGEHSSGGRQILGHISKQGNQMMRWLLVEAAQSAAQFDPELRCRYQRLKYRRGGPVAKVALARHLAVRLYWRLRQARSATPPVRMPGSPSSAVVDRGPSRV

SEQ ID NO: 277426 - protein, 453 aa, unidentified
MARTKREPQEILDEQHEQVLQRVCAIDVAKGFGQVCVRVPRADGRRGSKVFPVDATTGEVLRLGETLLGQGIEMVTLESTSDYWRIFYYLLEACGLPIQLVNARDVKNVPGRPKSDTHDCVWLAKLTERGMLRPSFVPPAAVRVLRDYTRTRVDLTRDRTRHWQRLEKLLEDALIKVTTIASKISTVSVRDMINALIRGERDPHRLADLARGSMRAKHRDLVRALDGRFDAHHAELATILLGQIDSLTTEIDRLTTRIDQLIADLPTPAPPGQHSDQAPPEHPGTGPGTPPAILHRLAGIPGISPQTAQVILAEVGPDMNRFPTARHLVAWARLSPQLKQSGAKHFGGKTSKGNPYLKGVLGTAAASASRTNTFLGERYRRIVKRRGKGKALVAVARSILVIVWHLLADPTATYHDLGADYYTTRIDKERRQRHLVQQLEALGLQVTLTPAAA

SEQ ID NO: 277427 - protein, 344 aa, unidentified
MTFYAALDVSVRTVAICIVDQEGVIRLERSVRSELPDILKVLSEFGEPIAKVGFEAGVLTQHLTYGLRAAGYEVVCMEARQVSAALAAMRNKTDKNDARGIAQILRTGWYSRVHVKSIESHYVRVLLASRKAIFNKCIDLENEVRGLLKVFGVKLPPRVYHGAFDGEARKTIEGDAALTDALVPMLDARLVLLRTFRDLDARVKRMAREDQVCTRFMTVPGVGPLTALTFKAAVDDPARFTSSRTVGAHFGLTPRRFQSGETDNPGRISRAGDADVRAALYIAANSMLMRSIQWSWLKAWGTRLIKTKGRRRAVVAVARKLAVILHRMWVDQTDFRWSNSEATA

SEQ ID NO: 277428 - protein, 337 aa, unidentified
MSVYVGIDVHRKRSQVAVVTEDGKVQLNKNTVNGAEPVLRLIGDLPPGTPVASGAAFGWSWLAELLEGYGFEAHLVHPLRCKAIASARLKNDKVDAAILAQLLRADLLPEAWIAPPAVRQLRALLRHRAGLVRLRTQQQNRIHAVVADFGYDRSGSYLSGPGRGWLAGLELPAVSRELVTDALAVIDGLVPLIERIDGELRQHAKADPRVKVLTELPGVGQFTALVMLAEIGDITRFPSARKLASWAGLTPTVRGSDLHVRHGHISKQGSAWLRWVMNQAAQTAKRSPEFAATYSGIAKRRGKKIATIAISRKLLTRAWHLLSEMQAAGADEPPRRS

SEQ ID NO: 277429 - protein, 367 aa, unidentified
MKKISTVATRQAKNFPPQKLTVGLDLGDRWSWYCVLDEAGKIRLEQRVSTTSKAMGEVFGALPRSRIALEIGTHSPWISRLLSELGHEVIVANARKVRLIAESRKKDDRLDAQTLARLARIDPQLLYPVKHRSVQAQADLTVIRARAGLVRARTALGNTARGLAKSYGERLRSCNVRNLNPEKAESLSPELQAALEPLLKAIESLSEHIVEYNERIESLAQQSYPQVALRKQIKGVGTLIGLTFLLTLEDPHRFRKSRDVGCYPGLQPGRRNSGQSEPQMHIRKEGDPYLRTLLVQGAQHILGPFGPDCDLRRWGLQLAERGGRNSKKRAIVATASKLAVLLHHLWVSGEVYKPLHNSSPTTVAAAA

SEQ ID NO: 277430 - protein, 446 aa, unidentified
MNQNQLDQKREWIKGKFIVGIDPAKDKHQAFMIDGSGYAVGKTFSFTHNAKGFHEQLWFKLSKYLESEFIHPDHLIFAVEAAIDFWQPLVDYLHRLGYSVVIVSPLTTKRSRSLPGHDFTKTDPKDARLVAESAFRGHYHRYVDYSDRIKALKTLSLSYNKLRKNLTQNQHRLRSTIARIFPEFLNIVPLDTDTARFLLSHYLHPKDFLNLDVTATAVKMLNISKQQHGRQTLNEIQQAARNSIGLPRESYEIISDRLSVNSWLSVIETLKQQMKIIADQLIELARQTPCFDILVSVKGISDLTTALFIAEVKDPSNYQHFKQIQKLAGLNLRLNDSGRYHGRHKINKIGNRRLRWIIYLMTKETAKYIPEVRIRFLKRKLKPCNYTKNIIACSSQLLQLIMALVKRNHPYEYLPQNQSIVWELEEQVQKKNRKRTKTKSRTSVTV

SEQ ID NO: 277431 - protein, 369 aa, unidentified
MTRALYVGLDVHKDTIAVAVAEDGRGGEIRFHGTVVNSADAVLRLTKALTKQGNTPSFCYEAGPCGYGIHRLLTKLGFECAVVAPSMIPRKTGDRIKTDRRDAEMLARLWRAGELTPIWTPDEEQEAMRDLIRTRKQAVDAVKTAKQQLLSFLLRHGLRYERGKYWTQRHRRWLAEMRKFRFPHQQLVFEELKRTVVQNEERVATLDQAIDDAIPRWHFAPVVDALRALRGVNTTIAATVVAEIGDITRFSNPRQLMAWLGLVPSEHSSGSTTRRGRLTKTGNALARTMLVEAGWSYRHPPKEGHPYLKRSAHLPQHIKDIGWKAQTRLCKRYRDLSRTGKPQPRVLAAIARELAGFVWDIARKTPLAA

SEQ ID NO: 277432 - protein, 343 aa, unidentified
MELHAIGIDLGKTVFHLVGLDSSGKVVVRKRCSRTQLLAYTANVRVQVIGMEACSGSHFLGRALRVQGHDVRLMPAQYVKPYIKTNKSDYIDAEAIAEAVQRPTMRFVPIQTEEHLDLQAVHRVRERWVMRRTAVVNQIRGLLLERGLPLPKGRSHVDHALPEILTDPALRLSGSLRVLLGQLQLELEQLTARIEQMDAVIQQTARENEACQRLTAIPGIGPVTATALVAAIGNGAGFRRGKDLAAWVGMVPREYSTGGKQKLLGISKRGNSYLRRLFVQGARVVMQYRTKQAPGLSVWLSQLMARTHQNVAVVALANTLLRMAWAVLCKNERYRVPLLATAP

SEQ ID NO: 277433 - protein, 345 aa, unidentified
MDVAYDGRQVVGMDLHRRRSVLVRMTMDGRKLGTARIENGPAALRRELAKAGRNPLVVLEATYGWYWAADVLEQSGAEVHLAHPLGVRAFSYRRVKNDERDAADLADLLRMGRLPEAWIAPAQVRALREVVRYRHKLAGQRTSCKDQVHAVLAKCGVPVTHSDIFGTGGGLWLDQLVLPEPYGAKVASLRALIAVLDGEIARLGQQSAQMLAAGPGYAALRELPGIGPVLAAVVIAEIGDVTRFRKPGQLCSWAGLTPRHHESDTKVIRGHVSKQGSRMLRWALTEAIQRQPEGAKPRTVKDAIVARRGKEAWNIARTAAARILLTQVFYVLRDGHVRRASIPAA

SEQ ID NO: 277434 - protein, 343 aa, unidentified
MEIRSVGIDLGKTSFHLVALGEKGKVLLKKKFTQKQLIAFTANMQTCLIGMESCSGAHFLGRALREQGHDARLMPAQFVKPYVKSHKNDFVDAEAIAEAVERENMRFVPIKTDDQLDLQSLHRVRERLVTRRTALINQIRGFLLERGIVFAKKPSRLRAAIPEVLENADENLTPRMRNLIAMLWSEWKDLEVQIDEMNSEMERIASSDAACRRLQQIPGIGPLVATAIVASIGNGAAFSKGREFAAWLGLLPNQHSTGGKARLGAISKRGNCYLRTILIHGARAVVFRSKRDRIAWGAWMTSLESRAPRNVLIVATAHKLARIAWAVLSTGQDYRAVPQEMAA

SEQ ID NO: 277435 - protein, 346 aa, unidentified
MWIIGCDFHPRFQQVAFVNTETGECGNRRLEHGNGEAERFYGALRGQVVRVGMEAGGHSLWFERLLGKLGYELWTGDPAQICAKRVRKQRNDVLDADHILGLLVEKQGEGFPRVWRPTLAERDIRQLVLHRHRLVQIRTRVKNQLQALAMNQQMCQKQKLWSKSGRAQFEALALPEWAARRRQDNLELLDELNRRTEPLDQAVKLQAAQRAEVARLMTHPGVGEVTALAYAMTIGDPRRFHCGKQLASYLGLIPSEDSSGGKQRLGHITKQGNALLRGLLVEAAHVAVRHEAELGRCYRRLAMKKNCSIAAVAVARKLAVRLWLMWIRGLDYGQMFFESGSHAGQA

SEQ ID NO: 277436 - protein, 392 aa, unidentified
MFFVGIDIGKNNHVASMMDESGKVVFKAFSFPNTSDGGHALFSKLTSYSSSTDDFEIGMEATGHYWLSVYSFLFEKKFLLHVINPIQTDGWRRGTEIRKRKNDIIDSVLIADLIRYGQFVETRLADEDLFSLRTLTRFRTYLVESISDLKRKVVCVLDQVFPEYQSIFSDIFGKTSKEILLQFSSPIDFESVSSQTLAGLLAKLSRKQIGSAKAEQLKAAASCSFGVTFAKSSFTFQLKALIEQIAFIEKQVKETETEIAGIMEKLESPITTITGIGNVTGAAIVSKIGDISKFDSPRKLVAFAGLDATVTQSGEFDAAHNVMSKRGSPYLRKAIFQAALVAAFKDPVLSAYYQKKRAEGKHHLTCVGAVARKMCNIIYAVMKNNQPYVPKA

SEQ ID NO: 277437 - protein, 482 aa, unidentified
MKKRTIFQQQSQELMQLYEEAANNKKILVVAMDYAKKEHTVLFCNGNGDILRKPFGVWNNPEGIKYLIEQVHKTCSYHKINPKHVFYGGEDCGSYTENFAQSIREQGYLVAGVNARDAKNQRENMQASTDRLDLLGIAHMLINRRGNCSPCQSGAYRNLRTLVRHRRKLVVLTTEQRNRMHCLVDRLFPGFLQERKSGLSPFHEPSLRIMENRFSAAQIKKRKYATLVNILAKAGAQKPEQKARQLQDYAGTVLQPPKEYITTWQTSLIQYIELYRCLKSNISTLEHEMAIWLAQTQGAFLMSIRGVAMVLVSGVTAEIGDPFTQKPVGNLVSYSGIIPRVSQSGGSESSASVGSVAKRCNRVLKDYLVQSASHIGLHGAADLMADHKRRDAAGQHANFGIARRYLRTAMYLMRNWQIYLPENLQKHSSMDERREYYQMIWPYLLNKWKKYDAHEAAFASENPLGQWRDMVQNVYKITLKIN

SEQ ID NO: 277438 - protein, 400 aa, unidentified
MISVGVDVSKGKSTICVLKPYGEIVCSPFEVLHVEKELEGLDNLLQKLDGEIRIVMEATGIYHLPILSFLQEKGYFVSVVNPYAMKKYAKDNSIRGAKTDRLDSSMIANYGIEKWYKLQKHESDEETYAELKLLGRRYRYYMELHVKALQELTHILDYVMPGIKKLFNSWDEASGKDKLSDFAERFWHFDLITSMSLDEFVDEYLIWAGEKKYHRSRSKAETVYELASGGIPTVPSGTPSTKMLVQEAVRVLRAVDNSLSLILSRMQELAKSLPEYSTVRAMGGVGDVLAPKLIAEIGDVRRLHSAKALIAYAGIDPPPYESGQFVGSNRKITKRGSSTLRKVGYEVMRVLKSHKAPKDDVVYNYILKKEREGKDKKLAKIAGLNKFLRIYYARVMVVYQ

SEQ ID NO: 277439 - protein, 341 aa, unidentified
MEHIAIDLGRRESQICVRNDAGQILHETRYATSELRSYLSQHRAGARVLVESSAEAFTVADWATELGHQARVVPSILVPALGVGERGLKNDVRDARKLSEMDCRMAVPSVHIPSAERRAYQARLTAREALVRVRTKLINTVRSFVRMRAVAPIRATPPTLARAVRAVLLRTPEGVPDYLEALLGSLEHLNAQIQQADRAVQEVAHGEPVCRLLMTMPGVGPVTALSFVSAIDEVTRFESASRVTSYLGLVPGERTTGFKTRRTAMTKAGPSRVRWTLTQAAWTLVRTQPHSPLGQWYEQVSKRRGKKIAISALSRRMAAILYAMWRDQRPYSAMRASSRHG

SEQ ID NO: 277440 - protein, 411 aa, unidentified
MNDLLQYLFVGIDVSKENNQVYAMNFSQEKLASFSTPNHQSGANLLEEKLLDILDRHHLSKIIIAMESTGIYSAHIATYLSASKFLFPFEVKVYVLNPKISRNYRHSFSDMDKTDPKDAFILADLARVGRCEKLTPFKGPQKIALQRLTRHRHHIAELLAKEKVYALNNVFLKFSEFKGILSNDFSKTAVELLLNFKSVDEIINVPLEELVEFVMTSSKNRFADSNQIALTLKAAARNSYRLDKMAYEPINLSLAASFNCISTYQTELKSIDLAILKQVKGLNQNHYLSLISIPGIGPVYASGILAEIGQIDQFDSDDALAKYAGITWRKSQSGTFDAEDTRMTKTGNVYLRYFITEAANLARIHNPVFKEFYQKKFDEVKTHRHKRALALTARKLIRLIYGLLSTDRLYK

SEQ ID NO: 277441 - protein, 346 aa, unidentified
MIIVGCDFHPSWQQVAIFDSLTGEIVESKLVNGNGEAERLYRSLPVPSLIGMESCGNSQWFIELVEQLGHTIWIGDAAQIRASYVRKQKTDRRDAAHILKLLMEGRFPRLWAPDAEVRDLRQLLIHRHKLVEIRTRVKNGLQHLALNRGLQRKSRLWSEAGQKALRELPLKGWAACRREDLQRLRTVLDEQIGQLDEAVKYAADGNQQAQLLMTQPGVGPITSLAFVLTIGDVARFKRGKQVASYLGLIPREHSSGGKQHLGAISKQGNRLARTLLVEAAQSANRLDEGFRKQYQHRCHSKPKGVAKVAAARRLAVRLYWMLRSNMPYPEIVRIEGSSRSPMAGES

SEQ ID NO: 277442 - protein, 360 aa, unidentified
MKKDTRDGSGLIVGVDLGDRFSRYCVLDRKGQVLEEDTVATTGKAFRKLFGDRPAARVVIEVGTHSPWVQRLLQELGHETITANPRYVRLIYSSGSKNDQLDAERLARLARVDPKLLHPIQHRGGAAQADRALLRSRNALVECRTKLINHTRGIVKSMGGRLPSCSSSSFHKRVRQDLPDELKPALTLVLDTIAALNVKIQRLETRIERLASKRYPETGLLRQVSGVGPLTALSYVLTVEDPQRFKSSRAIGPYLGLRPRQSQSGDVDPELRITKAGDSDLRRLLVGSAHYILGPFGPDTDLRRWGLALAARGKKNAKKRAVVAVARKLAVLLHHLWVTAEVYEPLRTTQPAIAAEAIPA

SEQ ID NO: 277443 - protein, 351 aa, unidentified
MNINHYIGFDVHKKSISYCVKAPDGKIVEEGRLRATHRVLREWAQQRTEPRHGAMEATLFSGWIYDTLKPFAGELEIGNPAMMKAIGAAKKKNDRLDARKIADLVRCNLLPSCYVAPAEMRELRRLLRYRNKVVDHAVQTKNKMSGLLMEVGAEYSKQRLHGKRYFTELMGELEEVPESVKDMLRFSRNTLEMFEATQRQILDRLQKEPLLKKRVKLLQSIPGVGEVTSLTWALEVCDPRRFASIANAVSYCGLTSALDASADKQKRGPISKQRNPHLQTVLIEAAKLAPRWNRQLAELHEREVKTGHRNRATLEVARKLVAYLLAVDKTGKPFEIRNQPVRSTGEETKVA

SEQ ID NO: 277444 - protein, 400 aa, unidentified
MRAVFGIDVSKTSSEVAILVNGEKVHGYTILNDAIGFNRLFGDLKTVHNPEIIFEATGVYSRRLQAFLEEYSYAYTRLNPLEAKKQLDSLRVRKTDKIDAEKLAKSQLVHNRKPPYVQEEVYQHLRDLSRFYQNMTEDLVRTKNRLHKVLQVTFPELETLLSTPTGEQYWNLVMAFPCKEFVLSLSQSNLCEIVRQSTSKRISEKRITYLTDKLIKLAKQSFCAVKNTSPMLEEVRYYAQELLRLSERRQVVLNDMVALAQPLPEYDILRSIPGIAETTATSIIGELGDIRRFQSSNQINAFIGIDLRHYESGNFLAKEHITKRGNPYARKILFKCIHNIASASHTNPCHIADFYEKRKRQSTIASTKPHTIASIHRLIRTMYYLITHNKLYDYSLTQNR

SEQ ID NO: 277445 - protein, 403 aa, unidentified
MRHVIAFDISMGKSYMVIYNAQKQCIFEKEIKHSKSEFEELQKKIHELTNETGKSPEIVFEATGIYSRQLERFMQDNQYTYCLLNPLEAKLQCDSLRIHKTDRSDAHRLAITHFTVTRRVSHGTNHLFHQLKSLSRFYSELDGELSMIRSRIHKVIQLTFPELEKMFTSKSDLFLNFVQLFPHPDCVLSLSKTIIKNRIRANTNKKISTIMAEKKAIQILEIAKNSYPAVSQNDVLCDQLKVYARRYQELLHQKERCINNMVHLAEQRAEYSIILSLPGIGPNTAVRLMAEIGDITRFANNKQLNAYAGIDIRRFQSGKTFYKDKINKRGNKHLRKLLFLIIQNMIKQRRYGRNHIIEYYDKLKTQPYNKCHKVASIACVNKLLKLLFHLITHDIHYDYRLTA

SEQ ID NO: 277446 - protein, 422 aa, unidentified
MAPQERVEYAALIGIDWADKKHDFCLGVVGTDKTEAGVMASRPEAVDAWVNQLRKRFQGRKVAICLEQSKGALIHQLMSVEFIDLYPLNPQALANFRKAFTVSQAKDDPTDAQLLWEYLAKHRNRLRVWIPEDVDTRRLALLVEDRRKMLDLRTKLSNKLTATLKGYFPQALELIGTKATSSMACDFLLRWTCLSQVKRCRDHTIKEFYTQHHIRNRRKIETRLELIRNSVPLVEDKAIVETSMLKVKTLCRQIACLNEDIDEYDRRIANLFEIHPESELFESLPGAGPALAPRLLVALGTDRERFGQADDVATFSGIAPVTIRSGKHIWVHWRLACPKFLRQTFHEFANMSRHHSVWARAYYGMQRDRGKSHHAALRSLAFKWIRIIYRCWKRHEIYDEAKYLMALKKRESPLAKFLAEAA

SEQ ID NO: 277447 - protein, 414 aa, unidentified
MLYVGIDWAVESHTVTLLTRPGEVLKSLVIANTLKGFLTLLDAIRRHIGKDKPAPTPGDVLFIIEDRNQRLVDFLLAQDFIGYLMEPSRMPGYRLRYRSSGNKTDPDDAFIMADVLGRDRDQLPTINPMNATVQTLKTLLMDREGFVRDQTRLINRLTACLRQYYPEALELFSDVAGKTALAFVAAYPDFAAAHRLSREQIQQFLTEHHCPQTKRLERIVELLAQEPIAAPAAVIETKRRLALHIIQQLQGVQATVAEYDAEIQRIGAENKEVQRFRGLPGAGSQIAGGLYTLFGDDRTRFGSAMAVQSLVGTAPRTIQSGKMRVVCFRFGCNGFYRTQAQQLALSALRVSAWAKQYYRGKRAEGKRHQHALRCLANLLMKIAFAIWRDQTTYDENRHLAQIMRHQLRQKSSMA

SEQ ID NO: 277448 - protein, 326 aa, unidentified
MLLFVGVDVSKAKLDVALLLSNGKFKSKVFANDAQGFKSLLQWLQLAAPGGLAEVHVCMEATGGYHEALACLLHDQGVLVSVVNPLLAKRFAESNGVRNKTDSGDAKCLALFCREKKPARWEAPSAGVRALQALVARLDTLLAMRQAECNRLDVAHDAVADSVRSVIADLDEAIAQVKAQITSTIDKDPDLKTRAGLLKSIPGLGDKTIPQLLAYIGRPERFKSVRALIAYASLTPLIQESGTSLHKHRGTHPMGHQELKRALYFPALVAGRYNPLVAAFWSRLKAQNKPGKVIVVACMHKLLAIAYGVLRSGKPFDANHLMPMAA

SEQ ID NO: 277449 - protein, 340 aa, unidentified
MNKNTVIGIDLAKTSFAVIELGRGGNVKRRKTFRRDGLKRFLVKHEPATVALEACGSAHYWGRWLEEHGHKPVLLPPQHVKGYLRGQKNDYNDAQAIAEACLHGAIRSVAVKSIEQQDEQAFHAIRRSLKVESTRLVNQMRGLLAEYGFTVPKSVSAFRRRVPELLEDAENGLSARFRMLLNRQWSRLKALLDEQAWYDQQLQQQVKEDDTCCRLTGIPGVGPVVASAVKSWMGDGQQFRRGRDASAALGLVPKQYSTGGKQSLYGITKRGDAYLRSLVVHGARAVVRTAKNKQDALSRWALAVEARRGHNRAVVAVANKIIRMAWVVVARQEEYRPAES

SEQ ID NO: 277450 - protein, 337 aa, unidentified
MEQYVGLDVSQETTSISVRQDGRRVWRGKCPTDPKALSEVIRKHAPHAVRVVFETGALATWLYHALQAEDLPVVCIDARHAKAALDMAPNKTDANDADGLAQIAEIGFYREVRVKGYGPMLTRTLVGARSQLLRISVQLSNQIRGIMKTFGLIVPKGAGRIFERNARALLETNEAVARVVLPLLETWQVVRARAAELDRQLIAAARTGSSYRLLMTIPGVGAITAVSFVAAIGVPENFKRSRAVGAWWGLTTRRYQSGETDYDGHISRRGDRYLRALVYEAAVAVLTRTRTDCALRSWGLKLKAKVGFKRAAIAVARKLSVIMHTMLKTGAAFAAAA

SEQ ID NO: 277451 - protein, 342 aa, unidentified
MMEISAIGLDIAKRVFQVHGADAAGRPVLRKKLKRRQVVAFFTALRPCAVGLEACATAHHWAREIGALGHDVRLIPPQYVKPYVKTNKNDVTDAEAICEALMRPTMRFAKAKNAEQQSVLMLHRARELLVRQRTMLINALRGHCAEFGITAPQGISRAGALISCIDEGDDRLPPLARRALASLVAQIKAIQAEIAGLEKELLAWHRSSEASQRLGVIPGVGVITATALVATVGDASQFRSGRQFAAFLGLVPRQSSSGGRDRLGRISKRGDGYLRRLLVHGSRAVLRWTRSRPQRRSPWLEGLLDRRPTNVVLVAMANKMARIVWAMLSRSEAYEPNRLATA

SEQ ID NO: 277452 - protein, 326 aa, unidentified
MNNCKEFAFVGVDISKSFFDVCFLDAKGQFVQQRINQNPKGYRQLANAIPEGAVCVMEATSTYHLPLTLWLYNHGIQVVVENPLKIKRFSQMHLQRHKTDKADARIIYEYGTTIVAQKVTLWQPQPVEIQELQQCDSLSRRLNKELTAITNTHEALAQLDVVNSEVKRIVNNTIKQLKTALHQLDEHMQKLIKKHYQESYDLLRSIPGVGPKTSVMLICQTSNFTKFDNVKKFLSYIGMSPRTYESGTSVKGKGHITKVGNGRLRSLLYMCSWTAKTCNPQCVSVYEKMHKKGKPEKVIKVAIAHKLLRQVFGVIKHQKPFSSNLA

SEQ ID NO: 277453 - protein, 397 aa, unidentified
MIAVGIDVSKSKSTVAILNGDGSIRAKPFDVHHTADELQALVSYIIGTSEAPTILMEPTSHYHYPLLKAFQEANLPVCLINPYQMKKYGDTELRKAKTDKRDSLRIAQYALEKSYSLVPYTPAAQKYEDLRFLSRQYSQRISTLTVAKVQLLSLLDETMPGITTILPLKSRDPDNCVLLRFIKRFKSFDMIRKMGKTRFLDSYQVLVKKTKDRFAGAKGLAIYELVLNSITTRGENPLSAMAQDQCVDLVSTSQKAADEINLQMRIIAETIPEYKVLLSMAGVGERLGPIILGEIGDIRRFHSGKALNAYAGNDAPPYQSGQFESRNRHISKRGNPALRKACFEVMQALKLTKPQDDPVYLFLLKKEQEGKPYNVAKMAAVNKFLRIYYARAMELYK

SEQ ID NO: 277454 - protein, 343 aa, unidentified
MNPTTIGLDIAKNVFQAHGVDQNGKVVVRKRFSRAKVLEFFANLPPCLIGMEACPGAHYWARELMKLGHAVKLMAAQYVKAYVKGNKNDGNDAAAICEAVSRPGMRFVAINTEAQQDTQMLHRIRSRLVAERTALINQVRGLLGEYGIVFAQGPSQVRRGLAVLLAEEDPRLSGMARELLADLNGQLLALDERIVNYDARVKAACATDERSAKLAELPGIGPLTATALAAAVNDGKQFDNGRQMAASLGLTPREHSSGGKQRLMGITKRGDTYLRTLLIHGARTVLRHAEGKTDRLSRWALAVQARRGANVAAVALANKLARIAWAVLARDRIYRADWAEQSV

SEQ ID NO: 277455 - protein, 340 aa, unidentified
MQTIRFGIDLAKNVFQVHGVDAAGRVVVQRQLRRGQMLTFFARQPAALIGMEACGSAHHWGRELQSLGHEVRLMPPSYVKAYVKRNKNDARDAEACCEAVSRPTMRFVPVKTVAQQCARAIHRARDLLVRQRTQSANAMRGLLYEMGLTGNKGAAGIAALVLRIEAADPAIPAALAGCLVALARQWRARGTEIAQLDKQILAEVRQDRAASRLMAIPGVGPITAHAVVAAVGEGRQFGSARDFAAWLGLTRKNHDTGGKHRLTGKISRAGDTGVRRLLVLGASSWLRQVRAKPGSASPWLRGILARRPVKVALVAQAAKTARIIWAMLTSGQEYRAPSAA

SEQ ID NO: 277456 - protein, 420 aa, unidentified
MVYLERGYNLKELPWSKIVSNSFLFKEACMILVGVDVAKDKHDCYIMTSEGEVLFKSFTIANNMEGFNQLYEKILSVIDNFDNVKIGLEATGHYSYNILGYLLDKGLTPYVINPLHSNLYRKSLSLRKTKTDKVDSHIIASMLMSDVSLKPYSNTLYHNEELKSLTRYRFTKVQERAKLKISISRLVTILFPELEKLVPTLQMNSIYALLYEFPSAHAISKAHLTRLTNLLNTTSKGHYTKDKAVLIREAAKNSIGSNMPAKSLELKHTIKLIKELTSEINKIEEEIKIIMNKINSPILTIPGIGLSTGAQILAEIGDFKNFSSPDKLLAFAGLSPSTYQSGNMYSSNTKMEKRGSKYLRFALFNAAIYVSYWEPTFSQYLKKKRVEGKHYYVAISHVVKKLVRVIFHLEKTNERYSTVV

SEQ ID NO: 277457 - protein, 379 aa, unidentified
MTSEMRQKDDTKTGRLLVAIEMSLSKWGLAAAVEGQPRKRVKTVVGGDYRALLEAVADFKARFKLSPDAPVVFCYEAGRDGFYPYRRLVEWGHAVWVIDSASIEVSRRRRNAKSDGIDADKLVELMQRKAGGEQRALRLVRVPDEGSEDQRQLPRERENLLTDRRRVLNQIESLLFVQGYREVPESSRALKGWLDQPRELGPQLRERLQRDVERLALLESQLTGVEKRLKELAHHEHAGNIGRVAWALMQLCGIGLIGAWVLASEIYGWRVFRNRKEVGSVLGLTPTPYSSGSDEREQGISKAGNKRARSLLVELSWLWLRHQPDSALSQWFKARFSGGGKRLRRIGIVALARRLAVALWRYTAQGVIPEGARLKGAGA

SEQ ID NO: 277458 - protein, 389 aa, unidentified
MSPQNDQSKKCFTAFEQASTMVAVVELSKKLWLVAGIVPGIDRHPLKKFEADENRLLALLHHWQQQAVRAGREIKRIVVAFEAGRDGFWLARWLRIRGIEAYVIHPTSVAVSREHRRAKTDRLDTEHLKRVVLGWLRGEPDHCRMVAIPTVEEEDAKRPNRERETLVGECTGIVNRVKACLARFGIRGFNPTLRKAADRLETLVTPEGARLPPLTLAEMLRDIARLRFLREQIKSIEKARVQRLRDAPATRTNAMVNLIARVFGIGIETADLLVHEILSRNLRDRRAVARYAGLTGSPDESGDRRREKGLARAGNARVRRGMVQLAWRFLGFHPDSALTQWYNKRAADGRGSTRKTMIVALARKLLIVLWRMVTTGEVPADLKLRRTTA

SEQ ID NO: 277459 - protein, 408 aa, unidentified
MEVVHPRCCGIDVHQASLAVCVAIKENGKSEKHKLRCGTTTAELLRLADWLHGHQVTHVAMEATGVYWKPVWHILEGQFELLLANPTQVQALRGRKTDFKDGERISDFLQHGLLQGSFVPPKPVQQLRDLTRSRTTLKQEQVRIGNRIRKVLEDANIKLSSVMSDVMGVSGRAMLRAMVRGESDPEALARLARKRLRGKIPVLQQAATGSLNEHHRFLLEQWLAHWDELTERIAKFDQRIEEQMRPFAAAVETWNSLPGIDRITAWTMVAEMGPNMNQFPTVAHAASWAGLCPGQDESAGKRRSGRTRRGNVWLRRALTQAAWGASMTKGSYFKAFYHRLAARKGKKRAIVAVAHALLSTGYMLLWTGRRFSDLGEDYFDRLDRERLTKRLVKRLEKLGHQVSIQPAA

SEQ ID NO: 277460 - protein, 349 aa, unidentified
MEQISRIGMDTSKHIFQLHGVNAAEKPVLRRKLRRKDMVAFFAGLEPVEIAIEACGASHHWARLLRSFGHEVKLIAPQLVKPYVKRGKNDAADAEALCEAMSRPTMRFVPVKTTEQQAGLMLLGVRDRLVRNRCQLTNAIRSFAAEFGLTAPTGDYHIPSLLDRIASDDDLPLLARELFAVQAAEYDRLRAQIAEMDEKLQAWHRANECSRRLAQIPGVGPIGAAMLIMKTPAPEAFQSGRQFAAWLGLTPKDHSTGGKVRLGTITRAGDEDLRRVLVVGATSLLRHVRSGKGRDRGALSAWLNQLLLRKPPKLVAVALANKIARMAWKMMITGQVYSSRPIPCSACAA

SEQ ID NO: 277461 - protein, 424 aa, unidentified
MKKHSNSLKQSEAPAKQSEAPAKRRKLGVVVERKPQEVMAELVAKLAEQLDVTIVPAAKENKGNRDAVGPNLDRLTVGVDLGDQWSNYCILGLSGETLAEGQFRTRKQEVAEFFQALATSRVVVEVGTHSAWVREVIAGFGHEVLVANPRLMDGSKRRRRKNDRIDAEKLARLGRMDPKSLHPIQHRSTEVREDLLVLRAREALVESRTKLISAVRGLVKSMGARVSNCSSPSFSQKAAAEIPEEVEETLQPLLRLIATLSEEIKTFDKRIDKLGAEKYMATQLLRQVVGVGPVTALGYVLTLETPLRFARSRDVGPYLGLVPRQEDSGEIQPQLGISKAGDRMLRKLLVGSAHYILGPFGPDTDLRRFGLRLCARGGKNAKKRAAVAVARKLAVLLHRLWASGEVYEPLGHGAPMKLVHTAAA

SEQ ID NO: 277462 - protein, 412 aa, unidentified
MTNGMRHWFAGVDWGSEKHQVCLLDEAGTVVGERVFQHDAAGLAALCDWLVSVAGDTSSVAVAIEVPHGPVVDVLLDRGFAVHAINPKQLDRLRDRFSPAGAKDDRRDARVAAAGLRTDPHLFRPLQVGDPAVIELREWSRLAEELQQERVRLANRIRQQLWRYYPQLLALSDDLTAEWILALWTMAPTPAKAMRLHEATIAKLLSRHRIRRLDAAGVAEMLRQPAITVAAGVTEAAILHLRSLVARLRLANTEFHQAERKLDELCAQLSQNATAAADGPCDAAILRSVPGVGTVILATLLTEAGDPLARRDHTALRTLSGVAPVTKRSGKTCIVVMRYAAQARLRQAVFHWARVAVMHDPTSRSRYEALRARGHSYGRALRSVADRLLGVACVLLRRRTLFNPNHGTSAAA

SEQ ID NO: 277463 - protein, 433 aa, unidentified
MQDVQEEPLFVQRVAGLDIAKAGVEVTIRVPSDTRPGRRQQETRTFGTTRRELLDLADWLRSWGVTKIGMEATSDYWKPVFFLLESRGFDCDLYNAAQVKALPGRPKTDRADSVWLAKITERGMISSSFVPPEPIRRLRTHTRYRRHLTQARTAEKQRVEKLLEDGHLKLSSVISDIHGVSGRDMLDALAAGQRDPRALAQLARGSMRGKIRRLEEALECSFFTDEHAAVLAMMLAVIDHYTAQIDQLTATIEELAEPWLHQIDQLDAVPGIGTICAQDIIAEIGADMAVFPTASHLVSWAKWSPQVRQSAGKRKGSNATGRGNPYLGAALGEAGISAGNTQSFLGAKYRRLTRRMPRKKALVATGNSMLVIVHALLSDPAATYTDLGADYYEQRMHARRQARNHVKSLERLGYKVTIQAIDPATGELLTAAS

SEQ ID NO: 277464 - protein, 321 aa, unidentified
MTYVGIDVSKATFVITYSSVKTNKTRTFKNTVKGVHEFIQTISPATHHCVLEATGNYSALLVYLLSEAGITVSLENPLKIRNFARVMLTVTKTDEIDARMIALYGERMHPAPYKLRSGSILILKQKRTVLRQLKKQLVATRNLKGSMEVLPFFDPQCKKTIEKTIVFLEKQIKGMEEELASLAQGEYRKQMDLLTSIKGIGVTLASALIVATGGFTYFDNARQLTRYLGLSPTYQQSGTSVNVKGHINRNGDSTLRSQLYVAAFSSLRCNTECKACFNRLRSNGKPGKVAVIAVANKLVRQAFAVVTHGKPYVDGFKSEKP

SEQ ID NO: 277465 - protein, 355 aa, unidentified
MDIVNKLDFTGQHIYVGLDVHKKSWNVSIHSANLEHKTYSQPPDPQILGNYLRRNFPGAQYHCVYEAGFSGFWTYDRLQEQGIDCLVVNPADVPTNDKERVTKSDRVDCRKLARSLRNGELRGIYVPSSVKIEDRGLLRIRHNLVKKQTRCKNQIKSLLHFYGKSIPDEMVLSHWSRRYIQELENIRMERPAGATALQTLLSELIYLRDLIAQTTREMIALSRTEDYRESVQLLKTIPGISTLCAMTLLTELVDISRFLTFDHLACYVGFIPNIHDSGEKERHTGLTNRRNPTLRTLLIEAAWITVRKDPAMMMAFNHLCIRMKKTRAIIHMAKKLLSRIRFVLKKRTAYQMAVV

SEQ ID NO: 277466 - protein, 453 aa, unidentified
MRIMPRKNTRTRKKKAVASQRQFNSNAAGIDLGATVHYVAVPPERDSQPVRHFGTLTEDLEALADWLKACDVTTVAMEATGVYWIPLFQILEDRGFEVYLVNARHVKNVPGRKTDVQDCQWLQYLHSVGLLNASFRPPAAICAVRSLMRHRESLMRTACQHLLRVQKALDQMNVQLHHVVTDITGVTGLAILDAIVEGERDPKVLASQRDPRCKKSEAQIAKALHGDWRAEHLFTLRQSLEAWRFHQRLMTDCEQQIQEHMNALDDHGDGPSPSPAKKGAKKVDEPMRQHLFNKFGVDLTAVEGVSIQTSLAFLGEVGTDVSKFATAEHFGSWLGLCPDNRITGGRTLAAHTRNVSNRLATALRMAAQSFHRSKSALGDWFRRIRAKLGTKAAVTAAAHKLARILYAMVKHRTPFDPGRLGNPEQTRARKERFLRRQAEQLGFTLTPVEGEVS

SEQ ID NO: 277467 - protein, 438 aa, unidentified
MSEKKTLQHELRGGQGPVPVKSKRNKLPDRPEQLDRQVFEPNAAGIDIGAREIFVAVPEDRDDHPVRKCATFTGDLNKMAEWLVSCGVTTVAMESTGVYWVPVYDAVERHGIKPCLTNPRNMKNVPGRRTDFHECQWVRQLHSLGLLHSSFRPDSQVCAVRTLMRHRNDLVTMASEHIQHMQKALTQMNVQFQHVISDLTGLTGLAILDAIVGGERDPAVLAKLRDPHIKASEETIRKSLEGNWLAEHILALKQRLSLYRSHRDLIDECDKEIEKLVAAFEPRVDPDEKPMPEDRKQKQRKRKKKSGSPDFDMRTEAYKLFGVDLTQIPGLMTLVFMLFSEVGRDMSRWPTAAHFVSWLGLCPDNDISGGKVLWRGVRRTKNRAGTLFRLAAHSLHHDQTPMGDYLRRMKAKLGPAGATTATAHKIAIIFYTMVKNQG

SEQ ID NO: 277468 - protein, 332 aa, unidentified
MTSSIIHIGLDISKRFLDLDLPNSSASLPYDPKGCKTLIARLRALKASVQVICEATGGWEHQIVAALHEANIPVSVVNPRQVRDYARSMGKLAKTDKIDKQILTAFGKVVLPRPTPPPTALQAEISAWVTRRQQLRGMLAAEQCRMMPGLPKAVAKSITASIAQLTKELEGITAQLAKLIEEDAQLAAGKERLCCFQGVGFVTAAVILGHLPELGKVDNNQIAALAGLAPFNNDSGPRRGLRHISGGRHSVRSAIYMAAFNASRCNPVLKPFYDRLRAKGKAFKVAIIAVARKLLIALNTAFANPRFTPLITTPECSPRTPAAASGAGFGGA

SEQ ID NO: 277469 - protein, 419 aa, unidentified
MNKLFIGVDVSKNDYEVCFLDGAGEKTRKTFTLRNNNDDSLKLVEAIAADCKSLEASKVFIGYESTSVYGFHLQYFLADSKELAPFHPTIICFNPKIIDAFKKTLGDLPKTDKMDAFAIAERLRFGRLPDSVPADFRYLALQRLTRHRFHIIESIVREKSYYMSNLFLKCSGLCQSNVFADNFGATASFIVEEFSDWEDVANMSLEELSSLLIEKSRDRFDDAEQTAKKLQRAIRSSYKLSPNVDNSLNFVLRSCLDNLKALETQKKAVDKAIQKEVAYLKNEYTCLTSVKGIGPVIAAGLISEIAGVHRFDNDNALAKFSGIYWNSYQSANFSADETPLRKQGNKYLRYYFIQAADQLRKYLPEYAAFYHRKFKESKTHHHKRALILTSRKVVRLVFALLHDNKLYSPTGKGVDVTTP

SEQ ID NO: 277470 - protein, 387 aa, unidentified
MQKPHDNSKASLAAFMQDNTLIAVIELSLSSWLVAGLIPGASREPLKKLEPNPEELLKLLHGWRDEAIKAGRLITRIAVAYETGRDSFWLARWLRERGIDAHVIHANSVTVSREHRRAKTDRLDTAMLKRGFLGWLRGERGHCTVAIVPTMEEEDAKRPHREREGLVHEQTRVVNRMKSALIQFGVRNFNPKLRKASVKLETVRTPEGKSLPPNTIAALRRDMERLKIIKQQIKAIEQARLQQFEQKPEAVANRMIYLLVRIYGLGLETADLLVHELLSRTLRDRKAVARYAGLTGSPDESGSKRREKGLSRSGNARVRKIMIQLAWRMVKFQPDSALVQWFKQRTENAKRSRKPMIVALARKLIIALWRYANDGLIPAGFRLHSAA

SEQ ID NO: 277471 - protein, 348 aa, unidentified
MSKISQYVGLDVSLKETSICVIDEAGKIVWRGRTDTTPEAIASAVKQHAPHAVRIGLESGQLSTWLFHELKAVGLPVICVDARHAKAALSLKVSKTDANDALGLAQIMRVGWYREVSVKGLDCQAVRTLLVVRAQLVSQVTTLKNCVRGVLKTFGLVLPKGLRSQFPGRVRAAIDGHPVLGAIIEPTLLVLEATRAQLIVYDRAIIQRARSDDTARQLMSAPGVGTVVALAYMTGVEDPARFKRSSSVAAYFGMTPRRYQSGEVDRAGHISKCGDGMVRGLLFEAAKVLLSRSARPSALKTWGEALGKRIGPKKATMAVARKLAVILHRMWITGTTFQWNAEAASLAA

SEQ ID NO: 277472 - protein, 352 aa, unidentified
MAKGTKLDFTGQHIYIGMDIHKKSWSVSIHTEQFEHKTFNQPPEVEKLTNYLQRTFPGATYHSVYEAGFSGFWIHDRLTEEGIHSMVVNPADVPTKHKEKAGKADKVDCRKLGRNLRSGDIKGIYVPSRVQTEDRHLIRTRQSMVRKQTRCKNQIKAILFFYGILIPEEGHWSRNFINWIEAIRMERTSGDLALKAHLEELKHLRQIIASLNKASLALSRTDTYRDKVLLLRTVPGISTLTAMTLLTELCDISRFSSLDKLASYAGLVPDIKSSGETEYTSGITHRRNPALRAVLIEASWVAARKDPALIMAFHKFSLRMKKTAAIVHVARKLLNRVRFVLINQERYVPAVV

SEQ ID NO: 277473 - protein, 411 aa, unidentified
MSDSIFVGIDVSVKSNKVCILDSLGNRLAKMTVHNNSHGSSQVVDRVTDILCKTGCTKVSFGLEATSVYGEGLIFYLKQDKSLKNYDTKVYLLNPKQVHNFKKAYSDLPKTDDVDAWVIADCLRFGRINLSETYFDERHKALQRLTRVRYHVVQNIVREKNRYLTNLFLKFSGLYQENLFSNKFGATAMEISNGAFSLDEIAHMPVDKLAQFINASGKGKFADPETLAANIQKAARSSYRLPKTIEDSVNRVLAVSTVSIKSYLEQLKSLDKSISALMETIPNTLTSIKGIGPVYAAGILSEIGSISRFKDQASLAKYAGLSWSRYQSGNFDSDNTHLINSGNRYLRYYLIEAANLVRRHDPEFKRFYELKYRETPKTPHKRALALTARKFVRLVYALLRDQRLYIPPRVE

SEQ ID NO: 277474 - protein, 413 aa, unidentified
MSTASSPARFVALDIHRKYLVVGAVDAGQQIVLTPRRFGFEAFSAWAPTHLGPSDAVVLEATSNAWLLYDQLEPLVGSVTVAHPLAVKLIAAARVKTDSRDTIKLAHLLAANLVPAVWVPPVHVRELRALVSHRKRLVNQRTQVRNRLHAVLHRHNLTLPPGKPFAAHQQQWWLTLDLSSSEKLRVQQDLSLLHSLEELVAAVDAELGRLSTCEPWVKQVPFLVQLPGLGVLSVMSILAAIGDITRFPSAKKLVGYAGLGASVHDSGETHQGGHITKEGRRDLRGVMVEAAWVAVEHHPHWKAQFERLSKRIGKQKAIVAIARKLLVAVWHVLSEQQADTNAEAQAVARKLMNWISHHGVVPGQHRDRLLLLYQHLDELGLSEELEEIDYYGTTYRLSLRQQLLREAQKRKSS

SEQ ID NO: 277475 - protein, 428 aa, unidentified
MNEADRTRLEEFRQFRKEIRGSAEYLLVGIDVAKDEHYAFFGTATGKTLFRRLVFENNLEGFRKLLVQAEAMKVQGGLKKVVFGMEPTANYHKPLGEHLIRCGRQVVLVSGVAAHENRKTLDGRWDSNDSRDAANVADLVSQGKCMFYEFPVGALQDLRNLLSLKRRFKRVEHGYRVRIRNHLVAKYFPELDRYYDQSPSTSLAIVRWCLDPSEIAGLEYKEFVQRVGSGQRRLSQENRLQAIWKMAVDSVGCEVGPVVEFEAQVMVEGLKQIQEAIQAIEEKIHEACSQFPEYEFLLSIPGFGPDVSSKVLGAIGDPFRFQNGKQVLKMAGLDLNAKRSGKTSASAIPVISKKGKADLRYALYQAALIASIRNQGFIVYYTHKLRGREKEPGIKTKMRVKLAAKLLLIAWTLMKKKEPFNPDYLAVE

SEQ ID NO: 277476 - protein, 311 aa, unidentified
MTDDTIGIDISKATLDIHRLSDGKMMSFSNCPAGFKEFTKFCAQTSVTRVVYEATGAYHSGLERALGALLPLVKVNPLQARRFAQAQGVRAKTDAVDAKMLAVMGNAFVLDPDEPATKLQHDLKELRAFRSGLIKDRTRIMSRQKTQTLSIICRQSKARLAQVDKHIAEIDVEVNRLIQSSDTMARSMKILRSIPGIGAVCASTILIEMPEIGRMDRKQVASLTGVAPMTRQSGKWRGKSFIQGGRKVVRNALYMPALVAMRFNPDLKVKYQAMIKTGKPPKVALTALMRKLIELANALIKADRNWEEKRA

SEQ ID NO: 277477 - protein, 375 aa, unidentified
MQEKVRFLGLDVHAETIAVAVAEPDGEVRSLGTIPNRADSIRKMIKKLGPAEKLKACYEAGPTGYVVYWQLAELGVECEVVAPTLVPVKAGDRVKTDRRDAEKLARSYRSGDLTAVWVPDEGSEALRDLVRAREAAKQDQTRARHRLTKFLLRSGQRPPSGVRSWTRPYLIWVAQLRFSQIAQEFTRQDYLHEVEHMRERVKRLEQAITEAVKLASPALQQVINDLQALRGIADISAVTIASELGQVSRFDSARQLMGYCGVVPSEDSSGKRTRRGGITKTGNAHLRRIVVEAAWSYRRPPAIWYGLRRRQESISAETKEIAWKAQHRLHKRYMKLGAAGKDPRKIVTAVARELLGFIWAIGTRAETVSKQQVAA

SEQ ID NO: 277478 - protein, 339 aa, unidentified
MKYVGVDLHKKTISVCVVSQARETLASRRLFCDDEDSIANYFAGLGPYCVVVEATASYEWFVRLVEPTATHVALAHPGKLRIIAESTRKSDKLDARVLAEFLALDMIPPAHRPTPRVRAHRSLVRHRQHLQQRMTATKTQLRRILSDYNADRPDLFTRIGRQALAGMELTPTDRFRCDELSDLLDFLQLHLEQANQRLRLFAGEGADPEQEARRLLRTIPGVGEVTSEVVLAELGDVRRFRSAKQAVAYAGLAPGQRESAGKRKDLAIEKKGSRLLRWVLVESAWQVVRYDARWRGVFEALAKRIGKKKAITAVARRLLSVMVALLKSGQAYQRAAAIK

SEQ ID NO: 277479 - protein, 416 aa, unidentified
MTYRIAAIDIHKKVLMVVVATAAAEVADAAGEALEFSCRQFGTGALERQRLASWLQQQGVTEVVMESTAQYWKAIWLELEPHFPKLHLAQAQSNRAPRGRKNDFRDAKRLARRLLAGELSLSYVPEPEQRLWRIMTRTKQQLVRERIRIRNRMEALLEEMQIKLDSVISDLLGVSGRRILKALSEGETDPNRLAQLGDERLKCSQAELADALRGNPSPTHIGVLKLYWENVELLDRQIADLDRLVAQALKPYEEAVQRLAEVSGFGVDSAQQLIAEVGVLADAFPTAGQFSSWVGTCPGSNVTAEENHSSRSPKGNKFARRLLNQAANAAIKKKGSHFQNVFRRFVGKLGYQGAVWAVAHRLSRLVWLILNKQIRFVEQGEETNPQAKLRRAQKLARALRRLGYQVSLTPIQPAHA

SEQ ID NO: 277480 - protein, 446 aa, unidentified
MLHNLVARLSQINFQSTPLPLKGGAIALNKLFVGMDISLDDVKVHILDQDGNDACSRFSVDNNPSGCNILVSHILDCCNKYNVQKVFIGLESTSVYGWHIQYYLADHASLKPFNPSVTTFNANTVKAFKKSLGDLPKNDWVDAFVIAEKLRFGRLPKSCPVDFRYLALKRLTRHRFHIVDSIVREKNYFLSNLFLKFSGLCQIKVFSNNFGAAATEIFNEFLTLDDIAARPLEDLIAFLVDKGRDHFNDPNATAKLLQDAVRKSYRINANVNDSLNFVIKSCLDNIQYLEKQKKASEKTIANEVKGFKNQFLCLTSVNGIGPTIAAGLISEIGGISRFDNDNALAKFSGIYWSEYQSADFKAEDTYLKRTGNEYLRYYFIQAADQLRKYCPEFSQYYARKFNESKTHKHKRALVLTARKAVRLVFALLREEKLYKPPAMKGDDCKY

SEQ ID NO: 277481 - protein, 345 aa, unidentified
MAERDAVVVGVDTHADIHVAVVLSSLGARLGSRFVATTPTGFGELVDWASGFGPVRCFGVEGTGSYGAALARHLGAAGHVVVEVDRPDRRTRRLKGKSDPVDAEAAARAVLAGTASGCPKAGDGRVEMIRCLRVARRSALKARTQATNQLLALVLTSPEELRASLRGMSLPRLVQVAARFRPGPLLDPAAATKLALRHLARRHAALSAEIAQLDRALAQVVSEAAPGLLALPGVGTDVAGALLVAAGDNPERLSSEAAFARLCGVAPLPASSGKTNRHRLNRGGDRIANNALWRIVLVRMSSDPRTRNYLERRTKEGLSKKEIIRCLKRYVAREVYRRLVGVDEQ

SEQ ID NO: 277482 - protein, 342 aa, unidentified
MEEYVGFDVSKEETSFCVMDETGNILAEGKAFSDPKSLFEAMREHTLCPKRIVLETGTLSNWLARGLHKYGLAVDVIDARQDHAVMKLQHNKTDANDAILLAEIARTGFCRPVSVNSEDAYKHRILIKARRHLVCQRRDTQNAIRGFLCALGIRFPKGSGKLADRVQAALAERPDLKVMIEPLLASVEALKIQIRHLDEDVLKQAKASKASQLLMTIPGVGPITALAFAATIDDATRFEKSRAVGAYLGLTSRRYQSGEMDYSGRISKFGDGLLRSLLYEAANSLLTIVRKSHPLKDWARRIRKRSSHKKACVALARKLAVIMHRMLITGEAFRWPEKEATA

SEQ ID NO: 277483 - protein, 452 aa, unidentified
MEEEKISMEIVNPQAAGVDVGSRSHWVAVGQKEKDVREFGVFNHDLFEMADWLKEKKVRTIAMESTGTYWQNLYAVLIAKGFHVILCNGKFTKNIKGKKTDIKDCQWIQKLHSLGLLSSSFLPDGKTEQLRTYCRQRSNLLHLSASTSKKMQKNLRLLNLRLDVVVNDICGLTGLNIIRAICNGETNPEKLASLRHGNCHKSEKEIAMALQSNGRKDYLFALKQELDTYDHLQKKISECDEMIEQMLNEIIDNDDNKRQHFIDSKAYKKINKNTPKNIDLNLKSYQMFEGIDLLAIEGMSYSTVLALMSEIGIEGIRKFPTAKHFTSWLRLAPNNKVSGGKILSSKVPKGSNRLKIALRNAANAIGNLKDSTPLRDFFQRINFRKGRVSAISATARKLAVIIWNMVVKGIPYINPEGYLFLDQKRKLGIVKRIQKQIDKFELTNQDLKFVNN

SEQ ID NO: 277484 - protein, 320 aa, unidentified
MESKNAVVYAGIDVAKATLQLHLQSRQSEFANSKAGLGQLLKQLQKVPEVHVICEATGGYEQAMVRTLHAANVPVSVINPAQVRAAAQARGQRAKSDPIDAEGLQDYGRRYQPTPTPPTSATQDQLVALTQWLKQLVQGQALAKTQAEHHQHPFVRRQHAKLMAHLRSQIEAVEKQIEALLEQDAVLQQRVNCLDDIQGVGPRTAWLVLAHMPELGRLNRRQAAALAGLAPWTRDSGTMKGMRCIGGGRPEVRVALYMAALSATRSNPVLRGLYQRLRAKGKLGKVALTAVMRRLLIYMNHQLKDLLSKTHNQNIVEVTA

SEQ ID NO: 277485 - protein, 337 aa, unidentified
MSVYVGIDVHRKRSQVAVVTEDGTVQLNKNVVNGSEPMLRLIGELPSGTPVAFEAAFGWSWLAELLEDYGFEAHMVHPLRCKAIASARLKNDRVDAAILAQLLRADLLPEAWIAPAKVRQLRALLRHRISLVRLATQARNRIHAVAADHGYDRSASYWTGPGRGWLAELDLPAASREIITDCLAVIDGLAPVIDRIDGELHAHAKADPRVKVLRTLPGVGEFTALVMVAEIGDISRFGSARKLASWAGLTPTVRGSDLHVRHGHISKQGSVWLRWAMNQAAQTAKRSPEFAASYAAIARRRGKKIATIAIARKLLTRAWHLLSEVQAADAGTPPRRP

SEQ ID NO: 277486 - protein, 355 aa, unidentified
MNSEKYIGLDVHQATISVAVLDSKGKLVMESILETKAATILEFFAGLRGTLSVTFEEGTWAAWLYDLLKPHVAKLVVCNPRKNALLKQGNKSDKIDARKLADRLRLDDLKPVYHGETGVRTLRELARSYLTIVKDLTRVMCRLKAVYRSWAIPCAGRDVYYTRHRAEWLGKIKEAGVRRRAERLYQQLDMLQYLRQQARRELLAESRKHAITVKLRQIPSLGPIRSALAVALIQTPHRFRTKRQLWAYSGLALETRTSAEYCYVKGGLRRSKKQISIRGLNKDHNHDLKGLFKGAATRASVLPGPFQDFYQRSLAKGIKPTMARLTLARKIAAITLTLWKKGENFDADKLKSQAA

SEQ ID NO: 277487 - protein, 337 aa, unidentified
MKKYAYYIGADVSKKTIDISVLKGKEKLFHLRINNDEKGFKALKKELQKHGILAKKSILCLENTGFYGYSFSCWAVENAYPVWIENAIAIKRSLGLVRGKNDQVDSHRIALYAARFEDKCKLWQPPRKAVQRLQQLIATRTRLIESRNRLKTPLKELSFAFSKNQNKEVETCCKAAIKGIEKSIDKVEEKIDQLIKSDTQLSHMKKIITSVDGIGLQIATALIVATNEFKELKNQRKMACYAGIAPFEHTSGTSIKGRTRVSHLANKSLKTLLHMGAISAIKNSEEIGAYYRRKVEEGKPKMVVINAVRNKLVLRMWACIREDRMYEKTYTKNLAES

SEQ ID NO: 277488 - protein, 418 aa, unidentified
MAFKIFRKNCCGLDVHKTWIYACIGITDTNGLTEYRQARFSSFSKGLRELADWLAKYSCFEVCMESTGKYWIPVFNILEKSCFVTLAHPKYTKPQKGNKTDRKDAKWICDLFMCDVIRPSFIPSPEIRQLRDLVRYRSKLTNMLVGEKNRAQNCLTVSNLKLDDVFSDVFGKSARSITQYILDHPGETFDVAPFVDRRCKAPLEEIQAAVDGAVSPEQAVKLRQCLAHIDELEAHRKEIEQEIFLIAEPFSAVLDLLRTLPGLDKNPMTAIAILSEIGPDMSVFPSSKHLVSWAGCCPRNDQSNSKVKSRRISTAGSYLKPLLVQVANALIKSKKHPEFKERYHRIKSNRGHKKAVIAVCKMLLTAIWNMLSKLEPYNPSGFLEHRPVNEKKVLTKSQALELLRLRGYTITDDTVDVA

SEQ ID NO: 277489 - protein, 348 aa, unidentified
MKQVSVIGLDLAKRVFQAHGCADDGTVMFRKKLPRSRLLPFLASLPNCVVAMEACASAHYWGREIGRIGHEVRLIPPAYVKPFVKRQKNDAADAEAICEAAQRPTMRFVAVKSEEKQALAVAFKARDLLVRQRTQTINALRGHLAEFGLVAPQGVAHASSLMAHVEAIQCSLPEGVRSMCLILAMTIKSLSENIRVLNTRIAVRARHDAVAKRLMTIPGMGPIIATAIEALSPPVGTFKCGRDFAAWMGLTPRQHSSGGKARLGRTSKMGQRDLRRLLIVGASSVVRWAAKHGAPQGSWLARMLARKPRMLIAVALANKMARIAWALMAKGGVYNPIVPLPAEAAVAH

SEQ ID NO: 277490 - protein, 595 aa, unidentified
MLPQSPSASQAPRRFGVGIDTSRYGHYAAFLNEQLQPAAAELQFPESAAGYALLRGRLDSLTRRHGPAHFVVRLDAAGQYADNLRHFLHGLASPAAGAVGAARFSLTLSCGDPQRNKNYRAALFGSKKSDPVEARAAARFALAERPSTDIPLSQELRILRQVAGRLQAVVRQRTRLLNQFHHLLALTFPELALLTKELAAGWVLELVHRYPTAPLLAAAPPTDLGHIAYLPDRHIAPLLEHARASVASLAGATVAELVREQVRQLRDSGARQKRLENLLVTAYRALPEANHLDSIPGFGAVTAAVLTACTVAIERFATPAKYVAFFGVLPVEVASGVERDGQARAPRRWAMSRRGNDLVRRYLWMAALSAAQCSPAVKALYARVVAKHPQHKAVAVGHAMRKLLHLAFAVWKTGRPFDRDHYPWQTPTHVESSDNGMSPAPETSDNTRSQEGQAAGHKPVRMPAQPVVTAARTDTLADAAAVGEGTYLDFAHLKRQLPLARVLDQLGLTARLRGSGPQRRCACPLHRGDARGRTFSVNLDANVWQCFAQECGRKGDVIDLWAAVQGLSLRAAALELVQTFGLEPAPCGGTEKRHG

SEQ ID NO: 277491 - protein, 371 aa, unidentified
MYIVGIDIGKNHHEASIVSPEGKQIGRSLRFATTHKGADSLMSFIFKNIGNSPCVFGMEATGHYWYPIYSFLKAKGYTICVINPIQSDSLRKMYIRQTKNDSIDSFLIAEVIRFGQFGTTSMADENILAMRQLCRYRDSVISSRTEIKLRIGTIMEQIFPEYEKQFSSLWVSTSMGILEKYLTPENIENAPIDELFEIIKDKSHNRLTKAKAISIKEAAADTFGIKIAQDAFSFQLKQLIDRMNFHDKQIEALDIEIMKYYEQFDCYLHTIPGIGIIGAATILAEIGDISRFKNSSALVAFAGIDPTVRQSGEFNSTHNHMSKRGSPYLRHAIFLAATTCSFHNSPLNAYYKKKRDQGKHHLTATGAVARL

SEQ ID NO: 277492 - protein, 342 aa, unidentified
MQITTIRLDIAKNVFQVHGIDAAEKVIVRKQLRRGQMLAFFKALQPCLVGMEACATSHYWARELRKLGHQVRLMPAKDVKAYVKRNKNDAADAEAICEAVRRPTMRFVQIKSPEQQGRLMQHRARDLLIRQRTQVINGLRAHLAELGITAAQGNAGLKELLAIVASNEDERLPADAHAVLIVLAAELQAMQTLITSIEKRIMAQHRSGAESKRLETIPGIGIVGATAIAATVTDPEAFRSGRDFAAWIGLVPRQDSTGGKQKLGPISKQGDRYLRRILVVGAIAVLRRARQQPERHPWLTQLLARKPFRVVAVALANKMARIAWVLLAKGGTYREPALAAAA

SEQ ID NO: 277493 - protein, 351 aa, unidentified
MSEYIAFDSHKRYTWVDREDHSTGNSTCHRLEHAPGAVRKYLNGCEPGTAVAVEATGNWYWIIEEIEQAGLQPRLVHPRKAKLMMGQINKTDKLDAQGLNRLQRNGTLPTVWIPPRPLRDLRELTRTRLVLVAQRTRLKNRLSATLAKWGTPASEYSDPYGKRGRAELENHLQRLPEQTRWVSGQLLAQLDFVSAQVRQLEQRLDELVEITPEMQWLLTMPGVGVILAATIALEIGEVQRFPSAMHLASYAGTTPRVHASGGKVRYGSLRADVNRYLKWAFAEAANSVAVNHKSHPERHVSQLYRRLRQRKGHPKAIGAVARHLAEAAFHVLRQKQMYQDPALGRGRTSQA

SEQ ID NO: 277494 - protein, 371 aa, unidentified
MELIYQRCCGLDVHKRIITACIRLLEENGSIHQETRTFDTMTRALLEMADWLAAAGVTHVALESTGSYWKPVYNILEGRFRLVLVNARHIKHVPGRKTDVKDCQWLAQLLQAGLLQGSFIPERPQREFRDLTRHRSQLVAEKHRAANRIQKILEDANIKLASVASDILGASGRDMLRALIRGETDAEKMADLARRQLRSKIPQLRPALEGKVTEHHRFMLGELLHHLEYLEGRIEEFSRRIEEVSRPFAPAIAQVATLPGFDQRSAQNVVAEIGADMDTFPSAQHLSSWAGVCPGNHESAGKRKSGKTTKGNRWLRSALSQSAWAASRKKNSYFQAQYRRLAGRRGKKRAIVAVAHSLLTIIYHYPLGNEL

SEQ ID NO: 277495 - protein, 354 aa, unidentified
MIIIGCDFHTRYQQIAMARAETSELLVERRLDHESGEAHAFYRNLQNSQEPVRVGIEATGPIHWFERLLTELGHELWIGDSGKIRASEVRKQKTDERDARLILDLLLAKRFPKIWVPTPAERDLRQLLWHRHKLVCLRTMLTNQLHFLAMSQGLCRKQKLFTKKGRAELGSLTLGPWASRRREELLKLLGQLDPPIAELDRAVLEEAKRREDAVLLMTHPGIGPVTSLAFVLAIGPITRFHRSKKIASYLGLNPSEASSGGKRRLGAISKQGNTMVRWLLIEAVYPAVRLDPALRQDYQRLKFRRGHAVAKVAIARKLAVRMYWMLRSGADYAQLVRRQGSPAATLVSASSSLG

SEQ ID NO: 277496 - protein, 343 aa, unidentified
MQDVATVGLDIAKQVFQAHGADASGETLFNTKIKRENVLEFFSKLKPCLIGMESCATSYYWARQLLEFGHDVRLIHTSYVKPFVKRGKTDANDAEAINVALTQKTMRFVPVKTLNQQAAITIFRTRSLFVSQRTQLVNALRGHLAEAGLVAAKGIQNYSKLLKLMESAADTVLPTVMKQALTDICDQIHRLNDLVTKLDKEIERRVQHDENACRLLTIPGVGPKTAMCVIATIPDIHRFPSGRHFSSWLGLTPRTHSSGGRSVLRRITKMGNSELRTMLYLGGTVIMMRDSKTPIGRWAARLRARRPYKVAAIAVANRLARIIWALLTNGGVYDPTYGREASA

SEQ ID NO: 277497 - protein, 366 aa, unidentified
MKKQAKQAIRLKKLCNEVTRILNLGLDEHYWQVTVAMQEDGGRIKVVGKMSHEAFLGWVKKKVAEGWEIRSCYEAGACGYWLHRELEKLGVKNLVVTPRAMGKTGQQQKTDKRDAVELCDTLDRYLRGQHRALSVVKVPTPEEEAKRALIRHHRQIMKDRCRCEARGKGLLCAQGIRVRGCWWKDQTWQELSTDPRLKDWLKQQLEHWRSQILSAQEKQLSLREEIAALAPARLPKGVGAYSAAVLHYELRGFERFKNRRQISSITGLCPGVHQSNGHGKEGSINRCGIGAVRWVLVEMVWRLMIWQPQYPPVRRLAAGLVKSRRAKKRLVVEAARRLAIDLWRLSTGQTTPEKLGLIMQDHSQSH

SEQ ID NO: 277498 - protein, 384 aa, unidentified
MQKCATKKWHKKKVCIFEFVKKVSILILMPRQKSSKNPDSQNVYIGLDVHLRQWNVCIYQGGIARKPFQQSPSASVLLAHLKAHYPEMNYYSAYEAGVCGCSVHYELLAAGIENIIFNAADISQTHKERVRKTDAVDAAKIARSLAYGELRCIHIPPKWRLDDRNLLRLRSTLVSDMKRLKSRLRHYLHVNGITIPPEFQPRRWPLAFIKWLKKTAIDNNNTTGSTLAMMVDKIENAVTELKNIDKLLLAMMKEKRYKSDYQLLRSIPGVGAQTATTILLECGDLADFGTADAFCAFVGLIPDIYRSDEHDGKCGITRRHHRVLRYMFTECAWRSIRKDPYLSGLYAGYCRRMPTTKAIVKIANKLARITKFVLKNKKAYVQTE

SEQ ID NO: 277499 - protein, 319 aa, unidentified
MYVGIDTSKDFFDATGLEEEQVVLQTQYSNKTAGFEQLLISVKTCKMVIIEATGPYYLPLAMFLSRNNIPVSVVNPLIIKRFSQMKMSRAKTDKKDSFLIAQYGQIHKPSLWKAPANSIVKIKQLDTYMEGLAKRRQMALNQLHAFQSSGDVDDQLVKEIKEEVALFDIKISKIEKQIDKLIQKEHKDMATYLRSIPGIGPKSAYLMIIATNGFKDFENYKQVISYFGLAPRIYESGSSVRGSTKICKMGMSKVRKTLYMAARQAIRFNKACKELYDRLRAKGKSHRLALIAAVNKLIKQAFSIVKNKKMYNPEYCAVQ

SEQ ID NO: 277500 - protein, 423 aa, unidentified
MSYRIAGIDVHKKMLAVVVADVEVKGEYQFERRLFGSNPEHLRLLANWLIEQQVEEVVMESTAQYCKPVWGALERYWKPTGQKREGSAPMSGKLHLAQAQSNRGSRGRKKDFPDAERLVKRLLANELRLSFVPDAEQRLWRTVMRRKYQLTRNRVQLQNRLEALLEEAHIKLSSLVSDLLGASARRMLKALADGETDPAALAALADKNLRATPAQLCDALGACTELNPVYRRLLKMFLEELQLIDQQVDQLDKEMATLLSQHQAAVERLAEVPGLGVDSAQQIIAEVGAKAATFASAKHLSSWVGACPGEDESAGVSKSHRSPKGNRHMRRILNQCANAAAKSKGTIFEIVYRRLVSRLGHNQTIGAIAHRLCRLIWIILHRDVRYEERGPSVNARSRQRRTTRMIRELRSLGYRIEPVASPA

SEQ ID NO: 277501 - protein, 320 aa, unidentified
MMSEVVLGIDVSKKTLDVALIFDNRTFSKQFRNSAEGFKLLAVWLASLEIKQVHACLEATGVYGEAVALFLHEHGHQVSVVNPLRIKGYAQSNMQRNKTDRLDARLIADFCLTQKPDAWHPPSVAVKHLQSLVRRVEVLEEMRQAEDNRLVNASAEIKPSVERMITLIKEEINQLERQIKQHIDRHPDLKGQSELLQTIPGIGAKTAHLLLSEIEFERYNSGRAIAAQAGVVPRQKQSGTSLKQTGLSKLGNARLRKALYFPATTAKRHNEIIKEFAERLHKRGKTPMQIVCAAMRKLLHIAFGVLKHKRAFDASLAFSA

SEQ ID NO: 277502 - protein, 397 aa, unidentified
MSKVFVGVDVSKDFSTAQGIDKNGKKLFYLRFAMNAGGFSELLKAMIKSIEHITEITAAMESTGCYHINLFSFLSSEGVACVVVNPLLITNFARLSLRKTKTDKKDAHTIAQFLLANEKSLSAIAFSQDTQDIKDLSRERESMTVLISGMKNDIKRLLQGTFPELEKLCSPYGETMLHFLKRFPSARLVLAAKQRDIEKALICPDEKRKRVMVSAEDIIAAAKSSVASSGAAKELILSEKISTLLYLQEKNERITEVLIETCESLMIEKLDIIRSIDGVNDITGSTFLAEIGDINNFTSYKHIIAFAGLDPSIHQSGQYVGRSTISKRGNRHLRRIIFLMTLCAVRCKNAFREYFLRRKQEGLPPKKAILATAHKLIRVIFAMLSNKTLFRKGVAAE

SEQ ID NO: 277503 - protein, 344 aa, unidentified
MIWLLTLNLFSMSKFSNFLGIDVSKEYFDAVIILNSNKNDTIHNQFSNDIKGLKELVKWLKSVTSTNQNTLVCLEHTGMYGKVIIQYLLSKEFNLWVEMSLKIIRSIGVQRGKNDKIDAERIAYYAMKNQDEVQLYQAPRKVIDQIKKLISLREHLITTKAMLVRNSNELKGFEPELSKLHKKYSKATITGIETDLKNIEKALDNLIKSDEKLSNVFEKTTSVTGVGKVTALFLICYTNEFKMYETPRQLACYCGVVPFEHTSGKSVRAKPRVHFMANKKLKKQLHMCAISSIRAEGDLKEYYERKVGEGKNKMLVINNVRNKLIHRICACVKNNKLYEKRIVA

SEQ ID NO: 277504 - protein, 484 aa, unidentified
MAKRKMSTFERLRKGQLNRAERRELGRQVAGSDPGLRIVHENAGGIDVGNKSHFVAVPADRDGQPVREFGCWTEALREMAAWLQSCRIDTVAVQATGVYWIPLYDILEQQGIRVVLVNAQHTKNVPGRKTDVQECQWLMKLHTYGMVRDSFRLPADIEPVRTIWRLRDRHVKEAGESVQHMQKALAKMNIQLANVISDISGVSGQAILSAILMGERNPYELADLADYRIKASREEVARSLEGNWRTDVLFELQQAMDSHRFAHQQMQECDKELCRYLKNLPTRQLDATTSSEGGEMSAAQKRKKAKKPRGNEPRMDIKMELQRVCGVDLTSLDGISVMSAMTVLAEVGTDMSQFADEDHFASWMGLTPSKDITGGKVVKNSKKKVKNRVADTLRMSATTLLHSDTHLGARYRHLRRQLPTFVSAAKAMARYLAVSIYRLLTKGQIWVDRGVAQFEQRHAQRRLAVLQSQAKANGFILVPIAEAR

SEQ ID NO: 277505 - protein, 323 aa, unidentified
MDAGTGRAATATSIVGVDVSKDRLEVFVDSTGESFSVDNTAGGVAELARRLLSLPAPAALVVVENTGGYERRCAADLMDAGLPVALVNPRRTRDFARAMQWLAKNDRIDARLLAEFGRRVGPTPAVRVPPERALLDELVGRRRQLVAMRAAEQVRLQQASGKAVVASVEKHLRQLSAQVHDLEKRIAKMVEDDDDWRGRAELLKSVPGVGPAVAATLVAELPELGSVSRQHAAALAGVAPYDDDSGKWHGRRHCSGGRASVRCALYMAALTARRFNPVIKDLSDRLGAAGKPFKLVMVACIRKLITILNAVVRRGTPWVPSPT

SEQ ID NO: 277506 - protein, 339 aa, unidentified
MFIIGIDPHKGSHTATAVDAGEVVVGEVRVDADCHQRARLLAWAAAFEPRTWAIEGATGMGAMLAQQLVGAGEHVVDVPPKLSARVRLMDTGRIDKNDPNDARSAAVVALRHATLNTVTGENQDRVVLRLLADRYHQLTAQRTRTVCRLHAVLCLLIEGGTGRHLQVERATKLLAGVPIGDPITVERVATGTQFVTEIGFLDQALADTRARTTAAVVASKTSVTDIYGVGPIGAAIIVGHSGDIRRFPTAGHFARHNGTAPLEASSGPKTRHRLNPRGDRQLNHAIHTAALTQIAHDTAGRVYYLREQFDGKTPKEALRALKRRISDVVYRQLISDTRP

SEQ ID NO: 277507 - protein, 456 aa, unidentified
MKKKQISLEVVNPNAAGIDIGSRSHWVAVGQNAQDVKEFGVYSQDHQELCEWLKKHKVTTIAMESTGTYWQNLFSSLVVFGFDVILVNGRQTKNIKGKKTDILDCQWIQKLHTLRLLSSSFLPDSTTAVIRTYSRHRQNILKQSASAILKMQKYLRLMNMRLDVVVKDIVGLTGTKIITAFIGGEKSGKVLAQNRHYNCRKSEDEISRALQYNGREDYYFALKQEWETYLHLQKQIDQVDIQIKKHLEEVINNDDDKKQHIASKKPYKRKNKNTIRNADMNQLSYQYFEGVDLMAIEGVNDATLMAFISEIGLEGINKFESAKQFTSWLRLAPNNKISGGRVLSHHLPKGSNRLKVALRQAANTIGNLKDGHLSDFFRRINYKKGRATAISATARKLAVIIWNMLTRGIPYHPPTEYLFLDQKRKLKLVNRIKRNIAKFDIKPEDIGLTKILNIST

SEQ ID NO: 277508 - protein, 285 aa, unidentified
MNYMGIDHHMQYSHITLLDEKGEKLKSGRVANLRSELENFLLGIEEVKAVVEAGRSSYTMVDVLDSMGIDVTIAHPKEVKAIAKAKIKTDKRDSKILAHLLRTDLIPEVYKRSRENRSYQRILRQRVFYVGSMTRVKNRIKALLSQQSEDIRGEISRVKNIFGREGLAVLKGLDLPEGEKKLINALLITFRHMEERIKESSALVEELYEMLPFVRLIHTVPGFGKFLSVLVAVEVAEVNRFEGLGKFHSYAGVIPSTHSSGGRTYHGKIVKEGNRGLRWAAVEAV

SEQ ID NO: 277509 - protein, 420 aa, unidentified
MKVVYQTCCGVDVHKSFLVATIIKTISGVEPSYQKKRFSTFNNSILQFKNWLIENQCRDVCMESTGKYWVPVFNLLEDDINVTIANPKWVKAVKGNKDDTKDSKWIGDLFRLGLVPGSYIPCKPIRILREFTRYRYKLTSCRTSEKNRYQNALTVCNVALDSVVSDIFGKSATSVIDYLIEQSNNSINHEEIASRLLRSLKKKSDSVIESIEGYQMTDSPKYRMRLVRAHLDYITSTINDIDTMLDSLIAPYENAVQLLCTIPGVDRNSAITVISEIGTDMTPFSNSKRLCCWAGLTPGNNESAGKKKSVRITRAGVYLKPALVQVAHAAVKSDKSPYYKQKYERIMKRRGKKRAIIAIARMILTAIYQMLSTGEAWNPTDLYKIDIPEPLKEKQKEKAIKQAKKLLIREGILSESQLAS

SEQ ID NO: 277510 - protein, 339 aa, unidentified
MTLVGCDLHARQQQVAARDTATGEIQEHQLTHHGEAVERYYAALPPPVTVAVESTGYALWFHTLIRQLGHTLVVGDATKIRAMVVRKTKTDRRDAPHLLELLRHDRLPTIWVPDPATRDRRALLGHRMRLVRVRTTMKNALHAIALSHRLVDGSKRLTQSRLAPLQDLPLGPYAARRRDESLELLKWLDERIRQLAEAAAVDPAARLLLTHPGVGGVTALTTVVVLGPVGRFPGTKEVASYVGLAPALHASADKHHLGQITKQGNPMLRLVLVQAAGVAIRYDEALHRLYTTLLRRRGHAKAKVAVARKLLIRLFIMLRDGIDYDEFCRRGRARQPAPV

SEQ ID NO: 277511 - protein, 338 aa, unidentified
MVYGAIDLHMRYSQIRIIDEAGVVQRDQRVPTTRERLTQAFLSHGPLRILLETGTESEWVAQALEAAGHEVIVADPNYAPMYGELTRRITTDRRDAVALAEANRRGWYRTAHRTSAAQRDTKQILRSRRFLVQARSGAVSLLRSLLRPSGYRLGTGSCDTVPARVARLSRPTELAETLAPLCRQIAALTTEIHTIDGRLQTRTASDAIVARLRSVPGVGLIVATTFRTFVDRCERFGHAGQVSAAIGLVPREDSSAERRHRGHITKAGPRELRSLLIQAAWVCWRHGGSGTLRAWADRVAARRGRRIAVVALARRLSRILFALWRDDTTFDGKILATA

SEQ ID NO: 277512 - protein, 346 aa, unidentified
MIIVGCDFHPGWQQVAVFDSATGEVREEKLENGNGEAKRFYGSLPSPARVGFEACGNTQWFEDLLDSLGHEVWIGDAAEIRASYVRKQKTDRRDAAHILKLLIEDRFPRLWRPSQAERNLRQLLIHRHRLVGIRTRVKNGLQHLMLNRGVQLKQKLWNEAGQKVLRELPLEGWAAQRRQDLLKLLSELNPQITQLDQAVEHAAYEHPQARLLMTQPGVGPITALAYVITMGDVTRFQRGKQVASYLGLIPSEHSSSNRRRLGSISKQGNPFLRMLLVESVQTVCRLDEGFRKQYKHRCHRMKKGVAKVAAARKLAVRLFWMLRTNTAYPEIARIEGSPRDGVVGES

SEQ ID NO: 277513 - protein, 312 aa, unidentified
MAELSFGGIDVSKDRLDVLLLPEGVCFSVCNDTPGWAELIARLRPLAVSAIGLEPSGGYERGIIRALLAAGLSVRRINPNKLRQFARARGVLAKNDRLDARLIAEYVAIMPTRVLQRDDAIERLAEIVTMRRQLCDEHVAAMNQATHLEDAMLRRISKRRLLRIEADILLLDKRLAELVAADPRLAHRYQLLISMPGVGPTLAYTLLATLPELGQIDRKQIAALVGLAPYDFDSGKLKGHRCIYGGRMPVRNVLYMAALSASRYNPALKAFSNRLAAAGKKSKVIIVAVMRKMIITLNAMLRDNTEWHPVAA

SEQ ID NO: 277514 - protein, 352 aa, unidentified
MQHFIGCDVHTRFQVVAWIDEGTGEVKVRRLEHEGEEARKFYAQFPSGAVVGIEATFPVLWFERLLGDLGHALWVGDAARIRASAVRYQKNDSFDAELLLDLLRTQRFPRIWVPSAEERDLRQLLVHRMKLVRARTQVKNQLHALAISQGLCRKRKLWSAKGRAELESLALLPWAARRRQELLEWLDRLDEQVRELDRAVEAAGGERAAVALLRTHPGVGMVVALAFVLTVGPIARFLSSRKLVSYLGLNPREHSSGGHQRLGSISKQGNTMLRWLLIEAAQTAVRFDPQLRRIYQRLKSQRNSGVAKVAVARRLAVRLYWMLRTRHNYAQLVHMSGSPSSAVVPPEGGSNL

SEQ ID NO: 277515 - protein, 351 aa, unidentified
MSMVCGLDLHRQQITFDAMNTASGEVWRGRVWQPDRARVRRWLRNDVARRADGQPVAMAVEGCTGWRYVAEEITAAGFEAHLAEPADTQAARGKKHRAKTDRSDARLLRVLLQRGELPESWIPPAIVLEWRERVRLYKWLVDQRLVWVQRIHAELFQHGVAVPEGAIRAASTRSLLAGDEVTLSAAARQRIAVGYAMIDAADAHSEPLKKDLQRFGTHQPACRALVDAVYGIGGLTAVAVWSELGDCRRFSRSDQAVRHTGLDVVVDASDLRRAGGYLSRQGPPVLRWALVEAAINASHQRSPDHTYYSGVKQRHDGKLAAISVARQFTRRCYHILRNLDPDVVYATPSAA

SEQ ID NO: 277516 - protein, 331 aa, unidentified
MEIKEIIGIDVSKLTLDCCHHSSGSHKEFDNNLDTIASMVKWSLQVSGVSKMKLLFVFEHTGLYSDQLVQFLGGGDYLFNVVPGLEIKRSLGIARGKDDKADAKRIALYGYRVKDELKPFQIPSKTLEVLKRLMSVRKKLVTQRAGYIATLKEQARILSKQHNKVLFKVQGKMILTLDKQITIVEQEMNQLIEEDPELLNLYQLITSVKGIGGVTARFLIVYTVGFTTFESWRKFASYCGIAPFPFRSGTSIRGRTKVSHLANKEGKSLLSMCAVSAIQSNPEMKAYYNRRIDQGKNKMSTINIIRNKLLARAFAVVQRRTPYVNTMKFAC

SEQ ID NO: 277517 - protein, 489 aa, unidentified
MKTQAAKKAQKDKKPSKKASGKATPGKWDEMNRKQRREMMRKMQSEDLSLEVVHPHAAGIDIGNESHYVAVPPSRDPQPVRCFGCTTAELKKMAEWLTQCGIRTVAMQSTGVYWIAVYDILEEAGMEVYLVNASETKNLPGRKTDVQESQWLMKLHTYGLLRNSFRPSQEIRILRTYWRQRQDLVRSTGRHIQRMQKALTRMNIQLANVISDISGVTGQTILKAILDGQRDPRELAAYRDCRVEASEEEIAQALEGNWQEDQLFVLRQEQAGYEFCQKQITECDQQLAQCLARLEDQTQGATLPEETRKGRRKKKKGNPQFNLREELFRMTGTDLTQIDGIDVMTAMTVVSEVGWDMSKWKTENHFVSWLKLSPDNKISGGKVIGKGRMPTNNRATTVLRMAATTLRESDTYLGAQFRRFRTRLGPPVATKAMAAKLARLVYRMLRYGMKYVNQGAEFYEAQHRKQQVIHLKRKAAQLGLEIIEVAAAA

SEQ ID NO: 277518 - protein, 426 aa, unidentified
MYVAIPPDRDSEPVRVFKTFTLDLECLVDWLIARGITTVAMESTGVYWIPLYQMLEDRGVRACLVNARHMKNVPGRRTDWHECQWLQYLHAAGLLRAAFRPEQDVCGVRTLLRHRNEMVRMAVQHVQHMQKALTQMNIHIHHVISDITGLTGLAIVDAILSGERDVAKLAELRHRSIQADEETIRKSLEGDWREEHLFTLNQSRQMYMNYRNNIEACDEKVAKLLGGFEAQVDIQLQPLPAPPGPSRKRRTKRTGDFRFEVRTEAYKLFGLDVTRVPGLNELAIPIFSEVGRDLAARFPTAGHFASWLGLCPDNDKSGGQVLWTGVRKINNRAAQMFRMAASSLHHNRSPVGDFLRRMKAKLGPAAGITATVHKIAIIFYTLVTKQIEYDDSIWATRDEHRQKRFEQKVKRQARLLGYELVPVQPA

SEQ ID NO: 277519 - protein, 347 aa, unidentified
MRFYTRVHKHYCGIDLHARTMYVCILNQEGVVVLHQNIPCDPRRFLSAIGPFREDMVVGVECIFTWYWIADLCAREGIAFVLGHALYMRAIHGAKAKNDRIDSRKTAGLLRGGLMPQAYVYPAEMRATRDLMRRRLHFVRHRGSLLAHIQMTHHQYNLKSPGKRITYRSNRDGIGDGFEDVSVRDSLAADLALVDHYEVVIGELELAVLRQARGHDPNSFELLRSVPGIGKVLALTILYEIHDIHRFERVQEFASYSRLVKCQKSSAGKVLGTSGAKIGNAYLKWAFSEAAVLFLAKCPQGKALLARIERKHGKAKALSILAHRIGRAVYFMLARKRAFDLERFLRS

SEQ ID NO: 277520 - protein, 334 aa, unidentified
MLFELLAIDLGKASFHLHSISPDGTILSRKVSRSKLAETVGAIAPKTVAMEACASAHHWGRQFKDDGREVLLINPRFVKPFVRGSKNDAVDAAAIYEAATRPTMRFVPVKSTAQQDLQSLHRIRERLIVQRTSLINHARGLLAEYGVVLPQGPWRFAAQAPLAVQNAALSDLGRELFLELLDQLTDVNGRVAKLDRKISEICREREDCRRLSELPGVGPIIATALVASVEDGSHFKSGRELAAWIGLVPRQYTTGGKPRLGGIGRRANHYLRRQMIHGARAVISRLASHDDRRSQWLKELVARRGFNKAIVALANKTARIAWALLTRQERYSAQ

SEQ ID NO: 277521 - protein, 346 aa, unidentified
MEISRVGVDLAKNVFQLHGADSKGKTVWKRQLSRDKWLKVIFASVKPGAVIGMEACTGAHHWSRILISKGYEVTIIPPQFVKPFVKSNKNDANDAQAICEAMARPNMHSVKVKTIEQQDMQAIHRVRNEIKNHRIAKANQIRGLVAEYGLVAPKELSSLRRAIPEWLEDASNGLTLFFRQLLQGLYEDLYSMDKRMAELDKQITVIAQQDPIAKRLQQLRGIGPLIATALVATMGDGKQYRKGRDMAAAIGLTPKQHSSGGKDRLLGISKRGDAYLRCLLVHGARSAMRTAKDKDDRLSRWITNLQDRRHANVAACAMANKMVRMAWAMMTKGVDYDPDFHSITAN

SEQ ID NO: 277522 - protein, 416 aa, unidentified
MDVIVARCAGLDVHKNTVMACVRAPGPDGGRTSTVRQFRTFTDALRQLRAWLVAEGVTQVAMEATGVYWKPVWHVLEAVPEFELLLANAHAVKNMPGRKTDVADAEWLALLCECGLLRPSFVPPPVIAELRDLTRYRKKLIEERSRETQRIQKLLEDAGIKLDSVVSDILGVSARQMLEALIAGVRDVEALAELARTRMRPKIPQLRRALEGRFGVHHALMLQMHLDHVDQLSAAIERLDVEVDRVIRPFSAQLQRLITIPGVGRRTAEVIIAEVGVDMRRFATAGHLASWAGMCPGNHESGGKHRSGRARKGNHALRAALCEAAWAAAHGKDGYLPAQYRHLLRTFGKKGQTRAVFAVGHSILVIAWHLLANDCDYTDLGAEHFTRNADPEARKHYLIRQLEALGHKVTIEPAAA

SEQ ID NO: 277523 - protein, 408 aa, unidentified
MRYLIGIDDAKAKNDIAIFNSDMGLVRKPFTVSQSQSDIQKLVKSFAAIDRDVRAVVESTDRYHLPIVEQLSKERIFVSVANPKQIKQFGDNSLRNVKNDPADAKKICRCGILNWDSLREYTNMDELRTQLQLYNSQFEFFTSQKVSVKSNLIALLDMTYPGVNQLFNSPVRPDGSEKWVDYAELFWHVDCVRSLSLHAFSEKYRHFCEKQGCHFQQGKCESLYASAQDLIAVFPKNAQYKALVKMAIGNLKEVITHVETLRAAMNEIASQLPEYPVVMAMKGVGPSLGPQLLAEIGDPMRFKHREALTAFAGVDPGVNQSGTLNQGSNCAFKTGNPRLRHTQFKIMEVLIKLHPEEDKVYQFMDKKRSEGKPYLVYMTAGANKFLRIYYGKTREYLHALEADKGTNE

SEQ ID NO: 277524 - protein, 338 aa, unidentified
MQTGQTAQTYTLFVGVDIAATTAAVVTQRPGAKASQSFIIDQTPEGYTSLLHTLQRTGHAPCQVLVVMEATGSYWMSLAARLVHEGFGVSVINPAQAHHFAKALLKRAKTDVIDAQTLAQLAMVLQPEPWTPPPQIYYALQQRLAQRDDLLNLRQQVRNQLHALVQHPEVIPEVRARMDRLLATFEAQLTEVEREIAAALTQDSAWAAAATRLQSIKGVGWVTAAWTLVTTLNLTSCDTVDSLTASAGLAPMPRQSGSSVWHRPSIGHTGNGRLRTAFYMATLSAAQHNPVIKAFYTRLREVGKPEKVARCAAARKLLHIAWAVVKKDQQFDPYYARG

SEQ ID NO: 277525 - protein, 422 aa, unidentified
MLAESHDEEQIIARVAALDIGKAELVCCVRVPAPAGGKRRSQEVTTYSTMTRSLTELANRLIEMRVERVVMEATSSYWKPVFYLLEAHGLDAWLVNARDVKHLPGRPKTDVLDAVWLCKVAERQMLRPSFVPPWPIRRLRDLTRYRTDLVSARTAEKNRVEKLLEDACIKLSVVASDIFGVSGRAMLAALVAGERDPKVLAQLARARMRGKIDRLEQAFDGHFADHHRFLLSRMLSRIEGLDADIAAVDAQIEVQLAPFAEAAVHLDEIPGIGPIAAAAIIAEIGVDMSRFPTAGHLCSWAKFAPGINSSAGKTKGSASSGHGNPYLARVLGEAAVGTSKTDTFLAARYRRIARRRGQPRAVVAVGRSILVIIWHLLHDPDTRYQDLGSDHYTRHVDPSAKKRSHIRQLEALGYTVTLTPAA

SEQ ID NO: 277526 - protein, 368 aa, unidentified
MADSVTHYVGLDVHKDTIAIAAAKADSRTKPLFIGTTQYCAKQIRKALRKLAPPASLRLCYEAGPCGYGLARELQALGFDCQVVAPSRVARGPADKVKTDRRDAILLARLHRAGELTPIMIPDPDDEAIRDLVRARHDAVNARRRARQQLAAFLLRHGQRYTGGRAWTKRYQLYLSRLKFENPVHHVVFGEARLALTAADNRVERADQALRDHIETWRWFATVRGLMTLRGVDLIAASTLVAELGDLRRFARPSALLSYVGLVPSEYSSGSTTRRGQITKAGTQHARRLLVECAWNYRFPARVGETIQPRLVGQPQEIIDIAWKAQLRLTKRFRSLKARTAIARELLGFIWDIGIRTLPKKLPNETVP

SEQ ID NO: 277527 - protein, 407 aa, unidentified
MAVVEFPQLIARGCGLDVHKDTVVASIKGTGIQEETRTFATFTRDLEDLSHWLEGHQITHIAMESTGVYWRPVYYVLEGRFEIILVNARHIKNVPGHKTDKKDSEWIAKLLLSGLLRHSFVPEGWVREIRTLLRHRKKLVNERSREKNRLQNILEDANIKLGSVVSDVFSKTGQGIVDLLMEGITDPVVLSNQAKGSLVNKKQVLQQALYGRFCERHRFMLKLLTQTMGALEKLIEQLDQQIELCLAGKQAELALLQTIPGVSRQSAIGIVSEIGLDMSQFISDKHLASWAGVCPGNNESAGKVRSARTTHGNTYLKTTLIEAAWAASHTMNTYLSFKYHKLTQRRGKKKAAMAIAHHILTASYHILRDKLPYKEPALRPEILIERRKAEIQRLENRVRKLKILASQ

SEQ ID NO: 277528 - protein, 371 aa, unidentified
MDKSSKVLFVGLDVHKDTIAVAYAPEDRGAEVVSWGMIGTRQCDIDKLIRKLESKGATLVVAYEAGPCGYWLYRYLTRRGVSCSVVAPSLIPRKAGDRVKTDRRDAVTLARLLRSGDLSAIYVPTVDDEAIRDLSRAREDAVHDLKRSKVRLKAFLLRQDLRYEGRANWNAAHLRWLARVVCPTPAQQIVFQEYVYTVSEQTARLQRLEVELHTAVKTWRQSPVVEAVQALRGVNLTGAVTLIAEVGDRTRFDTPRKLMSDLGLTPSEYSSGPHRHQGGITKAGNGHARRALVEGAWAYRYPAKVSRHLQLRLEPVPAEVRAIAWKAQLRLCKRYRLLSARGKHVNQVVVAIAREMAAFAWAIARIVPIAA

SEQ ID NO: 277529 - protein, 379 aa, unidentified
MTVGEFFRQCVGIDISKKKFTACLYMYDRASDAGCCTQSVDFANTKTGFNQMVKWSRKEAVKGQPLTYLMEPTGSYYEKLAYHLNKIGLTVYVVLPNKARQWCEAEGVKTKTDAMDARCLALMGCASRKLSPWSPPAAIYRELRQITRFHADLCKVRTSVANRMEALDNMYGPDKSVRKHCEKLLEEIDNLMEKNDEALLCKLAEDKDLKSKVERIAGAKGVSIQTVACVIAETDGFHLIRNRKQLTSYAGFDVVAKQSGGQDPKHKISKKGNANIRAALYMPALVATRYNKQMKAAYDRICQKHPSEKKIGVTAVMRRILLLIYTLWKNGEEYDENKDKANAKGKKKQAQEHGPEDRLAVNEEHVEGVAEDENGQPSS

SEQ ID NO: 277530 - protein, 469 aa, unidentified
MEHNRSRSRQRGGGKRAKHPSLLKRINRNAAGVDCGSEAHYVAVPSERDPEPVHSFKTFTTDLHRLADWLEVCKIKTVAMESTGVYWIPIFEILEERGFEVVLVNARHIKNVPGRKTDVLDCQWIQELHSVGLLRGSFRPAAEIVSLRAYLRHRGKLVEGAASHIRRMQKVLVQMNLLLHNVISDITGVTGMRILRDIVAGVTDPMVLAAHRDYRCRASLEEIAASLTGNYRAEHLFVLRQNLELFDTFQRQIQTCDGEIESLLRTLAAKQRRPKTPVPSPRCKPRFCDNEPRFEIRDPLYRLAGADLTQIDSIGPYTALKLIAEIGTDMSRWPTPGHFTSWLTLAPRNKITGGRLISSRTQPSANRAATVLRMCAMVVGRTSTALGAYYRRIAYRIGKPKAITATARKLAILVYRVLKGDLDYNDPGAQAYEEHYRARALRNLSKRAKQFGLGLVNVETGELLHAPVS

SEQ ID NO: 277531 - protein, 351 aa, unidentified
MESQQTAPPKLFIGIDIHKRSWKVHCATDLFGGKSFSMSPDPIQLRDYVSKHFPDYEVSTAYEAGCCGYSAHRAFEPYGWTSLVVNPADIHRKGKERHTKTDKIDAQLISRELKDDRLDGIHIPDTHREELRSLFRRRNDLVKDFRRIKSYIKMQLLYFGIKEPVEFDNDHWSHKYRKWLDDMVFRYPTAKATLDSRMRFFRFVDQELRDVSTELRRYCKTHHKKDYMLLRSIPGIGRIVACGILCELGDLRRFNSVKHLAGYVGLAPGVHQSGGNYKTLGITPRAHRLIRSYFVEAAWQAIRADPIMQTYYRKHQGRNVKSIIIKVARKLLSRTLAVIKTETPYVIGVIE

SEQ ID NO: 277532 - protein, 342 aa, unidentified
MQITTIGLDIAKNVFQVHGIDASEKVFVRKQLRRSQVLAFFKALPPCLVGMEACATAHYWARELTKLGHQVRLMPAKDVKAYVKRNKNDAADAEAICEAVRRPTMRFVQVKSAEQQGRLMQHRTRDLLMRQRTQVINALRAHMAELGIVATQGREGIKELLTIIASEEDARLPVDAHASLVVLAAGLQAVQTMIGSIEKRIIVQDRSNEASKRLESIPGIGVIGATAIAATVPDPKAFRSGRDLAAWIGLVPRQDSTGGKQKLGPISKQGDQYLRRILVVGAHAVLRRARQQPEKYPWLTQLLARKPFKVVAVALANKMARIAWALLAKGGTYRAPALAAGA

SEQ ID NO: 277533 - protein, 396 aa, unidentified
MSEQAGRVVIGMDPHKRSVTIEVMTADETVLGGGRYATDEGGFSAMGCYVSQFPDHVWAIEGCNGIGHHIAMRLLAAGEEVLDVPPKLSARARVFATGQGRKTDATDAHSVALVGTRMAGLRPVVNDEQLAVLRVLVDRRRSLGEDHTRMISQLHALLLELIPGGAKRDLSAAQAKVLLSKVRPHDTAGRTRRRVAAELVGDLERIYARKKAADKELREIVAATGTSLLDLNGIGPSGAARLLVEVGDITRFPDRGHFASWNGTAPIDASSGDHVRHRLSRAGNRQINRVLHIMATVQLRNPTEGRAYYDRRKADGKTSMEAMRALKRRLSDLVYRTMLDDAVGRSINQPRTGPGGHRGNDSDSSAAGSHPHTDSSEKSLPGPAKTNPRTALPAAS

SEQ ID NO: 277534 - protein, 402 aa, unidentified
MNAVGIDVSKGKSMVAIMRPFGEIVSAPFEIKHTASGINSLVELINSVEGESRIVMEHTGRYYEVLAHQLSEANLFVSAINPKLIKDFDNDSLRKVKSDKADAVKIARYTLDKWQNLKQYNVMDELRNQLKTMNRQFGFYIKHKTAMKNNLIGILDQTYPGVNTYFDSPARSDGSQKWVDFASTYWHVDCVRKMSLNAFIDHYQNWCKRKKYNFSQSKAEEIYGKAKELVPVLSKDAITKLIIKQAVDQLNSASTTVESLRTLMNETASKLPEYPVVMAMKGVGTSLGSQLMAEIGDVSRFTHKSAITAFAGVDPGVNESGSYEQKSVPTSKRGSSDLRKTLFQVMDVLIKTHPQDDPVYQFLDKKRAQGKPYYVYMTAGANKFLRIYYGRVKEYLSSLPES

SEQ ID NO: 277535 - protein, 375 aa, unidentified
MKEKLRYLGLDVHAETIAVAVAEPDGEVRSLGTIPNRAESIRKLIKKLGPLDKLRACYEAGPTGYVVYWQLAELGIECEVVAPTLVPVKAGDRVKTDRRDAEKLARCYRSGDLTAVWVPDEGSEALRDLVRAREAAKQDQLRARHRLGKFLLRSGQRPPSGVKPWTRAFLIWVAQLRFTQIAQESTRLDYLHEVEHMRERVARLEQAITEAVKLASPELQQVVNDLQALRGIADISAVTIAAELGQVSRFASARQLMGYCGVVPSEDSSGKRTRRGGITKTGNAHMRRIVVEAAWSYRRPPGIWYGLRRRQETISEEAKEIAWKAQHRLHKRYMKLGAAGKDQRKITTAVARELLGFIWAIGTRAETIVRQQATT

SEQ ID NO: 277536 - protein, 429 aa, unidentified
MDEVDDVDLVVERVAALDLGKAGLEACVRVPHPQRPGRRMQELRGYATTTAQLLAMAGWLRHWQVQRVVMESTSTYWKGVYYLLEAEGFDCWLVNAREVKNVPGRAKTDRADAVWLAKVAERGMCRPSLVQPPEIRRLRDLTRYRRALVQDRTREQQRMEKLLEDAQIKISAVLSNLHGVTGRAIMDALIAGERDPRTLSGLAKGLARKKTDRLEEALRGFFTDHHATILQMMLDNSDRISTQIAALDARIEEAIGPFSRPAARLIDIPGVSTVAAAELIAEIGVDMTRFPSAAHLVSWAKFCPQIHQSAGKSMSKGRAKGNPWLAGTLGRIAFVNSRTDTFLGARYRRLARRRGKQKALVATGNSVLTVIYHLLSDPDARFCDLGPGYHESQINKHRRARDLATQLQALTGQHIAIRDGKAVITDTAA

SEQ ID NO: 277537 - protein, 472 aa, unidentified
MQFIGGGSQQEYVERTRGLDPSHCLAAGVDVGKYEALCLIADHRGEVVGEALTFSLTEPGIRSLEAMLAAATQSRGAVSVRIGVETAGHYHRTVVARLVAAGHDVVELNPAHVKAARTQQGSRRLKTDLRDAAAIVDLVISGSGRVPQQRSDALIEQLVWAGVRRRRVRARTALSNQLLGTLDLIFPGLDGCFDDLLGSKVGPVLLHDLADPGRLHRLGVEGLQAFTARRGVRLQRRKAEQLHQAAADALRLPVVERACRAAVLTADLAVLDMLNHQIDQAEQHLAAVLPHTPAGVLTSLPGVGVVRASNYGAALGDPARFANADRAYRASGLVPASYESAGRARGGQGISREGNAELRAAIIELGRGLAQRDPDFAAYRASVSVRMKPLMAAIAVGHRAHRLAFALMRSGESYDPARLAESVATNGERRTKEAGRPVKKNSREATCRHDVTYPPVTTVPRTTATSKTLART

SEQ ID NO: 277538 - protein, 324 aa, unidentified
MIDGVLGIDVSKNTLDASMSSCNKVRARSFANSPDGWRNLLDWLITQRVRRVHACLESTGRYSLGIAGALNEAGHVVSIVNPAQIRDFARTKLGRNKTDGVDASHIREYCELFKPQPWAPPSEAHRRLGELQTIRAGIIAGLTEWKNRKNSCMIDAVAQSLADVTISHFTSQLSAVDEAITQTIDHDSVLRRKRDLLLSISGVGETLAGVVLAELPGPDVLHSSAEVVAYVGLNPRQHQSGTSIDRMTRISKIGNAVLRAALYMPAMSAMRYNPAIVALVARLKSRGRLKPKQIVVAAMRKLLVLCFGVLKTGKPFDPAIAMGR

SEQ ID NO: 277539 - protein, 344 aa, unidentified
MQITTIGLDLAKHVFQVHGVDATGAVGVRKALRRAQVLPFFAKLPPCLVGIEACGTSHYWARELIRLGHEVRLMPPAYVKPYVKRGKTDAADAEAICEAVTRPTMRFVAVKSREQQAALSMHRARNLLVKQRTQLVNMMRGLLAEFGIDIPEGLERALLMARQVVEGATPDVPEAAVKIVGMLSQQALDTHAQLREIDRALCALQRTDDMARRLATIPGIGPVGATALAASITAPGQFRSGRQFAAWLGLTPLQNSSGGKEKLGRITKMGDKYLRKLLVVGATSLVRRARQKPETMDPRFVALLARKPVRVATVAMANKMARIAWAVMTRGEVYKTSHVPALAA

SEQ ID NO: 277540 - protein, 348 aa, unidentified
MGKKDIVKKDDIMRKDDIMKSVFLDPANLYVGIDLHKKYYTGTIMNSAGKIVCRDNFPPTLRGAGTFFNFVPPSTKMAIEACSLWRGAYKLLIKLGYHVVLAHPAKTRAISGTKKTDPVDSRDLADLLRVGYLPQVYIPDEDMYILKCAARHKADLVRIRQMLQCKIKSYLDREGIFYKNSWSKENLAILRSLHPHVAHYVEGVETMNRLIKDSLKEIRALAHNTYLAGILQTAPGIAEFSSLMILGEVSDVKRFETRKNLVSYGGLCPGIYQSGDKCYPVKNRACNTWLKWIMYVCSRRATRMDTKYTKHYERVKKRKGKKVAKRSTARKMLEDVWCMLTYEHPYIP

SEQ ID NO: 277541 - protein, 345 aa, unidentified
MNEITRIGMDTSKHVFQLHGVDGEEHVVLRRKLRRREVAKFFARLAPTVIGIEACGGSHHWARELGRLGHEVKLLAPQLVKPYVKRGKNDAADAEAICEAMSRPTMRFVPAKSAEDQAAAMLFGQRERLLRDRTRLSNTIRGYAAEFGMVAPRGQCRIEPLLARIAAQESVPELARRQFAELGAEYAELEVRVRQAERRLLAWQKENETCKRLKEIPGVGPIIAAALVMKLADPGAFGCGRQFAAWLGLTPKDHSTAGRQRLGGITRAGDKQLRQLLVSGAMSVVQQAARRPERASPWLRDLLARKPAKQAAVALANRIARIAWALMAHGGRYQASRGLHSAAAA

SEQ ID NO: 277542 - protein, 481 aa, unidentified
MAARKKNTSKDAAPGLPAAASGPGDDGAEVAEERVEVVTYAAAIDVAKGSGMVCTRVPGSRPDRKRQKIWCAEARYDSVVALMDHLRCQGIQRLVVESTSDYWRTWYYLAEAAGLQVWLVNAKDVKHLPGRGKSDREDSVWLCKLNERGMLRRSFVPPQAVRDLRSLTRTRSRLAQDQVRHQNRVEKILEDALLKISCVISDLFGASGRRFLDALVVGERSPAALAALGDARLKATPEQLAGALTGRFREVHAFEIATYLRLIDTINDEITRLDARIEQQLASIPGVAPACGSCGLIGGGHSPGCAAGGTPVLGLVARLDEITGVGVCNAQVLIAELGTDMSVFPTPAHAAAWARLIPRTLQSGTTARPGRTGKGNPYLRGALGQCVMAAARTDTRLGEQYRRIARRRGKQKAIVAVSRVICEIACILIADPAARFTDLGASYYSSLNPQRQTRSKIREIERLNPGMKVTLTPAGPAATAA

SEQ ID NO: 277543 - protein, 370 aa, unidentified
MENYSGAFVAFDVAKAKHAVAIAENGRQGEVRFLGEVENTPTAVARIIKRLAKRHGRLHVCFEAGPTGYGLYRQIRELGHDCMVVAPALIPQRPGERVKTNRRDAMMLARLYRAGELSGVWVPDAIHEAVRDLVRAREAAADDLRRKRQQLLSFLLRHGRIYTAGRDHWTQAHRRWLACQSFEHTAHQIVFQESINAIEDASQRLRRLGEQLASIVPNWSMAPMVEAYQAMRGASFLVAVTFAAEIGDLRRFDTPRQLMAFLGLVPGERSTGETVRRTGLTLAGNRRARRVLVEAAWSYRFPARVSETLRARLDGLPKAVRDIAWKAQVRLCARYRRLSAAGKKLPIVVAAIARELAAFLWAIGRQVAPA

SEQ ID NO: 277544 - protein, 394 aa, unidentified
MKLVGIDVGKNSHHFCVMDKETGELNVTPSSFPNNKEGFDFLINSLKPYSKKSILLGMEDTGHYHVALLKFLLSNGYTVALINPKTTDLTRKMEGGITKNDKLDTITICDVLDTPERKKQYRITKVDRFDLYEQRQLTRHHHNLKEELNLYCNRLQKSIDLVFPEFNTLFSSKYGVVYMNLLKTFGSAEAIASTDIRTIRKCFEIKGRGGRISLTPEKLKECAKNSIGISSEVETIQIKHLVSQITLIKEQIAEIDKKIEEFSITNNSPILSIPGISHFSGTSILAELGDIGNYSKPSQIIKFAGVAPYHYESSQYNAQHTAITKKGSKYLRKTLYQIILPVINNNPVFKKYYRLKISQGKGHRCAQGHCIRKLLRIIYHLLETGQSFDPALLR

SEQ ID NO: 277545 - protein, 460 aa, unidentified
MKKSRYRTVPVQAVKAPTLIAQLGQGRCIVAIDIAKEAMVAGIANAAGVCQQLVRFSHPTQTLLFATLLVALRESGLTVEVAMEPTGVYGDSLRHVLKQRDFAVFRVDPARAHAMSQVLDGVPSLHDPKACTLIADLHARGLSTKWQEKSAFELETRALMDERDLSARPFERCVGQLEATIARYFPELGAHIAHSASWHLNLLSVFPSPAHIVADPQGVREHLRKSSHGTLSAAKIDAVIADARRSLGTPMSPGEAALVVRLATFMLELRARMKEVDRRIRERLATQTDLKHAVTAFGATTMGAILADLGNPAAYGSAAAFEKAMGLNLKEKSSGKTSENAPLHITKRGPARSRQYLYMAALRAIIHDDTVRAWYQHRRAFAAGYKIKAVVAVMRKLARALVHVARGNPFDASKLFDVRRLGLTPAEPISPSQLPTHAEGEHELGHQLVLCPTPTSLATR

SEQ ID NO: 277546 - protein, 426 aa, unidentified
MNEVEDTRLKEFRQLKKEIRGSKDHLIVGVDIAKEKHHAFFGTATGKTLLRRLIFDNTIEGFEKLLTQVRAIQVAQGLPKAVFGLEPTANYHKPLGEHLIKCGRMVVLVSGVAVKRNRELLDGRWDKHDTKDAANIADLISQGKCLYYEYPEMGLRDLRTLLSLKKKLKKQEHSYRVRIRNHLLAQYFPELDRFSGRPEVEPIIRWCLDTSELAGLEFDQFVQRVVPGRKTLAQHQRLQTIQQLAIDSIGCEMGEGAHFEAQVMVDGLRQLRETIKTTDERIRETCRQFPEYGYLLTIPGFGPDVSAKVIGALGNPFRFQNRKQVLKMAGLDLSADRSGKTSDTATPVISKKGKADLRYALYQAAFIASTRHRPWIEYYTDQLQGRAKEAGIKTKRWVKLSAKFLIIAWTIMKKKEPYNPQYLTPA

SEQ ID NO: 277547 - protein, 366 aa, unidentified
MKKNSTVAVGRKQIFKQAKLTIGLDLGDRSSHYCMLDEAGNVILERSLPTTSNGIRQAFGRIPRCRIALETGTHSPWVSRQLSQMGHEVIVAHARNVRLIGESSRKDDRIDARTLARLARIDPGLLGPVRHRSAQAQIHLTVIRARAALVGTRTALVNAARGLTKSYGERLNKCGTEQMNRDSAKGLSQELREALDPLLREIESLNERVKEYDRRIEQIAKEVHPEVARLKQVKGVGTLIALTYVLTLDDPQRFRRSRDAGCFLGLRPGRRNSGQSEPQLHISKEGDRYLRTLMVQGAHYILGPFGQDSDLRRWGLKLAERGGKNAKKRAVVAVARKLAVLLHKLWVSGEVYEPLRNNHKVESAVA

SEQ ID NO: 277548 - protein, 343 aa, unidentified
MNKLNVIGVDLAKNVIQVSVLSPTNRELRNSALTRRKFSEFLGRQRASLVAFEACATSHYWARVALRHGHEVKIIPAKAVFPFRQGHKTDENDALAVAEAARRPNVKLAPLKTVEQQGMQAVQRSRELLVHERVALSNHLRGLLMEFGIVIPQGFASLYRLLPEILEDGENELPDLYRPTLNLLYGRLCDLREDLERLNGEIESLVQNNLVCRRLTQLEGIGPIGSVLLYATLGTGEAFANGRQFSAYLGLTPKQFSSGGKVNLVGISKRVANRRLRAVLIQGARAYVYHMKEPKSTKDRWLWAIVERSGKCKAAVALANKNVRTAWAMLTQNTEYQRYPLAA

SEQ ID NO: 277549 - protein, 401 aa, unidentified
MKRLSGGIDIGCESHHIIILDEEDNFLYNQKVAHKLNEFTENIKVFKQIEKKEGGKISFALEGKNGYSTPLDRILLDQGFTLYNVDNLKLKRFREAFAGEWRGDERDSLMLSKMLKLKDYINSERERVFIKIEKPSLITESLKLLSRHQQTLIDEKIRLINRLGKKLLEVCPQILKLGKLKNKKITAILAKYPDFSKYKRITLKSLLKIKGIGKKGAFFLLKRLNNIEYMPGLTDIYKTIILSYAKRIVQLQREIEDIDKKLDEIGKKNKEVNHLKTIPGVATKLASRFIGEIGNINRFPSEKQLAVYCGVACVDNNSGKVTKARAVYKANKICKKTLITMAGCSIRFSPQCKAYYLKKRAEGKSHNHTLRCLARQLIKVIYRMLTEDREYIVRKDLKKVA

SEQ ID NO: 277550 - protein, 402 aa, unidentified
MNCVGIDVSKGKSMIAVMRPFGEVVVSPFEVRHTASELSELARLLKNLDGETRVVMESTGNYHAPVAWLLHGAGLYVSVVNAMLVHDYGNNSLRRGKTDKKDAVKLANYGLDHWLTLPRYVPEEDTRLMLKTCYRQYQQYSKVQTMLKNNLISLLDTAFPDANRLFTSPPRADGSEKWVDFVATFWHCECVCGLSKKAFTAKYQKWCRKHGYNFSQDKALDIYASACGRFGVMPKTNTAKLLVEQAISQLQTTSAALAALKQEMQSLAASLPEYPVVMGMFGVGPTLGPQLIAEIGDVRRFHSKKALVAFAGIDAPPYQSGQMDVRSRSISKRGSASLRRTLFLVMSVILQHAPMNEPVYQFMNKKRSEGKPYRVYMMASANKFLRIYYASVKSYLDSLEHD

SEQ ID NO: 277551 - protein, 310 aa, unidentified
MEQIFVGIDVSKDRLDVHVRPSGESFAVGRDGEGVEELVDRLRTLTPMLIAVEATGGFETIVAAAIGGAQLPLVVLNPAQVRHFAQAVGQRAKTDPIDAEMIARFAEAVKPAPRPVPDAAARVLGELVARRRQIIEMMVAERQREKRAGNLRVRKSLARHIKVLERELQDLTDEIGGLIRGSPVWRETEDLLVSVPGVANKTSSSLLAEVPELGRLTRRRIASLVGVAPYTRQSGRWKGKSMIAGGRAAARSAVFMAALTASQHNPLLKAFYRRLLAAGKPKMLALIAVARKLLVILNAMIRDKKPWQYA

SEQ ID NO: 277552 - protein, 337 aa, unidentified
MKYSGIDLHSNNCVVVVTDEQDHVLEEKRVPNDLVVILKLLEPHREDLAGVVVESTFNWYWLVDGLMEAGYAVKLANPAAIKKYTGLKHSGDETDARHLAQLLRLGILPTGAILPKELRATRDLARKRMQLVRHRTMHILSVENITARQFGTRISCNQVKRLGLPDIEAMPLPGDVKLALKAHVAVIATLSMQIEVIERRIKEQLVPRAEYRLLESVPGIGRTLAPVILLETGPIGRFADVGNYASYARCVESRHTSNGRKKGQGNTKNGNKYLAWAFVEAANFARRYHAPAKRFYERKKARTNNVVATKALAHKLARACYHILKEGKPFDDARCFT

SEQ ID NO: 277553 - protein, 359 aa, unidentified
MYFAGLDAHLKYVSLAVLDRRGQVALETSVSTREPEQLLAALAPYRPLDVVVETCPFWPWLYDLLVPAGIGFHLAHAKQLRAIAAAPQKSDAVDARLLARMLLAGLIPEAYPRPADQRELLRLLRHRTTLVRYRTRLAGRIHSQLHQQRLSLPREKLLRQATRAWLEETAWPRLTVEQQAIVTTHLELIDGLTPLVQALERRIATAAAGHATAPLLATIPGIGPYRSLLLAAELSPITRFPRAEHLVSYAGLAPVTRSSGGHTHHGSIPQGANRWVRGALVSAIPTHVRWAPTSPVTMAYAQLKARLGWRVARVAAARKLARVVYVMLTRRTPWCGAPVAGDVRDEVQNSHVAATTSFC

SEQ ID NO: 277554 - protein, 401 aa, unidentified
MSINGAPVSAVVAVDVGKKTAALLATGADRRRLLGPVDFAMTAPALAAVLERVCAVLPAGPVKVGIEAAGHYHRPLLAAGVWPVGWQVLELNPARVTEQRRVQGRRRVKTDAIDLEAITELVLAGHGVPVTARAAAVTELTGWAAHRRRRVLTRTATKNQLLAQLDRCFPGLTLALPDVLGTQVGRLVASEFADPHRLAALGVTRFIRFARNRGLRVRRPVADRLIAAARDALPSPDAVVARQVLADDLALLTDLDAQILAAEAQMARLLPDTLFAPLTTVPGWGTVRAGNYGAAVGDPHRWPGAPQLYRASGLSPAQYESAGRRRDGTISREGSVALRRALIDLGIGLWHADPAAKAYGQALRARGKKGAVIGCAMAHRANKIAYALVRDQTGYQPDRWA

SEQ ID NO: 277555 - protein, 348 aa, unidentified
MDYYAGLDVSLEATSVCVVNGDGKVVREGKLPSDPDAIELFLAEWGVQLKRVGLEAFSFSAWLHAALDEKGLPVTCIETRHTKAALAAMINKTDRNDARGIAQLMRTGWFRAVHVKSREAQALRMLLGGRKALLGKVLDMENMIRGLIRPFGLKVGTVSTGRFEARVRELLAGADDLERIVEPLLVARAAMRLQFARLHRLALAAARNDQAVKRMMTVPGVGAIVALTFRATVDDPGRFRKSMTVGAHFGLTPRRYQSGETDRSGRISKCGDDLTRAMLYEAAIAILTRIPKSFKLRLWGLRLLKKKGLKKAATAVARALAVLLHKIWVDGSTFRYGVGLRGGRIARA

SEQ ID NO: 277556 - protein, 433 aa, unidentified
MLNSCPFDLVIGLDRSDRKADLYFIHTVSGKTERQTIGTSPEALHDWLLHLRQKHPDARVAICLEQPAAALILFLETYLWVTLYAINPITLQKFREAFVTSRAKDDGKDAQYLAELLHTHHSKLKPWQPDDAQTRRLQQLVSHRRAVIDERTGLSNRLKALLKQYFPQALELGGEDLWRPLATAFLLKWPTLQSLQKAKPEAIKTFYYLHGSRSQKLIAERLEQIGKAISLTDEAAILESHTLRVQLICRELQLLHKTIAEFEDKIAAAFKAHEDHDLFASLPGAGPVLAPRLLASMGSERERFATASNLQRFSGIAPITKQSGATRYIHRRYRCPVFCKQTFHEYAKESILFSRWAAAFYLQQRQKGSSHHTAVRALAFKWQRIIWKCWSTRTPYKEEIYEASLRKNGSSIVVLLDQIEVGKSPVKTTMEKS

SEQ ID NO: 277557 - protein, 354 aa, unidentified
MKKLSRMSSTLTIGLDLADVWSDWVAIDADGVVVARERVRTSEPQLRRVFGHLSASVIALEVGTHSAWVSRLLESCGHTVIVANARRVALIHRNKRKNNRIDAELLARLARADRKLLFPITHRSKRSQTDLSLLRTRDVLVRTRTKLINHVRGASKSFGVALPKCSSESFATRARASVPKVAAALAMVLDQISTLTEQVRELDRSIDAMLKRHPAARRLTQITGVGALTALAYVLTIEDPARIVRSRSAGAFFGLVPGSADSGEKHEPMKITKEGDGFCRRLLVNAAHYIVGHFGPDSDLRRHGEAIAARGGKNARKRAVVAVARKLAVLMHHLWSTGADYIALYHSAHQPAAA

SEQ ID NO: 277558 - protein, 349 aa, unidentified
MPRTIPQNAAIYGIDLGKNIFHVVGFDGTGAVVQRVKLRRDTLLRFFERANSAVVGMESCPSSQWLARKLAAMGHQVRIVAAQFVKPYVKSQKNDTIDAEAIAEAVTRPTMRFTHPRTVEQVDLQARHRIRDQLVASRTALINQMRAFCLEYGITFPQGAGLFRRDLPGALADQDNDLTPAMRRILADLSADLARLDQRITDLTREIEQIAGRDERARRLLTIPGIGPLAATALLAAIGDGRQFRRARDLAAWLGLVPQQHSTGGKTTLLGISKRGNRYIRRLLIHGARSCVTHLDRTRDGLGQWIDALRARMHINKVIVATAAKIARTVWAVVTRPGALYARRDLVAA

SEQ ID NO: 277559 - protein, 466 aa, unidentified
MKKAEHPSNKAQLPKHLQQLNLFAAGIDIGSKSHFVAVPEGTDEQPVREFQCFTADLHRLVDWLISCLVTTVVMESTGAYWIPLFEILESRGLEVKLVNARHVKNVPGRKTDVLDCQWLQQLHTYGLLEGAFRPPEQICALRAYLRHRMNQVRYGAAHIQHMQKALTQMNLLLHNVVSDLTGVTGMRIIKALLAGERDPQVLAGMRDKRCKNSIETIAKSLEGNYRPEHLFSLKQAVESFEFYQTQIAQCDREIESLLASFDAKVMTTPPTNSDPEDGASVKAQGRAPAFNLKDELQRVTGVDLTKIDGIDTTTALKVISEIGIDMSRWNSEKHFASWLGLSPGSKITGGKRLSGKTKPVVNRAAAALRMAASSLYRSQCALGAYYRRMKARLGAPKAITATAHKLARLIYSMLKHGNEYTDVGQDYYEQQYKSRALKNLKARARQLGFDLVETVVENTSKNSVLA

SEQ ID NO: 277560 - protein, 354 aa, unidentified
MNVPHYIGFDIHKKSIQYCVKTADGAIVREGRLSAERAVLVQWALTLTEPWQGAMEATLFSGWVYDTLKPYAAQLNMAHPLMMKAIGASKKKSDRIDARKIADMVRCNWLPVCYVAPAEMRELRRLLRYRNLVVRQAVRMKNKIAGLLMEVGEPYNKRRLHGKKYFDELLGNLEETPESVKHLLRLSRGVLVLFESIQMQLLQRLREEPKLRERVRRLQSIGGVGEVMALVWALEIVDPHRFSSIGQAQSYCGLTTALKSSANKEQRGPISKQRNAHLQTTLIEIAKLAPRWNPQLAALHARELERGHRNRATLAVARKLVAYLLAVDKSGQPFQVRGEAGVEAGTEAETKAVA

SEQ ID NO: 277561 - protein, 341 aa, unidentified
MKNKSFIGIDISKNVIDVSIFCEETPIKDFSHDVFNNSRKGFGEMCTWLKKNHVVLSNCLFGMEFTGSYSMELEKFLNARNYQFCMLSTHVVKHYPMGSKDKSDKIDSAKIADFLYRYNGTECVKPYKMPDKTMQRLKALMNERKFLVEQRTCFMNRRQLCTTKEDAQLYDGYIKKFSRDIDNIELEEQKLLATDDSLLATYKNLLTIPGVGFVNAINVIVITRNFTAFETARQYASYVGMAPHSHTSGTSVRWRPRPSARCDGQAKADLSMAATVAVQYDAELQSFYNRKLGGKQDSDTKRKALNAVKFKLVLRMFAIGKQNRKWEPLDSKSSNEKLAIS

SEQ ID NO: 277562 - protein, 367 aa, unidentified
MENHSIVWVGMDTDAKRNHVALYRGWEKEPAAEWEAGMDGKGIKQLIERLKKEQGEVRCVYEAGPSGYPLCRKLRQAGIGCDVIAPSLIPRKAGDRVKTNRRDARNLGRLYRAGELTAIEVANEAQEAVRDLTRAREDVREDLTRRQHRLSRFLLRHGYIYQDGNKWTGKHWVWIGKIRFEDSILQAVLEESIRAVQQSQEQLKTYDARIEETAQKPEYEEKVGRFKTLRGVQTITAMTIVAEGADLRRYTTAPQFMGSVGLVPSERSTGDQERRGRITKTGNAHLRRVLVEAAWHYRHRSIPGAGVKKRRNGQPAAVVTIAERADQRLCRKFRKLVDRYNKKPAIAAVAVARELAGFVWAIGQQEL

SEQ ID NO: 277563 - protein, 345 aa, unidentified
MRLLYGGLDVGSSNCHFTALDSDGAVEASTEIPTSELHITALLSSLNSDEKIKLHLEASELSRWIRDVILERVPNIEEVVISDPKRIMWITRDPQKGDKVDSLKLADLLRLGTTHPVYYSDDGRMSSFKKCVQNHESLVEECSRSKNKIKATLRWLGMIFKDDIPFRKSQREIILNEIKEPIQKQDIEDQYKLLDQKDELRKKAEKRMRKLSKNWPIIEKFMEVPGIGLILACRFFAYVQTPWRFATKRKLWKFGGLGITARSSDGKPLGFKRLDWNGVPTLKALSHSAFRVAIGQCEDNSFKRTYYRSLHNTNNADHARLTVQRKILTVLWTMWKNNERYDDSK

SEQ ID NO: 277564 - protein, 331 aa, unidentified
MNYSHFVGLDVGKKTFDASLMSADEKELSHKSFDNTPTGIQSLLDWIAGYHLSLSKLLFCAENMGSYVTELSVSSVSMGFSLALVCPLTIKKSIGLQRGKNDRIDAKRIANYAVLHYRKLELYKLPDKDLVRLRGWIIIRDNLVKQKVSSIKLLETFSWMAKLADVTESISFLEEQLKSIKERILEVEEDMEQLIAASTSLYTNYLLLRSIKGIGIINAIVLLCVTDNFQRFDNPRKFACYCGVAPFEHTSGISIRGKTQTSSLANKEVKVYLTRAAITAISWDPQMKAYYKRKIAEGKHKASVINAVRAKIIARSFAVIRRQTPFVTLTV

SEQ ID NO: 277565 - protein, 410 aa, unidentified
MSRRCIGLDVHRDFCEVAIWDQGEVRSAGRIDSRPKTLAEFAATLGPGDEVALEATSGARQVAEILRPCVARVVIANTHRLAAISEAKCKTDRNDARTLAQLLAAGMLEGSWLPDEQTRALRRRVSRRHNLVVARTRAKNEAMSVLHRNLSQRPPMSDPFGVKGRKWLGALELPDDEVETLSASLRLIDFHGAEIETIERELARFAASSAEARRLITVPGVAMVTAVTFLAHVGEIGRFAAPKQLVGYLGLDPRVRQSGNGTAFTGRISKEGSVLVRHVMVEASHSAIRTPGPLLAFYQRVRSRRGHAVAIVATARKMVVLFWHLLTHGEDYRHSIELVTNKKLRKVELLAGAPRRRGGGRCEGPNRDQRREIDRDRAQRAADDYRRVAERQNGPGTDKVKDASQTPART

SEQ ID NO: 277566 - protein, 420 aa, unidentified
MQSARTTLPEEPAGGVTAGIDWARDDHAVPVVDARGREISRCTIEHSAAGLRELAAVLARAGAGEAAIERPDGPVVDALPGAGITVVVISPNQVKNLRGRYGPAGNKDDRFDALVLAGTLRTDRARLRPLTPDSPATVALRRACRARKDLVSHRVAVANQLRAHLRNAFPGAVGLFADLDSPVSLAFLARFDTRDRADWLTPVRLGKWLASISYSGHTDPAVPHARLTAAPRGLTGPGAAARAGITRALHAVLVTLTEQIKALSAQIGTQLAAHADSHVFTSLPRSGTVRAARLLAEIGDCRARFPTPEALACLAGTAPSTRQSGKIRAVTFRWSCDKQLRDAVTDFAGDSRRASPRAAGLCNRARARGHDHPHAVRILARAWLFVIWHCWQDHTAYDPARHHALQRLLAAQPSTAARAA

SEQ ID NO: 277567 - protein, 343 aa, unidentified
MQTITTVGLDIAKSVFQVHGVDAAGQVVIRRQLKRRYVLAFFQKLPPCLVGIEACASSHHWSRELQAVGHVVRLMPPAYVKPYVKRQKNDATDAEAICEAVTRANMRFVPTKTPEQQSGLVLHRTRHLFIRQQTSLINAIRAHLAEFGIVAPVGRRGVEELLQLVADPADKRVPETARACLSALGVHLRRIKEQVLELDRKITAWHRSSEMSRRLDDCPGVGPALATALVATVAEPRAFRSGRNFSAWIGLVPKQNSSGGKDRLGSISKQGDRYLRGLFVAGALAVIRYAKIHGTKHRPWLTALLARRPVKIAAIALANKIARMAWAMMARGERYKEPAALAA

SEQ ID NO: 277568 - protein, 352 aa, unidentified
MKKGIKKVVAVGIDVGDKTSQVCAKDATGAVVWEKKVKTTEAGFRGALGKAGPCRIVLEAGSQTHWIKACLEGLGHQVKVADPRKLRRIYQSESKSDVRDARELAEEALWRWDRMSEVTLRSQRSQEKLAVLKARDALVRARTALVNLARSVLKQEGVVVPKGTPEAFPKKAEPLVPEGQRAALGPVVKQIAMQTEEISGYDRWIEKAGLAEGPVRLMRTTTGVGPVTSAAFVWTLDTPDRFAKSRTVGAFVGLRPRRDQSGDTDKELPITKTGNAFLRRLLVGCAQYILRRSSPKSALKDWGLKLAGRGGKRAKRRAVVAVARKLAVILHRMWVTGEEYVPFPQRARAHAA

SEQ ID NO: 277569 - protein, 523 aa, unidentified
MAATRTRKRSRRRFVDVIQKPSGTIHPRVQKVGPEHFGIVSVDCAKARSKWMLCDFYGNILIAPVVVAHNRNDLQAAVERLRLAVERHGLRDLIIAIERTGRYHHFVRDAFVAASYEVRLVHPFATKCYRQPSDPGNKTDDTDLVGIHGAAVNGLALIEPARDEAWTILQLRIRQRRDLVQKMSQLCCQIREHLEACLPGFASCFDDLWDSPVAWCIVRRFTSPQAIHQAELAGLQRLLRAADIRHQQRTLDSVLAWAEAAPAPELAASTHHAIVLTLDDDRLRKTQEIHALERDLAGRLARTPYVLLMSFPGINVVSGADFAGEAGPIQYYTQASAIRGRAGLRPSRSQSDQVDRPNGPLVRCANRKLRAALLNIADNLVVCNQHFRALAATWRAAGKDPRHTRVKIAARFSRIAYQIVAGGQVCRHPAIQQRSYVLEKLLAFHTTHATPMAQTLTDVQAAIDQLPKSAYADEARPLVEELDKINQGRRRGPQPLGDIIPIVLARLGVRLLQSPASGESDSH

SEQ ID NO: 277570 - protein, 357 aa, unidentified
MQEYIAFDSHKHYTWVEHQEANTGELRQYRLEHEPGAIQRALGHCTPGTAVAVEATANWYWITDEIERAGCVPRLVHPRKAKLMMGQINKTDKLDTHGLNILQRNGTLPTVWIPPGKLRELRELTRTRVVLVAQRTRWKNRITATLAKWGLPASEYSDPYGKKAREELEQRLARLPEQTRWATRQMLVQLDGLSAQIKEFEKRLEELVEVTPAMQWLETLPGVGVILSATIALEVGDIGRFLSAERLASYSGTVPRVHSSGDRTRYGRTRPDVNRYLKWAFAEAANSIAVNYRRCPDRHVSQLYARLRARKGHNKAVGAVARHLAEAAFHVLSRQQAYRDPTNTSGSDQRGVNAIRS

SEQ ID NO: 277571 - protein, 339 aa, unidentified
MRLYAAIDLHSNNNVLTIIDDSDHVLFEQRLPNDSREVLARLAPYRESIEAIAVESTYNWYWLVDGLMDAGYTVKLANTVAVKVYDGLKYTADEHDARHLAHLLRLGILPTGYIYPKEERAVRDLLRKRSQLVRCRTAQILSIQNLVSRNTGHGIKTDQIRELDEEMIRQLSNNDDDRAMAVKSNLEVMRCLDEQIRILERAVLAKAKLKPSFEKLLTVPGIGNILGLTIMYEAGDVGRFAKVGQFASYARCVQSSRWSNNKKKGEGNRKNGNKHLGWAFVEAANFTVRYSERARRFFQRKKAKTKAVVALKAVAHKLARACYHVLKDQVPFDESRAFA

SEQ ID NO: 277572 - protein, 388 aa, unidentified
MQVVSDRAAAPTAIQTDLRAIFVSLELSRSTWLITSLSPGGGEKMSKHSVQAGDIAGLLRRFAQLKEKARARTGRDFPIITIQEAGLDGFWIHRVLLSEQIESYVVDPASIATSRRRRRAKTDKIDGETLVRTLLAYKRGEPRVCAMVKVPTPEEEDSRRLCRERKVLTAERVLHVNRIKGLLFCQGISGYEPMRRDRHERLEELRTGDGRPLPQHLKAQVNRELDRLELLLKQIKAVEAERDALLVAVRIPAAVPASMLLNIKGIGPEFAAVLWSEGLFRHFDNRRQVAAYAGLAPTPWQSGAVDREQGVSKAGNPRLRTTLIQLAWLWLRNQPHSALTLWFRERVSRNGGRLRKTTIVALARKLLVALWKYVTAGIVIEGAAMTAA

SEQ ID NO: 277573 - protein, 411 aa, unidentified
MELVHPRCAGLDVAKDEVVACVRTPDGRGGRAQQVRTFPTFTSGLEALAGWLAAEGVTRVVMEATGQYWKPVWYVLEEAGFELLLVNARHVKILPGRKTDVCDAAWLAELLEHGLLRGSFVPPAPIRELRDLTRYRKRLIQAHASEGQRVQKTLEDAGIKLDSVAADVLGVSGRAMLEALVAGERDPQVLAELAKGRLRAKLPQLRQALRGRFGVHHALLVRLALAHLEQLEASIAELDAHIDRVLAPFAAARDRLDTITGVGKRAAECMIAEIGVDMAVFPTAGHLASWAGRCPGNNRTGGKRRSGKPTKGNRWLGEVLIECAWAAARSRDTYLSAQYWRLARRIGKKKAAVAVGHSILVIAWHLLASDCDYADLGGDFFVRRDSDRARQRAVAQLQALGYRVTLEPLAA

SEQ ID NO: 277574 - protein, 344 aa, unidentified
MQTMYYIGLDVHKRTISYCVKDASGRVYAEGSLPATRFDLDRWMKTLPQPWTAAMEATVFTGWIYDHLQPHAAALKVAHPLMLRAIAAAKKKNDRIDASKICDCLRCDFLPECYMASTAIRERRRTLRYRNLLVRQMVQMKNKISGLLMEAGVSYNKQRLHRAGYFRELLATNSGIDEGLCSLLRLCRETVVRLQKTESAMVLSLERDSLLMDRVERLMTIPAVGPITALTWALEVGDAQRFSSIKKAISYCGLCGAEKSSANTVQRTPLSKQRNKHLQTTLIEAAKMAPRYSPNLAMLYDKEKQKGNANRATLAVARKLVAYLMAIDRGQRNFQVVETNCIAA

SEQ ID NO: 277575 - protein, 377 aa, unidentified
MSKIRFLGLDVHADTIAVAIADANGEVRRHGMIPNQLEAVRRLVKKLGAGFDLRACYEAGPTGYVLFWQLTTLGVACEVVAPALVPTKAGDRVKTDNRDAERLARAYRAGDLTPVWVPDAAHQALRDLVRAREDAKQDQTRARHRLSKFLLRHGQRPQIHTKAWTLLYMEWVKRKVHCDPPALEATLRDYVREVEHAAQRIQLLEKDLAAAIATSAPAIRAVVEALQALRGVAFLTAVTIVAELGILSRFAHPRQLMGYRGLVASEYSSGNRIQRGGITKTGNAHLRRVVVEAAWAYQRRPWVGGYLGKRQKGLDPEIIDLAWKAQHRLCGRYKRLAARGKNKPQIVTAVGRELLGFIWAIAVKVEARFKLPHTQAA

SEQ ID NO: 277576 - protein, 410 aa, unidentified
MGYETLIRRAHVMTRKNTLKSLPTDTEFRVVGLDLAKSDVSVAAIPVDDNTPSLVDRMTYADLLDWAGKISPTLFAMEPCNGYSLLCLQLENLGHEIKVISGSTVSMWINTHLSGQKTDLNDAIALARLAVSDAELTPIRHKSITEIRIQTVQAVRQQLMSQRSKSIVSFKALAQQWGIPCAAGHRNLKKLRESIEAKVDLITRPVANAMLFLLDAVKSLDRQIGQLNQTLQELVMSDERGRLLQSVLGVGTQISARVITVVGNIERFNSPRSLVAYVGVAPRNFITGHKNLTKKKHGNCPDLSHKGQGKISRRGDKLLRSLFIQGAACLYMQFCKDQLPECQLKRWILKQLASQKPYGKLIVSLAAKLIRIVWAVLTYGEKFNIQKAGMTRSMWSEMALETPLNKEVPA

SEQ ID NO: 277577 - protein, 341 aa, unidentified
MQITTIGLDIAKNVFQIHGIDAAEKVIVRKQLRRGQVTAFFEALAPCLVGMEACATSHHWARELTKLGHEVRLMPAKDVKAYVKRNKNDAADAEAICEAVRRPTMRFVRIKSAEQQGQLMLHRARDLLMRQRTQVINALRAHLAEFGITAAQGREGIKELLAIVAQEEGSRLPSDAHASLTVLAAQLQAVQTMIGSLEKRIVAQHRSNEASKRLETIPGIGVIGATTIAAVVPDPRVFRSGRDFAAWIGIVPRQDSTGGKQKLGPISKQGDQYLRRILIVGAHAVLRRARQQPETYPWLTQLLARRPFKVVAVALANKMARIAWALLAKGGTYRAPQLVAA

SEQ ID NO: 277578 - protein, 454 aa, unidentified
MAHRLKNVESFPVVHARAAGIDIGSRFHVASIAADLDADPVRTFGTFTSDLRALRDWLVSRGITTVAMESTGVYWIPLYEILAEQGLEVVLVNARLGRNVPGRKSDVNDAQWLQRLHTSGLLRGSFRPAEDILALRSYIRQRECLVSIAAANIQHIQKALDQMNIQLHHVVTDITGVTGMNILHAIVMGEHNPKVLATLRNGSCKATESEISAALDGNYREEHLFALGQCMDLYTIYREKIGDCERAMESRLKHLARTHGCCTEALPAPRAKGKQHQGINFDVRTALHSLTGVDLTQIHGIGPGLALKLVGECGTDMTKWPSAGHFTSWLCLAPGNKVSGGKLLSSQTRRSSNKAAVMLRLAAVTVGKTDTALGAFYRRLAARIGKAKAVTATARKIAVLFYNSLRYGMVYADPGASAYDERYRQRVVSNLRRRAEALGFTLADAPMTVSGGVS

SEQ ID NO: 277579 - protein, 387 aa, unidentified
MIEEAASPDAVLGLDVGKSSHWACLVTRAGEVLVNRPVANREPDLDALMSRVPAGTLVVVDQARNIGSLALRRARLAGLPVAYLPGSAAHGAARLFAGEAKTDERDAAVIAKTALGIPDALLPAPEPDGRLEAARSLASQRDHMVTCATRDKNRLRSVLLESCPAFEALADLSDDRWLAALEALGGPWGILDAGKRALGAATRGGDRAAFDAAWAAAESSTRPSEYMVAAENPQVEVLARRIREASAEARRLDGEIAALLREDGTYGCLLTVPGIGPRTASELVIAIRIEDFPDHGHLASYCGVAPRNRRSGTSISSVTASRQGNRRLKNLLIFSCNSLARSGGRFGEYYRSCRGRGMCHGEALKATARKRMKVIYAIMRDKVPYAA

SEQ ID NO: 277580 - protein, 494 aa, unidentified
MNGQGVRPAHRTRILAVEEKVTIRSVGIDFHQGQHRARCLDEGAQSCDSFGFQTTPEGLATLEEHIFRDGSNPIVVFEPAGLPWLTVAAYLRSRYPDCRLVKAKTQKVAALRRYLRGPVKSDRIDALTLAKMPFIDPEQMEEIYLPSAEIHALQRLTRQRKRLEGDIAGRKVRIEAIIDGYLPGVRRAFSSPWSTQVRAFLRSRLNPFAVVRNREKALVTFLSKAASRERGTRAESHEVFQACQAVANICELSQSARTINEEFFVELQDEIARELRLMEMEETESKSLENRISEIYQKLHPSNNLCTIPGVGEHTAPVFLATIGDPSRFRNQSAFANWTGAVPGSRQSSNVEAKGLRMTKAGPSIMRMALFQSGDIGRRWDPQMAAVYYREMVHHGKNHKQAMGAVMSHLGARVLKVLLEDRPYELRDIQGKSITREDARRLILTEYHVPEDIRRERRRRNSVKAYKTEREMPVSRTNEAAKAPQPVKIMAISR

SEQ ID NO: 277581 - protein, 360 aa, unidentified
MDTDKEKSAPSKLKTWFIFGDVTMSYFGVDLHTNSFTVCRRTQQGKNSIRTFQIGRIDEFRKTLRSRDFLAVEATGNTAWFVSQIRDRVKKVTVVDPCKFEVIRKSVKKTDKHDARTLAFYLSKDMLPEARMKTKENAQLNSLAPTRDKLVKQRTALINKIHGVLNSHGIKFKKESLGTEKGLKSIWAFEWDVIVKIELEVLIEQVRSLNKNIKTVDKEMSEHGKKLKGHKNLSSIKGIADRSATVLLSVIGDVNDFADENKLAAYFGIVPRVSDSNETVRHGRITKHGSKLGRTTLVQCTLVAKRYSPYLRRYYQRIKSHRGSGKAIIATARKFLGIIYNTLKNGWVFEDFPNFVIASS

SEQ ID NO: 277582 - protein, 413 aa, unidentified
MDVFNERCAGIDVHKEVIYIRVLIGQGRGFQKIPLKFGTFHHQLVQMRQKLVELGVTHVLMESTGVYWMPVYDALEGFVEIVVGNAQHIMNVPGRKTDETDADWLAKLLRYGLVKPSFVPQRQFRELRQLTRYRRAVVQTRASEQNRVEKHLQIAGVKLSSVASHLFGVSGTNMLNRIAQGDTDPTRLADLALGRLRRKIPQLRDAFKGSISEHTQQLIATQMDQMNRLECTIAQVELKIDDKVKPYYGILARLDQIPGIDLRCAIDILAETGIDMSPWATHRQIAAMAGLCPGNYISAGKRLKNRSRQGNPYLKSILVQAASSAINTDGSYFQSKFRRLKQRRGHKRALVAIAHAMLVTIYYMIKKGEPYRELGANFVTDYENGRKKDDLVKQLHKLGYSVSLVENAAAHTT

SEQ ID NO: 277583 - protein, 370 aa, unidentified
MVNHITIVGLDAHKNSIDIATAETGGNQEVRHYGTIGGDMASLDKAIRKLKSKSGGLHFVYEAGPCGYEIYRHLTAQGFPCVVVAPSMTPKKSGDRIKNDRRDAANLARLERAGELTAVHVPREDDEAMRDLTRGREDAVKAQRTARQRLGAFLLRYGCRYPGRKTWGPAHMRWLSDIAMPHPAQQITLQEYIHAVMECKERVDRLTEQIQKLLPAWRMAPVVKALQALRGVAQIVAVTTVAEIGDMSRFAKPQQLMTYLGLVPSEHSSGDSIMRGAITKTGNSHVRRALVEAAHAYGFPARVSRSLLKRQDDLPQHIRDIAWKAQIRLCGRFRRLMARGKLKTKVVTAIARELAGFIWAIAREVQPQGI

SEQ ID NO: 277584 - protein, 331 aa, unidentified
MDEVKRFVGIDVAKAALDVFMGSAGAAFSVANDEVGIRELLRQLAPADFVILEATGGLEMPVASALAAAGIAVAIVNPRQVRDFARATGRLAKTDRLDAEVLARFGAAVRPEARPLANEQAQALEALVTRRRQLVEMLTAEKNRRASAPKVSHRSIDEHIRWLEKRLSGFDDELGELIRETPLWRERDELLRSVPGVGKVLSSTLLAHLPELGALNRKQIAALAGLAPFNRDSGSLHGSRCIWGGRAQVRRVLYMATVAGVRSNPVIKNFYTQLRARGKYPKSALTACMRKLLVILNAMLHNKTHWQTPALTSPTSNLSPLLGAVSEHGCC

SEQ ID NO: 277585 - protein, 356 aa, unidentified
MATYSLSTLQTFISIHQTDPFWIGVDVHKRSYHIALLRADNKTITFTSTASPEAFVEQLRRLNIPVAGVAYEAGPTGFSLARALLAENIPVTVAAPSKIPRSVSAGSKTDRLDCLKLAHYAGKGLIRPIAIPTAEEEAQRALLRRRHQLVDRVRQSKQRIKGFLLYHGFKETDAIRNWRSDCEEQIAGLPLLPEGRLTMESHLRELRFLQQELSKVADQLECLNRQPEHHTVIKSLTSVPGVGKVVATSFHLELFRPERFQRGEEVASYLGLAPTVSHSGEKTPRGYLVPCGQKRLRSLLVEAAWMWRAKDAKAGEIYNKLLSKTGIPQKAITALARRLAIILWRLSIEQRTYRPA

SEQ ID NO: 277586 - protein, 397 aa, unidentified
MSKKLLSRPLGQCVGLDVHLEFIEIAICEEGRVWSAGRVPATPEGIKTLADSLLPTDRVALEVTGSSREIARLLEPHVSRVIVVSPSDTGISQARAKTDRLDARTLARLLWTGELEAVWMPPEWTCRMRRRLARREQLVRTRSRVKNELHAVLMRCLKGRPPASDLFGVKGRGWLRGLELPEEESETVQAGLRHIEFLDCEIEQVERLIATEALKSPQVKRLMTVPGVNVICAAIFLATVGDIRRFKGQRQVVAYLGLDPRVSQSGSAPARSGRISKQGSPRARWALVEAARSVAQQPGPLHAFSERIRARRGHNLAVVAVARKLAVLFYCMLTREEDYAHQQPSLTARKLRMLEVKAGQPTLKGKPTGVFATRERMRKAEKQLAVDRPPFRGHVLS

SEQ ID NO: 277587 - protein, 357 aa, unidentified
MNGVSVWTAPSIKGDHHVELTGIDVSLEASHLCVVDEAGVVVKEAKVASEPEALVAWFSTLGFSVKRIGLEAGPLSQWLYAGLRAAGLDVALLETRHVRDAFRSMPVKTDRKDARGIAQLMRLGWYRQVHCKSVDAQDNRTLLAARKILQCKWHDLEVSLRGLLRGYGLKVGETNRKTFELKLRELVAGVPGLAEVSEALLKARAVLFEQFRVLDARMIVRARKDERAGLLMTVHGVGPLISLTFVSAIDDSGRFKSSRTVGAHFGLTQRKYQSGETDITGRISKCGDHEVRTALYEAANIILTRPVKGSLLKSWAAKVALRSGMKKAKVALARKLAFAMHRMLVDGTCFDPALAAA

SEQ ID NO: 277588 - protein, 387 aa, unidentified
MQQPNDLSRSLAALDQDSTLIAVIEMSRSTWLVASIVPGINRQPLKKLAADETALLQLLDRWRDEATKTGRTIDRIAVAYEAGRDGFWLARWLRGRGIEAYVIHPTSVAVSREHRRAKTDRLDTELLKRAFLGWLRGERGHCSMAKIPTSEEEDAKRPNRERENLVGERTRIVNRMKSTLARLGLRNFKPTLRKAAERLDSLRTAEGVPLPPNTLAELRRDMARLRFVMDQIREIEAARLTRLEQHPELASHAMVRLLARVIGIGIETADMLVHEILSRNLRDRKAVARYAGLTGSPDESGARRREKGLARAGNARVRRGMIQLAWRFLMFQKNSALAQWYRRQTADSRGTSRKTMIVALARKLLVALWQLVTTGEMPEGVVLRAAA

SEQ ID NO: 277589 - protein, 400 aa, unidentified
MRKPKQRQTKLRQSKQRKPNDLSRSLAALDLDRTLIAVIEMGASSWLVAGLVPGVERQPLKKLKTDEYALLALLERWRGEAVRSGYAITRIVVAYEAGRDGFWLARWLRAQGIEAHVIHAASVAVSREHRRAKTDRLDTELLKRAFLGWLRGERDHCKMVAIPTVAEEDARRPGRERESLVGERTRIINRIKSALARLGIRTFNPTLKKAPVLLNDLRTPEGDPIPPNTLDEIKRDMERRQLICEQIRRIEQERVKRLEQAPDTGPNAMVHLLARVTGIGIETADTLVREVLTRNLRDRRAVARYGGLTGAPNQSGSFNREKGLARSGNPRVRRCMIGLAWRFVRLQKDSPLVKWFELRTANARGSRKTMIVALARKLLIALWGLVHEGVVPEGIVMRPA

SEQ ID NO: 277590 - protein, 376 aa, unidentified
MEHDSTLYVGLDVHKDSITVAYALGTGEVELLGKVGTTKTDIDRLCKRLQSKARHVRVVYEAGPCGYGLYRQLVQKGFDCMVCAPSLIPRKPGERVKTDRRDAIKLVRSLRAGDLSAVYVPTVGDEAFRDLARAWMTAKDDLRQARQRLKSFLLAHDVRYTGHADWGPAHRRWVSQYAFGSEWQQFAFEELRRTIEDRLAQCQRVEAALREAVTNWRFYPAVLGLQAMRGVQFTTAVGMLAELGDLSRFDHPRQLMAWLGVTPTEHSSGDKRRQGSITKTGNSYARKLLVEAAWSYRHPARVSADIQRRHEGIPKAIIDRAWDAQVRLCRRYRRLSARGKNANTTVVAVARELSGFIWDIGRLAMSLALPRSKEAT

SEQ ID NO: 277591 - protein, 522 aa, unidentified
MLKPVLALVFKKPDSNQGLNVKSNRLSLLAFEFNGDTFIVIPIGIISKLVVTFLGAYFIIFKKQTIMKRKQISLEVVNPNAAGIDIGSRSHWVAVGQNAQDVKEFGVYSQDHQELCEWLKKHKVTTIAMESTGTYWQNLFSSLVVFGFDVILVNGRQTKNIKGQKTDILDCQWIQKLHTLGLLSSSFLPDSTTAVIRTYSRHRQNILKQSASAILKMQKYLRLMNMRLDVVVKDIVGLTGTKIITAFIAGEKSGKVLAQNRHYNCRKSEEEISKALQYNGREDYYFALKQEWETYLHLQKQIDQVDVQIKRHLEKVIDTDDDKKQHIASNKPYKRKNKNTIRNTDMNQLSYQYFEGVDLMAIEGVNDALLMAFISEIGLEGIKKFESSKQFTSWLRLAPNNKISGGRVLSHHLPKGSNRLKVALRQAANTIGNLKDGHLSDFFRRINYKKGRATAISATARKLAVIIWNMLTKGIPYHPPTEYLFLDQKRKLKMLSRIKKNIVKFDIRPEDIGLSKILNIST

SEQ ID NO: 277592 - protein, 320 aa, unidentified
MSMEEQQQPRVGVDVSKGRLDVFVRPIGERFAVPNDEPGIEGLVGRLEGVRPVLVVLEASGGFERPVAAALAAAGFAVAVVNPRQARDFARATGRLAKTDALDAEALARFAEAVRPEPKALPDEEAALFAAILARRRQIVGMLTAEKNRLSATAPEPVAKRIRAHLRWLEKELACTDRDLDETIRQSETWRENEALLRSVPGVGPVLARTLLAELPELGSLAPKRLSALVGVAPLNRDSGTLRGRRTVWGGRARVRAALYMGALVATRFNPTIKAFYERLSAAGKPKKVALVACMRKLLAILGAVLKHRTPWRSPHALTP

SEQ ID NO: 277593 - protein, 383 aa, unidentified
MESTLITDFTPEMTTLAVAFELSKASWKIGLHDSKREHPAMHTVADEAAQKRLEQAVAVIEETKQKWGLAQPLRVVVMYEAGQDGFWIARALIQLGYEALVIDPASIPVERHARRAKTDRLDTIKLLTCLRAWLRGERDRMHVIRIPESAAEAQRQLVRDRGELQKECGQHRDRIRKLLRTVGCWDSMDSHFARRLADGDVRCHDGSALAPELQQRLRRESVRMELAEQQLLALEKALVKQLPESTQERIATLTRLKAIGKVGAMRIVLELFWRDFDNRRQVGSCVGLVPQPYDSGESHIDQGISKQGNRRVRALLVEMAWMWLRYQPESALTRWFDKRTQGSGLNKRARRIAIIAVARRLVIALWRYLKDGVIPDGATLKAA

SEQ ID NO: 277594 - protein, 322 aa, unidentified
MAQQTVKFNQVIKCGCGIDVHQQVIVATVRHNDEKYETREFDAYTSSLTKLREWCKSEGVTHIAMESTGIYWKPVFNILEEDFEIILVNARHVKNVPGHKTDKKDSCWISKLLVGGLLKGSFIPPRDIRELRDLVRYKKKIINQAASEKNRLIKILEDCNIKLSSVLSDVSDGASATKIINDIISGETDIEKMIKHVHGKVKASREEIHKALEGRITPHHRFMLKIIKERITETEKIILKIEKQIDKAVKQYQVEIDLLQTVPGVGKDSAISIISEIGVNMNQFPNEQHLSSWAGMSPGSNESAGKKKVPEPYTETNISEQH

SEQ ID NO: 277595 - protein, 487 aa, unidentified
MAEHSMAYVAFDTSKLHNAVAIAEAGRAGEVRYLGEFENTLAATAKLVRKLAAKHGALSCCYEAGPTGYGLYRQIKQLGHDCIVVAPSLIPRKPGKRVKTNRLDALSLVKQLRAGDLTAVWVPDERHEAVRELTRARGAAVVDWRAKCQQVSSMLLRLGRHYPGKKTWGKAHMAWLAGQKLEHLEQRIALEERLVAVRQAQERIERLEQAIREAVPAWSLAPLVTALMALRGIDFIAATALLAEIGDLGRFRTPRELMAWLGLVPSESSTGEDTRRGPITKAGNRRARQMLIECAWSYRHPPRVGRDKLARVSAAPAAVRDIAWKAQVRLTGRYRSLCRAGKLDVVAITAVARELAGFIWAIARAVAGGATAATADAKQADADNGSGGARSASHPSAISSRNGIQGEPTHGTQATGRTRIDRRRTPGALPDTAKRVVAGDTTGAAPQPAHTATQPQPGAALARGGRRTRRLAGGVCRVAAGSAGGNP

SEQ ID NO: 277596 - protein, 349 aa, unidentified
MVILGIDAHKRTHTVVAIDEAGRQLGTKTTLTTTTEAHLEMVRWADRFGPERRFAVEDCRHLSRRLESDLLAAGEVIVRVPPKLMAHARASARTYGKSDPIDALAVARAALREPDLPVARLDGPSRELRLLVDHREDLVRDRTAHINRLRWHLHELDPSWDPAPRSLVRYKTLDALLARLEGVEGMVARIARDLVARIRGLTVQANALGREILALVCSLAPALLELPGVAGLTAAKIVAEVADVRRFRSKDAFARHNGTAPLPVWSSNRVRHRLSRTGNRQLNAAIHRIAVTQKRCHEGAKSYLERRMANGNTKTEALRALKRKLSDVVYRALLADAASASSARFGEAA

SEQ ID NO: 277597 - protein, 402 aa, unidentified
MISVGIDVSKGKSMIAAVDHIKREVCPPTEFAHTKNGIEKMSAMLMNLSKSTSPNIRIIIESTGQYHEPILQCSIKLGFFISVINPILTNEYGNNSIRKVKTDKEDALKIARYGIDNWHHLHEYLPRDTIRHQLKTLSRQYNLNIKTIRQYENNLIAILDNTMPGANKLFASRKRKDGRQKWIDFVQHYHHADNITMLDLTAFIVDYEQWCFENRYKYNTAHAIKVYNALKLQTTTQENNAFSKLLVTTSTMQITTLSMNQAVVKEEMIRLSTLLPEYGVVSSLYGVGDVTGAQLIAEIGDITRFKSKKSLVSYAGIDPLPQQSGKMNKISTKTSKRGSPHLRKTLYQIVCTHLRHSPAHDKVYQYLDRKRTEGKPFYVYMTATSAKFLHIYYAKVMEAFGA

SEQ ID NO: 277598 - protein, 347 aa, unidentified
MRFYTQPHAFYCGIDLHARWMYLCILDPQGEVLLHRNLRACPEAFLKAVEPYRQDLVVAVECIFSWYWLADLCAQEGIEFILGHALYMKAIHGGKAKNDRIDSQKIAVLLRGGMIPVAYVYPPQMRSTRDLLRRRTYLMRKRAELLVHVQNTNSQYNLPEIGKKIAYRANRSGVAERFSDPAVQTSIAADLSLIDFYDTLLNRLELFITSQVKQQDNHSFYLLRSVPGIGKILALTILYEIHDISRFPRVQEFVSYCRLVKCSRQSAGKNYGFSGKKIGNVHLKWAFSEAAVLFLRHNPEGQKLLARLERKHGKAKALTILAHKLARAVYFILRREKTFDLTQFLAA

SEQ ID NO: 277599 - protein, 412 aa, unidentified
MTDEARRWFAGVDWGSEKHQVCLLDEAGAVVGERAFRHDGAGLAALCDWLVSLAGGARAVAVAIEVPHGPVVDALLDRGFAVHAINPKQLDRLRDRISVAGAKDDRRDARVAAAGLRTDPHLFRRVAAGDPAVVELREWSRLAEELQQERVRLGNRIRQQLWRYYPQLLELSEDVTPEWILELWAVAPTPAKATRLREATVARLLGRHRIRRLDAASVLEVLRQPAITAAAGVTEAAVLHLRSLVARLRLANAEFHQAEQKLGELCARLSQDAAAAARGPGDAVILRSLPGVGTITLATLLTEAGDPLGRRDHAALRTLSGVAPVTKRSGKTCVVTMRYAAQVRLRQAVFHWARVAIVHDPKSRSRYEALRARGHSYGRALRGVADRLLGVACVLLQRQVLFDPYHGKPAAA

SEQ ID NO: 277600 - protein, 390 aa, unidentified
MHVVAHQPEAPGAIRSDLGAIFVSLELSRSTWLITSLSPCAGEKMSKHGVAAGDIGALLARFSEFKQKAFARTGRSFPIIVIQEAGLDGFWIHRVLQSEGIESHVVDPASIATSRRRRRAKTDRIDGEALLRALLAYKRGEPRVCAMVKAPTPEEEDRRRLSRERKTLIGERVEHVNRIKGLLFCQGVSDYEPLRRNRRQRLDELKTGDGRALPDHLKAQISRELDRLELLLEQIKAVEAGQNTLFAAAKAEAPTPAPVTMLLDIKGIGPEFAAILWMEAFFRSFANRKQIAAYAGLAPTPWQSGAVNCEQGVSKSGNPRLRTTLIQLAWLWLRHQPQSALALWFKERVTRNGGRFKKTTIVALARKLLVALWKYVTAGIVIEGAVMKAA

SEQ ID NO: 277601 - protein, 371 aa, unidentified
MKSIIYIGMDVHKKTYSLCALLKETGEIIGETKIPADVSLIIKFIENAKKSVDSDDVQIKTGYEAGCLGYSLYWQLAEKGIECDILAPSTMHRSAKNKVVKNDRRDAKNIATNLANGTYKSVYVPTDEDVEIKEYIRMMHDFKIELKKVKQHINAFLLRFGHHYPGKSKWIPAHIKWLKELELSDMYREILDEYLSQLEILTEKIERFKYRLEELSQKETYNEKIGQLRCIKGIDTTAAMTMHAETSDFDRFPTANAFASYCGLTPGEDSSGESYHRLSITKQGNSMIRTTLIEAAQVLVRGTIGKKGKKVKSKQKDQDVKVIDYADKAVIRLQKKYHRMIFRGVKRNVAITAVARELACFVWGIETGHIS

SEQ ID NO: 277602 - protein, 344 aa, unidentified
MEAHVSVVGLDIAKSVFQVHAVDSVGKPIIRRRLKREEVETFFRKLPPALVALEACPGSHFWARLLREVGHDVRLLPAQYVRPYVKTNKSDAADAEAICEAVTRPTMRFVPIKEEIQQEVLVLHRVREMLIRQRTQLINSIRGHLAEFGIIAPNRAHNIGLLTKLIEDEEFDELPAVARHALRYLVEQLREVKTKLFRIDRDLMKIVKGSDACRRLMTIPGVGVVTATALVSSMREPADFKSGRHFAAWLGLVPRQHSTGGKESLGGISKRGDGYLRRLLIHGSRSIMRWRGRSWTWLAKLRDRRPANVAVVAVANKTARIVWALLKFGGTYGQPGDGATMRAT

SEQ ID NO: 277603 - protein, 404 aa, unidentified
MTVVCAGIDWASEEHAVCVLTDEGELLHEGTVRHDEAGLGELCELLCGLQADRVAIERPDGVLVDRLVAAGLPVYAMHPNQVKAARARFRTAGGKSDRFDALVLAELARTDHHRFRPLAPDSDETRALRALTRAREDLVATRVALANQLRAELERFWPGAARIFADVDSPIALAFLERYPGPADAKGLGERRLAAFLARHSYCGRRAAADLLARLREAPVTALGELEAEARRGVVLALVAALKVLVERIRLLSSEIAGAVRQHPDGALFLSLFRDRKSTVTAARLVAEIGDQRGRYPSAEALAADAGMCPVAVESGKRKVATFRRACDKRLRDAVVTLCDSTRHWHPWAHDVYERARRRGCDHPHAIRVLGRAWLRVVWRMWQDRVPYDPDLHGSLRALPVTGG

SEQ ID NO: 277604 - protein, 386 aa, unidentified
MTKKITNPEILAIREAAETDPARARVWVGLDVGLKSTAVCVLDGDGKVVHQCSMKTHPTEIGRYLAKNFTSNVAVVGMETGAMSVHLSGGLRRLGYQVAVMDALQVHRVLSLKRNKTDTNDARGIAEITRTGRDYLTEVYVKSAACYEVRAQLIMRHRLVQQRTANENMIRGLLRVYGGRVEPGAKSAATYRERVIEQLLLIQDHEGINLRPRILPVLDLCERLQADAQRIETELEALAAANPICRRFMAVPGVGAITALSFFTAVEEPSRFRRADDVAAYLGLTPRVYQSGESLTHGKISKMGNRLTRTHLVTAATVMLSATKTFSSLKDWGLRLAKKVGFNKAKVAVARKLAIILFGMWRDGTHFQFKADTVEPHRQMMQAARA

SEQ ID NO: 277605 - protein, 393 aa, unidentified
MPVLAAQSEAAIAVRTDLCAIFVSLELSRSTWLITSLSPGGGEKMSKYSVSAGDIDGLFRRFGDLQERARLRTGRSFAVVTIQEAGLDGFWIHRVLEREGIESWVVDPASILTSRRRRRAKTDRIDGETLVRTLLAHKRGEPRVCAMVQPPTPEDEDRRRLCRERKVLTAERISHVNRIKGLLFAQGVRDYEPLRRDRRVRLEELRTGDGRCLPVHLKAQISRELDRLEIILVQLKAVDSERDALLAKGNEDQPPTPASLLVQLKGIGPEFAAVLWSEGLYRSFNNRRQVAAYAGLAPTPWQSGSIDHEQGVSKAGNSRLRTTMIQLAWLWLQHQPGSAPSIWFRERVQRNGGRGKKIAIVAMARKLLIALWKYAVHGVLIEGAVANTASQKG

SEQ ID NO: 277606 - protein, 480 aa, unidentified
MLLLRSGHFEVEQDWSVLSPLHSLTRTSSEPLIVAPPSEVSTREGFAFLPRPSSRTAEQEWNMEVLYTRCCGLDVHKASVTACCRWKDEAGQPQIQIRRFGTYTSELRELANWLHQQQVEKVAMESTGSYWRPVWNELESAGLPLLLANAHHIKNVPGRKTDVKDPEWISDLLQHGLIKGSFVPHREMRDLRDLTRMRSKVVADHTRVVNRIQAVLEDANIKLGNVVSDIMGVSSRDMLQGLIAGRSPGELAELARGRLRSKLEELQQALEGNVRPEHSFLLKRLLMQAQFLEQQERSLRREVVRHLDERACEAIRLWDTIPGVNEAVAWVMVAEMGTRVEQFPDAHHAASWTAMCPGNNESAGKRRSGKTRKGDNWLRAALCEAAWAASHTKGTYLSALFRRIAARKGRKRAIVAVGHALLIIAYEMLKKHEPYRELGENYFDNINPEKTAGRLIRRLQNMGYQVLIVKEVAEPAGAPN

SEQ ID NO: 277607 - protein, 332 aa, unidentified
MNAVSTLGIDLAKNTFSVHGVDANGVVTVRRTVSRGKLAELVARLPPCLIGMEACSGAHEWARRFGAAGHTVRLMAPKFVAPYRKSGKNDGNDAEAICEAVCRPNMRFVPIKSVQQQADLSVHRVRQGFVEERTATFNRVRGLIAEFGYVLPNGVEQLRRQVPQLIDRLPAQVARCVHDLLEHAERLRGKVLEYEREIRVSVRDNELARRAHTRPGIGFITASAVVATVGNGHDFKNGRQFSAWLGLVPRQYSTGGKTRLGHITKRGDPYLRTLLVMGARSVLQRAYRESDPLSRWALALQQRRGYHRACVAIAAKNARVLWALLAKESASA

SEQ ID NO: 277608 - protein, 332 aa, unidentified
MNYSGIDLHSNNSVVSVIDETDRVVAEKRLPNELAKILTFLAPWQAGLAGVAIESTYNWYWLVDGLQAAGFVVHLANTTAIRKYDGLKHSGDETDARYLAHLLRLGILPTGTILPPQQRAVRDLARKRMQLVRSRTSHILAMENITARQFGKRITSNQVIRLDEETIKQMRLPEDVALALRANVAVITTLSAQIAIVEKRLQQKVAPDADYTLLTTVPGIGQTLATVILLEVGTIERFASAGNFASYARCVDSQRISNGKKKGEGNTKNGNPYLSWAFIEAANFALRYCAEAKRFYERKKGKTNTILAHKLARACFHMLKEHKPFDMTRCFA

SEQ ID NO: 277609 - protein, 411 aa, unidentified
MEVVHVRCAGLDISKKDAKVCVRVAGAGRRKTVETVTTWSSMTSQILALREHLIAERITCAVMEATSDYWKPFYYLLEDAGFDVLLVNSRHVKNLPGRKTDVADATWLAQLGAHGLVRASFVPPEPIRQLRDLTRTRTAITRERSREVQRLEKLLEDAGIKLSAVASDIVGVSGRAMLESLIAGNSDPAALADLAKRRLRSKIPALTEALSGRFTDHHAFLARVHLDLIDQHTAAIDEITIRIEQLIAPFHGFRDLICTIPGISTLTADVIIAETGADMTRFPTAAQLASWAGTTPGNNASAGKVKSSRTRPGNPYLQGALGAAAMSCAQNPRTYLGARYRRIASRRGPQKANVAIQHSILIAIWHMGTNGCLYDDPGADYFNRLHPDRAKKRAINQLEAMGYQVTLTHAS

SEQ ID NO: 277610 - protein, 337 aa, unidentified
MHKSEYDYTCAGCDTSKDTIDVVRYSNGRSAHRRFNNTTAGHKHLIQWLTGPGQAVRVVVEASGIYSLDLALALHEAKRVEIMVANPRALKDYRRAHMQRSKTDKVDATIICDYARRMPFIRWQPPSSEVLELQQIARRIHALIVERSREKNRLRTAHATVTTSPVVINDIEVNLRHLDRRIGELEKQALRRVTASAAIKEAHRHLTSVPGISDRSAVQLLAEILVLPQGLSVREWVAFEGLDVRRYESGTSVERPRRISRVGNVRLRRALYMPALVAIRHDEAIGAFYAKLLGRGKKPLVAIVAVMRKLLHAIYGMLKHDADFDGSKFYRIPPQAA

SEQ ID NO: 277611 - protein, 427 aa, unidentified
MRSIALDVHRDFCEVAIKDESGLRLAGRVKSSVSELELFAQSLAPDDEVALEATGGALAIARILEGHVARVVIANTRKLSAIAESKVKTDKVDAKTLCELLAAGFLPAVFSPDEFTRALRRRLQRRSKLVRSRTRAKNECHAVLARNLKGRPPMTDVFGKAGRRWLAALELPADERETVDCCLREVDFLDNEVGLIERELARQAMSSQEIRRLMSVPGVSLVSAAAFVAAAGEIHRFSTPKKLVSYVGLDPRVRQSGEGPARHGHISKQGSSEARHMLCEAAWVAVRTPGPLHAFYERVRARRGAQIALVATARKLSVLFWHLLTREEDYAFGRPSLTRRKLRALELKTEEGWRRGRYSGPRVHETKAEREHEREFSDQVETAYRRLVADWQPKPGKSGAGATRGRASSKPTSGKQRGRASVPNSAL

SEQ ID NO: 277612 - protein, 359 aa, unidentified
MSSISPPGSLSKIIVGVDTHKHVHVAVVLDDDGQRLGDLRVPVDSLGYQELDRWAQTFGRVLAYGIEGTGSYGANLTSYLRRQGRKVVEVNRGDRRARRANGKSDTLDAELAARSVIAGTSTAVPKSADGTVEMIRKIKVARDIACKNRTSAIISLKTVIVNTPQELKEQLDSLGDKALIQKCSGFRPGTVDDPISAAKHTLRALARRWEFLNAEVKDHDAVIAKLTTSLSPTLCDGFGIGPDTAAEILIVFGDNPNRVHSEAAFAKLCGVAPIPASSGMTTRHRLAWNGHRQANAALYRTAIVRMQHHQPTKDYVAKRTAEGLSKRDIIRCLKRFIAREIYGRVMADFHARTALSAAA

SEQ ID NO: 277613 - protein, 351 aa, unidentified
MEYYTSTTEFNCGIDLHSRQMYVCVMDKQGQKLVHRNIKGNSFEFFLKLVAPYRHDLTVVCESTFSWYWLHDACSKANIRFVLAHALYLKHIHGGKNKNDRIDSEKLASLLRANLIPPAYVYPSEMRPIRALLRQRMSYVQECTRIKTRLWMCQAAEGLIPATQSKCDVDGWEERIVEQFTNPLHKFSVACGMDMVRAYSVQIKKLEAEINRQAKAKKSREYYLLKSAPGIGPIMAMTILFEVDDINRFPTVKDFLSYCRLVKGSVASAGKVKGMTGAKMGNANLRWAFGEVAVLGKNANPLLRTYAEKIISKRGKFKGNAILANKIARAVYFMLQKGTAFDVERVIATSI

SEQ ID NO: 277614 - protein, 343 aa, unidentified
MTAVAVLGIDLGKNTCSMVGLDTAGAVVLRRRVRRGGLLAVVGTLPPCVVAMEACCGAHHVARRVAAQGHTPRLMPPEYVRPYVKTTKNDDRDAEAVAEAASRPTMRLVEPKSEAQLDLQSLHRVRERLVGERTALANRMRGLLLERGVVVAKGRRALRGALSAPLAEQAGGLGPRMRALLSGMRAEWEALDDRIASFDREFAGIARDDEDARRLAGVPGIGVVVATALVAAVGRGEAFGKGRDLAAWLGLVPRRASTGGKPRLLGISRRGSTYLRKQLIHGARAVLSKLAGSGTPLGRWLAGLLARTHRNKAVVALANKLARVAWAVLRRGRGFEPALSAAA

SEQ ID NO: 277615 - protein, 354 aa, unidentified
MKRSTKYVGLDVHQATTVTTVREESGRVIARTIVPTEASPIVNLFRGMRGSVHVAFEEGTQAQWLHDLLVPVVDRVIVCDRRGQASPGNKADQADADVLSELLRRGALRAVYHGSRERAALKELARTYENLVEDSTRVMLRLKALFRARGIKVVGRGVYQRQRRAEWLCQLPEAGVRFRAQALYAQLDVLQQLRPQAKAALLAEARQDPAWGVLRTIPFLGPVRVALLFATMQTPWRFRTKRQLWAYAGLAVVTRTSAEYVLRENRPVRRRRAPLTRGLNRNHNRMVKAVLKGAATAATAHPGSFRDFYHALVARGMREELARVTLTRKLAALTLRLWKTGERYDPAKLTVQAH

SEQ ID NO: 277616 - protein, 388 aa, unidentified
MPAAETPVAYLGIDVGKSSHSACALDAGGGVAFRAELANRPDDIDRLLERAGSGALVVVDQKRNIGALVLARAHAHGNPCAYLPGYAEKQARGMFPGTAKTDAIDAEVIARTALGVPRALRPAPEEPEGTASLRILSSQREFASSARTRAKNRLRATLLEADPALEGAVDPSSRWQVSMLAEFGGAAGCSAAGWRRFSNAARRAGAPAAGARRLWEALLASSRSGRRLPAGEDVAVRILAREIASLDADIEELDSLVADSLAGDEVYECLLTVPGIGPKTAAALVTSIDISAFRGHDELASYCGVAPSDRRSGSSIRSTSPQHGGNRQLKNLLIFSCNSLIGTDNRFGRYYGECRARGMRHSKALKAVARKRLKVIYAIMRDAVPYAA

SEQ ID NO: 277617 - protein, 344 aa, unidentified
MQIAVLGIDLGKNSCSVVGLDSTGAVIKRRRMRPESIAAFTEKLPACIVAMEACCGAHHLGRMMAGQGHQVRLMSPEYVRPYVKAQKNDDRDAEAIAEAATRPTMRFVELKSESQLDVQTLHRARDRLVGERTALINQLRAVLLERGVTIPQGRRKLEQHLDAFAASDDDHSLSPRIRRLIDDMRAEWVELDRRIATFDNEFAAYARGDADARRLATIPGIGVLNATALLAAIGDGRTFARGRDLAAWLGLVPRQVTTGGKPRLVGITKRGNKYLRKLLIHGARAALPSLATSATPLGGWLRALMQRVHKNAAVVALANKLARIVWVILRRGEEFNAAAVKAMA

SEQ ID NO: 277618 - protein, 352 aa, unidentified
MKYYIGCDAHKKYSVFSVVNERGQAGGPERVQHDKELYRKYLNYLPAGSKIAIESVGNWYWMIEAMEQAGHIPILVNPKKAKLLMGNINKTDKLDARGLAMLNLNGSLPEVWIPPAELRDQRELSRMRISMVGVRTQFKNRIHATLAKYAIEINEVSDIFGKTGRALLQEAIRELPPETKNSVEVQLKLLDQVSGQIEELENHIRKVVKETPAMQLIKSLPGVGDILAIVIALEIGDIDRFRSPQHLASYSGTVPRVSSSGDKTRYGRVRSDVNHNLKWAYIEAANCVALQQERQAGRHAVQLLKRIQKQKGYPKAAVAVARHLAEATYCMLKKNQPYQEPNLRKTVLSSQG

SEQ ID NO: 277619 - protein, 344 aa, unidentified
MSESYEGKQIVGINLHRRRSVLVRMTEAGERLETVRISNDPEYLRQVMARAGEAPDVALEAAYGWYWAADTLAELGAQVHLAHPLGVKMFSYRRVKNDERDAADLADLLRMGRLPEAWIAPPATRELRGWVRHRAKLVGLRSNLKCQVHAVLAAAGVQVPMSDLFAPGGQRLLAGCPLAPESRSRVDSLLRLIDALDFEIDTFARLVAGRLREHPCYIAIQQIPGVGPILAAVFVAEIGDVTRFPGPAQLASWAGLTPKHHESDTTVHRGRITKQGSRLIRWAAVEAVQRVPAHTRLGQVRDQIGACRGRNIGVVAAARELFGLAYYGLRDHHIRCQPKRTSAA

SEQ ID NO: 277620 - protein, 354 aa, unidentified
MSNKSNPSVATMGIDIGKNSFHVVGLDQRGAIVLRQKWSRGQIEARLAAMPPCLIGMEACVGAHHLSRKLQAHGHDARLMPAKYVRAYSKGQKNDFRDAEAIAEAVQRPTMKFVATKTADQLDLQALHRVRERLVRQRTGIINQIRAFLLERGIAVRQGLRFLRTELPGILAKRSDVLSPRMMRIIEDLAGDWRRLDERIEGLSTDITRVVEQDPACERLMTVPGIGPIISSATVAAIGTGDVFSKGRDFAAWLGLVPRQISTGDRTILGKISKRGNRYLRVLFVQAAWVVLIRPKSWERYGLKAWIEAAKKRLHHNVLAIALANKLARIAWAVLNKERNFECVRTTAPSSQPA

SEQ ID NO: 277621 - protein, 369 aa, unidentified
MGECRCEGFAIANPSRGGRRPWSLRQLAVVERWDRRRSHARPNSRQTSIARTRQVTVAKIICGVDVSSLSLEACIGSNGPNRSFPNTAEGIAELIAFCRQHHVELIAMEASGGYEKQSFALLWAHGLPVALLNARAVRRFAEGMGLLEKTDRIDAWVIGWFATVKDSAPTAPACAEQERLKALVTRMRQLTELRAAQRNQRLLVSDPTVLTSFHEILTAVAAQIRILETAIATLIAADPLWQKLDQAFRSIKGVADRTVARLMAEVPEIGAASNKAVSKLVGLAPLARDSGKHQGKRPVRGGRRNVRAILYVVAGVVRRHDPDFAAFHQRLTAAGKPKKVIRIALAHKLLVRLNAKAHQVRNQFAALTP

SEQ ID NO: 277622 - protein, 356 aa, unidentified
MKDKSNLLNFSDIPIYIGLDVHKKDWSVTLYSDEFELKTFTQPPKPDVLAKYLCQHYPRGSYKAIYEAGFSGFWAQRELTKLGIDCIVIHPADVPTSDKEKRQKTDKMDSRKLSKVCKNEEVNGIYIPSEEHQEERNLLRVRQKIVRDKTRVKNRIKSYLMYQGIDTTSHEGKKWTKRSINYLKEIKLTTSSGTFALMTYIEELENLQKQADKIDLEIKELSKTDRYSENAKLLCSVPSIGITSAMILLTEIGDITRFKTFDDLCSFIGLVPNTHSSGENDRVGHMTKRGNQFLKSILVECAWVAVRKDPALLQYYKELTVRMNGNKAIIRITRRLLSRIRHVLLKKEKYKIGVLK

SEQ ID NO: 277623 - protein, 328 aa, unidentified
MYSIGLDISKSTINVYIPINDLDIVINNDLKSIKRLYSKLKKLYKKDVDKLTFVYEPTGSYSSLLTKFCSDKKILCFIVNPKKSVNFSKAIGQRNKTDIDDAKMLSKMIVTATINDIKIPIIDEVVEELKELISYYRFIIKQQMQNKSHLEAISIKEGSSIVIKTIKQEIESLTNKEIKIIEAIKKIIAKDEKLYKSYLNIQTIKGIGEISAIVLLHHFIKYPDTNQREIVSLAGLDPIHKSSGTSVRGKAKISKAGSNICRSTLFMATLVSVQHNEELKIFYNRLKENGKHTTVAQIAVMRKIIVLAHALYKNNEEYDSSKYKNRMM

SEQ ID NO: 277624 - protein, 352 aa, unidentified
MERYVGVDAHAESCTLAVMSASGRRLRELVIETNGRALVDTVRGIGGRVHVCVEEGTQSSWLYEVLKPHVSEVVVVVPPEKKGQKDDSRDAWSRANELRTNSIETRVFKAPEQLAGLRNAVRAYGFAVTDAVRAKNRLKSVFLSRGISTDSSVYDTARREAWLKKLASPHRELAAWLGRQLDQLEPLREEAERMLLAEAKKHPIIRTLSTAPGMGPIRTAQVVAIVITPERFRTSRQFWSYSGLAVVTRSSANWMRDSRGRLIRAQEVQARGLSRKRNPRLKAVFKGAATTIINQLPQDPLHGDYERMLRSGMKPTLAKLTLARKVAATVLSMWKHQEEYDPKRHRPTPDQK

SEQ ID NO: 277625 - protein, 415 aa, unidentified
MTESYRIFVGIDWGADAHQVWVTDAAGTAVGEQTVDHTGTAIAALVDWIVGLAEGDARAAAVALETPRGPIVDACLARGCQVFAINPKQLDRFRDRFSVAGAKDDARDAEVLSSAVRTDRRAFRHVTAEDPLTVQVREYSRQDTELGEDLRRLANRLRDHLLRTWPELLRLVPAADEPWFWALLKRAPTPVEGRRMRPAQVRQLLRAHRIRRITAEALLTVLRAPSVSVAPGVREGVRVRILDLVDQLPVLARQRRAAERRLATTLEAMTQGPDGESVREHTDVTVLQSLPGIGTRIAATMLAEAADALRDRDYHALRLLAGAAPVTKRSGKSCVVIMRYACNHHLQTALYHWARGCMQRDPRSRAHYAQLRRAGHGNARALRGVADRMLTVLIAALKTHMPYDATRRRPWAAGA

SEQ ID NO: 277626 - protein, 435 aa, unidentified
MDVIVARQGALDVHKAQVTACVRVPGADGVRVQEVKQFKTTVGGLLVLADWLKAHGVTHVVMEATGDFWKPVWHILEGDFELMLVNARHVKNLPGRKTDVGDSAWLCQLAEAGLLSASFVPPKPIRDLRLLTRYRRTQIAERRREAQRLHKALEETGIKLDCVATDILGKSGRAMLDALVTGTTDPELLAELARGKLRPKIPALKEALEGHFEPLHAVLIGAILGHLDFLDQQIQQLSGAIEEQMLPFVKQAELLCTIPGVQKRTAEILIAEIGVDMNLFPTAGHLASWAGQCPGNDQSAGKRRSGKTRKGSKHLNAALTDAAMAALRTNDSYLQALYRRKKPQLGHGRALGAVKHSKLCAIWHMLSTGELYNDLGGEYFARRDPERQTRRLIAQLERLGHTVTLQDAPLAAQDAMSSERPSPGTRSPPSASFPH

SEQ ID NO: 277627 - protein, 425 aa, unidentified
MHDKHYNKQMVKRSRIGNRTLVVGMDIGSEFNAACFMDKEGNVLGRYPKIYNSRKGFDYFHTMVEQAKRKHKLTRVFIGMEPTGHYWRKIAFFAKEQGYDVRFVRTTAVKHQRELDESSSARSDIRDAHTIGNIVREGKYIDTVIEESVFRQLRTLAHARERILRYIVGSTHGLQAVLNDYFPELRKLFWSMKAKGLWTLLETYPFPEDVRHAGLAAVTALLSKGTGKKRHIQEQAAHIYQAAVESVGLTAITKADRARLTMYLEEIKRSDARRKLLEHEMTELLEEIPLAQYILSLPGMGKVGCAVFLGELGNPDYFKNPRQIIKFAGYDPKENDSGLRVGRKIISKKGRWLLRKCLFFMVLRLVQRSSFFKAYYEHKKKGCDRPLQKTEALCAVILKLIRVLFALMRDRRMFTEELPRCEKAA

SEQ ID NO: 277628 - protein, 334 aa, unidentified
MDKVTTLGIDLAKRVFALHGVDASGRVVLRKTVRREQFVETVAKLPPCLIGMEACSGSHEWARRFQGFGHSVRLMAPVFVAPYRKSGKNDGNDAEAICEAVSRPNMRFVPVKSAEQQALLALHRVRQGFIEERTALINRLRAVLTEFGVVLPNRTQWVRRDAVAVAEPLPVLARQAVEDLRAHLTQLDERIGAYDRQLEQQARQSEAAMRLMQVRGIGPLTAVAIVATVGSARDFASGRQFAAWLGLVPRQNSSGGKARLGHISRRGDAYLRMLLVQGARSVLNTAARHTDRLSLWALSLQARRGMHKALVGIAAKNARIAWALLSKDQTLRTA

SEQ ID NO: 277629 - protein, 369 aa, unidentified
MKKHSKKANEKGRMSASQGQPEVTIGIDVGDRYSHFCWLDANGEIVKRGRVSSTQQALEKEFGKIPAGRIALETGTHCHWMSEVLSQLGHEVIVADARELKSISGSRRKNDPRDAEQLARLARVDVRLLHPVMMRKRKTQQDRSVLRARDLLVASRTQLICAIRGMVKADGSRLADCSAESFPEQVGQSIPEGMRRALAPLLETLDVLNEKIRYYDELVTHIAEEEYPETCLLKQVPGVGPVTALYFRLVIEEAQRFQHSRDVGSYLGLVPKQQDSGESTPELRISKAGDEGARRLLVNCAHYVLGPFGPDTDVRRWGLRLAARGGKNAKKRAIVAVARKLAVLLHRLLVTGEVYEPLRNSQAAERAAA

SEQ ID NO: 277630 - protein, 343 aa, unidentified
MATIGGFDLHRRQLTYDDLDVVTGQVDRGRVVPADRGHLRCFLARFQGQGEVAFAVEGCTGWRYVVEELERVSIGAHLAEPAETAARRGRKRRAKTDRSDARHLRELLVKGDLPESWIPPAHVLEARARVRLYKDLEEERTAWLQRVQATLYHQGVPVIASLTSAAGQARLTAAELSPAGRQAVEVGLRQLDRLTGELDPLRAELARFSRRQPGCRALRTTHFGIGPITSVAIWAEMGDTRRFSSSDAAVRHSGLDITVYASDSKRARGHLARQGPATLRWALYEAAVCATRPTSPDHAYFLAVKRRADGHLGVISVARKLARRVHHTLRALGDQAWEPVPAG

SEQ ID NO: 277631 - protein, 368 aa, unidentified
MDAAYCTTIGADVSDRTTKICVMSKADGKPKIVQETTIPTTPDGFRAFLERQDKAAALVFETGTHCRWIDKVASGLGFKTFVANPCRLRMITESTTKNDKNDARTLARMALADIELLHPVKLRGDEHQKMVNLHEIRDQLVKERTAEVLQIRAIAKSMGFRLPDCSAECFHNVAKRDLPKELSDIVWPLMKELKSKAVTIKTVEKQMRRLAKSDTFRVQVERLMEIPNVGFITATCFVAVTGGDMDRFDRPRDIGPWLGVTPKQDQSGNIDRQCHITKAGSKMLRWKLTECAQRVLQKNSADIDLKVKGLRIRARGGKIAKGKSITAVARGLAVLMVAMLKKPDEPYVPLSEDKARELEQIRAAMTSA

SEQ ID NO: 277632 - protein, 404 aa, unidentified
MSINGASVMAATVVAVDVGKNTAALSVTDAARHRLLGPINFAMTAVAVSAMLDRVCGVLPAAAAVKVGIEAAGHYHRPLLAAGVWPAGWEVLELSPARVSEQRRVLGRRRVKTDAIDLAAITELVLAGHGVPVTARMATVIDLTGWAMQRNRRVQTRTAIKNQLLSQLDRCFPGVTLALPDVLGTRIGCLVAAEFADPQRLAALGVTRFVRFAANRGLRVRRSAADRLVAAARAALPTPEGAVARQVLADDLGLLADLDAQIAAAEAKIAQLLPETPFTPLLTVPGWGVVRAANYGAAVGDPGRWPGARQLYRASGLSPAQYESAGKRRDGSISREGSVALRRALIDLGIGLWRSDPSARRYGLQLRARGKKGGVIGCAMANRANRIAYALVRDQTGYEPGRWA

SEQ ID NO: 277633 - protein, 357 aa, unidentified
MSKSRPRVEDPSPRQATVFCGIDVSAATLSVAVQADPEWKLEQRQLANSAAGHRSLMAWLRKRKGLVRVTLEATGVYGMDVALALEEAEGFAVEVLNPKKARDFARSLGRSKTDKTDAAALAEYSRRMKFVAWKRPSREVLELRALGRHITTLTEEHTRLSNRLHAARASRTAPRCVREDLKRSMAGIQKRLVRLRREARGRIEKQAGLRRKWLRLLAMPGIGETSAVQILAELASLDENMTVRQWVAHSGLDPVHETSGTSVHKPSHISRQGNRYLRKALFMPALTAARFDPHLQGFYMQLLDRHKTKLQALTAVARKILHAIYGIFKTDTPYDGAKLFPALAVSITKNPQPTPTY

SEQ ID NO: 277634 - protein, 355 aa, unidentified
MAVIDGNGEVLVNWNVFNGVELILKVIGGLPVGTPVVFEVVFGTTWLVELLEDYGFDPHLVHPSRCKAIASARLKNDKVDAAILAQLLRADLLPEAWIAPPPVRALRALLRHRVHLVRLRTLLRNRIHAIVADHGHDRPRGGYWSGPGRAWLAALPLPAVSRELVEDNLGLIDAIQGRVDRLDGEIRQRARSDPRVKVLTQLPGVGPFTALVILAEVGDISRFASARKLASWAGLTPTVRGSDRVAHYGHIWKGRLGVAALGAVRGRPDRQTAPAVRRHLPAHRQPAREEDRHHRGRPQAAHPRLAPAHRRRIHRQPSTRRTSDSGTVTGPGRGRQAPGKLEDHPEPGHGPRSTN

SEQ ID NO: 277635 - protein, 352 aa, unidentified
MLIIGCDFHPGFQQVAIFDNLTGEIEGKRLQHRAEAEQFYRSLAGQEVRVGMEACGHYPWFERLLEELGMELWLGDAARVRAAEVRKQKTDRRDAEHLLQLLRENRFPRIWVPSLEVRDVRQLLVHRHKQVQARTRTKNQLQAIALSNGVQKKYKLWTKVGRAELEQLALLPYAAQRRKRLLEALDELDVEIAELDRRVAEEARQRSEAVRLMTHPGVGSVTALAMVLTLGPAERFGSAKQVGSYFGLIPSEDSSGGKQRLGRISKQGSSFLRFLLVEAGQTAARYDPQLKRFYRRLAARKNRSVAKVAVARKLATRLYLMLREDWTYAQLSQAVMQVGPSHSVAGKQEPGA

SEQ ID NO: 277636 - protein, 313 aa, unidentified
MSQNNLPILYVGLDVAKASLQLDLAGQPHTLANDAKGHAKLLKLLRDHPTAQIVCEATGGYEQPAVRALHAAAVSVSVVEAGRVRHFARAKGQRAKTDLIDAAVLSEYGRAFEPAPTTAPTAQQTRLAALSTRRGQLLQTRLAEANRAEHYVDKLCLSQSRQLLRTLDKQIAAGEAAIAELIAADEILQAKATRLDAIPGVGAITAGTVLAELPELGQISDEAVAALAGVAPYNQDSGNITGTRHIAGGRRSVRCALYMATLSTIRYDKILKAFYLKLRAAGKKPKVALVACMRKLVVLMNRLLKNPEFQLAN

SEQ ID NO: 277637 - protein, 383 aa, unidentified
MRAVCGLDVHKDTVYLCILCSDGEIIERVFGVLTFQLRDMRRLMQSHGVTEVTMESTAMYWIPIWRVLEPHFRLKLVNPYFIKQLPGRKSDVKDAQWIAECTMKDLVRGSFVPPERIQQLRQYDRRIFDLDAEIVRKLSKLDGIMQRCNIRLSNYVSNTDTKSYKAVVDMLCEGITDAEELIRKVHGRIVNKHGRETILASLTGVVSDAEKDTMRQLREEIALAETHKRECLDKMLQICRTYYPNELRRLMTIPGIKERAATSLIAEIGVDMTKFQTAAHLASWSGLKPRNDVSNGKFKSRRITHGNAYLRKTIIECAWAASRTKDCFFSRFSYHQTVVRKKNKMKVLVAVARKLLIAVWHVLHDATDYVDFNPDCKSPANNG

SEQ ID NO: 277638 - protein, 419 aa, unidentified
MLTARWFVGIDWATEAHEVCVLDPEGQVCDRRSVPHSATALQAFVAALLERAHGDASTVAIGIEVPRGALVDVCVERGFGVYAINPKQLDRFRDRFTAAGAKDDRRDAHVIGDSLRTDPQAFRRVRLDHPLVIQLREWSRVDEDLAGDLTRMTNQLRDLVYRIVPGLLTLCPAADERWLWTLLRDAPTPADQRRLSLRRLERLLRDHRVRRLEAAQVREVLQKPSVYTAPGVVDAVAAHIQLLLPRVDLLAGQRRDAEKQLERLLDALDAQEPAAGDQREHSDVAIVRSMPGIGTRVAARMLAEASQPLVERAYHVLRATMGVAPITKQSGRRRTVSMRYACNARLREAGYHWARTGAQKDPASRAYYAQLRARGHSHGRALRSVADRLLRVLMTLLNHGQLFDLTHGQHAPATIGAGA

SEQ ID NO: 277639 - protein, 420 aa, unidentified
MDVVVERCAGLDVHKDTVVAELRTPAAGGGRDTEVRSFGTFTAELLALRDWLVEAQVTLVAMESTGVYWKPVYYLLEDAVECWVVNARHMRNVPGRKTDVADAGWIAQLVEHGLIRPSFVPPPPIRELRSLTRYRKTQIEERTREVQRIDKVMQDAGLKLSSVASDLLTKSGRDMMDALVAGERDPDRLADLARRQMRRKIPQLKLALTGRFTDAHALVLGEILAHIDYLDAAIVRLTTRIDEAISPFATERDLLTTIPGVDRRLAEAIIAEIGVDMAVFETPGRLASWAGMCPGQHESAGKSRSGRARHGDTWLQRHLAIAAMASARSKNTYLAAQYARLAKRRGKLRARKAVGHSILVACFHILAGGVPYAELGADYFEQRNSPERRARKHLNDLRALGWDVTDTAQGVICLPPPAAA

SEQ ID NO: 277640 - protein, 320 aa, unidentified
MNSEQFIGIDVSKSHLDVAVYPSGEQHRWDNDDSGIEKLIKFVKSLPVALIVLESTGGYESLAASILSANALPVVVVNPRQVRSFAKATGKLAKTDQIDAHSIAHFASAVRPEQRQLKDEHMQLLTALNTRRRQIVSMLVAEKNRLYTAPKANQKNISQHIKWLEKNLDQIDKDIQKQIRNSPIWRENDDILRSYKGIGSVSSTTLLSDLPELGKLGSKKIAALAGLAPFNCDSGQYRGRRRIWGGRSHVRKTLYMATISAKRFNPQIKAFYDRLTDSGKPHKVAMTACMRKMLITLNAMLKNKTYWSHEYKTLDFQHGC

SEQ ID NO: 277641 - protein, 411 aa, unidentified
MHEKQKHLYIGVDLHKHHHVAVIIDCWHKKLGEIKFENKPSAFSTFLLDIYKYMEDGLTPIFGLEDVGGYGRALAQYLVDHEQIVKEVNPALSYRERKSKMTTQKNDSWDAECVARILLSELDQLPDVRPHDLYWSIQQLVTRRNALVKAQGALKNQLHIQLSHHYPSYKKFFSEVDGKTALAFWERYPSPSCLEDVSIKQLTTFLLEVSNNTCSVKKASEILKLVKEDGNTIREHQEIRDFLVKSIVRDISFKKQEMRYVERELKGLMSLLDVQLDTMPGIDLVTASALIAEIGDVRRFPNANKLARFAGIAPVYFGSGGKGREQKSKQGNRALHALFYNLAVQQVQVAKGSKLPRNPVFHAYYQRKLKEGKTKGQALVCIMRRLVNIIYGMMKHKTAYELPIIKEEEVV

SEQ ID NO: 277642 - protein, 410 aa, unidentified
MPERFVGIDVALRDHRVAVLDRDGEAVGQSFTIAATKEGVTTLLQTLPARGATPAQSVIGLEASGHLWENLEGALVGAGYLVLVLNPVQTRRYRDLVRRKAKTDDIDAHVIAGLVRSGAAQQSYVPDEQIQSLRELARLRARLLEDRQDYLRQLIAQLDVVLPEHRTALGDLLSARARGILAQFPTAQHLAQASPRAIRRAAHDAGTRGFSLDEATAVRAAARSSLYSGKAAGARAHVVRTLVSQLERLTTAIEDVDRAATTLLPPSAPGTGPSDAELLQTVPGIGPHTAATLLGELGALTRFTDARALVAYVGFYPVISESGERAATPRLSPVGSPIARHALYLAAVNAVRRSAEWRTLYLRKKAQGKHAKQALIVVAVKLLHTVYAMLKHRQPFNASRLLVAPTTLGA

SEQ ID NO: 277643 - protein, 342 aa, unidentified
MLHVGLDVHERSSAVCILDENGKKVKEHSLRGHPRRVIAWLRRHVDTPFQICFEASTSYGYLYDELRRIAHRVVVAHPGRLRLIFRSRRKNDRVDAAKLAKLLYLDALPAVYVPSAEIRSWRGMIEHRHRCVRSRTRCKLTIRALLRTHGVKTPGRQRLWSKRGRAWLESVELPDEIDWLRLEGLLADLDHFDARIGRLECVLERIAEKHPAVALLRTIAGVGIRTAEAFVAYVDNPDRFRRSKSIGCYLGLIPRQDASSDTNRLGHITKEGPGTVRQMLAEASWQAIRRSPTVRAFFERIAQGRKDRRKIALVATAHYLARVMLHMLKTGEVWQEDQMITA

SEQ ID NO: 277644 - protein, 381 aa, unidentified
MESETTCVLNDTPFSQYLYMAIELSNGKWLIGFTIGFGQQPRLRALAARDLKGLAEEIRQAKVRFSLPENAPVLSCYEAGRDGFWLHRYLTKQGATNLIVDSASIEVNRRKRRAKTDRLDVGKLLTMLMRYYRGEKKVWSIVHVPTPEEEDQRQLHRELMALTTERTRQINRIKGLLASQGVVLPIKADFISQLDGVQLWDGSQLLIGLRSRLVREYERLRLFDQEIQQLHRSRTEAIRTSTTPAMEQVRQLLRLKAIGVNSAWVYVMEFFSWRNFRNRREVGSLAGLTPTPYQSGESAHEQGISKAGDRRIRAMAIEIAWVWLRYQPNSQLSRWYQERFAKGNSRMRRIGIVALARRLLIALWQYLETDIPPQGAILTTG

SEQ ID NO: 277645 - protein, 450 aa, unidentified
MAKPKRRKHRKLDRSLPEMRPNAGGIDVGATEIFVAVPADRDKDSVRSFPTFTQDLHELTDWLKQCRVDTVAMESTGVYWIPLFQILEARGIEVHLVNAQHVHHVPGRKSDVLDCQWLQYLHSVGLLKASFRPEQAVCEIRSLMRHRENLVEMSCVHVQHMHKSLDQMNLQIHHVISDITGVTGLAIADAIVAGNTDPKELAKLRDHRIKASVETVTKSLVGDYRAEHIFTLKQSRTAYRHYQQLIADCDQEVQQRIQAFDSKNAGPSAPADASPSAAADPPRFDLHSHLARIFGVDLTLIPGFECLRIQTLLSELGADLSKFPTPDTFCSWLNLCSKDGSSAGRRIRAPKVKTKNRATQAFRFAAQSLHNNQSYLGDYYRSQRARHGAPKAIKNTAHKLARIFYHLVTTRQPYDETVFAKLEMRKQQQRFRKLQSLANRMGYSLVEVHA

SEQ ID NO: 277646 - protein, 316 aa, unidentified
MSKRSTVCAGIDTGKRKLDAALHKRGERLEVENSPEGHSKLSAWLRRHGVKRVGIEASGGYEMDVVAKLRRDGFRVVVFQPAQVRAYAKFHLQLAKNDKIDASLIAACTAAAVNIHAPPDPRLAPLAAHLTWIDQIGEDIKCHKTRLETCRDPRAREFWTQEIARLEKIAKAERATLEKAVRQHRDLAERLDLIASVDGIGVKTAVVILVRIPEIGRLSREQVAALVGLAPYDDDSGDRHGRRQIAGGRKRVRCGVFAAALPASFHHNPQLIAMYQRLIAAGKEHKVALVACARKLVIFANTVVARGTAWQPQGAL

SEQ ID NO: 277647 - protein, 347 aa, unidentified
MAAVMIGVDPHKGSHTAVAISPAEEPLGELRVRASAGQAEQLLAWAVAWPQRTWAIEGAGGLGHLLAQQLLAAGEQVLDVQPKLGARVRLLATGAVNKNDPNDARSVAVAALRSPSRRPVQPDDHAAVLKVWAKRHRDLGRTRTQVVCRLHAVLCELVPGGVPKAITANHATRLLSSITPARAVQAARCELAAEFLDDLRRIDAQLLEAHKKLTTAVRASGTTLTDVFGVGPVVAATLIGAVHDVSRFPGPDHFAAYNGTAPIEVSSGPRKIYRLSRRGNRRLNHVIHMAAVTQIRYRHSPGRAYYDRKLAEGKTGKEALRSLKRQISDAIFTRLLADARRAATGPR

SEQ ID NO: 277648 - protein, 410 aa, unidentified
MDTLYPRCCGLDIHKRDLVACLITPGTDGHPTKAIRKFGTMTADVLAFADWLTAAGCTHVAMESTGVYWKPIYNLLEESFTLLLVNARHIKAVPGRKTDVKDCEWIADLLRHGLLQASFVPERGQRELRELTRYRTALVRERTAEANRLQKTLEGANIKLASVATDILGKSGREILAGLIAGETDTEALAQLARGRLREKLPALEQALIGQFGPHQRFMVAEQLAHVDYLDTAIERVSGEIAQRVCVSDDLIGRLDAIPGIGRYVAEALIAEIGTDMSRFPTDRHLASWAGMCPGNRESAGKRQSGNTRKGSPWLRALLVQAAHAAGRTKGTYLAAQYRRLTMRRGRNKAAIAVGHSLLVIIYHMIQQGTEYNDLGPQHFDERDRQAIEHRLVRRLEGMGYTVSLEPRAA

SEQ ID NO: 277649 - protein, 394 aa, unidentified
MQTIGIDVGKRQHIAAIAHQGEREARKAVLRFSADRSGLGDLERWMSQQGEISRAVLESSGHYHLNLAAALQRRGVPVAVVNPLESKYFARRRLQRTKSDPADARTLALLAMVDQPEVRDVLAGAELREAARFAMALVDLQGRTCQKITRLVELGFPELEAAYDDPTCTSALAVLRAAPTAAAAARTSLPTLAAAARPGGGRRIGPKKAGQIHDLAADTIAAPELAAQIGFQMRLLIAQYDLLESQIKEAESHLGTLLDGELVRRLRTIPGVGPAIVATLVAEIGDIARFSDFDKLVAYVGVHPAEHSSGQKGRDPETSWRMSKAGNAYLRTALYRMAVVGITHNPIIRAHYARKRAQGKSKMNAVGHCMKKALAIVWGVWRSGEDFAAPPSTS

SEQ ID NO: 277650 - protein, 368 aa, unidentified
MQKDTKTQTANRGKKLRDCPAGSTVGMDIGDRWTHVAVIGADGELMAEERIASKEPEVRRSLSQLAAGVVAMEVGTHSRWMAKVAKQCGHKVVVANPRQLRLIYGDDNKHDRLDAIKLARLARVDWRLMKPVEHRPEEEQAELARIAVRETLVEMRSRAVNLIRGMVKAAGGRVVSCATESFVGKAKDQIPEALKSSLAPLLEQIEELNMRIGECEEMIEHVARTKYPEVELMAQISGVGWLTGLTFRLTISDPHRFERSRDVGCYLGLRPKRNQSGKQDPQLGITKAGNERMRRLLVNCAHYMLGPFGEDSDLRRWGMKLAQQSRARGAKQRAVVAVARKLAVLMHRLWVSAEVYEPLRGSGAKLAV

SEQ ID NO: 277651 - protein, 347 aa, unidentified
MRFYTRAHKHYCGVDLHARTMYVCVLDRDGNVLVSKNIASAPEAFVELIAPWREDLVVAAECMFTWYWLADLCAREGIEFVLGHALYMRAIHGGKAKNDRIDAHKITALLRDGMLPQAYVYPQAMRATRDLMRRRNYLMRQRAELLAHITNTNHQYHLPALGVRPARPAERSGLLEHFAEPQVRRSIAADLSLIEHYDRELPALERYLESNAQAHDPVALAIVRTVHGLGKVLGLSILYEIQDIARFGRVQQFLSYGRLVKPTKESGGKILGHSGKKIGNAHLKWAFSEAAVCFLRANKPAQALRSRLAAKHGKGKSLAIIAAKLTRAVYFMLKRGEPFDAERFFAH

SEQ ID NO: 277652 - protein, 428 aa, unidentified
MIAPAAPPQNCTFVAIDVAKLVHEVLVEPPTGRRQRWRIRNCQPDYETLRDRLRALKTPVLIGFEATGNYHRPLAYYLGQCGFELRLIASLAVARTRDALYNSWDKNDPKDTQVLLHLLKTGVSQRYHDPLVHRMNDLQELAQTHYQISLRKVQVQHSIMTHYLPLYFPEAERYYTNSRAQWFTQLLHRFPCPAAITRYAPDVFEHEAWTVVGRKVNKRGFLADLYATASQSIGLAVAEDSEAIQMFRVMLAEHQHLCATRLAIEQQADQALQSHPDYQRLRTLPGVGPILALTILAEAGDLRRFPHHRQFLKFCGFDLSTQQSGQFRGMSRLSKHGNARLRYAFWMAANGAVRMRQNTFREKYARYIKADPENPDRKRKALCAVAAKVARVAHGLIKRGSDYRPYFEALPPSGALRSRGPSRQVLTS

SEQ ID NO: 277653 - protein, 412 aa, unidentified
MEVLYACCCGIDVHAKMLVACLIKAGRKEVRTFSTMTEDLLRLLDWLTQAGCTHAAIESTGVYWRPVFNILEGAIEVILTNARDAKGFKARKTDVIDAEWLADLLRHGLLKPSFIPPLPIREIRELTRYRESLVREQTALANRIQKLIESANIKLGQVASDVLGVSGKLMLRALAAGETDAEKLSHLARRTLKRKQPQLQQALEGRVTQAQRWILGQLLDQYAHVEVALQTAEERIKQEVDSSPDPFVPEAVQLLDTIPGVGETVAQIIVAEIGVDMGRFPTDHHLASWAGMCPGNNESAGKRKSGKTTKGSRYLRAALVQAAWAASHQKGTYLAAQYKRLVKRMGKKKALVAVGHSILVIAYHVLQTRTSYQDLGGDYFDRRNVDKQRKRLIQQLESLGMKVTVEEIKEAA

SEQ ID NO: 277654 - protein, 377 aa, unidentified
MTADLQAQEYENATVLYMALELSNTKWRLAFGDGTRQRQVVIAAGDIAALCEELTKVKAKWGLSPEVAVVSCYEAGRDGFWVHRQLGKLGIANQVVDAASIEVSRRARRAKTDRLDAEALLEKLIRYARGERRVWRVVRVPEPVWEDLRQLHREREDLLTERTRHRNRLSSKLVAQGVRLPIGKDFVARLEAVKLFDGSGLPAHLKASLIREWERLQGVQAQLRAVEQAISELIESADRTQGVRSLMLLTGVGWVSAWVLVMELFGWRELTNRRQLASLAGLVPTPYSSGNLARDQGISKAGNRRVRALMIQLAWLWLRYQPDSKHSCWFQERFGGGSKRQRRIGIVALARRLLIDLWRFVESGVVPAGARLKVGVA

SEQ ID NO: 277655 - protein, 339 aa, unidentified
MQVTTIGLDLAKNIFQVHGITEDGTVAFSRSLRRAQLLAFFDRLEPCLIGMEACGSSHYWARELSKLGHEVKLIAPIYVKPYVKRGKSDAADAEAICEAVTRPTMRFVEIKSPDQQAILSLHRARDLIVRQRTQTINMLRGLLAEFGVIFAQGVGHAVKFAKRVTEGHLPDLPAAACDVILDLSEQLLALHLRVNWYGRRMTAAAKSEPRIALLQTIPGIGPITASAIVATVGSGEQFQSGRDLSAWLGLTPINKSTGGKERLGRISKMGDRYIRRLMVVGMTSRIKQIKSAPERFDPWFADILQRKPAKLAAIAMANKTARIIWAVLARNEPYAARTA

SEQ ID NO: 277656 - protein, 313 aa, unidentified
MPVSLSKPIVGVDVAKNELVIYQFEGDLLEEIPNTKTSIKQWLKALSGTVAIAIEATNIYHLDFADLAYEAGCTIYMVGGYELKHYREGVKIRAKTDALDAKLLARYLKNEAEELRPWTPPSPLYRQLLSLFRRRAALVQARVGLVQSWANEPLLKAAFAEQVKSMQQLETLIEKTISDQLKEAGLLGQLKRCLKVEGIGFLTGARLITAFQRGDFRNADAFIAFLGMDLRVAKSGQKDARRSLTKRGDPEARRLLHNAAMSASRTKAWKGYYEEQRTRGFSTTQALVMLARKLARVVFALLKGQSEYQPKAS

SEQ ID NO: 277657 - protein, 315 aa, unidentified
MSPQVFVGIDVSKAHLDVAVLPPERRRRFPNDSPGFEELIAWLGEPEATLIVLEATGGYQVAVTAALSLAGFAVVVANPRQIRDHARSQGRLAKTDKLDADCLADYAAKNKPPVRPLPDEQTRLLQALMARRHQLVEMLTMEKNHLQQASAPLAKPIRKHIQWLEKQLQQLDDELDHQVRGSELWRENDELLRTVPGVGQVTSYTLLADLPELGQINNKQVAALVGVAPLNRDSGQRKGHRVIWGGRAAVRTALYMATLSALRHNPVIKAFYQRLKKAGKASKVAIVACMRKLLTILNTMLKERQPWQPRLLKTA

SEQ ID NO: 277658 - protein, 340 aa, unidentified
MHITTIGLDLAKNIFQVHGVREDGSIAFNKPLRRMQILPFFAKLEPCLVGMEACSSAHYWARALTQLGHSVKLMPPAYVKPYVKRGKSDAADAEAICEAVTRPTMRFVEMKSADQQAILCQHRAREMMVGQRTQLSNTIRGLVGEFGIAIRKSLEAIRDFARDMDADQGPDIPDIAREVIASLCEQLLFIHARVIKMDQAIARTAKSDHRIKLLQTIPGIGPINASAIVATIGSGHQFRSGRDFAAWIGLTPLNKSSGGKERLGKISRMGDRYLRQLLVVGMSSRLRAARSHPERVDPWTASILERKPARLATVAMANKTARIIWAVLTRNEPYTPRTAA

SEQ ID NO: 277659 - protein, 275 aa, unidentified
MNYQFYLGIDVGKSSFDFALIDEEGTIHLQAEVSNTSASIAGWIIELQDLFPLINIWEKMLICMEHSGYYNALLLKHLDSRENHNIWVESALQIKRSMGIQRGKNDKIDALRIAEYALDLQRKARLWEPKAKNIERLSLLISHRDRTVKNLQSLTTPLKEEAGFINQILHQEMEEISRPSIVALEKSLAEFNLRIEKILKEDIELSQQAKILTSIPGIGSVIASKIIIATEGFTKITNPRALACYSGIAPFEHRSGTSIRGKTRVSHLANKDLKK

SEQ ID NO: 277660 - protein, 322 aa, unidentified
MEIVVGIDVSKDRLDVHVWPSGEAFAVARHHAGLLELQARLDGLGPARIGVEATGGYETVVAASLAGQGHPVVVVNPAQVRAFAVALGQRAKTDPIDAAVIARFVAATRPEIRPLPDAATQLLADLVARRSQIVAMIGAEQQRRKRTGDRRLLRSLDRLVAALEKELSHVETAIDDAVRGSPAWREKEDLLASVPGVGPQTARRLIADMPELGALDRRQVAALAGLAPFTRQRALGPVRRRHGRRPAQPRPQGLRRPPQGRRQTPHRRPRRRRAKAPHHPQRRPARQNPLENHLTRKTVASRAFGAPGMTAVGSGDGGPILG

SEQ ID NO: 277661 - protein, 365 aa, unidentified
MIEISQSSWLVAGLVPGINRQPLKKLAADETALVQLLYRWRDEATKAGRAIDRIAVAYEAGRDGFWLARWLRGQGIEAHVIHPTSVAVSREHRRAKTDRLDTELLTRAFLGWLRGEPRHCSMAMIPTLEEEDAKRPNRERENLVSERTRIVNRMKSTLARLGIRGFKPTLRKATERLDRLRTAEGRPLPPNTLAELRRDMARLHFVIDQIREIEAARLVRLEQNPEQASHAMVRLLAQVIGIGIETADMLVHEVFVRNLPDRKAVARYGGLTGSPDESGAKRREKGLARAGNARVRRGMIQLAWRFLMFQKESALAQWYRARTADARGATRKTMIVALARKLLVALWQLVTTGAVPQGVVLRRAA

SEQ ID NO: 277662 - protein, 421 aa, unidentified
MAVPREISLTRWVGRAIGLDVHRDFCEVAICEDGLVRAAGRVSTTPEALSVFADSLQLTDRVALEVTGSCWEVARILKPGVDRVVVVSPDDTGIAAARAKTDKLDAKALALLLWRGELDAVWMPDERCQVLRRRLQRREQLVHARSRAKNEIHAVLQRRLKGQPPCSDLFGVKGRQWLGDLELPLEERESVDAGIRHIEFLDVEITAVERLIAQQALVWPEILRLMTVPGVNVICAASFIAAVGDYQRFRTSNKLVAYLGLDPKVKQSGDTPARSGRISKRGSGQARWALVEAAWSTVLQPGPMHAFYERIKARRGHGKAIVATARKLTVLFWCMLTRGEDYAHQQPSLTRKKLRRLEITAGAPKYTPGSRGVWAANDAVRDAERALAKQAEASYKRMVQDQIAGGPARKVGASVTVEHAS

SEQ ID NO: 277663 - protein, 353 aa, unidentified
MEIIAMDSHKRYSQICVQDSKGSFISEKRIEHQRGNVMEFLSKYSRGDSVAIETIGNWYWLVDEIEAAGMHPQLVNAHKAKLMLGSINKTDKLDARGLNKLQFTGTLPTVWIPPAKLRDMRELPRTRMVFANLRTKLKNRIHSVIDKYGFQDDFINISDIFGRKGREQMSKIIKQLPPQSAYTLKCLLEQLDKVSQQIQRLEKQFKKVFSQNNDIKLLMTLPGVGFILAVVIATEIGDIGRFAGPERLASYSGMTPRVHSSGGRTRYGKLRNDVNHYLKWAYSEAGNSVAVNHKRLCNRHVSSLYSRIRSRSGHAKAIGAVGRHLAEATYWLLTKNVEYKEPKVKTDLSTTTV

SEQ ID NO: 277664 - protein, 369 aa, unidentified
MNQFSKYVGLDVHQETIAVAVADMGGEVRYMGEIVNTPEAIAKVVTRLKRGTDRLTFCYEAGPCGYTICRQLRELKQDCQVVAPSLIPKKPGERVKTDRRDALSLARLHRADELSPVWIPDEAQEALRDLTRAREDMKHLQRQAKQRLLSFLSRHGHRYTGRSRWTQPHWRWLEGIRFARPEQQIVLQEYIDTVQACGKRVASLDREVETAAHASTLWPVIEALMALRGISLLAAVTVVAELGDLTRFANAPQLMAYLGLVPSEHSSGKRERRGGITKTGNGHVRRVLIEAAWTYRHAARKTAILQRRAERTAPEVQEIAWSAQKRLCQRFRNLMARGKLKNQVCTAIARELVGFIWAIGQQVAPLSRA

SEQ ID NO: 277665 - protein, 349 aa, unidentified
MSVDPAYKVVRGGALAKEAKWKDRIVIDGLLGIDVSKDTLDASMSSCNKVRAKSFANSPDGWRHLLDWLISQKIRRVHACLESTGRYSLGIACKLNEAGHVVSIVNPAQIRDFARTKLGRNKTDGVDASHIREYCELFKPSPWAPPSHAHRQLGELQTIRAGIVAGLTEWKNRKNSGMVDAVAQSLADATISHFTSQLGAVEKAIAQTIDNDSDLRRKRDLLLSISGVGETLASVVLAELPGPDVLRSSAEAVAYTGLNPRRHQSGISIDRLTRISKIGNAVLRAALYMPAMSAMRYNPAIVALVTRLKARGRLNPKQIVVAAMRKLLVLCFGVLKTGKPFDPALAMGC

SEQ ID NO: 277666 - protein, 390 aa, unidentified
MVTTHFQTKTPTAIRTDLGAIFVSLELSRSTWLVTSLSPGGGERMSKHAVAGGNVSELLARFTHLQEKARSRSGRLFPIVTIQEAGLDGFWIHRVLETNGIESYVVDAASIAASRRRKRAKTDKIDGEALVRALLAFKRGEPRVCAMVKAPSPEEEDRRRICRERRVLIAERVEHVNRIKGLLFAQGIGGYQPLRKDRRRQLEDLRTGDGRVLPPHLRAQICRVLDRLELLLDHIAVVERERDALVERVECEAKAPEPATMLCAIKGVGPEVAAVLWTEGLCRQFDNRRQVAAYAGLAPTPWQSGTIDREQGVSKAGNPRLRTTMIQLAWLWLRNQPSSALSRWFIDRVQSNGGRHKKCTIVALARKLLVALWKYVTFGIVIDGAVLKSA

SEQ ID NO: 277667 - protein, 369 aa, unidentified
MNKTTYVGLDVHKDTIAVAVAEEGRRGEIRFFGTIAHTADSVLRLTKQLAAAGNTPSFCYEAGPCGYGLHRHLTKLGFDCAVVAPTMIPRKAGDRVKTDRRDAEMLARLWRAGELTPIWTPDEEQEAMRDLIRTRKQAMDAVKVAKQQLLGFLLRHGLRYENGSYWTKRHRRWLAELRRFRFSHQQLAFEELKRAVDQAEARVATLDQAIDEAVQTWRFAPVVAGLRALRGVNTIIAATVVAEIGDITRIENPRQLMAWLGLVPSEHSSGNTTRRGRLTKTGNALARTMLVEAGWSYRHPPKEGQPYLKRSAHLPQEIKDIGWKAQTRLCKRFRHLSNTGKPQPRVLAAIARELVGFIWDIARKTPLPA

SEQ ID NO: 277668 - protein, 424 aa, unidentified
MSKKKSSLAGLQALYARACGLDVHKKLVVACVRILDSKDGTVQSTLRKFGTMTADLLELRQWLVELKVTHVAMESTGVYWQPVFNLLEGHFKVWVVNAQHIKKVPGRKTDMKDAEWIAQLLQCGLLRPSFVPERQQRELRDLTRQQTKLVQQRNAVDNRIQKVLETANIKLGSVASDVLGVSGRKMIEGLIAGEKDVTALADLAQRQLRGKIPELQRALEGELTEHHRFLLRQLLGQYDFLEKEIASISERLGAVAPPSFRAAVEQLDAIAGVGERGARALLAETGTDMSRFPTHKHFASWAGRCPGNHESAGKRRSGKTPAANRHLDAVLTEMAHAAVRTKNSYFKAQYHRLAGRRGKKRAIGAVKHSLLVTVYFMLRDNRPYKDLGVDYFDKLNPQQRIRYHVRRLQELGQEVELSPIADAA

SEQ ID NO: 277669 - protein, 305 aa, unidentified
MAQSSTLFIGMDVHKETIAVAYVAQDHGAEVTYLGTIGTRQCDIDQLVRKMQSKAKHLVFVYEAGPCGYWLYRYLSKKGYDCWVVAPSLIPKKAGDRVKTDRRDAVPLARLARSGDLTAVDVPKVEDEAIRDLSRAREDTLSDLKDAKFRLKAFLLGHDIRYVGRANWNPAHLRWLSEVVCPTPAQQIVFQEYVRAVTEHTERLQRLEQELHDHVKAWRLHPVVEALQALRGVQFTVAVTMVAEIGDLSRFDTPRELMKFLGLIPSEYSSGERRQQGSITKAGNTHARRALVEGAWAYRYPAKVS

SEQ ID NO: 277670 - protein, 364 aa, unidentified
MTWCDSDRAFWSQHKHPGGSSHDTVCWTRCVAEGEKLHVLDEAGHRVWRGRCATDPAAIAATVRRYAPSAARIGLETGPLTTWLWTTLTAEGLPVVCLDARHAKKALDMRVNKTDANDAEGLAHLVRAGWYREVRVKGRSAMLAKALLGARSQLLSMSLALENQIRGILKTFGRIVPKGGGGLFEKNVRVLITEDAAIAAVIMPLLQARQVARGNCAALDRRLIRSVQGDATCRMLMTMPGIGPITAVAYAAALEKADNFKQSRAVGAWIGLTPRRFQSGEVDYDGHISRRGDRQLRALLYEAAAVLLTRVRRESALRRWGLMLWKRLGFKRAATALARKMAVVLHAMWKSGTSFNPTLGTVKA

SEQ ID NO: 277671 - protein, 406 aa, unidentified
MNQLFVGIDVHPGSNTVFIMLPDGSKHSSFTVPNNLGGAQRVSKQVIAALEKLQFSNVKFGMEATSVYGQNLVYFLREDGALAKFNREIFVFNPKRINKFTQSHPEVPKNDDVDAFMIADFLRFGRLPASVHTDDYRYQALRSLTRARASAVENLTREKQRFMNHLFIKCSGLAQTKTFSNSFGATALATYEEFETPDDIADMDLNELVAFLSKHGKNRFPNPEKIAEAVQTAARGSYRLPKTIVDSVNQVLSISISSMRALQSQIKALEKEIEKQITNIPNTLTSVRGIGPVFSAGIIAEVGDINRFDSHPKLAKFAGLAWSQHNSGSFIAQNTRLIKTGNRFLKAYLCETAFSLVRCDIEFKRFYDLKYKEVNKFQHKRALALTARKLVRLVFRLLKDNRLYVP

SEQ ID NO: 277672 - protein, 340 aa, unidentified
MKKVYAGIDLHGNNNYLGIMDKQGKKVFKRKLPNIAEVILEALRPFQKGIQGIVVESTFNWYWLVDRLMNEGYKVHLANPAAIQQYAGKKHSDDKDDAFWLAEMLRLGILPEGYIYPKEERPIRDLLRKRGHLVRLRTSLMLSLQNIISRNCGIKLSAGQMKKVRKDEVLPVLVGQEDLALSGRVSKETIDFLTRQIRQVENFVEDKVELKAPYQYLQTICGVGKILSLTIMLETGPIERFAQVGNYTSYCRKVPSKWTSNEKTKGQGNKKNGNKYLAWAFSEAAELARRYEGQARAYYNKKSAKTNFLVAHTALAHKLARAAYFVMRDQVPFDPARVFA

SEQ ID NO: 277673 - protein, 427 aa, unidentified
MQTEAERLATYRRLRTGIRGSERHLIVGIDIAKEKHHAFFGTATGKTLCKQFTFPNSREGFELLFSRTETVRLQQQLQQVVIGVEPTANYHKPLADYLVRQGLQVVQVSGVAVKQNRELLDGRWDKHDRKDAANIADLIAQGKCQFYEFPSPAIRELRELLHVKHTLRKEEHRVKARIRNNLLAQFFPELDQFMTACQQDTLAVIGACCSPEQIAALDYASFFDKVAIVYKGKRQEEHLYRIWQCAHKSIGCQAGNAPLYEGKVLIDQLLHLRQIAQELDEQIAALCSGFEEYPCLLSIPGIGPAISATILGALGNPYRFDTAKQVIKLAGLDLSASRSGRLALKATPVISKRGNPELRYALCQAALVAGSRNTFFRCWFARKLQGRERERGITAILRVKLAVKLLVIAWTVMKKKEMFAYERLNNC

SEQ ID NO: 277674 - protein, 320 aa, unidentified
MAMTVLQSIIGVDVAKAEVVVCHIETDELKIVPNNKTELRAWLKSLPVDSAIAIEATNIYHLDTVNLAHGMGHKVYVIDGYRLNHYRKSTGGRAKTDASDARLLARYLKNEQADLRAWNPPPKIYTKLQSLLRRRAALVKMRVGLNQSWAGEPLLKASSKSVSACLARHEGLIEKRILDAVTEAGLLHQIKRCQAVEGIGFLTAVALTMAFQRGEFESADAYIAFLGMDLRVSDSGQMSGRRSLSKKGDSEIRRLLHNAASAGIKSNAWKPLYEGYLGRGLKTTQALVIIARKLARIAFSLMKNLSEYQSKAVWGASPQP

SEQ ID NO: 277675 - protein, 460 aa, unidentified
MSKKDNSKKQKTQEKAHSSLPVLFPDTAGIDIGSKSHFVAVPADRATCPVREFSTFTASLHQMINWLKECKIKTVIMESTGVYWIPAYELLESNGFEVKLVNARHVKNVSAHKTDVLDCQWLQQLGTFGLLKGAFRPENAILPLRSYIRQRDMLIKSASTHILHMQKALTQMNIQLHNVISDITGATGIAIVRSIVGGNTNPKALATLRNRGCHNSQETIEASLQGNYRQEHLFSLQQALELYDFYAKKIAECEKLIEKEIKKIESRCDAEKVSQLSKNSKKSSKKSKKNEYDFELGSELMRITGVDLTKIPSIGASTALTIVSEAGLDMSRWRSAKHFASWLGLCPGNKISGGKRLSGKSKPCANRIAIALRVAANTLYRSECAFGAYLRRMKTRLGAPKALTALAHKLARLIYIMLKYGYEYVEKGVEHYEEMYRKRREASLKRKAKELGYELVPVAV

SEQ ID NO: 277676 - protein, 310 aa, unidentified
MEHYVGLDVSLKQTSICVVDQTGSVVQEGVVDSDPEAIAAFVRSKAPGTVRIGLETGPTTTWLWTEIKRLGLPVICIDARHAKAVLKMQINKSDRNDAAGIARIMQTGWFKEVRVKNLDSHAVKALLASRALLVKIKRDLENHVRGLLKNLGLVIGRAKFNVFAARAEELIQDSPELMAAVRPLLKARKAIEQQVDDLDRKVHKLARHDAQVRRFMTVPGVGPITALCFKATIDDPTRFKRSRSVGAYIGLTTRRHASGEVDWSGKISKCGDAMLRMYLFEAAGVLLTRVPKWSVLKAWGDEAHQAKWAP

SEQ ID NO: 277677 - protein, 354 aa, unidentified
MRLYQTETEFNCGIDLHAKCMYACVVDPKGEVLVHRNIKGNDFEYFLKLVEPYRHDLTLCSECTFNWYWLADACEDAGIEFVLAHALYLRAIHTTKKKNDKIDSEKIAQLLRTNMIPYAYVYPRAMRPLRTVVRTRMNYVWLRSEMLGKQTCRLMAEGKQLTKMPQLPRKRWEQAVTELHTDPHLRALVTSDCAIIHELDRQIDHLERVIMAAAKKDHWRDLHVLLSVPGIGKVLAMTILFEIGEISRFPRHQDLASYARLVRGTVASAGKIEGMRGAKMGNGHLKWAFKEAVLVAKRAHPEIRAMAQRLEKKHDRATANAILAHRLARAIYYMLKHGMTFSMELFSKKLRNAA

SEQ ID NO: 277678 - protein, 335 aa, unidentified
MEREYVGVDLHRRRSVIYRMDAAGEKLECVRVPNEPAVFAEAISRAAPGADVVIEATYGWYWAADLVAELGYRVRLANPHGNDWGKRRVKNDERDARDLADLLRLGRLAEAWVAPPAVRELRELVRFRAKLVNLRSGLKAQAHAVMAKNGVLPAVGDMWGPTGTAQLDSLDLPEAYTHRLGVLRELIASYDHQIVTLDRDIHRRLRADHGYQAVQAIHGVGRVFAAVFVAEIGDVGRFDSPAALCSWAGLTPWHRESDTKVRRGQVTKQGSRLVRWAAIEAVARYHGGDHLAAKFHQIADRRGTTKANVAIARRVLTLVYYGLRDGEIRCLNQAA

SEQ ID NO: 277679 - protein, 414 aa, unidentified
MPRWVGRAVGLDVHRDFCEVAICEDGVTRSAGRVPSTPEGIKALAESLLPTDRVALEVTGSCWEVARILEPYVQRVVVVSPDDTGIASARAKTDRLDARTLAGLLWKGELEAVWMPDERCRILRRRLARREQLMRSRTRVKNEIHACLQRRLQAKPPCSDVFGVKGRQWLAGLQLPLEERESVDGGLRQVAFLDAEIAAVERLIAQQALSWPEIRRLMTVPGVNLVGAASFVAAVGNANRFLTSRKLVAYLGLDPRVKQSGEAPARSGRISKRGSASARWALVEAACSAVLQPGPLRAFYQRVRARRGHGKAIVATARKLAILFWCMLTRSEDYAHQQPSLTRKKLRRLEITAGAPKNTQRSAGVWSTNQLMRTAERELAAQAEASYQRMVKDQQAGAPAKPVKVGASATPEHA

SEQ ID NO: 277680 - protein, 433 aa, unidentified
MKVKYEDRQKQKVIAITTDTLVVGVDIAKNYQWARFVDFRGIEHDRALKFKNSKGGFETILARIREICKKENFAKAVVGMEPTGHYWKAFANWLEKQDGIKAVLVNPYATKQAKELDDNSQTKSDKKDALTIAKLVKDGRYFELYLPHDVYAELRGLSTARSGLNKRKNALKNTITAVMDEYFPEYGEVFKCPLSGKASRHILKTCPFPKFILELGEDGVTDEIKRSVKKTVGRKKAAQLIETSKESIGVDYGEEAARLKLRLMLEELELLEKQTEELEVQMEAALQKTDYAGFLLSIKGIGVVTLAACLGELGNPARFENPRQMSRMAGYNLVEDSSGKNKSGTKISKRGRKNLRSVLYQMALIMVATNDEMKQLYHYLKTREEAPLRKMQALIVVSKKILALIHTLAKKKENYDPGKVFGHVRREQMKAAA

SEQ ID NO: 277681 - protein, 312 aa, unidentified
MDATVVVGIDVSKDRLDVHVRPGGEAFAVTRDGDGIAALVMQLAPLNVAAVAVEATGGFETVVAAGLAGSGLPVVVVNPAQVRAFANALGKRAKTDPIDAAVIAHFVEATKPTIRSLPDAETQLLGDLVARRRQIVAMIGAERQREKRAPARIRRSIQRLIKALEKELASLDRDIDDAVRGSPAWVAKEDLLASVPGIGKTIARTLLAELPELGSLDRRQVAALAGLAPWTRQSGQWRGKSFIAGGRAGVRAALFMGAMVAARHNPILKAFRDRLVAAGKPKLVALIATARKLVTILNAVIRDKQPWRAQTA

SEQ ID NO: 277682 - protein, 391 aa, unidentified
MRFAGIDVGSEHHVVAVVDEEGRVLQRPSPLGEDAAGYAQLWELLGSPQDSLVALEATGHYWRNQFIALLEKDYAVALLNPLRTRRFAEEELQRTKTDAIDALGIARFAAQKRPAATRLPDAATDELRELARLRERISRLRQLHRAVDLGFPEFTRYVRTLESQLATTILGRYPTAASFRGVSVKNLARMVYDGTHRVGEELARALLEAARTSVGAHHSEPYRLRIKYLCEDLEVLRRRLKDLARDIECKLDDHEIGKLLTTIDGIGPLTAACLIAELGNPARFPSASAIASYVGVAPRLRQSGKKRVSSSPAIPLGNARLRKALWMVVLNAVRCNPWLRQYYQRLRAAGKPGKVAVIAAMRKLLAAVWSVATHRRAFVPILPTPQVAANA

SEQ ID NO: 277683 - protein, 341 aa, unidentified
MRIVGGLDIHRRQITFDYLDERSGQSRRGRIAPADRMLLRRWLATNATERPAAFAVEACTGWRFVVEELRRAGMEAHLAEPADTAAARGPKRRAKTDRTDARHLRELLAAGRLPESWIPPEQVLEMRARLQLFRDLREEHTAWVQRIHAILLHQGAPAIAGDLLGADNRRRLEAADGLSPAGRQAVATALRVLDALDAELVPLRKQIAAFARRQPGCRALQAQYGVGEITAVALWAELGDTRRFSASRKAVRHSGLDITVYSSDGKRPPRHLSRQGSPLLRWALFEAAQCAARPSSPDYAYYRQVADRLGGNRAALSVARKIARRAHHTLRALGDEAFAAI

SEQ ID NO: 277684 - protein, 398 aa, unidentified
MTESSDYESVQVFIGVDVGKDTHHAVAINRSGKRLFDKALPNDENKHRSLISDLKQHGQILLVVDQPATIGALPVAVARSEGVLVGYLPGLAMRRIADLHAGEAKTDARDAAIIAEAARTLPHALRTLKLADEQIAELSMLCGFDDDLAAQTTQASNRIRGLLTQIHPALERVLGPRLDHPAVLDLLQRYPSPEKLASLGEKKLAAQLCKLAPRLGKRLAADIAQALAEQTVVVPGTNAAAVVLPRLALQLITLRKQRDEVALAVEQRVLAHPLYPVLTSMPGVGVRTAARLLTEVACRAFASAAHLAAYAGLAPVTRRSGSSIRGEHPSRRGNKALKRALFLSAFAALRDPLSRAYYTRKMSQGKRHNQALIALARRRCDVLFAMMRDGTFYTPQAS

SEQ ID NO: 277685 - protein, 409 aa, unidentified
MLLVGVDWAEAQHAACLMHPEGTVVRRLTIPHSAAGLAWLREAIAAVEVEPAEVLVAIERPDGLLVEALLDAGYVVYALNPKAVDRYRERTRVAGGKTDPADAELLARVLVTDRDRHQPLRPSSPMVEEIRVLARQDERASRDQRRLLNRLRHDLLAVFPAALEAFPDLTAVSALAFLERWPTAAVARDQDRPALEAFLRQQFHSQARAAAGRIHAALQADALTAPLHLAAARAGAIQLAARQLLLLHRQRAAWEKRLRELLEGDGAHPDGEVLLSLPGLDARLAARVLGEIGDRRERFPTPAALHCDAGTAPTTKASGRSRVVVARGACNRSLRQALFRWAFCSLPRSAWARSFYDQQRAAGKGHFKAIRALANRWLEILHHLLATGQRYDEDVHQRNRARATRPAAA

SEQ ID NO: 277686 - protein, 315 aa, unidentified
MDTEYVGIDVSKDNLDAAAYVSGKKWRLPNSDAGINKLIDIFREISPALVVMEATGGYETPAAYELNKAQIPFAVINPRESRDFAKATKKLAKTDTIDARVLAHFAAAIKPEPHPMADEQTQELEVILARRRQVIEMLTAEKNRLHTARKPVIAAINAHIDYLEKELSGTDSSLKGRIAESPVQQERYKLLHSVPGVGDRIAATLVIDLPELGKVNNKQIATLVGVAPLNHDSGSKRGKCSPWGGRPQVRSALYMAALVASRCNPVISSLYVRLCAMGKAKKVALVACMHKLLTIMNSMLRHKTFWNYEPLPASR

SEQ ID NO: 277687 - protein, 348 aa, unidentified
MAKVNTIGVDLAKNVIQSSVVSPSGKELQNKELTRIKFAEFLVKQKPSLVAFEACATAHYWSRYAQNNGHQTKIIPAKAVAPFRQGHKTDKNDALAVAEAANRPNIKQAPLKTIEQQGLQSIQRSRQLLVQDRTSISNHIRGLLMEFGVVIPQGWAALETHIPRVLEDAENGVPHMYRPTLHRMFERYHQLKDDIAFLNEQIKQLIKQNDACRRLMDLEGVGPISAILLFATLGTGEAFLNGREFSAYVGLTPKQYSSGGKTNLIGISKHVANRRLRAVLIQGARAYVHRGLKDPQTPKQKWLWALIERAGYGKAAVALANKNVRTAWALLTKGTAYNRAQAYEALAA

SEQ ID NO: 277688 - protein, 350 aa, unidentified
MLIIGCDYHPSFQQIALVDTESGELGERRLLHREEAEQFYGQLKGQSMKARVGMEASGHARWFERLLGELQFELWIGNAAEIRSKRVRKQKTDRQDAQLLLRLMMEDRFPRIWVPDAENRDLRQLLWHRHRLVQMRTRVMNQLHVVALNEGLRRKKALWRPAGRKQLESFALAPWASRRRQDLLDVLDQLTPKIQQLTRALEEEVEKRPVARCLGTHPGVGPLTALAFELVIGTPQRFHCGKQVASYVGLVPSEESSGDRRRLGHISKQGNVLLRFLLVEAAQVTVRSQSEWRRKFFHLAMRRGRKIAKVAMVRKLAVHLYWMWRQGWDYGQLKNLGSHAGEPGNPDGVQ

SEQ ID NO: 277689 - protein, 388 aa, unidentified
MEARTMNNLPPAGTHDDAICCVLAMELSKKSWIVAVNTPLSDKISRHTLKPCDGKELLDLCERIQTRARETKQRVEIVSCYEAGYDGFWLHRLLEAHGIRNYVIDPASLQVDRRARRAKTDHVDAERLLRSLMAYLRGELKVWSVVCVPSVAEEDDRRLHRERGRLINERIQHINRIKGLLAIHGIYDYQPLRRDRMQQLEWLRTADGRTLPPRLKAEILRELQRLVLVIGMIKTIEAERDTIASAETEAEHTSAKKIQHLAKIKSIGPEFATTLVGEVFYRSFDNRKQLASYVGLTPAHFQSGAMSRDQGISKAGNAKARTVMIELAWLWLRHQPDSDLSVWFRDRVGKLKGRIRRITIVAVARKLLIALWRYLETGLVPKGAALKV

SEQ ID NO: 277690 - protein, 404 aa, unidentified
MNNVAGIDVSKGKSMVSVLRPFGEVVAKPFSIGHTGSELKELADYLKSLDGETRVVMEHTGRYYEPVARFLHDEGVFVSAVNPKLIKDYGNNTLRKVKTDKADSRKIARYGIDNWAELRQHTPMDTIRMQLKTLNRQQSLYTKTKTMMKNNLIALLDQTYPGVNALFDSPVREDGSQKWVDFATTFWHVDCVRNMSLTAFAERYRKWCKRHGYNFSQSKAVEVHAGAQDLIAMLPRDALTKTMVRQAIDALNAISASMERLKAEMQALAAQLPEYPVVMAMHGVGDSLGPQLMAELGDVTRFTHRNAITAFAGVDPGADQSGTHEAKSTRVSKSGAPELRRALFLVMDCLLKTQPQDDPVYRFMDKKRAEGKPYLVYMTAGANKFLRIYYGRVKEYLALSLIHI

SEQ ID NO: 277691 - protein, 485 aa, unidentified
MFGQEKQPEEPGKQKTVAGKSKQRRRKKGMTLDDRPLLEPNAAGIDIGAREIFVAVPADRDENPVRVFPTFTADLEEMARWLVSCGVTTVAMESTGVYWIPLYDVLERHGVTPCLVNARNMKNVPGRRTDWHECQWLQFLHSVGLLRAAFRPDGDVCAVRSLMRHRSDLVQIAVQHIQHMQKSLTQMNLQIHHVISEITGVTGLAIVDAILAGERDPAVLAKLRDHRIHASEEIVQKSLVGNWRPEHLFTLKQSRQIYQQYQESITACDEEIERLVIAFEPRVDPSEHPLPPDRKAKQRKRKKRGVTPGVNPKTGFDTRTEAYKLFGVDVTQIPGLMMMALVLFSEIGRNMSKWPTADHFASWLGLCPDNDISGGKVLWKGMRGTRNRAGQLFRMAAFGLHHDLTPMGDHLRRMKSKIGPAAAQTATAHKIAIIFYTMVKNQVEYDASIWARRDAEREKKFEAKLKRQAHERGYKLVKIEENIAA

SEQ ID NO: 277692 - protein, 381 aa, unidentified
MIVLGADTHKRSHTVAAVAAATGELLGEQTVPVGQRGFGALLRWARGLEGERVWVLEDCRHVSGSLERFLIERGERVLRIPTHLTATARRSARQRGKSDPIDALNVARAALQEGLECFPAAHLDGPELDLRLLVDHRERLVRHRVELNSTLLWHLHDLWPELQLPGGALFSKKWSTRIARRLARAEQTMRVRIARDELRRLRELTQAISRLEREISELVDQLAPQLVSQPGFGPLTAAKLVGEIAGAQRFATSAKLARAAGVAPIPASSGNTRRQRLDRGGNRQINAALHRVIVTRARCHAQTRDYIARRRSEGKSTREAIRCLKRYLARHVWRLLQPPHPAQGTLSPSISCHRSDRSGSGDPRRPHCRYDEDRQSAQRRC

SEQ ID NO: 277693 - protein, 371 aa, unidentified
MNHVTSIGLDVHARSITGAAFNASTGEMTVKKFTAAPGEVASWILSFESPKAVYESGVTGFHLVRELRSLGVDCVVGAVSKMQKPAADKRKKNDRNDAQFLARQLASRNIVEVWVPDEECEAARDVSRALEDLRDDLVRAKHRLTHLLLRHGHVWDEYDPETGKRRGAWTRAHWEWIRSIELPEPASRDALDLYISEVRHIEAQKKAVEKEVARYAAADRWRGRVEAMQHLKGIGLATAFSLVVEAGVFSRFDDARAFSSWLGLVPSENSTGGKVRRGGITKAGNGHLRKQLVESAWHYTHATKKRKRDAWDGDVPLSVQNHAAKGVERLVERRAHFARQRMRPVVANVATARELACWAWAIGRMMEGTLA

SEQ ID NO: 277694 - protein, 341 aa, unidentified
MQRTKYFIGLDISAEDFSASCITSPDNSVFSVQKFPNNIDGFNEFISHLSKHSIKQSEVIVCMEATGVYSESLSYFLSSKGFNLCIEAPHKIKNKTKDSPRKNDFIDAVSIAEYAYRYFDKLTFWKPKDNIIEQIQVLLSTREHLIIQMTANENALKTLKHKYYQTPLANQIYEQTINKFKEHIKEIDKEIKELIDKDDSFKNKINLAKSVPGVGLLLAANLLVLTKGFTEHLNYKHTAAYTGICPYEKISGTSLYKPPRSRKAGPAKLRKLLYLAALSVRTHNLVFKKYFLRKVAEGKNKRLIINNIENKLLKIIFAVINSGVAYTNNYKSINPELLKTA

SEQ ID NO: 277695 - protein, 429 aa, unidentified
MSYRIAGIDVHKKMLAVVVSNVEVESEFQFERRMFGGNPEQLRLLAAWLLEQEAEEVVMESTAQYWKPVWGALERYWKPIREKREGAKRRSGTLHLAQAQSNRGRRGRKKDFVDAERLVKRLVARELTLSFVPDAEQRLWRAVTRKKYQLRRDVVRLHNQLESLLEETHIKLSSLVSDLLGVSARRMLKALADGETNPAALAALAHQRLRATPEQLCDALGACTELKPVYRRLLKMTLEHLQILEQQIGQLDQELATLLHPHQDAVERLAEVPGFAVDSAQQIIAEVGPAAATFPSEKCLSSWVGACPGDEESAGVNYSHRSPKGNRHMRRLLNQTANAAVKAKGSIFEIIYRRCVPRLGHNQAIGVIAHRQCRLIWLILHQGTRYEERGPAVTKRSRYQRTWRMIRQLRNLGYRIELPNPQASQAQAQ

SEQ ID NO: 277696 - protein, 363 aa, unidentified
MTNTNISSVIIGVDTHKFIHVAVAIDNNGNRLTAFSAPATTKGYKLLEDWACALGTITAFGIEGTGSYGAELSRHLFAKGHKVIEVTRPNRQLRYQHGKSDSLDAEGAARSVLAGQAIAQPKTQTGSVEMIRHLKIARDTAVKCQWQAMVTLKTLIINASAVLRDTLNQISGKIALIRYSAAFRPGAMTSTMASAKTALRALAQRWLTLHEEIQSHDKALEQLVVVRAPTLLASHGIATMTAAEMLMLVGDDPTGIRCEAALAKLCGVCPIPASSGKTNRFRHNRGGNRQANAALYRVAIVRMRNHPRTAKEKWKERATGRLYAASSDTSSAKSLPTCVAQKHRRPALDIGASTPWPRRSTAL

SEQ ID NO: 277697 - protein, 347 aa, unidentified
MEYFVGLDVSLETVNVCIVNAAGDILLEKKIAAEPATIVHLLKSFGSPFKRIGLEAGPTSSWLYGELRAAGYGAICLECRHVKAGLSAMRNKTDRNDARGIAQLVRLGWFRQVHVKSEEAQRTRMLLVNRQQLLTKALDIENSVRGSLKVFGLRVGVVARRGFEARVLELVADDPILLAVTEPMLRVRQALLEEFERLDRLCQQLARRDPVCRRLMTVPGVGVVVALTYRTGVDAPERFSRSRDVGAHFGLTPKRYSSGQTDYDGRISRCGDEMVRTALYQAANVLLHHGRWSSLRSWAMRIAKRGSVKGAKVALARRLAVVMHRMWTDGTDFRWSDTSRMTVPTAA

SEQ ID NO: 277698 - protein, 364 aa, unidentified
MTVTIVETPTQARAITGGVDTHAGVHVAAALDPIGGLLGVAEFAASPAGYAYLLEWLGGFGTVCLVGIEGTGSYGAGLARHITAAGIRVVEVDRSDRQDRRRRGKSDPLDAVSAARAALSGRAAGTPKGRDGQVEAIRALMVAKRTARSERIQTINQARSLIVTGPDDLRARFAGHSADDLVAELASLRPRPGSMIRYHTLLSLRELGRRVAFLDGQLQRLDALIVPLVTARAPGLLALYGVGHDTAAKLLIAAGDHPERLRSEAAWAHLCATAPIPASSGKVTRHRLNPGGDRQANHALYRIVITRMSSHPPTRAYVDRRSKEGLSKKEIIRCLIGGLSVPRSGWPGCGSPVALGDGLVAVPL

SEQ ID NO: 277699 - protein, 356 aa, unidentified
MNKNSILFIGLDTHKDFFEVAYFSPDHHSAVEHYGRISSAKVALTKFIQSMQRKYPNATIHVVYEAGPCGYWVYRHLTKLGHLCFIVAPSLIPKKPGDRVKTDKRDAILLCTLLKNGDANPIYVPEPEDEAVRDLSRARERAMHDLNDARYQLKALLLRNNINYDGLANWSAKHLRWLTEIVLPHTSQQFVLQEMIVTIHERKDRLERLDNELNHHVHAWRYYPVVKAIQAMKGVRILVSTGLIAELGDLTRFDHPRKLMNYLGLVPSEHSSGGKRRLGAITKCGNTHARRLLIESASSYRYSANVSTELQIRLEGLPKQVVDIAWAAQVRLCRRYQRLMARGKNANVVKVAIARS

SEQ ID NO: 277700 - protein, 318 aa, unidentified
MSKSTLMSAGIDTGKYNLDAAIDGRPDRLQLNNEQPGHASLAAWLQKHGVERVGIEASGGYERPVVAYLRAQGFNVILFQPKQVRAYAMFRLQRAKNDTIDAALIAACTAAVKTLHAPPDPRFAALAERLTFIEQIEEDIARSKTRREGFQTAELKAEVEAEISRLKKRRTLELKLLAKSLRASADLAKRLDLLVSVPGIGERTALALLIRMPELGTLSREQAAALAGLAPFDDDSGNRKGSRHIEAGRPRLRKSLYAAALPAAFKWNKALVDLYGRLKAAGKPHKLALVACARKLLIFANTVLARGSKWTDDLPARN

SEQ ID NO: 277701 - protein, 430 aa, unidentified
MNTNTQNAKIEAISETTLVLGIDVGSETHYARAFDFRGIEYSKKPFKFSNTEVGFMTFKAWILDIKEKHGKDKVVPGMEPTGHYWFNLGKFIQDNEMKPVLVNPHHVKKSKELDDNNPTKNDRKDPKVIAGLVREGRYMIPYLPDGVYADLRIASNMRFQLQAELTRIQNRISRWFSIYFPEYKTVYGQPDAKSGMLILKKAPLPEDILTLGVDGVNQIWRDAKIRAVGKARAKILVEAAEHSVGSKEGAVSARMEIRMLLEDYESRNIRLQEVMTLIEGLVKQIPMAEKLLEIKGVGIKTVSGFLAEVGDISRFNTPKELQKLAGLALVENSSGKHKGETTISRRGRKRLRYLLFEVAMSLVSKNQEFRELHNYYTTRRLNPLKKMQSLMAIAAKLIRVFYVMLTKGVDYDPKKMVSDIKRPAVYLQAA

SEQ ID NO: 277702 - protein, 345 aa, unidentified
MRYYAGLDVSLEETAICIVDEVGKIERELRASSEPAALIDAFAALPLPIERIGLEACSLASWLHQGMARAGLPVLCIETRAAKAAMGAMPNKTDRNDARGLAQIIRTGWYRAVHVKSPPCRSARALLGARRMVLNKQRAIENEVRAVLREVGLKLGTPGRKMFAPRARELASADAGITDIVEPLLAILATMAIELARLTKRVLDTVRVEPVCRRLMTVPGVGPLTALTFRATVDQPERFRRSRDIGAHFGLTPRRYQSGETDIQGRISRCGDELARTALYEAAHTLLTRCTKWSTLKAWGMRIAQRRGLAKARVAVARKLAVILHRMWSDQTDFRWGKASAVAAV

SEQ ID NO: 277703 - protein, 323 aa, unidentified
MSQPNPLCVGIDVSKATLDIAASSDVAQFTVSNDSDGFNAIITGLRRHSVALVLMEATGGLEVAVACSLQAEGFEVAVVNPRQARDFARAMGYLAKTDRIDARVLTQMAEVINRHPERKRFIRALPDAERQALAAMVVRRRQLIAMLVAERNRLHPFHPQNKKSINTIIKALEDELVRLEKEMDSHIRNHFKEIAERLSSIKGVGTMTVSAMLAEIPELGTLSRREISALIGVAPVNRDSGTMRGRRTIFFGGRAGVRSALYMAALVATRFNPVIKTFYVRLLAAGKAKKVALVACMRKLLTILNAMLRKNEEWDESYHHVAP

SEQ ID NO: 277704 - protein, 346 aa, unidentified
MEHYVGLDVSLKQTSICVVNQTGSVVREGVVDSDPEAIAAFVRSNVPGVVRIGLETGPTSTWLWTELRRLSLPAICIDARHAKAVLKMQINKSDRNDAAGIARIMQTGWFKEVCVKHLDSHAIKALLVSRALLVKIKRDIENQVRGLLKNLGLVIGRAKMNVFAMRAAELADARPELAAAVEPLLKAREAVGEQIADLDRKVMQLARNDAQVRRFMTAPGVGPITALCFLATIDDPTRFKKSRSVGAYVGLTTRRYASGEVDWTGRISKCGDKMLRSYLYEAANVLLTRVAKWSALKAWGVRLAKRSGLRKAKVAVARKLAVILHRMWIEGSEFKWSSKQAASQSA

SEQ ID NO: 277705 - protein, 355 aa, unidentified
MKYYTSTTEYNCGIDLHARQMYVCLMDRQGKKLVHTNIRNNDFKFFLKLIEPYKHDLTVCCECMFGWYWLADACEAANLTFVLAHALYLKAIHGGKNKNDRIDSEKIAHLLRSNLIPPSYVYPADMRPLRALLRQRLFFVWSRADLLARINSHQLAHNRVPPKRTCRTRDPWEEALLKAEDHPLRQLALKNEMAMIRHFDHQIFQLEEELQRQTKKVAGRDYTLLQGVPGIGESLGLTILYEIGDINRFPTVKDFLSYCRLVRGTVASAGKIKGLRGSKLGNPYLRWAFGEAAVISKRDHQVIGPLSQRLEAKMGGNKFKANTVVAIKLARAVYFMLKNKTVFDPERLVAALAKN

SEQ ID NO: 277706 - protein, 349 aa, unidentified
MAEQRLSYTGERIDVGIDVHKETYTVTCLCQRQRVKTATVPADPARLAESLPRWFPGARLFSAYEAGFSGFVLHRALTTAGITNIVVNPASVAVAANDKVKTDRRDSRKLARDLADGRLRGIYVPTEAEELARLLPRTRAQLVAHRATLTRQIKAKLHQFGLIAPASRRLMSSRYLREIAAWELPTELRVSLTLLADQWRFATRQLLEVRRLLREQAKAQVALETVYRSVPGVGEVVARTLATELGDMTRFANERALFSYTGLTPSEYSSGTAIRRGHISRQGVSRLRHVLVETAWRALPRDPILQAMFDRIAATRGKQRAIVAIARRLIGRIRACFRHGTTYAVGTVG

SEQ ID NO: 277707 - protein, 353 aa, unidentified
MANHTGGVVGGVDAHADKHHVAVVDLQGRLLGATTFPTTAAGYAQLISWLRGHGEIERVGVESTGAYAAGLVRALRAGGISVVEVNQPHRHARQRLGKSDPIDAELAARAALSRTATAVPKQTSGIVEAIRQLQIVRTSALKARHAALQQLNDLIVTAPEQLRSNLREGRTMRAKAALCRRLRADIARVHEPEQAAKLALSSLARRIGELDREINHLDGQLEQLVRIAAPRTTQLFGVGTQGASQLLIAAGQNIERFRSEAAFAKICGAAPIQASSGRTTRHRLDPGGDRQANRALHMIAVCRLRYCPRTQAYAAKRTRDGLNKREILRCLKRYIARETFHTLQADLGALTST

SEQ ID NO: 277708 - protein, 404 aa, unidentified
MSTTSLTPPAIITEAATFIGIDFHKKYSVYHAINAAGTDLGKGRIEHHSPEDFATLIKRWPNARVVFEASMNWHWLYEVLEMSMTGNHITLANPFKTRIIAEAQVKTDKIDARILALLLRAGLVSSVHIPCKETRQRKEVLRQRCFFVKQRTMLRNRIHRLLGAQHGLKLPVVSDLFGKKGMAILEKLELAAPAGLLLKQQLEMLKNVQTRIKEDEVALEQMMSSTEAQKHVLSIPGMGPILASVVVNEIDDISRFNSAQKLCGYIGLCPSTSSSGGKTYNGKLMRHCNKWLRWAFVEAAWVAIGCNSYFGDLYKKKRAVGKKANTAILCVARRMARITWQLLTQERDYETLPPSDTPKKQLKRGAKAQESSVKDRGGEGLNASAVKGKRGRPKKTFPAAPIAH

SEQ ID NO: 277709 - protein, 353 aa, unidentified
MKRDKYMGMDVHQATTVVAVIDAEGKIVLETIVATAAAPICRLIESISGPLHITLEETTQAEWLYELLQGFVAEVVVCDPRRNKLLTEGSKGDKADARKLAELLRSGMVRSVWHGRQTTRGLKEMVRSYETFAIDTRRTMLRIKALYRSRGIATTGTGVYSAKQREHWLKQLTEVGMQQRAAWLYQQLDHVRELRKQAKAAVLAEGQRHRAVELLRTIPQVGPIRAAQIVATAGTPHRFRTKRQFWSYSGLAVVTHTSAEYELRAGRVVRRNKPVATRGLNPNCNRRLKSVFISAATAGGVSHPWQPYLDNLERKGMRADTARLTLARKIAALALAIWKKGEAFDPKKLNWTT

SEQ ID NO: 277710 - protein, 410 aa, unidentified
MAERFVGIDVGLREHRIAVLDRDGEAVGQSFTIAASKDGVATLLRALDARDAPPAPTLIGLEASGHLWENLEAALVGAGYRVIVLNPLQTRRYRDVVRRKAKTDDIDAHVIAGLLRSGVAQASYVPDEQVQSLRELARLRARLMADRQDYQRQLIAQLDVVLPEHHAVLGDLLTARARGILAQFPTAQHLAQANPRAIRRAAEDAGARGFSLNDATVVRDSARRSLYSGKAAVARAHVVRTLVNQLERLINAIDEVDRAATALLPPSEPGTGPSDAELLQTIPGIGPQTAATLLGELGALTRFTDARALVAYVGFYPVIHESGDRAATPRLSRVGSRIARRSLYLAAVNAVRRSGEWRTIYLRKKAQGKTAKQALVVVAVKLLHALYAMLKHRQPYNPSRLLVAPATIGT

SEQ ID NO: 277711 - protein, 343 aa, unidentified
MESIHYIGLDVHKKSIAYCIKDIAGTLIRQGTVSTDRTALRQWLQELPAPWRGAMEATIFTGWIYDFLKPHAVELKVAHPQMLKAITAAKKKNDRADAEKLADLLRVNLLPECHMMSSELRDLRRMLRYRNLIVRTATQMKNKMSGLLMEVGASYNKRRLHGKRYFDQLLETVEDVPDSVKDLLVLSRGSLELFTGIQKKLTKALREDRLIRERVERLMSIPGVGEIMALTWVLEVGDPDRFKNSRQLISYCGLCSAQRESAGKEHRGPLSKQRNKHLQTKLIEAAKLAPNWNVQLAELHEKELKRGNRNRATIAVARKLAEYLLAVDRRGSVFEQKIAVQVA

SEQ ID NO: 277712 - protein, 371 aa, unidentified
MFHVGLDIHTKRISICALDEKGQVVHRSQVRSIQDLLRVLTDLPDRFQVCYEASCGYGHFHELLRPLATRVVVAHPGQLRLIFRSRNKNDRNDAERLAKLLYLGEAPAVHVPSADVRAWRELINCRSQVIARRTRAKNAARALLRGAGVTPPKHPGLWTKEGLAWLRRLELPTASQQLRRDLLLEEMETLLRQVQRIERQLAQQAQRTPAVVRLRSIPGVGLRTAEAVAAFIDDPHRFPNAKAVGSYFGLVPCQDQSGDRNRLGHITRQGAPVVRQLVAEAAWQARRRSPTVRAYFERAQRDDPQRKKIALVATAHYLVRVMWALLKRGTDWQENPALAKAPASASCGGPAVERGEGEREKERGERMSESA

SEQ ID NO: 277713 - protein, 343 aa, unidentified
MQIHSVGIDLGKTTFHLVALGAAGKVLVRKKFTRNQLLAYTANMPTSLVGLEACAGAHFLGRALRKQGHDVRLIAGQFVKPFVKSNKNDFIDAEAIAEAVDRQNMRFVPIKTDDQLDLQALHRVRDRLITRRTSVINQLRAFLLERGLVFAKSPAKLRERMPEVLENADEDLTPRMRNLLALLWNEWKELEQQIVDMNYEVEQIASSDPACTRLRQIPGIGPLVATAIVAAIGNGAAFRKGREFAAWMGLVPKQYSTGGKARLYGISKRGNSYLRKILIHGARAVVLRSKRDRIAMGAWMTSLETRAPRNVLIVATAHKLARIAWAVLSTGQDYRAVPEALTV

SEQ ID NO: 277714 - protein, 363 aa, unidentified
MKAAPAASAIELKNEKSAKAKRILVGVDVHLRGYQAARKVDSSVIGVVENFRSLEALLLYVEKQCERAEQVVLVYEAGPLGYTLYRMLKARKVLCYVCAPDSSEQQRKRRKNNKIDARSLTSKLFNYLNGDQEALQLARVPTEAQEQLRLASRQHDQLVEERKRLGAKGNGLLLSQGFGSWSNWWRPKAWAHLSCIAPQWLLERLKIWVDVLKMLDEKICQAKVALARACSGPRPKGVGALSQMQLQSEVLDWSLYTNRRKIACLAGMVPSEWSTGDEQRRGSITKVGVPAIRRIIVEMVWRMILFQPQYKAVQKWQEVLRGTNPAMKKKAVVAIGRQLMVDLWRLQTGRVTAQELNLVMIGD

SEQ ID NO: 277715 - protein, 405 aa, unidentified
MLYLGIDLHLRQMTVSLRNEGGDVLIRRQVSTRWPKLTEFRAQLAQTTTGDEKYVAVVEVCGFHDWLVKWLHRDPRCHMVLVVQPLGRSAVKTDPRDANALSELLWLNRGRLLRGERVRGVRTVHQPDEKQQADRRLTQLRERLVWRRTQTINQIHKILRRNNLEWDRPTKTFQTCKVIRWLRGMRLNPMDRLAMNQLLVQWKLWEEQLLEVDKRITSRFLANRDAQLLATIPGVNAFIALAIASRIAPIERFPHGRSLANFLGLTPGCRSSGETERPGSITKAGSRLVRSLIGQIIVHLLRKDAAVRTWYQRIKRRRGSRIARVAVMRRTAAIMQRMLSKGEPWRAEKVDSVTSETEDKPQRVQPRRRQKTVPSALMERRTESSISDTGSSSLPAGGEVARCPA

SEQ ID NO: 277716 - protein, 354 aa, unidentified
MQQFVGIDWATRRARWCAVTPAGLVIDEGWIPADEDGLALLVGRLGPAALACIEMMSGAAWVRERLQAAGWTVQIADARKAKAVGSLAAKTDKLDARVLAELARRDLVPQVHVPTFADRELKERLGRRMHLVRLRTSAMNRAHGVMSQFGVKLAFNRLRQPDRDDLLTGLGVPEVWRRSIAEAVAVVSALDARLIPLEQELRPIARADPRVQLLVTIPGIGDLLGLTIASEIGDISRFPSARKLVGYSGLTPRVYQSGEKSRTGKLSKTGSTMLRWAAIEAAQQAWRPNNPWHQLYRDVKERCGGKGNPAKAAVARKVLIASWHVLALQQPFNPSRPRGAAAPVPANSSCVLAA

SEQ ID NO: 277717 - protein, 309 aa, unidentified
MKQSVVYIGIDVAKTHLDVAWAGTFRRWPNERSGHAALVRWIKQSATPVQLICEASGGYEQALLESLQKSQVKVTLVQAVRVRQYARAAGILAKTDRIDAKVLAAFGSAMQPQPTPPLSAEQKRLRQYEAQRRHLSRTLVAEENRLAQLSCTELRTLSRSLISKIKTQIKTLDRGISDLIAQDQTLCVKAQKLTAISGVGVRTAALLLAQMPELGQLNRRQAAALAGLAPFNHDSGSVRGKRAIFGGRPALRSGLYMAALSAARFNPILSNFYQRLRAKGKPHKLALTAVMRKLLLALNQTLKPLPCSA

SEQ ID NO: 277718 - protein, 320 aa, unidentified
MQTQNAVVYAGVDVAKATLQLHLQGRQSELANTPEGRRQLFNQLQNVPGVHVICEATGGYEQAMVKVLHEAKIPVSVTNPAQVRAAAQARGQRAKTDPIDAEQLTDYGQRYQPKATPPTSATQDQLVALTQWLKQLIHGQAMAKTQAEHHQQPFVRRQHAKLMAHLQSQIKSVEKQIEALLNQDAPLQQRVNCLDAIQGVGPRTAWMVLAHMPELGQLNRQQVAALAGLAPWTRDSGTMKGMRCIGGGRPEVRLALYMAALSAARSNPVLRTLYKRLRAKGKLGKVALTAVMRRLLTYMNHQLKDLLSKTATEKTEDAKA

SEQ ID NO: 277719 - protein, 366 aa, unidentified
MDAKIAPQGVIIASEFTSWLLAIQFRDREQPSLYPIEGGNTDKLMAKLAAARDCWAKVNGALPAITLCYEVGHDAFWLARFLKARGIECLVIDPGSLQVNRRARRVKTDRVDVKMLLRTLIAWCRGERHVWSLVRIPSVDEEDLRRSHRERSRLVRERTAHINRIKGLLFAQGVRGINIKSQYKTLAVDQLVTGDGHRLPPRLVCEVAREIQRLAMVQEQIAKIERERDTAPTPCEATERKRRLLLRLKSIGPAFANRRQVGSFLGLTPSPYSSGEEERCQGISRAGSGHVRAIMIEAAWLWIRHQPKSALTRWFLERTAGQSTRMRKTMIVAVARKLAIALWRYVEHGLVPQGAILNPPTTGNAR

SEQ ID NO: 277720 - protein, 346 aa, unidentified
MKKIFIGIDFSKEKFDATLIQAEGLKECAPSVHEVFDNKTSGYRRLVKWVKTHAEGFTADTWLFCGENTGGYSIGLSNYVYASGYDMWLECAYKIKHSAGIQRVKNDKADSRTIAEYAMRNYDKMILYKPQSASLTCLREVFLYRHSLVRQKVALQVRRDEKRLTQEKSDARAFMSFTSKHLITEVNKAIAKCDQKIKDIIAADDELRETFDIITSMPGIGVQNATCLMVYTDNFQKFDLNARKIGCYYGIAPFGRQSGTSVNSRPQVSPFANRMIKSLLSQAALVAIKFDMNVYNYYQRLKERGKHPLLIHNNIKNKMLHALVAMVRDRVKYNPDYVYRTNKEIA

SEQ ID NO: 277721 - protein, 404 aa, unidentified
MKHVIGLDVSKGKSTVTIYDSYRQCKYEGEINHTRRDFEQLHKRIVDITSLDDQAPDIVFEATGVYSKPIEAFLKDYGYAYCRMNPLEANLQMAKMRRHKTDISDAHELAKTHFKMEREPTYIQDDYYEQMRALTRYYDEIDEEMILLKNRMHSILQLSFPELEKMLTPNSALFLNIVQLYPHPTLVLAHSKTVIKNRLKANTRKNLSLERAEKKAIALLEAAQNSYPAIKSTDVRCEQVRDYANRIAELKDKKEALVQQMITLSKDRKEYMVLRSIPGIGDSTACRLIGEMGDIRRFQNAKQLNAYAGIDIMRYQSGNTQYHDRINKRGNKHLRKLLYFMVCAMIMKKKDKPNHFVDYYYKLKTQPQRKPHKVAIIACINKFLKVTFQLLTHGILYDYETALS

SEQ ID NO: 277722 - protein, 376 aa, unidentified
MSNLRFIGLDVHAETIAVAVAEPGGEVRSLGVIPNRSEAIRKLVKKVGPAAQLRVCYEAGPTGYVVYWQLSELGVKCEVVAPTLVPVKAGDRVKTDRRDALKLARSYRAGDLTAVWVPDAAHEALRDLVRAREAAKKDQLRARHRLGKFLLRQGRRPATKMNAWTQKHLTWVKTVHFEHAAQEATLLDYLNEVEHVADRLERLERAIDDAVKSAPERMRTVIDALQALRGIAQVSAVTIVAEVGELSRFAKPRQLMGYSGAVASEDTSGKRTRRGGITKTGNAHLRRIVIEAAWAYQHRPGIGPALRKRQATVSPEVRQIAWKAQHRLNARYRHLTAKGKCRQEVVTAVGRELLGFIWAIGVKVEAQGRRQRSAAA

SEQ ID NO: 277723 - protein, 339 aa, unidentified
MDNDIIIGIDLAKNVFQLHGARRDGTVLFRKKLTRTQLKKFMSTHAPCLVAMEACGTAHYWAREFSKVGYRVKLIPPIYVKPFVKRQKNDAADAEAITEAALRPNMSFVEPKSAETQAKTMMMRTRDQLIEQRTATVNALRGHLAEFGLIAPVGLKNVDQLRKRIEETDDIPALGIEMANMHFTQISTLSENIDALTANIKVHCASSAAARLLQTMPGIGPIGAMVIEAFAPDMRGFSKGRDFAAWLGLIPRQNSSGGKTRLGATTKMGQKDIRRALIIGAMSCIASAARHGKRCHPWLQDKLDRKPKMVAAIALANKMARTIWAMLTKKEAYRTPATV

SEQ ID NO: 277724 - protein, 370 aa, unidentified
MKSIAYLGMDVHKDFIYCVVLGSGTNDTPITERKLPNDRLKLKKWIDKWARLYDLRSCYEASSCGYVIHRWLLEMGITCDVIAPSLIPTRAGDKIKTDRRDALKLARLHRAGELTKVHIPTIEEEAVRALIRCREAVQKEVIASKHYVLKFLTARGLVYREGKNWTQNHWRYLRGLKLEGPDAITFGHYIALLDFKLHELTNLDKEVETLAWSERYKDVVGRLICLRGVGVLTAMVIISEVQDFARFAGPRELMSYFGIVPSERSSGSAQRQGGITKTGNSRARRVLIESAWHYQREPAVGEKLKARQEGQNPEVIAHCWKAQRRLHKKFWSIATRKERCKAAVAVARELVGFIWAIVTNYGTSAQARAH

SEQ ID NO: 277725 - protein, 331 aa, unidentified
MFPVGIDVSKNTLDLCILYDGIKGRIKTRNIQNNRHSVENILRWLRLQHCGPEDVHVVMEATGVYHERLATELHDAGFRVSLANPHRSREFARGMGIMTKTDKVDAYMLACYAFLKKPHYWEPPAPEIRYLGALLRRRDVLLGDALREEKRLEKYLSTDTPADIISSCRRMAQLLREEVSNIERQIKAHIKASPALRRDYTLLNSIKSVGPQLGMHMLVVLRSHNFASAEQAAAFLGVVPIEKRSGTSVRSRPRMSKIGPPQLRAKLYMSALCGKIYNKRMRNIYDEMCLRGKPKMVAIGALMRKLVHWCYGVLKTGTVFNDEGLKQVLST

SEQ ID NO: 277726 - protein, 337 aa, unidentified
MSTTSHSHIAGNAQKDHNETNKIFVGIDVSQDSLAVHILPANESFTAANSADGIRELVKRFQKIAPTLILFEATGGLERRLLMSLIAAEMAVVVLNPRQARDLSNGLGQGAKTDSVDAKMLAKIASLDEFEPRIIPSEDAMKMNDLVTRKQQLIDMQTMEKNRLHMAKQKKLAGKIIRSIEKIIDIFRKQIEEIDAEIEAVIKANPDWSEKDKTLRSCPGVGKKTAQVVLSAVPELGDLTRKQIARLIGLAPMKRQSGKWTGEAHIGGGRSNVRCALYMAAMNAVKKPNIFKALYDRIRAQNKPYKVAIVAVMRKLIIILNVMIKTKTRWNEHGVRS

SEQ ID NO: 277727 - protein, 400 aa, unidentified
MRSIGMDVHRSFAQVAVLDRGKVTEEFRVELDYDAVVAFGQKLRKDDEVILEATGNTSAIVRLLTPFVAKVVIANPLQVMAIAHARVKTDKVDARILAQLHAAGFLPEVWAADDDTLNLRRLVSERAALVRSVRRVKSRVQAVLHANLVPKYSGHLFGKGGRDWLSTAPLPRAERDLLARHLDELDWLKGKLEKLDGAMARIALDDTRTRKLMTIAGINSVVATAVIAAIGDISRFPTPDRLASYFGLTPRVRQSGDRGAIHGRISKQGNAIAKTMLIEAAWSAASVPGPLRAFFLRIKDRKGLNVAAVATARKIANLIWELLTKEAPYRWARPAFVAMKMRKLELRAGAAKAHGPAGPARDYWIKEIRHREMELVAQAEAAYAAMVEAWRDRPPKPQKG

SEQ ID NO: 277728 - protein, 424 aa, unidentified
MKVTFQTCCGVDVHKSFLVATIIKTSSGIEPSYQKRRFSTFNNSILEFKKWLLENECLYVCMESTGKYWIPVFNLLEDEINVTIANPKWVKAVKGNKDDTKDSKWIGDLFRLGLVRGSYIPCKKIRILREFTRYRYKLVSCRSSEKNRYQNALTVCNVALDSVVSDIFGKSSTSIIDYLLEQSGTSIDHEVIASKLLKHLKAKEDAVIESIEGYQMTDSQKYRMHLVRAHMDYITAAINDVDSEIESLIASDPDYENAVELLCTIPGVKYDSAITIISEIGIDMSQFCSSKRLCCWAGLTPGSNESAGKKKSVRITRAGVYLKPALVQCAHAAVKSDKSPYYKKKYESLVKRRGKKRAIIAIARMILTAIYQMLSTGEQWNPSDLYKVDMPEALLEKQKQKAIKQAQKLLIREGLLPPTEPIAS

SEQ ID NO: 277729 - protein, 427 aa, unidentified
MLQVIHERCAGLDVHKKTVVACALVTKQDGQVQQEKLTFGTTTGEILAMAEWLKGQEISSVAMESTGVYWIPIYNLLEGSFELLVVNAQHMKAVPGRKTDVSDAEWIGQLHRHGLLKGSFVPPKPQRQLRELVRHRTNVVERRSQSVNELQKVLETANIKLASVVSEITGVSAMEMVYGLIQGQQEPQVLAELARGRLRDKKPQLAAALSGRLEEHHRFILSQLLADISFCEEQILELDLQIQIQMKDYEEVIKRLDEIPGVNRRIAEVLVAEMGTDTSRFGDAAHVVSWAGMCPGNNQSGSKRRSARVRQGNKSLKRVLVEAAHAAGRKKDSYFSAQYHRLAARRGKKRAKVAVGRSILETAFHMIQRKTAYKDLGSDYFDRRNPEKLAQRLAERIVRLGYKVSFEPTGKAAAGYKLSYQPLEKVA

SEQ ID NO: 277730 - protein, 342 aa, unidentified
MDHFAGLDVSVKETSICILDDRGRIVREVKVASEPEALLKVLGNPAYRFKRIGLEAGPLSQWLFSALAEAELAVVCVETRHMQAVLKAQINKTDRNDARGIAQMIRAGLYRPVHVKTLRSQKLRMLLTHRKLLQSKAIAIENDLRGTLRNFGLKVGMVGKVRFEARIEELVENFPDLAVLVEPLLIVRRALREQIVILHRRLLAIVRDDEVCRRLMTTPGVGPVVALTYRATVDMPARFRKSKAVGAVFGLTCARYQSGEIDWSGRISRCGDEMMRVMLYEAAQSMLRSKKWSWLKAWAMQIARRRGLKKAIVALARRLAVILHRIWVDGTEFRWTRETAAA

SEQ ID NO: 277731 - protein, 396 aa, unidentified
MKGYIGIDLSLDNFTATFLASDQGQERQTTLAFPVSKEGWQSFCQELELFRATCKQVLIGLESSGPYTALILAHLLSLPHPVYVLNPNLIRHLRQSQSLRPLKTDPVDANTIARFLQQASSLPQPVSEVQEIALLAREYEALSQEIAALKNRIGQHVHVLFPELAKNVHLFSQAILRLLQACPSAKAIAQAPQETLAAILQPKGRGRAPSITAQRLRQLAQNSFGIPNPARQALLQSQIRRLLFLLDERKRLEGQLLELVQSWQEQAFNTLRSIKGMGNITTATFLAELGPLPRFPKAKSLVAYAGLDPSVHESGRYRGTSRLSKRGNRHLRRILYLIAQKLTCTTERFRQAYAHYRQQGRSHREALVIVARKILITFYAILSRHQPFQDLPIGDS

SEQ ID NO: 277732 - protein, 370 aa, unidentified
MKEPTTSYIGLDIHKESIAMAIADADRAAPRFIGTINPVPAELCKAMRRVCTKESTLIVYEAGPCGYGWVRYLRKQGWACDVIAPSRITRKPSEKRIKTDRRDALLLARESRSGNLTSIVVPDERDEAIRDLVRAREDARAARHRVRLQIQAMMLRHGRHYQGKSNWSQAHDRHLSKVRFEHPAQEITFNEYRQASKEACERVERITQELRVQCEDWRMNPVVKALMCLKGFDFVAAVAVVAELGDLTRFAHPRALMAFLGLVPSEFTSGPNRRQGEITKSGNKHARRILVEAAWNNRFKPQVTRGLEVRQEGQPKIIRDISWKAQLRLSKRWRSLSMGRKLAQNKVCVAIARELSGFIWDVARHVKLSP

SEQ ID NO: 277733 - protein, 415 aa, unidentified
MEPVYGKGGRVAGIDVHKRMLAVVVADRVDPEQTRKEHKFGTEWRSLRQLREWLQSEQVEEVAMESTAQYWKPVLLELEGHMKVQLAQPRSTTARQGRKSDFRDARRIVKRLLADDLTLSYIPGPEQRLERFVSRARIQLVEDRTRIQNQMECLLEEGRIKLGAVVSDLLGVTSRRLLWALAKGEEQVEEMAALAAKHLEASEEVLRDALHGQMNATHRRLLEMSLRRIESLDRDIEELDRELARLQSVHQEAIERVCGVPGMSLIAAEQTVAEAGVAAAAFPSAGQFASWIGACPGREESAEKSNSNRSPKGNRVLRRVLTQAAWAAVKMKGCVFQKQFQRLVPRLGKYKAIWAVAHKMARLIWKILHDNVSYQERGNLPPDAKSVQRRKQRLTRQLRDLGFKVELTPRSLNMA

SEQ ID NO: 277734 - protein, 414 aa, unidentified
MRALVERCCGLDVHQDTVVACLLIGEPGKPLRQEVRTWATTTRALEALRDWLQAEKVTHVGMESTGVYWRPIYAVLEGHFVLIVGNARHIKTVPGRKTDVKDAAWIADLVRHGLIAPSYVPPQPLRELRDLLRYRRKLVEGRASERNRLLKLLETANIKLASVMSDVFGVSGLAILKALVAGETSPERLADLGKGPLRKKRADLVRALEGKVEEHHRFLMGVQLRRLDAADHDIAALNERISERLKPYTAEHALLMQIPGVDGLAAAAIIAEIGVDMAVFLSAHHLAAWAGVCPGNHESAGRSKSGRTRKGNVHLRTILVGAAISAGRCKGTYLRDKYHRLKARRGALRAALAIAHKILIAAYHMLARGVSYRELGEAYLDQLSQTRTAAHLKRRLERLGYHVTLEPKTVAMVT

SEQ ID NO: 277735 - protein, 420 aa, unidentified
MRDRRSARLQRRDPTWRSKRVFCGWDWGSTHHGVCVIDDTGTVVKQWLVQHTHDDLGQLFAELAELADPSDLPIAIERSEGLIVGLITAAGHPVLMAEPAGFNAARPRWGAAGTKSDAGDAFMLADYARTDGHRLRRVTAVAEVTRELGALVRARTGLVEARTAASNQLWAVLAEHWPGAAGVFQKLISKIALAFLTDYPTPQSAAHLGEARMRQFCRRHAYRGGKHPGDLLKRLRAAPAAASPIAPEILAAIVAGSVAQIRVLNAEIARLERAIKEALRQHPKAALLEDLPRVATISLAQLIAEVGPLLDRCENPEQVAAICGAAPITRASGKTRTVAFRYAANKPARVAITGFADNSRHASGWAAQRYNQARARGARHPHAVRILARGWLRVIWTCWHTHTAYNPSRHRGEQLATRPT

SEQ ID NO: 277736 - protein, 387 aa, unidentified
MPQPNDLSRSPIALNQDGTLIAIIEMSQASWLVAGIVPGSARHPLKKLAADAAALLGLLERWRGEATQAGRQITRIVVAFEAGRDGFWLARWLRARGIEAYVIHPTSVAVSREHRRAKTDRLDTALLKRVFLGWLRGEPGHCTMAAIPTLEEEDARRPNRERESLVGERTRIVNRIKANLARLGIRGFKPTVRGASERLEALRTPEGAPLPPNTRAELRRDMARLGFIVGQIKEIEDARQEGLATRPDQGPHAMVRLLARVIGIGIETADMLVHEILSRNLRDRRAVARYAGLTGSPDESGSRRREKGLARAGNARVRRGMVQLAWRFLLFQKDSALAQWYRARTADARGGTRKTLIVALARKLLIALWRFVSIGEAPEGVVLRPAS

SEQ ID NO: 277737 - protein, 370 aa, unidentified
MESIIYVGMDVHKESYSLCCYDPRTDRYLYEHKMKSTTTNVLKYLDSVKKQLGDVIFICGYEAGPTGFGLCRDLLRKDIACVVMAPTSLKRNANYKVKNDKVDARLLAKDLFTHDYSPVHLSSQKEEAIKEFCRMRRSIMTELKTAKQVLLAFLLRQGKHFDGKTHWSGEHRKWLKQITFEQPYLQEAFDEYLISVNELEARLKRVEHRLEEISKDEEVESKVKKLICFCGIDTLTAVSIVSEVGDFMRFARAWDFANFVGLSVGEHSSGGKERHLGITKSGNSYLRRLFTESAKSLKKTSMKSKKSKRLIDRQQGNDPRVIAYADKCRYRLKYKMMSLENRGKAANVASTAAARELACFVWGMMTDHIA

SEQ ID NO: 277738 - protein, 424 aa, unidentified
MDVIYERVAGLDVHKQTVVATVRAMVAGKVERECGTFDTTTAGLSALLAWLTEARCSHVAMEATGVFWKPVWNVLSDGAFELIVANAAHIKNVPGRKTDVNDATWIADLLACGLVRGSFVPDEKFQQLRALQRTRKQLTREQTRHVQRLQKTLEEANIKLDSVISDIMGLSGRRMIEAIIAGVRSPRKLADLADRRIKATPKELYDALHGRVTDHHRFRLRLHLAQYDALAEAMTALDKEIDAAIGRIDEERESAGQAPFRAASRDICEVPGVNLLAANMILAEIGLDMGRFPTAGHIVSWSGLCTGQNESAGKRKSSRLRKGAPWLKTTLVQCAVSASNKKDSYFRAQFLRLKSRRGAPKAFCAVAASLLTAIYHMLRDGTKFRDLGKDHFDKRPTKAKVNRLLAQLAKLGYQADLRPLTNAA

SEQ ID NO: 277739 - protein, 335 aa, unidentified
MNYRLFAGIDVSKLKIDVVFFLAENPDRQFHECFENSDEGCSKMVFWINRVSGLLISDMFFCAEDTGLYTLPICTFFDGQGGNLWIENALRLKRSLGLKRGKSDKADAAEIANYGFLHRRKAILFKLPSNTVSKLKHLLSCRKQLVKQQTALKNAMGELEVFDRESADFTLDIRKSLITEYDNKINMLEEKLLSYVKEDGILERQYNLVKTVHGIGAQTAMFIVVLTQGFTLFENPRKFACYCGLAPFGNTSGTTLKGKPKVSHLANKRIKTLLTMCALNTIKKDNEFKRYYDRKIKEGKHHSSVLNVLRNKLISRAFAAVLKDRPYGKNVNLVA

SEQ ID NO: 277740 - protein, 349 aa, unidentified
MGEVSTIGVDIAKSVFQIHGVDAGGTVVIRRRVGRARVLEFFADLPPCLVGMEACATAHQWARELKKLGHDTRLMAPSYVKAYVKRGKNDAADAAAICEAVTRPSMRFVPIKNVEQQSVLMLHRTRDLLIRQRTQLINALRAHLAELGLVAAKGREGVHQLVTVVTECGGERLPSNARFACQAIVTQLHAVQIEISGLDKRITQTHRVNADSKRLDTIPGFGVILSTAVVATMTDPKAFKTGREFAAWIGLVPRQNSTGGKDRLGSISKQGDRYLRRLLVVAATSVINSARARPYKYPWVIELLGRRPTKVVAVALANKMARIAWAVLAKGEPYRAPTRSSKAVVPAAA

SEQ ID NO: 277741 - protein, 326 aa, unidentified
MTLSHLTDNSFVGIDVGGAGLDVAWHRGDSAHYANRPDAIATLVERLRTGPEVTRIVLEPTGGYEKPLVKALRQAQLPVEVIHTTRFNAYRALVGVKAKSDTSDARLLASYAAAPDEIRGRKAGHVELPEDAIREALSELAGRRDQLKHMIHAETCRLGTVRLSELRQAITAHLEALRAEDKQVHRMMLELVRQRIDLRRDQRLLKTIKGIGVKSALGLLASVPELGRIDNKAAAALIGVAPFVRKSGTMSAPARIHGGRAAVRSILYMAAVTASRHNPVLRPFYERLIANGKPPKLALIAVLRRLVVFANAVLRSGQPWRGASAT

SEQ ID NO: 277742 - protein, 344 aa, unidentified
MDNHTQYSGFAGVDLAKKVMQIHFVTGDGEITDKQVKRAEFLDFFRNRSKCLIGMEACGASQDWARKLEAMGHEVHLMSPKAVKPFVSGQKNDYNDAIGIYKAMFNGVRRVPVKSTEIRDLQTLRRIRSQVTKDKVKEINHVRGLLAEYGIVMGKSITAFNKGISSALESLKERGDVSPLVAEELQTTVESIKTKIERQKRLDREIEQLARGCKNYENFLKTPGVGPFTAAMLCVLLCDPAIFANGRQFAAYIGLAPRSRGSGGKNFIIGIPSKFNCDSESRAVFVECAQALARYKNKSPWVDGILRRKPKKVAVIAIANKLARQVWAMANKGESFKQMTILTA

SEQ ID NO: 277743 - protein, 455 aa, unidentified
MPRRRRSTRPVTMPILHPHAAGIDIGATEIYVCVPLDRDPQPIRRFGTFTEDLHALADWLVQCGVTSVAMESTGVYWIPLYQILETRGLAVCLVNARHVKNVPGRKTDVQDCQWLQYLHSVGLLRASFRPPETVCAIRSLLRHRETLVQLAATHTHHMQKALNQMNLQLHHVLSDITGVTGLAILDALLAGERDPHVLARHRDGRVKASRETIAKALVGDYRPEHLFTLRQALASYRHYQRLIAECDLEVQGLLGTVESQVDPVRQPLPPAPAARRKPHRKTPSFDLRAELYRVLGTDLTQVPGLQTPTVHTLFAELGADLSAFPSGHHFASWLGLCPDNRISGGKVLSVKTRHVKHRVAQALRLAAQSLSRSRSVLGSFFRRMRAKLGAPAAITATAHKLARIIYHLLTTREPYAESRLAAAEADHRRRTESRLRAQARALGFQLVPAPEQAVS

SEQ ID NO: 277744 - protein, 401 aa, unidentified
MKRLSGGIDVGSESHHITILDEEDNILYNQKISHKLNEFAESIKLFKQIEKKEKGVISFALEGKNGYSAPLDRILLDQGFTLYNVDNFKLKRFREAFAGEWRDDQRDSLMLSKMLKLKEHINSEREKVFIKIEKPSLVTESLKLLSRHQQTLIDEKVRLINRLRKKLLEVCPQILELGKLKNKKIIAVLAKYPDFSKYKRITLKSLVKIKGIGEKGAFFLLKRLNNIEYMPGLTDIYKTIILSYSKRVSELQKEIEDIDRKLDEIGEEDKEVKHLKTLPGVATKLASRFIGEIGDINRFPSEKQLAIYCGIACVDNNSGKVTKAKAVYKANKICKQTLITMAGGSIRLSLQCRAYYLKKRTEGKSHNHALRCLARQMIKVIHRMLTEDRDYIVRKELRKVA

SEQ ID NO: 277745 - protein, 342 aa, unidentified
MSEITTVGLDLAKNVFQVHGADAVGQAVLRRKLRRAQVLEFFAKLPPCLVAMEACAGAHFWGRELTRLGHDVRLIPPIYVKPFVKRQKNDAADAEAICEAIQRPSMRTVPIKSEETQAAASVFRVRELLIRQRTQSINALRGHLGEYGHVVPQGATNARRLVALVEDEDMELPVAARASLLALTTMLAQLEQQIAALDAEIARRARENPVARRLMTIPGIGPLIATAFATLAPPPELFAKGRDFAAWLGLTPRQHSTGGKQRLGSTTKMGERSLRRLLIIGANSVIIKRHCHASARPGTWLAGMLERKPAMLVRVALANKMARIVWALMKNEEAYRAPAVAA

SEQ ID NO: 277746 - protein, 339 aa, unidentified
MYYGAIDLHKNNSVLGIIDADGQRLCVRKIPNDLALIKKALGPFAENLEGIVVESTFNWYWLVDGLQDAGYRVHLANPTAIQQYSGIKHTDDVTDSWWLAELLRTRQLKEGFVYPRAERAVRDLLRKRAHLVKQRTQNILSIQNLTCRNTGGRLSANQTKQLTEETVQKFYDQEEERALAINCSLRVIQTLKREITIIEKQVKSKLKLSQPYQVLQSVPGIGELLAMVIMLEAGDMSRFPGVGNFSSYCRCVNSVRLSNGKKKGRGNRKNGNKYLSWAFMEAAHYAIRYYPVIRRFYQRKSAKKGMMVAQMAVAHKLARASYYVLRDQVPFEETRCFVH

SEQ ID NO: 277747 - protein, 347 aa, unidentified
MRGAVHMQITTIGLDIAKNVFQIHGIDATEKVVVRKQLRRGQVIAFFEALAPCLIGMEGCATAHHWARELTKLGHEVRLMPAKDVKAYVKRNKNDAADAEAICEAVRRPTMRFVAVKSAEQQGRLMQHRVRDLLMRQRTQLINALRAHLAELGIAAAQGREGIKELLAIVASDGGSRLPVDAYASLIVLAAQLQAVQTMIGSIEKRIVSQHRSNEASKRLETIPGIGVIGATTIAAVVPDPKVFRSGRDFAAWIGLVPRQDSTGGKQKLGPISKQGDRYLRRILVVGAHSVLRRARQQPEKYPWLTQLLARRPFKVVAVALANKMARIAWALLAKGGTYRAPRLTAA

SEQ ID NO: 277748 - protein, 370 aa, unidentified
MKKHSTRPQSPRGAAARSKGPITIGLDVGDKTSRYCVVGDNGEVMSEGSVATTRKAMAQKFSGMGRCRIALEVGTHSPWLSRLLSKLGFEVIVANARQVQLISASSRKNDRMDAHMLARLARVDPELLRPIRHRSEQAQADLMTIRIRAALVEARTSLVNAARGFTKAMGERLPACDTDSLGVEKLEALPAALQPRLQPLLEQIEALTAQIKKLEGHIEQIARIEYPETRLLTQVSGVGTLIALTFVLTVEDRERFQKSRDVGCYVGLRPKQSESGQSQPQLRITKEGDRYLRTLLVQGAHLILNRRGPDTDLKRWGLKLAQRGGKNAKKRAIVAVARKLAVLLHRLWVCGEVYEPLRNSRPTPASQHAA

SEQ ID NO: 277749 - protein, 345 aa, unidentified
MEITTLGLDLAKNVFQVHAISSTGEVVVRRTLRRAQVIPFFSNLPPCLVGMEACGTSHHWARELTGLGHEVRLMPPAYVKPYVKRGKTDASDAEAICEAVQRPTMRFVPIKSVEQQAALALHRTRDLLVRQRTQLVNMIRGVLGEFGIELPKGIAYALAFVRRVVAGEAPDIPPLAAKVIGAMAEQALEGQARIRQLERELLAWHRSSELSQRIATVPGVGLLGATALAAAVTDPAQFRSGRQFAAWLGLTPLQNCSGGKERLGRISKMGDKYLRRLLINGMTSIVARNAHRPGVADPRVVALLARKPLRVATVAMANHAARAIWAIMTRGETYRAPAPPEAIAA

SEQ ID NO: 277750 - protein, 428 aa, unidentified
MPAYRVAAVDVHKKMLAVVVADVAGEGEYQFKRRKFGATPDQLHVLAQWLVEQEAEEVVMESTAQYWKPVWGALERYWKPARQQRDGAPQMSGTLHLCQAKSNRGPRGRKNDFGDGERMVKRLVAQELVLSFVPDPEQRLWRTVTRRKHQLTRDKIRFRNQLEALLEQAHLKLSSFVSDLLGLSARRMLQAIAEGETDPAALAALADCRLRATPEQLRDALGACRQLHAVYRRLLKMALKELQLMEEQMEQLDGEASHLLQHHQDAVQRVAEVPGFGVDSAVQMIAEVGAEAATFESAEALSSWVGVCPGSEESAGESKSTRSPKGNRTMRRLLNQAAQSAVKVQGGIFDIAFRKLLPRLGYKQAIWAIAHRLCRLLWMILHKGIRYEERGPAVSAKSQRARVARMIKELKKLGYRVEGAPLPAGASA

SEQ ID NO: 277751 - protein, 319 aa, unidentified
MVVGIDVAKAELVVAAGSAGPALWAVPNDEAGVRALAERLAGLAPELIVLEATGGYELLAVAALAAAALPVVVVNPRQVRDFARATGQLAKTDRIDARVLALFGERLRPAVRELPDAAARDLAALLARRRQLLEMRQAERSRLLQVEGRAQRAVRQSLTRHIAYLERELAATDADLGALIRASPAWLEREDLLRSVPGVGPVVARTLLAELPELGRLDRRAVAKLVGVAPLNQDSGAWRGRRAVRGGRAPVRAAMYMAALVAARHNPVVRAFYARLLAAGKPKKVALVACMRKLLTILNHLLRSGQRWEAPGALQPAEP

SEQ ID NO: 277752 - protein, 376 aa, unidentified
MSKLRFVGLDVHADTIAVAVAEPDGEVRSLGVIPNRPESIRKLMGKLGRPATLRVCYEAGPTGYVLYWQLCEMGIACDVVAPNLVPVKPTDRIKTDRRDAEKLARCHRAGDLTAVWVPDAAHEALRDLVRARLAAKRDQLRARNRLSKFLLRHGRRPPPGATPWRLRYFRWVQHVRFDLAAQQITLADYLHEVEHAAERIARLERAIDEAVAAAPARTRQVIDGLQSLRGVAKLSAVTIVAELGQVSRFDSAPQLMGYAGVVSSEHSSGERVRRGWITKCGNAHLRRIVVEAAWAYRFRPVISRTLAARQCTDNERVRAIAWKAQHRLHSRYCHLVARGKCRQQVVTAVGRELLGFIWAIGVELERGADRDITQAA

SEQ ID NO: 277753 - protein, 351 aa, unidentified
MRNQQTVTPKLFIGIDIHKRSWKVHCASDISSGKTFSMKPDPLKLKAYIEQHFNGYEVSTAYEAGCCGYYAHRAFESYGWQSLVVNPADIHRKGKERFTKTDHIDAQVIARELKDGRLQSIHVPDMKREQLRSLFRRRNNLVKNYRKIKSLIKGQLLNQGIDVPCEFDNSHWSHNFRDWLDNLEFTYLTARMTLDSHMRYFRFVDQELRDVSTELRRYCKEHYKKDYMLLRSIPGIGGIVACGIICELGDLRRFKSIKHLSGYVGLVPGIHQSGDNLRNTGITRRAHRLIRSYFIEASWQAIRTDPIMQAYYRKHLGKNVKAVIVKVARKLLSRTLAVIKTEIPYEIGVVS

SEQ ID NO: 277754 - protein, 369 aa, unidentified
MADRITYVGLDVHKESIVVAVASGGLRGEVREYGRIANTATALDRLLRKLGDAGMALRFCYEAGPCGYGIQRHVSARGHECVVVAPSLIPKRAGDRVKTDRRDAASLAKLHRAGELTAVWVPDPQHEAMRDLVRARLDAVHSLRRARQQLSGFLLRQGCHYGRPAWTKLHRRWLAGLIFDQAIHHIVLEDYIAAVEAAEARRDRLTAQIGTMLPDWTLAPVVAALQTMRGMAMVNAATLIAELGDLSRFADPRQLMAYLGLTPSEYSSGSSVRRGGITKAGNGAARRLLIEAAWSYRFPARLSRELLLRQESQPKPIRDIAWKGQVRLCARYRRLARTAKPANVVTTAIARELTGFVWAIARQVTVTPG

SEQ ID NO: 277755 - protein, 351 aa, unidentified
MSRKTDTVVARTIGIDTGKNTLHLIGLDDRGAIVLREKLTRGRIAARLANVPQCLIGIEAGMATHCVARELIALGHDVKQVPPVYAKPFRQGHKNDFRDAHAIAEAVQRPSTRCVPVKTDDQLDLQALHRVRSRLISERTAVINQIRGFLLEHGIPVRQGLRFLRQQLPDILAKRIDVLSSRIIRIIEDLSGDWRRLDVRIEHVTEEIEELAHGTESCRRLMTVPGIGPIIASAMVAAIGNGTAFAKGRDFAAWLGLVPKQMSTGDRTILGRISKRGNRYLRTLFMQGARVILLRPANWAKHSFGPWLTAAAKRLHHNVLATALANKLARIAWTVLAQRRNYESRVIVDAA

SEQ ID NO: 277756 - protein, 355 aa, unidentified
MIMIGADSHKRSHTVVALNEVGRRLGQKTVSTDIDGHLALLQWSGQFDDVQFALEDCRHLTRRLEGDLLAAGQRVVRVPTRLMADARRAGRDRGKSDPIDAEAVALAALRHPDLPVASLDGASREVKLLSDFRRDLVRQRTQVCNKIRWYLHELDPSLHIPSRGLRRRCVVDRIARELDRFDGVVARLARELVARCADLNRQITGLESELRTLVRQLAPSLLAVRGCGVLSAAVLVGETAGVDRFKSKDHFARFTGTAPIPVWSGASQGKVRLNRGGNRLTNTALHMIAVTQSRTDGPGRTYLEKVQARGKTRTEAIRLLRRRISDAVFAALRADIELIKLAVPSTPHHTMPAAA

SEQ ID NO: 277757 - protein, 391 aa, unidentified
MERPMSQAFDASRSLTALEQDSTIIAVIEMSQAKWLVAGIVPGVERQPLKRLAADEAALLKLLHRWRNEAGQGGRQIKRIVVAYEAGRDGFWLARWLRVRGVEAYIIHPASIAVSREHRRAKTDRLDTELLMRAFLGWLRGEKRHCSMVAIPTVEEEDARRPNRERGNLVTEQTRIVNQIKAVLTRFGIRTFRPTLRKAEEQLEGLRTAEGVPLLENTRAELHRYLARLRVVREQIRAIEQSRLGKLATTPEKGPHAMVRLIARVLGVGVETADMLVNEVFSRHWRDRKAIARYAGLTGSPDESGRRRRERGLARGGNTRVRCGMIQFAWRFLRFQKDSALAQWFAARTADRRASTRKTMIVALARKLLIALWRLATSGEVSDGIVLRPAS

SEQ ID NO: 277758 - protein, 367 aa, unidentified
MKKHTTVKQSLSSTDLSTCTTVAVDLAKQVFQIAGENALGQVLYEERIKSREAFHTFLRQLPPTIVVLMETGPGAQAWARQLQAQGSLARILPAQLVAKHRSGAKNDRNDAQAILRAGRDSKIAAVPIKSATALAMQALHRARQGYVRRRTAMSNQMRGLLMEHGITLAQGDAAINQTLPRVLEDATQPLPDMLRELVDELLGEWRQLGERINVLSGRLENAANEDKTARRLMSVRGIGPIIATALLAKQTDPERFANARQFAAYFGMVPEQNSSGQRVRLGRMSKRGDSYVRSLMVQGAHAVLRHLRPDSEQPDDRRLQRWQERLGRKEAAIRLANRNLRIVWVLLQNDQTYRSQPADGRPAAPSH

SEQ ID NO: 277759 - protein, 406 aa, unidentified
MEVVHPRCSGLDVHKKTVVACVLVPGRKEVRTFGTVTAELLRLGDWLQEEGVTHVAMESTGVYWKPVFNLLETTGLELLVVNAQHIKAVPGRKTDVKDAEWIADLLRHGLVRASFIPARPQRELRELVRYRKTVVEQRSHLVQRIQKLLEGANIKLSDVASDIVGVSGIAMLRALAKGEQDLDRLVELAKTSLRNKREELRLALQGSFGSHQRFLLGKQLDQLEFLDRQITDLNQEVEQRLRPFEALLARLDAIPGIGQRNAEQILVEVGTDMSRFPSAAHFASWAKLCPGNDESAGKRRSGRTGLGSRWLRSTMVEAAWSASRVRHSYFAAQYHRLAPRRGKRRAAVAVAHSMLIAVYHLIKDGTVYQDLGPNHFDELDRRRITHRAVRRLQALGYQVTLEEVLA

SEQ ID NO: 277760 - protein, 341 aa, unidentified
MAVAGGLDLHRGQLTFDYVDTGTGESWRGRICPADRESLRGWLRRFHGVPDVEFAVEGCTGWRYVAEELQRAGITPHLAEPAGTAGLRGRKRRAKTDWADARHLRDLLLDGRIPESWIPPGHVLEARALVRLYKDLLEERTSWQQRVHATLFHQGIPVVPKLGTADGQQRLEAAELSAAGRRAVQAGLRQIERLTQEMASLRRELARLSSRQPGCRALRRAHYGIGGLLSVAVWAELGDCRRFSSSDDAVRHTGLDVTIYDSDGRRARGHIARQGPPVLRWALYEAALYASRPASPDYAYYCGVRDRIDGQRALLSVARKLARRCYHTLRDLGEDALAPAA

SEQ ID NO: 277761 - protein, 354 aa, unidentified
MSQKLNAAIAVIGIDIGKNSFHVVGHDHRGAIVLRQKWSRGQVETRLANLPPCLIGMEACVGAHHLSRKLQMLGHDARLMPAKYVRPYSKGQKNDFRDAEAIAEAVQRPTMKFVATKTADQLDLQALHRVRDRLVGQRTGVINQIRAFLLERGIAVRQGLRSLRSELPGILATRTDVLSPRMLRIIEGLAGDWRRLDERIEGLSSEIETLARQDKACERLMTVPGIGPIISSAMVAAIGTGDVFSKGRDFGAWLGLVPKQISTGDRTILGKISRRGNRYLRSLFVQAAWVVLVKVKCWERYGLKSWIEAAKKRLHHNVLAIALANKLARIAWAVLNKGRAFECVKTEETASRPA

SEQ ID NO: 277762 - protein, 343 aa, unidentified
MEQYAGIDVSLESVSICVVDSAGRIVREAKVACEPEALIAWFSKLEVSMTRIGLEAGPLSQWLYAKMREAGLSVELLETRHVRDAFKAMLVKTDRTDARGIAQLMRLGWFRPVHCKSLPAQELRAMLTARKLVQSKRHDLEMSLRGILRGFGLKVGRTTPRTFEPRIRELVDGHPTLVMVADAMLQARAVLVEQLGKLHKRLISFARQDMRARLLMSTPGVGVLVALTYAAAIDDPTRFRSSKAVGAHFGLTPKKYQSGETDITGRISKIGDASVRTALYEAANVILTRPVRGFALKSWAMRVAKRAGMRKAKVALARKLAVVLHRMLSSGTTFVAGKAAATA

SEQ ID NO: 277763 - protein, 349 aa, unidentified
MEVTTIGIDIAKRIFQLHGVNNNGKTVLKKRLMRDQVLIFMSNLPKCLVGIEACGGSNYWARELSKLGHEVKLMAPQFVKPYVKTNKNDEADAEAICEAVARSNMRFVPIKTVEQQDMLSIHRVRARLVKNRTALANEIRGLLLEFGIIIPQGINKIVDKLTEVLDSDQLSGISYQTFSDLKEEYITNDKRVKELENRLKILSNQCSLYKRLQEIPGVGLITGTALIASIGNASCFKNGRQLASWLGLVPRQNSSGGKTKLLGISKRGDVYLRSLLVQGARAILNAKLRYISKKDQIHANCSKFTEWICNLSERCGSNKTVVAIANKLARVIFAVLSSGNAYLEQKVCN

SEQ ID NO: 277764 - protein, 475 aa, unidentified
MNIKGSKKKNQVLSVNIFEQQEIIAKADAIKAELKASTWHELETKGKFDKNDKLSFVSDDMLILGCDIGSETHYVRAIDTRGRELSKSVFGFSNTAEGFESMLDWSTKLAAANDKKQIVLGLEPTGHYWFCLTTWLVAKGISVVQVNPYAVKQTKEVEDNSQLKDDKKDPKLIANLVKDGNFGMPYLPEKLYADIRRLSMFRDQLHEDRIRNLNRLHREMKIYFPEYKDAFGKIDGAFSLELLKEAPFPDGLAALGTEGMKQIWHEAKLRGRGYANASSILEYARKSVGIKDGADAGRQAVKWFVSRIIELDEQLSDIENQLNQRCNEIPYAKNILAISGIGENILSGILAEMGDISRFDDVKEIQKLSGLGLVACSSGKHTGETKISHRGRKRLRYWLFQAAKSAVAHSEEFKELHVYYTTRKQNSLKKMQSLIVIACKILRVIFTILTKGTTYDPKKLLGDIVRPDQSIPQAA

SEQ ID NO: 277765 - protein, 345 aa, unidentified
MDEQQPADRQIVGMDLHRRRSVLVRMNQDGERLETVRIVNDVDRLADVIARAGESPEVVLEASYGWYWAADALAELGANVHLAHPLGVKGFSYRRVKNDERDAADLADLLRMNRLPEGWIAPPATRELRELVRHRAKLVHLRTSLRQQVHALLAARGVAIPVSDLFGVAGNQLLDRVSLSPAARTRVVSLRSLLDALDVEIDAFTKLTAKRLRGDPRYKAVQTIPGIGPVLGAVFLAEIGDITRFPGPTQLASWAGLTPKHHESDTTVHRGRITKQGSVLVRWAAIEAAQCAGKYTRTGQRRERIAQRRGRNIGVTAAARDLLQLVYYALRDGHVRCLEPAAQSA

SEQ ID NO: 277766 - protein, 422 aa, unidentified
MNINTDSKRRQVPDDYLVAGIDPHKKTHTMVLMTRGEKVLTSLKFDNSKSGFEHAVKRVDDQISKSGNKGVIFAMEAGGHYWRNLAYFLNKRGMWVCLVNPFTAKRLREGKDINRAKSDMRDARVMAELVISNGIPQTNLPQGTYAELRAVYNAYQRLIKERSRLKSRMKSLLDQLFPEFCQVFDNVCSKTAMQVLGCCLAPVDIARMQEAQFIACIRKGFTGRALKMQSLQKLYLLGKASIGAEEGARGIALELRLMTQQLLLLSEQIEQTKNILQDLLLSIPESRCILSIQGVGHIAAAGILAETGPLQAYRNAGQLIKLAGTNPTSWESAGKRHSITHMSKKGRPKLRSCLWIAAIGLLRSNPDFKEWSRIRRERELHMHPLKPRETVGAAANRLLRIIYALVKNGSMYCLPQVNEVLV

SEQ ID NO: 277767 - protein, 407 aa, unidentified
MRLFVGDDWAEDHHDVELMDATGRVLARKRLPEGVAGMARLHELIGQQLGEDAEDAEVVIGIETDRGPWVAALVAAGYVVYAVNPLQASRYRERHGVSGAKSDRGDAHMLADMVRTDSHQLRAVAGDSPDAAAVKVVARTHKTLIWERTRQVQRLRYQLREYFPAALAAFDDLDAPDALELLAKAPDPARAARLTRAQVSAALKRARRHDIPGKATAILAALRSAQLGQPPAVTAAYAATVRSLIAVITVLNEQVKTLQGQVEADFGRHPDAEIYLSQPGLGPILGARVLGEFGDDPDRYASGKARKNYAATSPITRASGKRKVVAARFIRNDRLTDALMAQAFAAMNASPGARALYDAERARGAGHNPALRKLANRLVGILHGCLKTRTVYDEATAWSHHENKLAA

SEQ ID NO: 277768 - protein, 341 aa, unidentified
MSDYSYFCGIDLAKNHFSLHAVDQNGKVILHKSVTRSKLLTTIANMPLMRIGVEACGGAHYWARTLNKLGHDARIMAVKYVIPYRTKGKNDLNDAVAICEAVQRPSTRFVPVKSPEQQAILSVHRMREHWVRERTALMNRMRALLSEFGLIIPVGRSSLMKHVPLMLEDAENELPHLARTVIADAYHHLGELNQRIADTEQVFDSFAKVSTNVQRVMKVRGIGPQTATAILASIGNGSQFDKSRDFSAWLGLVPKQYSTGGKPRLGRITKHGDKYLRTLLVHGARTVIANLGDKQDKLSQWCRGVLERRGMNRAIVALAAKNARIIWSLLHNQTEYENYAA

SEQ ID NO: 277769 - protein, 354 aa, unidentified
MKKNITIGMDLGDKKNYVFGLNEEGKKLESQFIMNTQKQIEKFFKKYEKENTRIVMETGTHSPWISEMLKKKGFEVLVVNSNQLPLISRSIRKNDMKDAELLARLGRFDKDLLHTIEHRSQESRNDLSIIKSRNKLVETRASLVNHVRGIFKSFGQSIPSSSTPSFTQKIIFDIPHKLKNAINPILEIIDTLTVKIRNYDKQIKELSEIKYPETKLLRQVNGVGPVTALTFILTIETPDKFQRSRTVGAFLGLTSKIFDSGEINKQLRISKAGNKYLRSLLITCSNYIMGPFGNDCDLRQHGLKIMQRGGKNTKKKAIVAVARKLSVLLHRLWKDKAIYDPFYNSKKDTLKQIA

SEQ ID NO: 277770 - protein, 346 aa, unidentified
MLYAGLDLSRKRLDFHLLDSEGATVEVGAAPPDADGLLGLTRRLDRHREPIRAAIESMNGARFVHDRLELQGWQVEIADAQKVKGLAPLACKTDRIDAWVLAELARRDLVPAIWLPDPMVRAERERARWRLHLVRHRSSLKQRVHAVLLTHGKPCPVSDLFGVRGRQLLARLGLPEPWQATIAASLRLIDELEREISDCERELRRLGADHRYVPLLLTVPGIGWVLAYTIAAEIGDIGRFPTARKLAGYTGLCPRVYQSGERDLRGPLAKQGPKYLRWALVEAATHACTAPVYRDRYQQTKARIGKQRGAKVAQIDLARRLAEAIWHMLSREQPFAPKGATDPLAA

SEQ ID NO: 277771 - protein, 370 aa, unidentified
MQSQGTQIDFTGQHIYVALDTGNKSWKTCIMTQHLEHATFTQPPDPKVLVNYLHRNFPGARYHCVYEAGYQGYWIHRALVHSGVDNLMVNAADVPTMHKEQRRKSNGVDARKLCRSLRNGELTGIYVPSAAACEDRSLLRNRFGFVKKQTRCKNQIKALLAFYGTTIPEELLRSHWSRSYITWLQQIPFQQPSGQEAFHALIDELLFQRQMIARLTREIRTLALTDPYRASVRSLQSIAGISTLSAMTFLTELFDIHRFRTLDHLASYCGIVPDEHSTGEEQTLTGITHRRNPFLRDVLIECAWIAARKDPQLLLAFNKLSARVPKNKAIIRIARKLLNRVRFVLVNQTLYESSSPHGSRLPGEPCSRAH

SEQ ID NO: 277772 - protein, 353 aa, unidentified
MQIVSALDVHRRQITYKTLELGSGEVRRGRVSPATRESVREWLERFAGCDAEFALEGTTGWRFVVEEIERAGHRAHLADPAETAAKRGRKRRAKTDNADCDLQLKLLLAGELPGSWIPPAHILELRTRVRMRKTLVDQRTAWQQRLLAQLFHQGIPAGLKPRTRAGREALAQAELSAAGRELVALALRMLDTIDRELVPLDQALRAFARRQPGCRALIANCYGVGAITATAILAELGDARRFTSSDDAVRHSGLDVTVYQSDDKRAPGHLSHEGPELLRWALFEAAQSACRPSSPDHAYYLQVAERIDHNRACLSVARKLCRRAYHILRELGEEALAPVEYAQQAEEAIAAAA

SEQ ID NO: 277773 - protein, 518 aa, unidentified
MISAESDVRGHCFYSFQPALSETAFEACSLAHMAHSAYTEVSSPAVAPAKNADWMNAHYARFQSPYVAQDKPSLKTSQIQIRKERDNMIKINYMSTLFVGIDVSSKSNVVCAMDFDENQYISSSFKNNQPGADELAKMILECMKTHSNLNTIVVALESTSVYSIHIANFLSTCEVLMPYKPYVFCLNPKATANYRKSYIAMEKSDPMDAYLIADFARCGRTKKCEPWRGGQFLALKRLTRHRLHLAECITREKTYMVSNLYLKFSELQLLDDDKQPFSNIYGATSSAVLTEFMSLQEIIDASEEDLLQFLSQKSRNRISDISKTSELLKKAARDSYRLDKCMYEPLNVSLASSFNCIQTYQKEIKLIDQAIEKCINGMNPNAFTILKSIPGIGPVWAGGILSEIGDINAFHSSDALAKYAGLIWLKNDSGDFVSEDNRVSKAGNTYLRYYLGEAANSVRRHIPEYKEFYSKKYAEVTKHQHKRALALTSRKFVRLVFGLLVKNQLYTGEKLDAEFNNE

SEQ ID NO: 277774 - protein, 391 aa, unidentified
MVCVGIDVAKDKHDCCILDSDGTIRADCITIPNNMDGFKQLLQTIRDCTKKSDKIKVGLEATGHYSYNILGFLLDNDLAVYVMNPLHTNLYRKSLSLRKTKTDRVDARTIATMLLSDVDLKSYTDTAYHNEELKSLTRYRFDKVRERAKLKQSVSRLVTILFPELEKLVPSLHIASVYALLSEYPGAKQISEIHLTKLTNLLATASKGRYEKEKAIQIREAARTSIGSVMSAKSLELKHTIKLIKELTSEIDEIEDSIQQIMDELHPPILSIPGMGVHSAAMILAEIGDFSNFDSPDKVLAYAGCSPSTYQSGKLTNCYAHMEKRGSRYLRYALYNATKYVCHWNPVFAEYLAKKRSEGKHYNVALSHAMKKLVRLIYALQKSGKAYLTAA

SEQ ID NO: 277775 - protein, 428 aa, unidentified
MSNQEIIRRKQYCQIIKEVSATDKYLIVGIDVAKEKHHAFMGSSKGKVLLKRLIFENNIGGFSRLLKIVEEIKVQNGLSKIVYGIEPTGNYHKPLARHLIKNGYNLVLVTGQAVKNNRQLLDGRWDKNDTKDAANIADLVSRGKCHYYDMPSTSILEIRSLLSLRRRLKKEEHSLRMRIRNTMLAKYFPEFDRYYSACESESLTITRWMLDPDIISGMGFSEFFNAVTKRHRGLAQKIRLRKIYHLSMESVGCPIGPAGMLESDILVEKLQQVRLHIKKTDELIKDFCGEFDEYSCLLTIPGFGPYISATVLASIGNPFRFENRKQLIKMVGYDLCANRSGKTSDKSVPVISKKGNGELRYALYQAAKVASSKVDLFRTYFTGLIRGRERERGIKTKMCVKLATKMLIIAWTLMKKKEPFDPAYLNIE

SEQ ID NO: 277776 - protein, 482 aa, unidentified
MKKKNIYVNQSQELLSLFEKAGNNEKIMCVPIDYAKKDHIVMFCNGYGHILRKPFSVKNSPEGIEYLTEQVTLSCSHRGIDPKHVFFGGEDVGSYAENFANTLRSGGWIVAGVNAHDAKEQRANIQASTDRLDLMGIASMLLNRRGNCSPAQSGIYRNLRTLVRHRRKLVSMSTEEKNRIHTVVDRLFPGFLDEKKTGILPFSTSSLYLMENRFSPLQIRRRKRHKLIEVLHRYGTTKPENTAAKLQEYAVRVLNTSDEYVFTLQLSLAQHVKHFRCLQDSISQLENEIAVWLAQTQGAFLTAIRGIGIVLAAGVSAEIGNPYEQKPLNNLVSYSGIIPRVKQTGGSEGKTRTGKVAKRCNRILKDYVVQSGLHMGLHGPEDLMADYKRREAAGQHADFGIGRRYLRMAMCLMRTSQIYMPQRLRNTEVKPEERAGYYLMTWPSLRKKWNEARALETAFEKERPLGQWRNMVQELYEIKLKL

SEQ ID NO: 277777 - protein, 333 aa, unidentified
MNKITLIGIDTAKQTFHLVGVDAYGHYDWRKQLSRRRLLPSLAQVEPCEVVLEACGASHHWARSIQALGHTVRLIAPQHVKPYRRGQKNDYRDAEAIISAALSPGMRFVGVKRIDQQAEQALHRVRSRLMSQRNAAANELLGLLGEYGVVFRRGLKPLREGARCFAGTDEAHTLGLVDLVNDVLEEISVLQARMDHYERLIEQRVQADETSRRLREELNGVGKLGASALRVKVADVRDYGNGRHFAAYLGLAPGHSGTGGQVHIGHLKHGHDRYLRQLLIHGARAALRHLGDKQDPQSRWLRGLLERRGFNIASVALAHKNARQAWAIMASAQ

SEQ ID NO: 277778 - protein, 409 aa, unidentified
MSKRFFGFDLHKNFVVAAAVNANQEVIFKPHKIGSADLEGWIIKHITNEDEVVIEAMSCAWMVYDILIQHASRVVVAHPYHVKLIASSFVKTDKRDAIAMARLLAANIIPEVWIPPNPVRELRSLINHRNRLVQRRADAKCRLRGLYQQYRIVAPDGRAAFEPEYWNNLDLPQVEKLRARHTSEEIELLTRQIQEAEDVLVQLSAQPPWVEQVPYLIQLPGIGIIMAMTILAAIGEIGRFASSKKLAGYAGLGVRIHSSGETTKTGGITKQGRRELRYAMIEAAWNAIENSSFWRKKYEQLTRRMDNQKAATAIARKLLVVVWNVLSKQEMDREADSEAVGRSILCWGWKNRLATSLGMKPAEFTAWQLNKLGIQLDQVKYCTRVYEIPKTEFVQPPVRVKEVSGVPNT

SEQ ID NO: 277779 - protein, 347 aa, unidentified
MLYAGLDLSRQRLDVHVLDEDGRTVEVTAATPEVFGLRELVARISRHGQEVSATIESMNGARFVHDQLELAGWDVEIADAVKVKGLAPLAAKTDKIDAWVLAELGRRDLVPAIWLPDPTVRAERERARFRLHLVRHRTALKNRIHATLIAFGHPVPVSDLFGTKGRELLAGLAVPEPWATTLARSLRIVDELEAEIERCTADLQAAGADHPYVPLLMSVPGIAWVLGYTIAAELGDIGRFASPKKLAGYTGLCPIVRQSGRRDDRGPLAKNGPKYLRWALIEAATHAARHPAYRERYEHTKKRLGRQRGSKVARVELARELSTAIWHMLSKNEPFAPGRPPARPLVA

SEQ ID NO: 277780 - protein, 398 aa, unidentified
MTESSDYESVQVFIGVDVGKDTHHAVAINRSGKRLFDKALPNDENKLRSLISDLKQHGQILLVVDQPATIGALPVAVARSEGVLVGYLPGLAMRRIADLHAGEAKTDARDAAIIAEAARTLPHALRTLKLADEQIAELSMLCGFDDDLAAQTTQASNRIRGLLTQIHPALERVLGPRLEHPAVLDLLQRYPSPEKLASLGEKKLAAQLCKLAPRLGKRLAADIAQALAEQTVVVPGTNAAAVVLPRLALQLITLRKQRDEVALEVEQRVLAHPLYPVLTSMPRVGVRTAARLLTEVACRAFASAAHLAAYASLAPVTRRSGSSIRGEHPSRRGNKALKRALFLSAFAALRDPLSRAYYTCKMSQGKRHNQVLIALARRRCDVLFAMMRDGTFYTPQGS

SEQ ID NO: 277781 - protein, 432 aa, unidentified
MYHKKLNHIYVGVDCHKITHTASIINAFKDHLDTITFNNDKDGFNSLINIVSKHLEDGITAVYGLEDCKHLGHSLSSYLLKRGYIVKVVNATYTYSERKNTPIISKTDEIDSLCIAKVTVDKLDDLPKATTDDLYWTIKQLVKMRESIVQTNIVYQNKLHAQLLHHYPDYKKFFAAFDNTTALAFWEKYPNPVILKNAQMTDVVDLICTSSNFQYKPSKAVQILKLVDNYDYALIDFQEERDNLIQNMVKQLRYTKEQLKLIDLEIDSIVQKTGYKLHTFTGVDKILAAKIISEIGNIDRFPSSDKLARYAGIAPVSFSSGNSTKWIDNKYGNRTLNSYIFIVACVVINEGAENAVKLCNPIFLDYYLKKISEGKTKHQAILQVMRRIINIIYGLMKNRTEYVHPKELSEKFQKLHRERIDKKRQQSKNVKK

SEQ ID NO: 277782 - protein, 346 aa, unidentified
MKYFAGLDVSLEETAICVVDEAGAMVREARIPSEPEALVAFFQGSGLALERLGLEACSLSAWLYESLVAAGLPAVCIETRRAKAAMGAMPNKTDRNDARGLAQIIRTGWYRAVHVKSPACRSWRALLTARRLLLNKMRDLENGLRAVLREAGLKLGTPTRKEFAARVRELTAADPGLSVLAEPLLTIIAAMTRELAQLTKRVLDIVRDEPVCRRLMGVPGVGPLTALTFRATIDQPERFRHSRDVGAHLGLTPKRYQSGETDVQGAISRCGDELARTALYEAAHSLLVRSRRWSALRAWGMQVAKRRGMARARIAVARKLATILHRMWADGTEFRWGKEGTMPAAA

SEQ ID NO: 277783 - protein, 475 aa, unidentified
MAGKGKATEPAGSGQRAGLTGERAEVTDEPAEVISRAAAVDVAKGSGMVCTRVPHEASPHRRMQRVWQVSARYADVMALMDELVSAGIQRLVIESTSDYWRIWYYLAEAAGLQVWLASARDARHLPGRPKTDKLDCVWLCKLNERGMLRRSFVPPEAIRDLRALTRLRSRLAADSARHQNRIEKILEDALLKISAVISDLMGQSGRRFLAALVAGQRDPKTLAALGDRRLKASTAQLEAALTGRFRDIHALEIGMLLELTGGLAAQITRLDEKVTAALAAIPGIAPACTGCGEIGGTHAPGCAGAGNPVLPVTGRLDEITGIAVDGAQILIAELGTDMTVFPTPGHAAAWAKLTSRTIQSGATSRNGRTGKGNPYLRAVLGRAAMAAAKTDSYLGERYRRIARRRGKQKAIVAVARTICEIACMIIADPSVRFCELGPDYYTRLDAGRQSRNRIRELERLNPGMKVTLTPATQAA

SEQ ID NO: 277784 - protein, 407 aa, unidentified
MQAPSVSTPITGGINTIFVAIELSQKTWLVTMHSPDRDKISRHKVPGGDHASLLALIDRVRDRAARKLGAVPAVVSCYEAGYDGFWLHRLLMAAGITNYVFDPSSIAVDQRARRVKTDRIDGEKMLRTLMAYLRGEPRVVRIVRVPTPEQEDARRDTRERHRLTKEQTAHTNRIKALLRLHGFAVGQPRRRDWLSWLAAQRDWQGQGVPPRVLSEIENEHARLMLVRKQLDALARTPAAADLAPAVAEMVRRSELLQRLKSLGPAFATTLTQEVFYKDFRNRREVASYFGLAPSPWKSGGIDRDQGISKAGNPRARCSAVELSWLWLRHQPGSELSQWFRQRTLNAGTRIRRIAIVALARKLVVALWRYLTTGLVPAGAMLKSVVGKANGSRECAPDDRLHVPHHFK

SEQ ID NO: 277785 - protein, 375 aa, unidentified
MTKHSEVFVAFDTSKLRNAVAIAEAGRAGEVRFLGEIENTAEATTKLVRKLEAKYERITFCYEAGPTGYELQRHIHGLGHECMVAAPSLIPKKPGDRVKTNRRDAVSLVKLLRAGELTAVWVPDRRHEAMRDLTRAREAAVIDLRAKRQRVSALLLRQGRCYPANKKTWTKVHMNWLAGQRFEQPERGIVFAEMMFAIRQAQERVERLEQAIRTAVPDWSLAEMVTAFMAFRGIDLVSATCLLAELGDLTRFPTAPEVMGYVGLGCSEGSTGDRIKRGGITKSGNRRARRTLVECAWSYQHPPRVGIAKQAKVAAAPAKVREIAWKAQCRLNRRYRGLLRRGKLKTVAITAVARELAGFLWAAARELSSPQRVAK

SEQ ID NO: 277786 - protein, 344 aa, unidentified
MAQVTTAQVTTVGIDIAKNVVCIHGVDAHGHVVVKKRLARQKVLPFMAQLPPCLLGMEASGGAHYWAREFTQLGHTVKLMSPQFVKPYVQSQKNDPNDAAGICEAVERPRMRGVPVKSITQQDVQALHRIRERQITARTALINQIRGLLTEYGIVIPQRASQVRHKLPLVLEDAENGLTATAREWLHALAEELQALDQRIAATDQQIERVFEADEACQRLAQLPGIGPLTATALVAAVGDATAFKNGRQFAAWLGLVPRQHSTGGKTTLLGMTKRGNCYLRTLLIHGARAVLRVVDRKTDARSRWLQGVKARRGMNCASVAQANKTARVAWALLAKGDRYRHAA

SEQ ID NO: 277787 - protein, 354 aa, unidentified
MRFYKQPPDQQPHRFYCGVDLHARCMYLCILDAGGQTVLHRDYPADRGAFLDAITPYRDGLAVAVECMFAWYWLADLCAEHGIPFVLGHALYMKAIHQGKSKNDRLDAAKIAGLLRGGLLPQAYVYPKTMRATRDLLRRRSFLVRRRADLLAHLVNTNSQYNLPALNKKLVYPGNRGELNLPERFTEPSARKMVECDLALIDALDAQIHELERHLIRTAKVHDAQAYARLQSIPGVGKVLGLVLLYEIHDVGRFPEAGHFLSYARLVRPRQESAGKASGFGNKKIGNAHLRWALGEAACLYLRASERAKRWQARQAKQHGPAKTLGILAAKLGRTVYHLLRTRQVFDEARFFAS

SEQ ID NO: 277788 - protein, 328 aa, unidentified
MTMNPALSAFNHVVAFEVAKDSLVIHVLPAGKQSFSANKPKAIREALIAEMRRNAEASLGPLLVVCEATGGYERHVLEVCQELGIAAHKAHGSRVRYFARYLGLLAKTDPIDARVLALYGLKTTDLRLYVPPAPEALALRDLRTRRDQLQQMLFAESNRLEHARHLSVSRSLKAHIASLRKALAALEAEIAACLKASETLARKARLMQTLKGVGPATVAAILAYMPEIGAFTKAGAACMAGLAPINDDSGKLKGPRHIEAGRAAVRKALYMPALVAIQHNPVMRLFADKLKRNGKPAKVVIAAVMRKIIVTLNAIVRSGEPWSHAKIA

SEQ ID NO: 277789 - protein, 308 aa, unidentified
MNIKFLGVDLAKRVFQLHGINAEGEVVLKKRLNQKGLIEFIAKMPTCFIGMEACSTSHYWARKFKVLGHEVKLINPAFVKPYVKSNKNDEKDSEAICEAMTRPSMRFVQIKSIEQQDLQALHRIREQLISNRTALANQIRGLLSEYGIVLPQEIQNVRKLLPTVLDDASNELTNFSRSLFQELYVDFSYLDNRIKSCDAKIAALFKSDERCQRIGDIPGVGNITATALISAIGDLNTFKNGRAFSAWIGLVPKQASSGQKQILKGISKRGNSYLRKLLIHGARSIVFRTKDKTDQRSLWIEQLKIGEE

SEQ ID NO: 277790 - protein, 386 aa, unidentified
MTATSKGAWDVRTIGAEIPNTEVAVILGVDTHLDFHAAVAVDHLGRCLGESSVPTTPKGYERLLRWAEGFGPLRCAGVEGTSSYGAGLTRHLRARGIEVLEVERPKHRRRSSRSNLQKSDPSDAERAARAVLAGEASSVPKSGDGRVEMIRTLRAARRSAMKARTQAANQLQGLRVTAPEQLRNRLRGLSTKELVAVAARFRIGDDPHDVPSATKFALRSVARRYEVLSAEIAELDAHLGPLVAQAAPELISLPGIGTDNAATLLIVAGDNPQRLGSAASFANLCGVSPIEASSGKVVRHRLNRGGNREANRALYMICLARMRRDRRTQEYVARRTAEGKSKREIIRCLKRYLAREVYRVLISCGARSSPTGPRDEAHIDARSHAA

SEQ ID NO: 277791 - protein, 438 aa, unidentified
MEDLRNVDAERDHLPAGQHEQMPVREKGWVHVGASSPAVFVGLDVGKSDHHAVAVTAAGKTVYDKALPNDEARLRAILEELATAHGPVLMVVDQPATIGALPVTVAQAMESVTVAYLPGLAMRRIADLHPGTAKTDARDALIIAEAARTMPHTLREIRVDEAQIAELAVLAGFDDDLAAQITATSNRLRGMLTQIHPALERVLGPRVGHPAVADLLTRYPTPAKLAAAGRGHVRARLRKHAPRLAETLTEEIFTALGRQTVVVVGTEAAATVVPILAGQLAALTTQRAQVASQVEVLVEARPLSEVLTSMPGIGVRTTARILTEVVGKDFADAGHLASYAGIAPVTRRSGTSIRGEHAPRGGNKRLKRALFLSAFASLHHAPSRAYYDRKRAQGKHHNQAIIALARRRTDVLFAMLRDGTLYQDPTDPQTASSMALAA

SEQ ID NO: 277792 - protein, 368 aa, unidentified
MAEGTRFVGLDVHKASISVAVAGPYGEPEDGGVIANDAQSVRRLLRRLGDGGHRSAVAYEAGPTGYALHRQVRAMGIDCIVVAPSLIPVRPGDRVKTDRRDAAKLARLLRSGDLVAVWVPDEAGEALRDLVRARDAAKADQLRARHRLSKLLLRRGILPPPGVRAWSRAHEAWLRGVTFEQVADQVVFEDYRSVAGAAAERVKRLEGALLRTAGEGPQAELIAALQAIRGIGFLSAVTIAAEAGDLRRFASARRFMAYVGLVPSEWSSGSSRHRGRITKTGNRLIRHVLGQAAHSARYRPNVSSGLRARQRAVPPEIVALDRRAQVRLHHRYRTLVGRIGKNKTVIAVARELAGFVWAAGQHVTPRSA

SEQ ID NO: 277793 - protein, 340 aa, unidentified
MKIKTIGLDLAKSVFQAHGVDADGKTVLVKRLHRKQMLPFFSKLPPCLIGVEACATAHHWARTLIAMGHEVRLMPPSYVKGYVKRGKSDALDAEAICEAVQRPTMRFVSVKTVEQQGILMAHRTRSLLVRRRTMAANALRAHLAEFGLVANPGIANLVKLADTAFAEEERLPAYARRALEILIRRLMELTEEIGALDQELRAWHAENEASRRLAAIPGVGVITATAIAATVTDPDQFRSGRQFAAWLGLTPQQQSTGGKTRLGGISKQGDRYLRRLLVVGATAVMRHARDNTTPMAAWIRELLEKKPFRLVSVALANKLARVAWVVLTRGETYRPYGMAA

SEQ ID NO: 277794 - protein, 387 aa, unidentified
MIFVGIDIAKLNHFASAISSDGEVLIKPFKFTNDNDGFLLLLSKLSSFEKNNIIIGLESTAHYANNLIAFLVPKGFNVCLINPLQTSTMRKNNIRKTKTDKVDTFIICKTLMMQPHRFVTLYDIALMQLKNLGRFRQKTVKQRTRLKIQLTSYVDQAFPELQYFFKSGIHHKGCYSLLKEAPSPGAVASMHLTHLTHLLKSASHGHFKKETAVELRVLAQKSVGNSDKSLSIQITQSIEQIELLDSQLNKIESEIEDTVKSLDSVILSIPGIGYINGGMILGEIGEITRFSTPSKLLAFAGLDPSVYQSGNFHAKNTRMSKRGSRVLRYALINAAHNIVKNNNTFKTYYEQKKAEGRSHYNALGHCAGKLVRVIHKILTNNLEFNLD

SEQ ID NO: 277795 - protein, 417 aa, unidentified
MKNHTQKLYVGIDIHSREHKAALVPIALLECLDAPWRKVKPLNIRNTIGDFERLDTAIRLHISSADEVAIAVDHTGGHYSEPLVHYLQARGYAVYHLETKAVKAARERFLDQESKSDVIDATSAAYLLYLRDVHGLSFRISAMTPELGSKAAALNSLVLQRWQFNKLVSQATNRLHQFLLAVFPEGEAQYFKQLLKVTLWYPTPKDILASNGLETIEGLRLKDKENILKLANDTVGIPNQIYQWLIRDLSLQRIESLAKRDALTSIIRKEVTVHPYGDVLLSFPYLGEIAAATIIGIIKDIERWPDKKKFKKALGVYSSLTQSGGDSGRTRQGREGSKHGRRVLFQVCFGCIGTKAPDNDFKDYYLRQVARGKPRIKALVSTMGKLAEIIYHCLKVEEPYQYQGKYKVPRISSNEKS

SEQ ID NO: 277796 - protein, 427 aa, unidentified
MDKGTDNWRQRTVLVGFDWASDHHDVVVVNQHGRIVEDFRFDDTAEGWQLLIKKLSKYPDPAVAIETSSGATVERLLEAGYAVYPVNPKAAKRYRERKAPSGTKTDRLDAWSLADALRLDGHTWRPLKPDDPLTVELRLLCRDEIALIEQRTALICQLRAALHEYYPVALQAFDDWTLRSAWAFIEAFPTPAALTKAGKRKWEKFLHTHKLYHPNNYQKRLDLFAQAETFCGSEAMINAKSMLAVALASQLRVLQNHLDKFRKKIEKLFAKHPDHDVFGSLPGAGEKLAPRLLAGLGDDRERFDSPEGLQCYAGTAPVSYQSGQIKKVRFRRACQTGLRHTVHLWTNLSRTKCPWAEAYYQKKRKDGQSHACALRCLGQRWLKILWKMWQTRKPYDAELHLRNQVKHGSWVIGLVTTLNAPLTTADA

SEQ ID NO: 277797 - protein, 321 aa, unidentified
MKMSETTAPTAGIDTAKSTLDMAIHGQSAVVHVPNTANGWKQLAETLEAAGIKRVGIEATGGYERGVMGHLRRQGITVTLLQPVQVKAFGMLHLRRAKTDRIDAALIAACTHTLGEQDKMTPDARFEPLGDHLTFIEQIEEDIARYKTRLEHVSDKRLRRSVMVSIKREQTRRRAEIKRLIIAVRKHTGLGERFDLVLSVPAVGERTALALLIRMPELGQVSREQAASLAGLAPFVHQSGKWKGETHIGGGRSRLRRSLFAAAFPGAHHWNKSLMDLHARLRARGASHTSAIVACARKLLVQVNAVVKRGAPWEDRTPTAA

SEQ ID NO: 277798 - protein, 443 aa, unidentified
MGSYAGVDWASEKHDVLIEDEAGEELFAGSFAHDEAGLRSLCRTLVRFKVRLVAIERPDGLLVERLLDAGLRLLALHPNQVAAARARFRVSGGKSDRFDSFVLCELARTDHHRFRVLEPDSDQTKALRALTRAREDLVGQRVALANQLRAELERFWPGPIGLFSALDSRISLAFLKRYPTPKDAKSLAAKRMQAFLAGQHYSGGKQPAALVAKLRRAPEGRAGELECDARRAVVLSLVAALEPIVAAIGQLERQIATTVRAHPDGEIFTSLFKHPDSVLTAAIMVAEIGDCRARYPNRDALCGDAGQAAVAIESGKRKVACFRWACNKRLREAFCTLADSTRHWHPWAADHYARSIAKGHDHQRAIRTLGRAWCRIVWRCWQDRVPYDPDRHRGLQQHITVIIPSPAGPGVVDQAATARMAAPLLVNNTKRPHRGTKRSVAAG

SEQ ID NO: 277799 - protein, 342 aa, unidentified
MTTIKYFVGVDIASATFTASVGAIPWKVILKAHTFENTGDGYQAFLEWLANRQIGAKESVVCMEATGVYSEGLAYFLFATGYAVAVQSPVEVKRTFKPYGPKTDAVDSLQIAEYACRHIDKLSFWQPRNEILEQVKALLATREQFVSQNVAHKNALQAIQRKPVRTLFAELAHAQMIEQFKKHIQAIDQEIRRLIESDPTFKEMLLLLLSVPGVGVLLASHMILLTHISLDHKELASYLGIAPNEHSSGSSVFKHATSRHFGPAAVRKLLYLASCSVRTHQAQFASYFARKTRQGKPAKLVLNNIANKLIKIICAVLLTKTAFIQNYHSVQPLVFQNTLTGS

SEQ ID NO: 277800 - protein, 396 aa, unidentified
MSGKREIACGVDVHNKFIVATILSSDDLKLQDRFDTTLDDLFRFKHWLKENGCHKVAVESTGNYWIPIYNVLEGSVNFILANAYQIKHIPGRKTDTLDSEWLAEICLKNLISPSRIFTKDRRELRSLTRSRESLIKVRTKIKNRVTHELEAACIKLSSMLSDIFGKSGRHIVDGLLNGMDLDKVLESIPSRRVRAIKEEIRGIIQSNLSPSQIFLIQSHLNMIDSITNHIAEIDAKISSLISLHKEDLKIALSMPGMGIISASAILAEIGDIRDFSSPDKLAAYCGLAPSVYQSAGKLINGHITKHGSPHIRAMLTEVAHAITRSKQNSRLKKFFLKIKARRGVKIGVVALARKVLCILYHLIMNQELYQYELLSKPKVGKHLSVNPAISMSIGND

SEQ ID NO: 277801 - protein, 310 aa, unidentified
MEVIIEKGCGLDVHKETVVACVMGEGIKKEIRTFSTMTEDLFRLKSWLSEKGITHVAMESTGPYWKPVFNVLEDSFEVILANARHIKNVPGRKTDVKDSEWICKLLRSGLLAASFVPPQAIRELRDLTRYRRKLTQAISSEKNRVQKVLEDANVKISSVVSDTFGVSASRMIEAILAGNLNPEAISDLAVGKLKGKKEELKKALVGNFQEHHRFMIQASLDHIESLEKIIAGLDQEINRKLKDYHREFELLQTIPGVKEQGAASIIAEIGADMGIFPSEGHLSSWAGMSPGNNESAGKKKVERRPTAIRI

SEQ ID NO: 277802 - protein, 485 aa, unidentified
MALVFAVVLGLLILEVARSRRKPNPTSPDPASLALLHTLHPHAAGIDVGAAELWVCVPPGAVSIPRPPTVLPAHVRRFGVFTADLQAIAAWLHQCGVTTVAMESTGVYWIPLYDLLEQAGFEVLLVDPRQVQRAPNRPKTDVHDCQWIQRLHSLGLLTAAFRPEEPIRVWRSYQRHRASLIEDAGRHLQRMEKALEQMNVKLPEVVSDLTGLTGMRIVRAIVRGERDPKALAKLRDHRCKASAETIARALQGTWQPEHLFALQQSLALYDYYHEQIRDCDRVIEAHLMGMALPEVPPLEPKRRSRRRKDNEATFDARQRLHHVAGVDLTAIEGIEESTALVVLSEVGTDMSRWPSEKHFGSWLGLAPNPKKSGGKMKSSATRPGVNRAAQALRLAAKNLQRSHSALGAFFRRIAARRGLAKAITATAYKLARIIYAMLKHGMAYVAQGLEAYETAYRERVVRQVKRKAVALGLVVVERDAGVQPS

SEQ ID NO: 277803 - protein, 439 aa, unidentified
MSNLNKQKEATPFAAHIGLDWADQKHFWAMRTADGTQHCGPLINTPEAIQVWAGELAQRFGGQLIAVALEQSRGAVIAMLSKYAHLVLFPIHSTTVANYRKAFCPSGAKSDPGDGRLILELLWTHPDKFRGLYPDTVETRKLQFLTEERRQLVNQHTSEVQRLISWLKQIFPQIVQWFEKPSCEMVGDLLKRWPTLEALQKASPKVLRKFFHQHNCRSEERIEERIDQIGHAVVATTDEGLLQTGLLCIRHSVAMLEILRASIETFDQQIAEVYQNHPDRFIMESFPGAGPALEPRLIAAVGTMRDRFHSANSLASFSGIAPVTESSGKSVWIHWRWACSKFIRQTFHEWAGCSIRSCDWARAFYEKQRGKGKGHHAAIRSLAFKWIRIFFRCWRDRVPYSEELYLKALQRHAPKPTSAPVEITWKTAAGFAKLSALSS

SEQ ID NO: 277804 - protein, 412 aa, unidentified
MRIIGFDIHRAFAEAVAWEDGKLRRLGRVDMRRNLLTAFAVTLSREDIVVVEATGNAAAVASVIGPHVKRVVIANPIQVRMIAHAKIKTDTIDAGVLAQLYASGFLPEVWIPDEATQALRRQVTRRNQIVRQRTRLKNIIQSILHAHLIPSCPAADLCGSKGRAWLGKQVLPEDERFAVERHLREFDRLGEDLAVIERDLARSALADENVARLIAIPGIDMVVALAVTAAIGDINRFGEPQKLVSYLGLNPSVRQSGPGPAHHGRITKQGRGHARGMLVEAAWAAARAPGPLRAFFLRVRAKRGQHVAAVATARKLAVLIWHLLHKKENYAWARPALQARKIRKLELKAGHPAKRGQKGSAHAYNIKGHREQERRFVEQAEAAYAHFVAGWTPRGSKPASKARTGAANEERR

SEQ ID NO: 277805 - protein, 372 aa, unidentified
MGKYSEVFVAFDTAKLKHAVAIAEGGRDGEIRFLGEVENRPAVIERLIKKLAKRYSKLQVCFEAGPTGYGLYRQVQALGHGCMVVAPSLIPKRAGERVKTNRRDAITLARLFRAGELTAVWVPDDLHEAVRDLVRGRTTASEDLRRKRQQLLSFLLRHGRIFTGRDHWTRAHQRWLAEQRFDHPAQQIVFQDAVATIEDAINRRQRLEEQLATIVPNWSMAPVVAAYQAMRGVSFVVAVTFAAEIGDVRRFDTPRQLMSFLGLVPAERSTGETVRRTGLTLAGNRRARRVLVEAAWTYRYPARVSETLRPRLEGLPKAVRDIAWKAQVRLCGRYRRLSTSGKKQPIIIAAIAREMAAFLWAIGRQVMPASAS

SEQ ID NO: 277806 - protein, 352 aa, unidentified
MPTQSNELDFSGQNFYCGIDIHKKSWSVTIETDDMPLKTFNQEADLRQLVKFLRRSYPGGKYIIGYESGYFGFNLYRYLLNQKIDCKVIHPADIPTTHKEKDQKRDPLDSRKIARVLRTGEVDSIWVPPSNLEQDRQLLRLRRTLAKDITRVKNRIKSLLQIHGIKYPGTFEKNGSHWSKRFIAWLEDIQLSEETGTEALQVAVRYLNYLREEQLTVSQKIKSLALTERYNTAYTELIKLPGIGVLIAMIILTEIGQISRFKNVNNFRSFIGLIPRSHSSGEKDYQGRITNRSNTHLRALIIEATWSAIKKDPYYLNVYYNYKNRMQHNKALIRTARKLANNIYYTLKQVDY

SEQ ID NO: 277807 - protein, 453 aa, unidentified
MATRKHNISLKPGKSRQALTITHPNAAGIDIGSASHFVAVPPDRDDEPVREFPSFTADLNALADWLKDCDVDTVAMESTGVYWIPLFELLESRGFTVLLVNARHVKNVSGRKSDVLDCQWLQQLMSYGLLRGAFRPTDEVCVLRALTRQRATLLRSQARQVQHMQKALTQMNIQLANVISDVVGETGQRILRAIVAGERDGNVLAAMKDVRIHASHDEIIKSLQGNWRGEHLFALKQALALFDFIGTQLAECDREIERQLQCLQTHDGEPGKSKKKSIPRNAPKFDLRAQLFKMCGVDLTRIDGINVTTALAVVSEVGADMSRFPSDKHFASWLGLCPGTKITGGKVMSGKTKCSANRAAQALRLAASALRTSQSALGAYFRRLCSRMDKSKAVTAAAHKLARLIYAMLTKGEEYTDQGQDYYEERYRERVLKQLNQRAEKMGMKLIVAEPAI

SEQ ID NO: 277808 - protein, 317 aa, unidentified
MEQGQSNTKIAGIDVGKRQLDVALHGHDDAMQAANAEAGISELVAWLKAREVGRVGLEATGGYERAVRSALEAAGFEVVVHQPIEVRLFARLKRRRAKNDRLDAQLIAAATAQVDTVRAAQDPRLVELAERLTGYEQAASQAAEMKTFLEQVSLKDMAAAFRVQIRTLERLKARLGLQVLRVIKAHPDLLARFRLLISLPGVGPIVAATLVVRMPELGAMRRGQAASLIGVAPFDRDSGQYKGMRLIGGGRSRPRRMLYLAALAAKRCDPTLRAFAQQLLDRGKTPKIVVVAVMRKLIEAANLVLSRQQPWVRRPAI

SEQ ID NO: 277809 - protein, 466 aa, unidentified
MEIVNPHAGGIDCGAQEHYVAVPPQSVEPGEPVVRCFSAFTEGLDALVEWLKACGVTTVAIESTGVYWIALCQKLEAAGIEVYLVNARHVRHVPGRKTDVKDCQWLQRLHSFGLLSASFRPEDMICRLRSLQRHRLNLVWTAGAEIQHMQKALQQMNLHLHHVVSDITGVSGLRILDAILAGQRDANQLAKLRDHRVYKSSLAQMEAALVGDYRPEHLFVLGQSLQAYRFYQARTQECDVEIERHLQQLAQRFESSSALGAELSQPEALDEVDGPTQNPQPAKRKVKRKPQANEPKIDLADYLQRICGVDLTQVIGLNVLSVLLIVSEIGVDMSKWRSAKAFSAWLGLCPRNKISGRKVLDTRTCKVISRVATTLRLAAQSLGRTNTALGLFYRRKRAHLGPAKATTATARKLACLVYHLLKYKEQYREPDPTTYQLKVEKAILARIQKQAAVLGYKLLPTALVPA

SEQ ID NO: 277810 - protein, 355 aa, unidentified
MQKYKVSFKGQNIYVGIDVHLKTWHVTTLTESGYKYSFAQHADAKELFDRLNKKFPEAHFKSAYEAGFCGFSAHYALTELGVENIVVNAADIPTTGKEKVMKTDAVDSEKIAWSLKRGELKGIYVKDKRYMDDTNLIRLRQRFIKDLSRLKCRTKSLLYTQGVTYPERFSRNRTHWSRNFMKWLREEVELLSEEKMTLMLLCDEVENMRKAVLKVTREIRRLSTTEKYKENFELLTSVPGFGLIISMTMLTEMDNNPMRFPNERKFVAMLGLIPTCHDSGEKTVSGEKTFRGNKQIGPLIVEASWIATQRDYQLGAYYTNCCQSMKPQKTIIKVARRLACRAYAVMKTKKKYVLS

SEQ ID NO: 277811 - protein, 312 aa, unidentified
MANNRCVGIDVGKAELHANLYGEQVVKVFANTHIGIKHLGNWLGRQKAELVVMEASGGYERQPAQDLRKVGFAVSIVNPTYVRRFCQSMGSLAKTDVKDARLIANFAYVKQPKPQIAKSDGELRLTSLVERREQLIEMLGKEKNRRSNAPEFHLSSINLTITFLETQIEALDQETDTLIEANPDWQARLAVMQSFKSVGKVISTTLLVEMPELGSESREAIAALAGVAPINHDSGKMKGKRKTHGGRSRVRRVLYMAALSAVRSNLVIKKYYERLLQNGKEKKVALVACMHKILTILNALLKKSQLWDPLYA

SEQ ID NO: 277812 - protein, 312 aa, unidentified
MTQPLFAGIDVSKARLDVALGDQFFSIKHTDETISELIEKFKAASPQLIVLEATGGLEGPLVAYLAAAKLPVVVVNPRQARDFAKATGQLAKTDKIDAQILSRFAEAIKPQQRPVKDAQQRQLSDQVARRRQITGMIAQEKNRLSRASEQVRTDIEHHITYLKQRLDLSNKDIETIIKASSLYQETAELLSTVPGVGPVSVASFIAFCPELGNLNRCQIAKLVGVAPLNQDSGPKTGPRCIWGGRKTVRNQLYMATVSAIRCNDKIREFYLRLRAAGKKPKVAITACMHKLLTILNAMLKQHRPWNAGLAAH

SEQ ID NO: 277813 - protein, 461 aa, unidentified
MAKKAKKVKTAKGAELRIVNPDAAGIDIADGIMQVCVPADRSKDNNRTFGAYTSDLHAISAWLRECGIKTVAMESTGVYWIPLFCRLQEDGLDVVLTNARDVKNITERKTDESDAEWLMLLHQYGLLKASFQPHNDAKRMRTLTRHRDTLSREASSIVLRMQKAMQQMNIKLTLVLSDITGKSGIRIIEAILAGERDPKRLADLADIQCKTPKEEIAKALEGNWEEDLMFVLRQNYDTFKHYCTQLGECDAELEKLMENYRAEVAKVEDTSYSPAKKRRDYKKTRHTVGFDVERKAYEMWGVNVFEIPGISHLTALELMSELGHDFTRKFPSSKQFCCWCNISPNTKISGGKRISSHVPHRRNNVGLIFRSIASSLANAKNQLGNFYRRIRSRAGGKAAVIATAHKVAEIFFAMVANQTTYNPERVGIDEKVLLEKRITRYKRELERITGTHIEIGNACVP

SEQ ID NO: 277814 - protein, 437 aa, unidentified
MEEVTDEPLYRDRVCGIDIGKAGMAATIRVPSDKDPARRAAETRSFGTTRREVLALADWLRCWQVPAVVMEASGDYWKGPFYRLEAEGFECVLADAKQVKNLPGRPKHDPGDSRWLAACLERGAVTSCFVATPEFRIIRLHTRYRRDLTEERTREKQRAEKLLGSAAVKLSSVVTDLHGVTGRDIMDHLIAGERSPKVLAQLARARARRKISELEEALEGAEFFTAEHAALLAAMLARIDRVNAEIARLSEVIETLLEPYEEQLQQAESMPGWGRRAAEDALAETGTDMTRFRTGAHLASWAGRTPLDNSSGKRKGKAKSKKGNRYLGGLLGETAIAAGKTQTREGARYRRLSRRRGKAKALVAVGNTQLKVYHALLSSPGTRYEDLGPDYYERRAEVSRQVRHHVGKLGALGFDVTLCRIPEPGPEPGGTGNSQTA

SEQ ID NO: 277815 - protein, 407 aa, unidentified
MDVVIENACGMDVHKDTITACAITPEGKEIETFSTKTIYLIELVDWVKKRNCTHVAMESTSVYWKPIVNLLEAEDIEFLVVNAQHIKAVPGRKTDVKDAEWIAKLLRHGLLKASYIPDRNQRELRELVRYRRSIIEERARQHNRMQKVLEGANIKLGSVVSNVLGVSAREMLRSIAEGNDDLEELSNLARGVMKNKKEDLKLALQGCIKDHQRFMIKTILDHIDLLTDQIDKLDSEISKRMEESQEDIERLDSIPGIGRKVAEQMIAELGTNIKEQFPTAPQMCSWAGLVPGNNQSAGKRKSSKTLSGNKYLKSSLVESAHSVRGSKNYLGALYRRTASRKGKKRAGIVVAHAMLRISYYLLTRKEMYVDLGEDYFDKQKQQAIVKHSLRRLEGLGYTVTIEEPKVS

SEQ ID NO: 277816 - protein, 344 aa, unidentified
MKIIGCDFHPGYQQIAVLDLVTGEMVEKALSHERKEEVRAFYAGLEGSVRVGIEASGQSQWFERMLAELGQQVWIGDAAKIRASCERKQKTDRRDAELLLRLLAEDRFPRIWVPTAAERDGRQLLLHRHKLVRMRTQVKNQLQALALNQGVQRKWKLWSETGRKQLELLPLLPWASRRRAELLQLLDGLEASITELDRAVAEQAQARPAARRLMTHPGVGPVTALAFTLTMGPAERFSRGKQVASYLGLIPSEHSSGGRQQRLGHISKQGNPFLRGLLVEAAQSAVRHEPEMRRAYQRLAQRKCRGLAKVAMARKLAVRLYWMLRLQVDYAQLIQGSHAGQLGT

SEQ ID NO: 277817 - protein, 374 aa, unidentified
MTMMQHRQVRYIGLDVHKASVAVAIAEEEGAPASYGNIANDPSAIRKLMARLGGPEVELRVAYEAGPTGYGVHRQLTSMGIECMVVAPSLIPKRPGDRVKTDRRDALKLARLLRSGDLTSVWVPDEAHEALRNLVRARADAKVDQLRAKHRLSKFLLRQGCPPPVGMKNWSQRYFEWLRQLQFEHLPDRVVFADYLAEVTAAGERIKRLEAALYQCAQSSSQVAVIRALQAFRGIGFLSAVTIVAEAGDLHRFRTAPQLMAYAGAVPSESSSGGKQQRGAITKTGNSLLRHVLGEAAHHARHAPRVAGTLKQRQADLPPEIVELAWRAQLRLHTRYRHLSSRIGARKALTAVARELAGFIWAAGQLIHEVPAAA

SEQ ID NO: 277818 - protein, 331 aa, unidentified
MNAHVGIDISARSSAMGWRQNGKAAGNGDIQHTPKGRKAAIEKLLRLKPLSVVMEATGIYYLDLAIELHAAGLPVSVINPKSFHNFAGLMLQNSKTDQIDAQLLAEYGERMGPRLWVPPTADQMMLRAIGRHINRLIGHRTRAKNELHALHATETSIALLIEDEKDAITALNTRIERLKQAARDAIAKCPDLSLQFRCMMAAPGVGEASAIAALAELTTLPVTLRAAQVSRHAGLDVRLTQSGTSVNRPGRMSKCGNAYLRAAMFMPALTAIRCDPYVKAFYEALVGRGKKKMQAIGAVMRKYLTGLWACMRAGEDFDTAKLFSKIHLLKA

SEQ ID NO: 277819 - protein, 368 aa, unidentified
MEKFITFVGLDVHKNSIAVAFADEYGAEIRSYGTIGPDPASLDKVARRLVSQGKEPRFVYEAGPCGYKIYRHLRQQKFECMVAAPSLIPKKSGDRIKNDRRDAMMLARLYRSGELTPVRVPSAEDEAMRDLSRARGDAKKAERKARQQLGAFLLRHGFRYSGLSHWSLAHWRWISDIKMDHEAQQFTLQEYVDTVRCCTERVDRITQQIRLLVGKWRLGPVVEALQALRGVSLVVAATVVAELGDLTRFDNPRQVMAYLGLIPSQHSTGEKIKLGPITKTGNGHARQMLTEAAWAYRLPARVSRRLLDRQQKLPEKVRQVAWKAQVRLCARYSRLLARGKPSQLVITAIARELAAFMWAIARTVEVSA

SEQ ID NO: 277820 - protein, 282 aa, unidentified
MFHVGLDLHKRYSEYAVMDVTGNILNQGRVQNIPDEMDAFSRSLSEPSSIAIESSSTWYWAHKLLSQRRTVVLSNPMKNKAIASVKVKTDKIDSIMLATLLRGGFLAESCVPPRETIDCRELFRHRPNLVRERTRMKNWVHAYLIMSNISIDATPFTKEYVTELRKIDDPRVQSYLRLIDGVNAEIREASKTIEEKAKDNEDAKLLMTIPGIGFYAALLIASEVGEISRFEDSSSLVTYAGLAPSTHSSGGKTYHGPIMKTGSRYLRWIMGQCTAPLPPLFR

SEQ ID NO: 277821 - protein, 416 aa, unidentified
MNEEVYYERCAGIDVHKKVLVVCLRIGRKSEVRNFGTLTHEIREIVAWLKQSGCQMVGMESTGSYWKPLYNIFEQEGLPAMVCNAYHIKNVPGRKTDVSDAQWIARCLSQGLLNPSFVPDREQRELRDMIRFRKSQIEERSRNINRLQKFLEGANVKLGSWLSDIEGKSATALLELVIGKEDFTVNDVAVRMHGKMKATAQELFLSLEGALTPSQREFFAHVMAIIREQTAQIEKTDAMIQRSLSDNYRAAVQALDAIPGIGRVSAEQILAETGTDMSRFRNQHALSKWAGVCPGNNESAGKRKSGRTPPGNKTLKSTLTQCAKSAKKNKRSFFCAQYNRLVSHRGKNRATMAVAHSMLIAIYFVLSGQQFQDLGSDYYTQFNREKKINSHLRQLSKLGVSIPDDFLRDAILAASV

SEQ ID NO: 277822 - protein, 441 aa, unidentified
MNYKQNEKINQVKESTLVVGIDIGSTTQYARAFDWRGIELGKVFPFSNSREGFESFKAWMQHLQDKYKKLDAIVGIEPTGHYWFDLGAYLEDEGILLVMVNPYAVKQTKELDDNSQSKNDRKDPKVIAKLVTEGRYSAPYTPDGVYADLRIMVANRKRLIREMTQIKNRFARWFAIYFPEYTDVFGDYEAQSSMLLLKKVCTPEAIVELGAEKINQIWRDAKLRAVGMKRATTLCETAKRSIGLKKGSSAAQYEMKLLLEDYEYKKAQLDAVMEEIEKLCRKIPESEQMLAIKGIGVITVAGFLAEVGDVRRFESPRQIQKLAGLSLRENSSGKHKGQTTISKRGRSKLRAAKQYIKKSSQSNTPAAVLFNAAIPLIAKNPEFKSLHEYYTTRANNPLKKKQSVIAISCKLIRVFYAILANGVTYDAQKMLSDIHRQPQAA

SEQ ID NO: 277823 - protein, 323 aa, unidentified
MTRIICGVDISSASLEARIGREGATGTFPNTAEGIAALAAFCQTHQVELVAMEATGGYEQRAFALLSEQGLPVAILNPRAVRRFAESMGQMEKTDALDAAMIAWFAEVKHSRPSCLSSASQLQLRALVTRLRQLTEVRTAQLNQARLVTDPAVVALIDELLALVARQMRELESSISELISQDPLWHQLDQVFRSIKGVADRTVARLMAEMPEIGTLSNKTISKLAGVAPLAKDSGKHQGKRAVRGGRASVREILFIVASVVGRHEPDFIAFQQRLSAAGKPRKVIRIALAHKLLVRLNAKAREVRQQLAAPQLHRSETVVAIL

SEQ ID NO: 277824 - protein, 391 aa, unidentified
MEAWTVNTLPPAGTHDDAVRCLLAIELSKKSWIVAVNTSLSDKISRHTLKPCDGKELLDLCERIRTRVARETKKRVEVVSCYEAGYDGFWLHRLLEAHDIRNYVIDPASLQVDRRARRAKTDHVDAERLLRSLIAYLRGEPKVWSVVCVPSVAEEDDRRLHRERSRLINERIQHVNRIKGLLAIHGIYDYQPLRRDRMQRLERLCTAADGRTLPPRIKAEILRELQRLELAIRMIKTIEAERDAIASAAKTETKHTSAKKIQHLAKIKSIGPEFATTLVGEVFYRSFDNRKQLASYVGLTPAHFQSGAMSRDQGISKAGNAKARTVMVELAWLWLRHQPESPLSVWFRERVGKLKGRIRRITIVAVARKLLIALWRYLETGLVPEGAALKV

SEQ ID NO: 277825 - protein, 407 aa, unidentified
MQLRLFIGDDWAEEHHDVYLMDEAGRRLASRRLPEGITGISALHALIATHADDPDQVVIGIETDRGLWVSALTAAGYQVFAINPMAAARYRDRHHLSGAKSDAADAKLLADLVRTDRHNHRPLAGDSDQAEAIKVLARTHQSLIWARTRHTNMLRAALLAYYPAAVQAFADLDDRDALAVLGRAPTPEQGARLSLSKLGAALKAGGRQRNIDARAREIQAALRTEHLTAAAPLTAAFAATTTATVAILAELNAQIAALETELGTHFETHPDADIYLSLPGLGVILGARVLGEFGDDPNRYTTAKSRKNYAGTSPLTVASGKKHAVVKRHIRNNRLYDAIDLWAFCALSTSPGARAYYDHRKDTKKDTHHQALRALGNRLVGILHGCLRHHTPYDEHTAWAHRTPQAA

SEQ ID NO: 277826 - protein, 476 aa, unidentified
MVVPNQEPKKPAKRQKSTKPNKSPQRSLPVPVPASTAALNVINPDAAGIDVHSNMHMVCVPADRDANPVRQFGANTADLHEIAAWLKKCRVRTVALESTGVYWIPLFELLESEGFEVKLVEPGQLSRCGARPKTDVLDAQWIQRLHSYGLLRGSFRPPDSILALRAYWRQRQMQVRYAASHVQHMQKAMEQMNVKLAEVVTDITGLTGMSIIEAILGGERDPVKLAKLRDERCHSSEDQIALALQGTWRPEHLFELRQAYELYQFHHKQITECDNQVQAELAQFPNRAGEKTRTHKPRKRGRKSNDLRFDATGPLFKALGVDLTLIDGIDVGTALVILGEIGVDVSRFPTEKHFASWLRLCPPQDESNNTKKRRRRRKNTSRVATALRLAARSVGKTMTPLGLFYRRIRSRIGALGAVKATAHKLACLIYRMLKYGHEYVVQSLEEYEAKTKANMFKVLQRKAMAMGFQLTPIPTQ

SEQ ID NO: 277827 - protein, 448 aa, unidentified
MTATSVLAVLDPLAAFVDVGSEHMHVSIAGGPPEVFGTVTGELHRLRDWLQERGVKSVAMEATGVYWLPLYGVLEAAGFQVSMVNGKQTRNLPGRKTDMKDCQWGATLQAHGLLQAGFVPPAQIRRLQDYLRLRADHLSSAAACVQHQQKALERMNVKLHDVISSLVGDSGIRVIQAILAGERSPERLLALCDVRIQNKKAQRVKESLRGTWAEEHLFALRQAVENWQHYQGQIAACDRQIEAVLREMSALDQPHDKEVKTSPLKRTGANAPQIEGLHKILAKLCGGKDLTVLPAHTDYSLLQLIGEVGTDLGKWPTEQHFTAWLGLAPGSHQSGKRNGSVRRKRNRAGRLFCLMARSLARSKNIALGGFYRRLAARRGGLVANLALARKLAALFWRVMVKGLDYAESGLKAYEEQVLETKRRALCHLAKQLGRVVLPSLAELQTVKN

SEQ ID NO: 277828 - protein, 398 aa, unidentified
MTNQHRVGGVDSHKDTIHVAVISDVGQPVADREFPTTAAGYRRAVAWLIEHGPLQAVGIEGTSSYGVGVAAAVTTAGIKVIEVNRTRPAERRKQGKTDRLDAYRAARSVLSGEASTDPKRASIEPLRALTVARRSAVKAQQAAWRQIGALLVNAPAELRDRYRDLPETKLVATLANTRPDQLHDADAAETLFGLRSLARRYRDLAVEITELEQRMLARATTANPGLMAVKGIGPVVGAQLLITAGDNPNRLRTSASFAALCGTAPIPVSSGRTDRHRLCRGGDRHANAALHHIVKNRMTNDDRTRAYRDAHLAKGWTTKAVYRALKRAAAREVFHALSGHCAVPDYTDLRPARRAKNITLTTVAAALDVWPARVGELELGRRRDDDFADRYRCWLNAA

SEQ ID NO: 277829 - protein, 449 aa, unidentified
MGNCAGVDWASEKHDVLIEDAAGSELLAFTFAHDEQGLRSLCRALVRLEVELVAIERPDGLLVERLLDAGLRVLALHPNQVAAARDRFRASGGKSDRFDAFVLCELARTDHHRFRVLEPDSDQTKALRALTRAREDLVGTRTALANQLRAELERFWPGPLYLFTKLHSPISLAFLQRYPSPVDTRGLGPARLQAFLTRERYSGRQDPSQLLAKLRRAPEGRVGKLELATRRQLVLSFVRTLTSLNAQINELDRQIRTQVREHPDGRVFLSLFKHRDSVITAATLIGEIGDCRARYPTRDALAADAGQAAVAIESGKRKTARFRWGCNKRLRSAFCTLADTARHTNPWAQDLYASARARGHDHRRALRTVGRAWSRIVWRCWQDAMPYDPALHRALQQHITVSIPTPSGPRPDVPATQRMAGNAVTDTAARRAEREALDGEPTAATTLRG

SEQ ID NO: 277830 - protein, 343 aa, unidentified
MEIKRIGVDLAKNVYQVHGVDGDEKAVWSRRLKRENWVKVLVEKVEPGREIGMEACSGSHYWARLLRDKGYKVKLIAPQFVKPYVKSNKNDVRDAEAVCEAMSRPSMRFVSVKSAAQQDIQAIHRIRRELIGHRTAKANQIRGLVSEYGLVAPKQMNSLRTAIPCWLEDAENGLSGLFRRLLHGLWVDLKTLDQRVNELDREIDRVAESDEHAKRLQQSRGVGPIAATALVAAVGSAEQFTKGRQMSASLGLTPKQHSSGHKDRLLGISKRGDPYLRSLLIHGARSVVHHAKHKEDRLSQWVTSLTARSHTNVAVVALANKTTRMAWAMLRQGTDYQPDRVTV

SEQ ID NO: 277831 - protein, 363 aa, unidentified
MNTTTFVGLDVHAESITAAILQGDSQEAEVIKLSGDLMKVRQFFRRLTGKAPVRACYEASGAGFVLHRVLTDDGFHCDVIAPSLIPRKPGERRKTDRLDALMLARLYRSGHLTAVHVPSEDQEALRRLLRLRTTYQIYCKATKHRLSGILRNHGFVSTDGKSTWTNKHRLWLGKLRSTLQGPLQTTLAIELEHLEYLETQRQAMDAELERFALAPAYRAQVEALCCLRGIKTLTALTLVCEVDDVRRFASPRHLMAYFGLVPSEHSSGSREQRGPITKAGNIHVRRLLVEAAWNNRHRAAAELILNRRRQGQPPAVVAIALKAQHRLSKKFWHLDQRKHRHVAITAVARELCGFIWAILKTVN

SEQ ID NO: 277832 - protein, 294 aa, unidentified
MKYPIGIDISYQTLDYHIQPICGEVTKAVIENSINSITQFLGSYSAANYFLVIEPTGTYGDKLVELAHQHGFEIRLANPKRSSKFMEVLDLLHKTDENAAMALCLMGQSKEFQLPRYMPQSETMKQRRQVQMTVNALAKQQRMLQNQIHAMEQRFRSSDISLTALKTTLQTVEHQLEILQQELQQLSDDEIEEFNYYAQSVKGIGEKSASLLMLYTNGLKYFEKKGQLSRFVGIVPSSHKSGTSVNKKGHITKSGPSILRACLYNAAKSAKQYNHACKALYERLRKMVDLIKSR

SEQ ID NO: 277833 - protein, 427 aa, unidentified
MKKRIKIDHLSTLCVGLDIGSRNNYITALDFDSNRLINMKPVPNAASGVEQMESMILAVLEANAQFKYLLIAMESTSFYGVHVANYLSTSDRLKPYDVKVFCLNPKEVANYKKSFTGLGKNDGLDSFIVADYVRVGRVDIDPWRGAQYLALQRLTRQRRHVTEAITREKNYVLNNIFLKFSEFALLGGEESPLTNKFSATAEAILTEYKTTEDIANASLEDLVAFVSSSGRGRFSDPEQVAKLLQKAARDSYRLDKSLYEPITTSIACSFNCIRAFEHEQKVLNKAIAETVAGLNTVEYQILKSIPGIGPVYAAGILAEMGSIRCFPSNDSLAKYSGIVWRDNQSGEFDSDDTPMIKAGNRYLRYYLIEAAGSVATYCPEYTAFYEKKFAEVSKHQHKRALALTARKLIRLIFGLLDKNQLYSAAKG

SEQ ID NO: 277834 - protein, 356 aa, unidentified
MSEKLKSTIAVIGIDIGKNSFHVIGQDRRGSLVLRQKWSRGQVEARLANLPQCLIGMEACVGAHHLSRKLQALGHDARLMPAKYVRPYSKGEKNDYRDAEAIAEAVQRPTMRFVATKTADQLDLQALHRVRERLVGQRTGIINQIRAFLLERGIAVRQGLHFLRAELPAILAKRTDVLSPRMLRIIEDLASDWRRLDDRIEGVTGEIGTLARQDKACERLMTVPGIGPIISSAIVAAIGAGDAFSKGRDFGAWLGLVPKQMSTGDRTILGSISKRGNRYLRALFVQAAWVVLVKIGPEGWERYGLNSWIEAAKKRLHRNVLAIALANKLARIAWAVLHKGRAFECVKTNATASQSA

SEQ ID NO: 277835 - protein, 347 aa, unidentified
MIIIGCDLHMRTQQIAMLDTATGEVVERRLEHEKGEGKRFYEGLKERALVGIESPGFARWFEEMLAELGHELVVGDAAKIRAKETRKQKHDRRAAQHLLNLLVRGDFPRLWLPSAEERDVRVLVEHRHQLVELRTRAKNGRQAMALSYGLRRRQRLWSERGQAELQKLPLREGMARRREDLRRLLGQLDQWVKGLDQRIGEEVARREDAQRLMTHPGVGPLTALGTVRVLGPVERFPDAKHVTSYVGLIPQEESSGGRQRFGHLTKQGNRLLRFLRLEAAQTASRFDPALRRTYRRLAFRKGAASAKVAVARKLVIRLYIRLRDKIDYAEFCRRASQAGMLGDVALV

SEQ ID NO: 277836 - protein, 464 aa, unidentified
MRAGKQLWRNRKEKKEWGRRLQSEDPGLEVVHPHAAGIDVGNSTHYVAVRPDRDPEPVRRFECFTADLHGLADWLQSCGVKTVAMQSTGVYWIPLYEILEEHGLEVYLVNARHTKNLPGRKTDVQESQWLLKLHTYGLLNNSFQPVSEIRVLRTYWRQRGEHVRGAATCIQRMQKALTQMNVQLANVISDISGLTGQAIIRAIVAGERNPLKLAMLSDPRVHASHEEIAKSLEGNWRPELLFVLHQELDMYDTYQKRIAECDQRLQKHLASFTRPLPIQPPTQKLKTKKPAAKNAPRFDLSSELQRVTGVDLTRIDGIDVMVAQTLLSEVGLDMSRWITESHFASWLGLCPDNRISGDKVLSRGTRRVVNRAATALRQAANTLMRSRSYLGAQYRRLRTKLGAPKAITAMAHRLARLVYRMLKYGQTYVDKGTEYYEERFRQQQIQLLRKRAAKLGLQVAEIHA

SEQ ID NO: 277837 - protein, 339 aa, unidentified
MVEGTVGSHHKEGSSKMSEHITICAGIDTGKYKLDVAIDRCVDQLQVDNTADGHAALSAWLKWRRVKRIGIEASGGYEQGVVAHLRRDGFVVVVFQPAQVRAYARFLLQRAKNDKIDAALIAACTAAIKKIHAPPDTRLAPFAARMTLIEQLTEQVACCKNYREGHRDPQIRELWQKEIARFNKQLRAELKSLAAAIRQHRDLAERLDLIESVDGVGLKTAVAILVRMPEIGRLTREQAAALAGLAPYDDDSATHLGIRHIAGGRERLRGSLYKAALAAAFHWNWQLIALYRRLTKAGKSHKVALVACARKLLIFVNTVVERGTPWVSARPLSVTSNRV

SEQ ID NO: 277838 - protein, 359 aa, unidentified
MEAQVKKIDFKGQNIYVGFDAHLKSWKVTVMADDIVYKTFTQPPKPEVLYNYLKNNFPGGNYHSAYEAGFCGYWIHDKLISFGIRSIVVNPADIPTTDKERVQKEDKRDSRKIARSLSNGTLTPIFVPSIKTQKDRSLLRTRTMLVKDLARYKNRIKSFLYFYGISIDDSFSNPQSHWSNQFMIWLESIEIDGESGKEALQVLISECKNLRTSILEVTKLIRELSGTSVYKEKVRLLKSVPGIGLLTAMTILTELESIDRFNNLDKMCGYIGLIPSTKSSGEKERTGDITPRGHNVLRTAIIESSWTAIRNDPALMKSYLIYCRRMAPNKAIVKIAKKLLSRVRFVLSNNKPYICLIEK

SEQ ID NO: 277839 - protein, 433 aa, unidentified
MNDHPLPVGIDFSQKQAAIALLLPDGQPLEGHRTFANSASGYVQAKRYLLDALHAQGLAGLDISGEATNYYWLPFFVRLADDPGLAAQEVQLFLLNPRWVRGFKKCFAPDDKTDAKDPFYIAERTRTRRPPVPWQPQTEWWPLRFYTRLRFHLAQALTREKNFAHVYLFLRCSAYHRTRPFSDTFGATSRRVLTALPALPALTAQPLAERANLLDGWSGHHLPDPLDNARKLQQAAAESFPLEAALAEPVQRVLDLTLQHIADLEALIAQVEQWIADEVQAHHPEVLNLAGILGIGPVLASGIAAEIGDLSRFFHGQKWDKKRQRFRAKNLRDVEDAVAKLAGLWWPPADSGDFVAQERRMAKTGHRYLRYYLIEGADGRRRYLPEYAAFYARKYREVTKHQHKRALVLTARKSVGLIVGLLHRNEAYRAQEG

SEQ ID NO: 277840 - protein, 359 aa, unidentified
MSELRTASLSSAVIIVGVDTHKFVHVAVAIDHLGTRLASCSVSVDRAGYAELLAWARALGRIEAFGIEGTGSYGVGLASYVRRQALRVVEVSHCDRRKRRNNGKSDTLDAESAARSVLAGLATAVPKSADGAAEMVRQIKVARDTAVKAKSAAIIALKTLLVNAPCELRESLEPLTDRKLIDRCARLLPGVLDDTTASTKHALRALATRWLSLAGEIETHDEGLDAITMAAAPTLRQAFGIGADSAAEMMIVAGDNPTRVRSEAAFAKLCGACPIPASSGVTHRHRLFRGGHRQANAALYRIVTVRMRWHQPTRDYVARRTAQGLSKRDIIRCLKRFVAREIYHGLLTDHRARHVVTAA

SEQ ID NO: 277841 - protein, 311 aa, unidentified
MELYVGIDVAKDRLEVATSGSESFSASNDSAGRAQLLERLLELSPALVVLEASGGYEQALLVELVAAKIDCARVNPTDVRYFARMRRQFAKTDRLDARVLAAFAEHRATELIPARLDAERDELKALVNRRTQLLQMLTAERNRLAQAPTWLRKSIGRTIRALERELAAIDHEIAERINASARWKPLQQQLTSVPGVGRVSASVLLARLPELGRLNRHQIAALVGVAPFSRQSGRWQGHESIFGGRAAVRTVLYMATLSAVRCNPTLRTFYCRLRQSGKPAKVALTASMRKLLLILNAMLKTHTPWSAPCHA

SEQ ID NO: 277842 - protein, 389 aa, unidentified
MYVGIDVSKEKFDVCAIGDEGTKLFSLSCPMNREGFDKLVTRLAAVSTASLLLGMESTASYHIALFSYLTAKGYRVAIINPLLIANFAKLSLRKTKTDKKDAFTIAQFVLLRKETLATGSPHLTELKDLSRRRERLVDEMTALKNDMKRILSVTFPELETITGIFTTSTLRLLTEFPSAHAIAKAGYDAVATIVTSRSRGRKSSASVKVLMDTATASVGVASPAKDMILKQEASLLLALEGQAEEIMQLIMDLSGEQIQRDAKILTSMRGIGDKTAFNFLIEVGGDIKAFEHDRKLIAAAGLDPTTYESGKYKGQSKISKRGNRHLRRVIWLMTTKVIISNEVFRTYYFKRRKEGLIYKKAVLATAHKLIRVMFSMLVNQKCFEPERRK

SEQ ID NO: 277843 - protein, 402 aa, unidentified
MAKRDKPSSTGHRETKEVLADLVGRLRKKLNQKVAAGGSEEVRGRDGLRPNLERLTVGVDLGDQWSNYCILDLEGETLAEGKLRTTQPDFAEFFQALSAARVVVEVGTHSAWVREVLRDCGHEALVANPRLMEGSKRRKRKSDRIDANKLARLGRVDPQSLHPLEHRSKEVRQDLVMLRARDALVAVRTELINSTRGLVKSMGQRLPGCSSQSFASQAEEALPVEIREALLPLVQFAAALTDCIREYDRKVEEMASQKYGHTKLLRQVKGVGPITALAYVLTLENPHRFTKSRDVGPYLGLVPKQEDSGDSQPPLGISKAGDRMMRRLLVGSAQYILGPFGPETNLRRYGLRLCERGGKNAKKRAVVAVARKLAVLLHRLWVTGEVYEPLRLGPSVPMATAA

SEQ ID NO: 277844 - protein, 455 aa, unidentified
MTQTKEQKYEQMPVLNEHAAGIDIGSREHYVAIGQGKEHVKRFGVYTEELEELCRWLIQHGIRTVAMESTGNYWKNLFVMLQQHNLNPILVNGSFTKNLKGRKTDVQDCQFIQRMHTLGLLPDSFQPDVFTEQLRNLTRHRSMLLSQAADTSKRIQQSLRLMNLRLDIAVSDITGKSGMNIITAILKGERNPVLLAALCDVNVKKSREEIAAALTGFYRNDYLFQLKQNMGIWQFIQQQIKDVDQELNRLLEKHLQDLNKNERNYTPGENAKKKKKQKNNPSFDVGKKSFQLFNGVDLIEVPGISHGTALTIISEMGENISKFNSAKSFCSWLRLAPNKKKSGGKVISNKIKQGSNILSVALRSAANTIGNMKKEILLTKFFKRLHFKYGRAAAITATGRKLAVIIWNMITKCQPYQPLSNEIYDQRIRHLALKNIQKKIIKLKIKQEDLQFAIA

SEQ ID NO: 277845 - protein, 324 aa, unidentified
MDKYIGIDIAKQTFDVYGLSVNEKEEFVQFKQTCIDYQRLIKRFGKDKTYVMEATGPYYMKLATFLYEKRVPVAVVNPLVIKRFSQMNLQRAKTDKKDAQTIYNYAFYQGVSLWAPPPNAIKQMQQILSSLELINKQMTATKNQIKAFKASDSVDPQVSKSLKAMLTKYAREIKRLEEQLNQIVEIHYPSTQRRLQSIPGLGKKAIAVLIAVTHNFEKFVHYKQVIAFVGFSPRVYESGTSVKGKGHIYKLGKAHVRKQMYMSAWVAKFHNKSCAQMYERLHAKGKPERVIKIAIANKLLKQAFAVVENQTMYDPNFVSKPYIA

SEQ ID NO: 277846 - protein, 342 aa, unidentified
MQISTIGLDIAKNVFQVHGIDATEKVIVRKQLRRGQVMKFFAALPPCLVGMEACATAHYWARELTKLGHEVRLMPAKDVKAYVKRNKNDAADAEAICEAVRRPTMRFVRSKSAEQQGRLMQHRTRDLLLRQQTQVINALRAHLAELGIVAAQGREGLKQLLAIIADQADARLPLDARACLIVLAAQLQALHTLIKSIEKRLLVQHRANEASKRLESIPGIGIIGASAIAATVTDPKAFQSGRDFAAWIGLVPRQDSTGGKQKLGPISKQGDRYLRRILVVGAHAVLRWAKQNPGKYPWLTQLLARRPFKVVAIALANKMARVAWALLASGAKYRAPRLAAAT

SEQ ID NO: 277847 - protein, 372 aa, unidentified
MKDSKIYVGLDVHKDTIAVCWLPEADGPEQTREIPNEARAVRKLFTRLADAGELRACYEAGPCGYEVRRQLAALGIACEVVAPSLVPRRPGDRVKTDRRDARKLARLYRAGELTVIHVPTRHEEAARDLVRCREDLGEDVTRLRHRLGKFLLRHGRVWRETRNWSQRHWAWLRAQRFEEAAAQRTVDEYVAQLDHAVDRLRALDTELAALAQQPPWADLVARLRCLRGFDTLSALTLLVELQDFERFRSPRQLMSFVGLTPSLYASGGRETRGAITKAGNAHARRILVEAAWHYRHRPREASRLRHQAADQSDALRAEALRAQHRLHRRFHRLVARGKPSQVAVVAVARELVGFVWALLVKHTPTGRGTAAA

SEQ ID NO: 277848 - protein, 450 aa, unidentified
MQVVYERCCGLDIHKKLVVACLIVLAANGQRHKEIRTFRTVTQDLLLLKDWLAAAGCTHIAMESTGVYWKPIFNLLEGDFELLVVNAQHIKAVPGRKTDVRDAEWIADLVQHGLLKGSFIPPTPQRELRDLTRHRTSLVQDRARVVNRLQKVLEDTNIKLGDVATDILGKSARAMLEALLAGQTDPKVLADLARGRLRSKIPALEQALVGVVKPHHRFLLTELFTQIDTLDEAITRVGNEIATRMQEEEPAGQEPTEHHQGSPNGEQQEAPAEEPRQASERPPLTWALAVALLCTIPGISRRAAEGILAEIGLNMARFPSAGHLASWAGMCPGNSESAGKRLSGKTRKGSSWLRILLVEAAHAAAHTKNTYLSAQYHRLAARRGKKKAMVAVGHTILVIIYQMLQQQKSYEELGGNYFDERERQDTEKRLVRRLEKLGYQVTLQSDNPAA

SEQ ID NO: 277849 - protein, 429 aa, unidentified
MDVVDRIRVEEFRQLRKQIRGSERHLIVGIDVAKDKHHAFFGTATGHTLLKRLVFENNIEGFEKLLTFSEAMKVKHALEKEVFGFEPTANYHKPLGEYLVNKDFSVVIVSGAAVKNNREMMDGRWDKNDTKDPANIADLISQGKFMYYDHPVLPLRDLRNLLSLKRRLKKQEHSIQVRIRNHLIAQYFPEMDSYYGRSGSIGLSIVKWCLAPCVIGNFEFDRFVRAVAGGRRLTLGQQKRLRGIWDKAACSIGCEPGEGLGFEAKLMVEGLQQIRDAIELTDGKILQVCVNFPEYSYLLSIPGFGPDVSAKVLAAIGNPFRFDSEKQVLKMAGMDLSAKRSGKKSESVTPKLSKKGKASLRYALYQAAHIASSRNQYFVTYFTNKLRGREREKGIKAKMKVKLAAKLLVIAWTLMKKQEPFNPDYLNIE

SEQ ID NO: 277850 - protein, 340 aa, unidentified
MRMFAGLDVGFKRTAVCVVDEAGRIVWRGVVDTHPEALCRALQRWGGKLAKIGLESGSMTPWLARELAKAGFPVVCMDARAAADAVKSRRVKSDKADAYALAEMLRTGWYRAVYVKSEDSHRLKAMLGARDQLVRAKRALGNQVRGLLRPFGIRLPSRQGTKKFAEAAHQAVRRDNMLHASVTALLETLAAIEGQIARLDEQLKELARRSPVCWRLMSVPGVGPIVALAFMAAIEDINRFRRMRSVGAYLGLTTRRYQSGETDVVLGISRQGDAMARHYLYEAANVLLTTVRRPSALKSWGLKLMKRRGPKRARVAVARRLAILLGRIWKDKTHFDAVPA

SEQ ID NO: 277851 - protein, 405 aa, unidentified
MVTSIDKYDEVDVFVGLDVGKGEHHAVALDRSGKRLFDRALPNDERRLRVVLDQLASHGTVLLVVDQPATIGALPVAVAQAAGALVGYLPGLAMRRIADLHPGEAKTDARDAAIIAETARTMPHTLRSIQVADEQVAELSMLCGFDDDLAGQIVQVSNRIRGLLTQIHPALERVIGPRLDHPAMLNLLQRYPSPAAMKAAGEARLGNRLLKNAPRKGRVWAAEIMTALSEQTVVVTGTDAAALVLPRLAEQLQALRRQRDEIAAEVEKIVDAHPLQPVLTSMPGVGVRTAARLLTEVTTKTFATAGHLAAYAGLAPVTRRSGTSIRGEHPSRRGNKILKRAMFLSAFAALRDPESRAYYDRKIAQGKRHNQALIALARRRSDVLYAMLRDGTLYQPRPIEPALAA

SEQ ID NO: 277852 - protein, 438 aa, unidentified
MGSNYAGVDWAAEKHDVIVQDEAGEELLAATFAHDEDGLRALCRQLVRLNVTLVAIERPDGLLVERLLDAGLRLLPLHPNQVAATRARFRAAGGKSDRFDAFVLCELARTDNHRFRVLEPDTDQTKALRALTRAREDLVGARVALCNQLRAELERFWPGPIGLFKDLDSPISLAFLAKYPSPRDARGLGEKRLEAFLARQRYSGHKPAGELLAKLRSAPEGRAGEEEMSARCQVVLALVATLTPLVQQIRQLDRQIAAAVRAHPDGEIFLSLFKSPDSTLTAATMLAEIGDCRTRYPSRDALAGDAGQAAVAIESGKRKAACFRWACNKRLRSAFCTLSDTTRHWHPWAADRYAAARASGHDHQRAIRTLGRAWCRIVWRCWQDRTPYDPARHRALQQHCTVTIPTSSGSLPDLAATQRMLGDTVTQQGRPQGRARSA

SEQ ID NO: 277853 - protein, 343 aa, unidentified
MQIVRIGLDLAKYVFEIHGVDAHGRTVLRKTLRRHAVSTFFANLPPCLVGMEASNGAHFWAKTLLDLGHDVRLISPQFVTPYVKSNKNDRNDAEAICEAVGRPNMRFVPVKSAEQLAVQAVHRIRTRLVADRVRLVNQVRGLLGEHGIVVAKDIGNLRRALAGLGDNEDRALNPMVRALMGELREELTELDARIVGYDRKIRELYRNSEICQRLGKVEGIGPVTATALVAAVGDRSSFKNGRQFAAWLGLVPKQRSSGGRARLFGISKRGDRYLRTLLIHGARSALGRVRDKQDPRSLWLGRMRQRRHPNVVAVALANKNARIAWSLLASDSAYDASLSVGAA

SEQ ID NO: 277854 - protein, 478 aa, unidentified
MAKAANQRSDLQAVPLFKHEPVYIGIDVGKVKHFAGFVSATLLERHQRFEACPALAFENSREGFRALVERIRHYAVLDHCFVIMEKTGHYHRALQQYLQELDLPVYLMHVQERPKGMMKTDKRDALGLANHLYNQLELGVQVADKTQLVRQAVAPTPAAAQLRGLIRHRYELVRESTQRKNKLIAICDEVFPELPRILKNPNAPTALAIREHFPTPHALATASLTVLQEIRGKAHSITDRKLMELQRLAAQSIGTKDLTRQRGLVLEQSQLIRELKLLQEHIEQLETEIRTIVEQAREGQILCSMDIGQIQAATIIAAIGSIENFSNAGQLKSYCGWAPVRDQTGTTFDRTHLTRGGTRMMRQIMFLIVVRLIQQPESEWGKLYERLVQARCPLDERTGERKGKIRVMGRVAGQMIETIYALLKTDAEVLAKVPPGKEPPPPTLYDPALHRKHREGHYRPLKSSPRPSVITLVPNPQE

SEQ ID NO: 277855 - protein, 352 aa, unidentified
MEFTKIDSKYYCGVDLHSTSMYVTIVDKIGNIHYRRNMTNNFNIFKAAVEPYLPNLAVGVESTYNWYWLADGCHNSNIPFYLGHALYMKAITGGKKKNDRIDSKILADLMRGNLFPPAYAYPRQLRPTRDLLRRRNYYVALRASANTHIQTIFSQEAILEVNGPDVKRKNTRQSLIEKISDPEQQLSIECDLSLMDALDPIITGLEKRIRNQAKHHDRRAFALLETTPGIGEILALTILYEIHTIFRFQSEKKFSSYCRVVKCERKSNGKFTGGGNQKIGNPYLKWAFDQIIVRAQAKEPLIRAYYQRLKSKHGRRKAKAIIAHKFAVAIYQMLKNEQPFNVDKFVQSRFGK

SEQ ID NO: 277856 - protein, 313 aa, unidentified
MYKYIGIDISKSSLDLYDGKKSYKVSNTITGFREIKKLVNKKEELCLIFEPTGIYSHPLIEYCSKYSIKAIIVGSKEARDYARSIKQRSKTDKIDAKVLYRYHTQIETKDITIPSLDINMRKITQRRNVYEKYQQMIRQLKNLIEATNHKDKTLINSLQKQIKQLEKSSNNLLVEIENLLFEHENNKQAFNNLQTIPGIAKKSALVILMEFLRYPTANSKQIVALMGLDPIVKESGIFKGKSRISKQGGQYFRTKIYMATIVAIKYNDRLKVFYEKLISNGKPKKLALIASMRKLLRIAFAIFKSNKPYLVSN

SEQ ID NO: 277857 - protein, 372 aa, unidentified
MSVYVGIDVHRKRSQVAVVTEDGTVQLNKNVVNGSEPMLRLIGDLPSGTPVAFEAAFGWGWLVQLLEDYGFEAHLVHPLRCKAIASARLKNDKVDAAILAQLLRADLLPEAWIAPPQVRQLRALLRHRASLVRLGTQQRNRIHAVAADHGYDRSASYWTGPGRGWLAELDLPAASREIVTDCLAVIDGLAPVIDRIDGELHQHAKADPRVKVLRTLPGVGEFTALMMLAEIGDITRFGSARKLASWAGLTPTVRGSDLTVRHGHISKQGSAWLRWVLNQAAQTAKRSPDFAATYAAIAKRRGKKIATIAIARKLLTRAYHLLASMQATDTSTPAAGAASAAAAPKTGRSPSSGHARPCGMSQATKARARSSD

SEQ ID NO: 277858 - protein, 350 aa, unidentified
MQQFIGCDAHKRFSVFVAVDERGAASRPVRIEHVREDYAHFLSQLPERSEIAVESTGHWYWLVDEMERAGHHVHLANPMEAKKRMGRTNKTDALDAKGLAILLRNGTLPESWIPPGNLRDQRELLRTRMALRDLRSSLKHRIHAAVDRYGLHTDAIADLFGSKGREYLAARLTEFPPETARMVEVQLCALDELAAHIETIEQRIHAEIAPTTEVQLLRSVPGVGEILAPVIGLEIGDVNRFPRAENLAGYSGLVPRVFSSGGHTRLGGISRFVNQYLKWAFVEAANCAVRLKAHRQSHVGCLYQRLLAKRGHGRAIVAVARHLAEASYWILRKQELYRAPHQNKISSRNG

SEQ ID NO: 277859 - protein, 350 aa, unidentified
MDKIYIGVDFHARQQTICYLTTDSGEILLHQLKHQDKAAVRAFYAQFSGQVIVGLEASGYSPWFERLLEELGCEVWLGHATEIRRRARWRHKNDRRDAELILDLMLHDEFPRLYLPPLQSREVLRMLRYRQKLIKIRTIGKNSLQALALQSGLAKGPHLFTKAGLQELGSATMSPAMQWQREQWLQLLEPLNERLLETMLWLKQQSQADQRIKRLRTHPGIGLLTALCLVHSLEPVSRFANTRKVTAYAGLDPLERSSAERQRFLGISKGGSRVLRFLLVEAAHTTIRKDAELKRFYQRLAERHGRPKAKVAVSRKLLIRAYIMLRDEIDYAEFQRRAVAARPAPAAHGH

SEQ ID NO: 277860 - protein, 353 aa, unidentified
MKTILAIDLGKRNSVFCRLESGSLKPEYFKAKTGPKKFHNIFAELDCGNSIVLFEVGAQAGWLCDMLRAMRIEFKVANVNHSAWKWSNNPNKSDKNDAHRLAMMYHHGFFPEVYVPEKPVRQKRSLIYYRQKIVNRLTQVKNGIRALLTIQAIDLPSGKACWTKRNRRQLEQLARPFEAIDDPGQLWRGQLHMDLQQIDALEDCLTKTTAKLDELNKEKKAVELLETIPGVGPRTAEAIVAVIDDPGRFKSCRQICNYVGFTPRRFQSGQMDRTGRISKRGNPLLRALLVQASCTALRYDWAKHIYKRVSRGSVKRRKIAIIAVARHLLMRCWAMLRDNEPWQYKKQKINLYD

SEQ ID NO: 277861 - protein, 351 aa, unidentified
MTVIIGIDPHKATHTAVAISGGEEELDRKKVRANRAQVDQLVSWAEPFETRTWAIESADGLGYLLAQQLVAAGETVLDVPATLASRARLLSSGRSNKNDPNDALSVAVAALRFQGLRRVQAVGHREVLRLLAKRNTDIGNHRTRLVCRIHALLSELAAGGIAKEINASDVDRFLEAVHPGNPVEQVRYDLAVELLDDIRRLDAQLKASHKRIRQAVQASGTSLTDLFGVGPIIAAMLIGYTGDVGRFRNRDHYAAYNGTAPVEFSSGGRVVHRLSERGNRNLNHAIHMAAICQLRQPHSDGRAYFDRRVAEGKTNKEAIRSLKRHISNAVHRCLVTDARQAVAGIPSSPVG

SEQ ID NO: 277862 - protein, 379 aa, unidentified
MMPSENRVLIAIELSVSSWFVAVRLPGSEKSRLHRVEGGNTTALLALVSDLRSRAETKLRQAVDVACCFEAGRDGFWLHRLLTAHGAIAYVLEPTSILVNRRARRAKTDRLDAEGMLRVLAAWLGGDRQVCSIVSVPTPEDEDAKRPHREREHLVQERQRLENRMEALLFTQGIRGRPSLRSWERDIVKLRTGDGRALPCLMQAELNRLRRRLVLILELIHEMEAERAKALAAKVDDAMTRKIADLQRIRGIGANFSTVLVREVLYRSFANRRQLASYVGIAPMPYQSGGMDRDRSISRAGNPRARTTLIQLAWLWLRYQPGSALSDWFRGRVGTLQGRTRRIAIVAMARKLLIALWRYVETGVLPDGVELRAMEEATA

SEQ ID NO: 277863 - protein, 344 aa, unidentified
MDNHTQYLGFAGVDLAKKVMQIHFVTEDGEITDKSAKRAEFLDFFRNRGKCLIGMEACGSSQDWARKLEAMGHEVHLMSPKAVKPFVSGQKNDHNDAIGIYKAMFNGVRRVPVKSTEIRDLQTLRRIRSQVTKDKVKEINHVRGLLAEYGIVMGKSLNAFNKDISSALEILTEIGDVSPLVAEELRTTVEAIKAKIERQKKLDQEIEQLARGCKNYENFLKTPGVGPFTAAMLCVLLCDPSIFANGRQFAAYIGLAPRSRGSGGKNYVTGIPSKFNCDSESRAVLVECAQAIARCKNKSLWVEEILRRKPKKVALIAIANKLARQVWAMANKGESFKQMAVLTA

SEQ ID NO: 277864 - protein, 366 aa, unidentified
MKKTSTVRVNGNMIFKGCKLTIGLDLGDRWSFYCVLDEAGQVLLEQKLPTTPEAMKQTFGKIPRSLLALETGTHSPWVSRLLSELGQEVIVAHAQKVQLITKSSRKDDRHDARTLARLARVDPELLGPVRHRSAPAQLHLTVIRARAELVSARTALVNAARGLVKSYGQRLPKCGTYQVSEKLGEGLSAELREVLVPLFQEIESLNGHIKEYDERMEKLAKEVYPEVSLLKQVKGVGTQIALTYVLTIEDPHRFPKSRQVGCFLGLRPGRRNSGESEPQKGISKEGDRYLRTMLVQGAHYILGPFGEDSDLRRWGHKLAERGGKNAKKRAVVAVARKLAVLLHRLWVGGEVYEPLRNSQKAMRDVA

SEQ ID NO: 277865 - protein, 354 aa, unidentified
MNYVGVDIHKRYSVLVAVDERGRELARGRISGNSVHAFAQFFEALQGPGKVVLEACWNWGRIYDVLSEIEQVEEVVLAHPLKTRLIAEAQIKTDGLDALALATLLRGNLIARAHVPSKATRARKELLRQRLYWARLRTRVRNRVHAVLDRQRELEMPQCSDLFGRKGLNALSKLRLAEPDAILLGEELDLLKLIDSQIKAQEGRIVAFNANEQATQYLQSLPGMGKILAAVAAAEIDAIERFDGAAKLCAYAGLVPTTYGSGGKVHQGHLLKSRNKWLQWAFIEAAWVAVGCSSYFGGIYRYHRARGKKANIAITIVARRMCRIAFTLLKERRNFQEQHKTFPGRSAVRLTAAA

SEQ ID NO: 277866 - protein, 324 aa, unidentified
MINGILGIDVSKNTLDASVSSYTKVRARSFANSSDGWCQLLDWLVTQKIRQVHSCMESTGRYSLGIACALYEAGHVVSIVNPAQIRDFTRTKLGRNKTDGVDASHIREYCELFKPQPWVPPSEAYRRLGELQTIRAGIIAGLTEWKNRKNSGIIDSVAQSLADVTISHFTSQLGAVDEAIAQTIDNDSGLRRKRDLLLSISGVGETLAGAVLAELPGPDVLRSSAEVVAYAGLNPRQHQSGTSIDRVTRISKIGNAVLRAALYMPAMSAMRYNPAIVALVTRLKSRGRLKPKQIVVAAMRKLLVLCFGVLKTGKPFDPALAMGC

SEQ ID NO: 277867 - protein, 353 aa, unidentified
MRTYYVGMDVHGASIVIVVLNGAGKVVMQYVTETSAERVRDFLKQLRGKVYVTFEEGTQANWLHDIVRPLVTEVVVCDPRQNKLLLSGNKSDRIDAQKLAELLRNGALKAVYHGDHGMRMLKELVRTYDCLVSDTTRVMNRLKAIFRGRAIPCGGHDIYRPDRRPQWLAKLKEPGARQRADFLYRQLAALKPLRHEAKRLMVKEARRQTASPWLLSVPRLGVVSVAQLLAIVGTPHRFRSKRQFWTYVGLAVVTRTTADHEVVNGVLQRSRRPLATRGLNRNHNHVLKRVFKNAATTACHSGPFKAAYDARIKQGMDPSLARLTIARQLSAITLALWKRGQQFNPERMKQQAA

SEQ ID NO: 277868 - protein, 311 aa, unidentified
MNAAEVFVGIDVSKDTLDVAVRPTAEEMTFANTEDGVAVMTDFIQPFSARLIVLEATGGWEMAAASALAAKGLPVVIVNPRHVRDFAKSTGLLAKTDKLDARIIARFAESVKPEVRPLKDEESQRLEALLVRRRQLLQMLTAEKNRLSLAPHWTKGNIQAHIRWLDKELEKVNRELQNLIRKSPLWREKDEILQSVKGVGFTTSVTLLSDLPELGTLNRKKIAALVGVAPLNRDSGKYRGKRAIWGGRANVRTALYMAARIAIRFNPVIRVFAERLKKAGKPYKVVVTACMRKLLTILNTMVKNRTRWQAA

SEQ ID NO: 277869 - protein, 391 aa, unidentified
MVCVGIDVAKDKHDCCILDSDGTTLVDCFTIPNNMDGFKSLLQTIQDCSQKSDKIKVGLEATGHYSYNILGFLLDNDLPVYVMNPLHTNLYRKSLSLRKTKTDRVDARTIATMLLSDVDLKSYTDTAYHNEELKSLTRYRFDKVQERAKLKQSVSRLVTILFPELEQLVSSIHGTSIYALLSEYPGAKQISEAHLTRLANILVKTSRGHYRKDKATHIRDAARTSIGSVMPAKSLELKHTIKLIQELTSEINEIEDAIRKIMDELKPPILSIPGMGFHSAAMILAEVGDFSNFNSPDKVLAYAGCSPSTYQSGKLTNCYAHMEKRGSRYLRYALYTATKYVCYWNPVFTEYLTKKQAEGKHYNVALSHATKKLVRLIYALQKSGKAYLAVT

SEQ ID NO: 277870 - protein, 410 aa, unidentified
MDAIVERVSGVDVGQAMVVATVLVGGAHQRPTKATRRFRTVTRDLLAMREWFQEHGVTHVALESTGVYWQPVYALLEDAFEMIVGNAHHIKNVPGRKTDVKDSEWLANLARHGLIAKSFVPPKPVRQLRDLVRYRRKLVESRTAERNRLLKLLETANIKLASTMSDVFGVSGMLMLRALLEGRAQPSEMARLAKGQLRQKTEDLELALDGRLEDHHRFLLTLQLRRLDRVESDIAQLDARIDEALAPYQEPHERLQQIPGVGRVQAAVLVAELGTDRRVFRSAKHAAAWAGVCPGNNESAGKHGGTPVRKGNMHLRSALVEAAIAASRKKGSYLRDKFYRLRARRGVKRAAMAIAHKILIAAYHILSDGAAYRDLGDAYLDGLEKRRTTRNLVRRLERLGYEVTIGPKVA

SEQ ID NO: 277871 - protein, 382 aa, unidentified
MRRATKRGPGPSHLLITPDHAGNVVGIDPHKQTLSATVLDPRGGIVASEHFRVSGDGHRALEAWAKQFGPIARWGVEGASGWGRHTAMFLTGRGYDVRDVCANRTARNDRARQRGKSDTLDSERIAREVLAHPLLPKAFKRAGQDQGPDELHELLAIWHNRRQSILKSRQHLVGEAETLLCELPLQLREQLPASKAVRPRLNALAARNRRRRYDPPTKLRLRMLDEYHVQIAALDREEKQVVAHLAELVRQSGSTLAELCGLDTRSVAELLVEVGDVRRFTLGGFARFNATAPLPASTAEGPGEPVRHRYNPGGNRRINAVLHRMAVTQLRCEPRAQAIYANARANHHTKKEARRVLKRHLSDVVYRRMTSDLAAHTQTLAA

SEQ ID NO: 277872 - protein, 482 aa, unidentified
MKAKQKEPTEKSTGQSSQLHWRQMNRKQRRDLERKIQSADLTLQLVHPDAAGIDIGNESHYVAVPPDRDSQPVQHFGCTTAELRAMADWLKQCRIRTVAMQSTSVYWIAVYDVLEQAGLEVYLVNARETKNLPGRKSDVQESQWLMKLHTYGLLRNSFRPPQEIRTMRTYWRQRNDLVRSAARHIQRIQKTLTQMNMQLANVLSDVSGVTGQAIIKAILAGERDPQKLAAFRDPRVKASEKDIARSLEGNWQEDLLFVLKQEQAAFEFCRKQMAECDRQLEQYLQKMEDRSQGATLPEEKRKDRPQKKKGNQPQFDLQQQLFRMTGTDLTQIDGIDVMTATTILSEAGWDMIKWKDEHHFVSWLRLAPDNRISGDRIIGKGRLPTSNRVTVALKLAASNLRTSQSYLGAQFRRLRARLDTPVAIKAMAAKLARLIYRMLRYGTKYVDNGSRYYELQQRTREIRRLKLKAATLGFHLVQSTAA

SEQ ID NO: 277873 - protein, 348 aa, unidentified
MTHFVGLDVSVRETAVCVVDEAGTVICEQKVPSEPDDIVTLLTSVGVDYGRIGIEAGPLSQWLVNGLAEAGLPVICVETRHMKSLLKAQQVNKSDRHDARGIAQMMRVGLFKPVHVKTLASQEQRMLLTARKLVQRKMLDVESDLRGTLRNFGLKVGVISTGKFEARINELVEGLPRLAAIVTPLLTIRRVMRQEFARLHKMLLDAVRHDPICRRLMTAPGVGAVVALTYRATIDQPQRFIHSRAVGAHVGLTPRRHQSGEIDYDGGISKSGDAMLRTLLYEAAQVLLTQSRHWSWLKAWGTRVAQRRGMRRAIIAVARRLAVVLHRMWVDGTDFRWGSEPAATVAVA

SEQ ID NO: 277874 - protein, 345 aa, unidentified
MDQIIRIGMDTSKHVFQLHGVNVAEVPVLRKKLRRKDMVAFFKKLAPTVIAIEACGASHHWARLLQSFGHTVKLIPPQLVKPYVKRGKNDAADAEALCEAMSRPTMRFVPVKTADQQAALMLVNVRDRLIRNRTQLANTIRGHAAEFGLTAAKGMAHLVPLLDRIQADESLPALARGLFALQAKEYMQMQAQIKEIDGKLTAWHRADECSQRLAKIPGVGPIGAVLLRMKTPDPELFRSGRQFAAWIGLTPQDHSTAGKTRLGVITRAGDEGLRSVLVVGATAVIKQAQRSGKASPWLAALLKRKSPKLAAVARANKMARIAWKMMVTGETYMANSAPAVVANVA

SEQ ID NO: 277875 - protein, 466 aa, unidentified
MEVLYARCAGVDVHKKTVVVCRIIPGPDGQPLQEIRTFTTMTRDLLALSDWLAEGGVTHVAMESTGVYWKPVYNLLEGTFTLLLVNAAHIKQVPGRKSDVKDSAWIADLLRHGLLKGSFVPDRGLRELRELTRYRTALVRERAAEQNRVHKTLEGANIKLSAVATDLMGVSARQMLAALCTGRSDTEAIAQLAKGRLREKIPLLEQALEGDFQPHQRFLVAQQLAHIDYLEGLIDQVSEEVAQRLEPLAPPPSGPAPAPGSDALDEAAAFAAAELEARREALHLRLALDGLQEQEAVEGPLSFAAAVALLVTITGISQRTAEVIVSEIGTDMSRFPSAGHLCSWAGLVPGLNVSAGKRHGNRTRRGSPWLRSALVESAHGASRSKGTSLSAQYHRLAARRGRKKAIVAVAHTILATAYYLLKNRTTYEELGDAYYDARDKEAIQRRLVRRLEEIGYTVTVELAQAA

SEQ ID NO: 277876 - protein, 341 aa, unidentified
MNEISIVGLDLAKSVFQVHGADECGAVVLRKRLRREKLLGFFSTLPRCVVAMEACASAHHWAREIGALGHEVRLIPPAYVKPFVKRQKNDAADAEAICEAAQRPTMRFVQPKSAEAQAAAVVFRTRDLLVRQRTQLINALRGHLGEFGFVVRQGPGNVGKLIALVEDPSSDLPAEARSILTVMAEALQTIQSKVALLDREIAARAKADPTARRLMTIPGIGPVAATALVALAPDASTFRRGRDFAAWLGLTPRQHSSGGKERLGRTTRMGERSLRRLLILGASAVTKIAARDPSRASAWLAGMLARKPRMLVTVALANKIARTVWALMAHGGSYQAPAAAA

SEQ ID NO: 277877 - protein, 431 aa, unidentified
MDRVIIGVDPHKLSVTIEVRDNREILRATGQFATDGRSYHQLLQVARQWPERIWAVEGANGIGRPLTQRLLASGERVLDVPAKLAARARVFDTGQGRKTDAADAHAIVMVALRDKGLREVSTDPELVVLRMLCDRRDELSRSRVQALNRMHRLFLGLLPGGAPVKKSVSQYQAMLATVRPRDPAGKTRRRMAAEELEDLHRLDAKLKSMNAELKTAVLATGSRLMDIHGIGPAGAARILADVGDIARFPDRHHFASWTGTAPIDASSGQHLRHRLSRAGNRRLNHVLYIAGIVQLRHDTAGRAYYRRKRAAGKTSMEAMRCLRRRLSDAVYRQLMADAPAREEASPGGHPGASLISSAAGLSPDTGTSDQPLPGPAPQTLPPPGKTLKAMAPAAASPRRRARGVNVERPAGRTTLTPTSAAAPSTAPGPCP

SEQ ID NO: 277878 - protein, 392 aa, unidentified
MIYVGIDIAKDKHDCFITNSDGEVLFKSFTISNNPDGFETLFQKIQSVSDDLTKVKVGLEATGHYSYNLLGYLLDKGLPTYVINPLHTNLYRKSLSLRKTKTDKVDARTIASMIMSDVNLKSYSDTSYHNEELKSLTRYHFDKVKERAKLKTSVSRLICILFPELEKLVPTLHMASVYALLSEFPSAHAVASAHLTRLINLLSQSSKNRYGKDTAVMFREAARNSIGSNMPTKSLELKHTIKLIQELTSEIDEIEAAIKQIMDEEIQSPILTIPGISYRMGAMIIAEIGDFCRFDSADKILAYAGMSSSTYQSGQLDNCYSHMEKRGSRYLRYALYNATKYVCHWDKSFGEYLAKKRSEGKHYNVAISHAAKKLVRLIFAMEKSRKAYLPTA

SEQ ID NO: 277879 - protein, 428 aa, unidentified
MKNRNDQKLEAITPSTLIVGVDIAKELQWARFVDYRGLELGKALKFQNHKNGFDSILASIETICKNKKLYDVIVGMEPTGHYWKPLANYLILNGITVVMVNPYHTKRAKELDDNSQTKSDKKDAITIAKLVRDGRYYEVYMPQDIFAELRVLSNSRISLMKRFNALKNTITAVMDEYFPEITTVFKDPLKGKASMQILKSCPFPSLIIGLGVEGVLIEIKKAVKKTVGRKKAEQLVEAAKNSIGVGYGTVSAKLKLGLMIEELELLIKQLEQLEVAMEQALADTGFGKIILGIPGIGVVTAASFIGEIGDPMRFDDPRQISKMAGYNLIEDSSGKNKSGTAISKRGRKNLRSVLYQMAMTMVAVNNEMKEFYEYLKIRKDNPLKKKQALVVISKKIITVIYNLLKKQTEYKAELVLGKYRKNQMKKVA

SEQ ID NO: 277880 - protein, 393 aa, unidentified
MICVGIDVAKDKHDCFILSSEGEVLADVFTIQNNAEGFDTLLQTIRRCVCPGDKIKVGLEATGHYSYNILGFLLDKGLDTYVINPLHTNLYRKSLSLRKTKTDRVDARTIAAMLMSDVDLKSYTDTAYHNEELKSLTRYRFDKVRERAKLKQSVSRLVTILFPELEKLVPSLHMASVYALLSEFPGAKQVAGAHLTHLKAVLYDASKGRYGRDMATTLREAARCSVGSVMPTKSLELQHTIRLIRELDAEIEDIEAAIQSMMDEMQSPITTIPGIGVRMGAMILAEIGDFSRFDSPDKILAYAGMSPSTYQSGQLSLSGAYSHMEKRGSRYLRYALYNATKYVCLWDPVFAAYLAKKRTEGKHYNVALSHAAKKLVRLIYAMEKSRQSYRNAA

SEQ ID NO: 277881 - protein, 415 aa, unidentified
MDVLYPRCCGVDVHKKQVVACLLTPGPAGAPRKAIRTFGTTTAELLRLVEWLQAAECTHVAMESTGVYWKPLYNVCEGLFTVLVANAQHIKAVPGRKTDVRDAEWIADLLQHGLLRPSYIPPQPQQELRELTRYRTTLLRERAAEVNRIQKVLEGANIKLASVASDVLGMSGRAMLEAIVAGTTDPAVLANLARGRLRDKRPALEQALSGRVHPHHRFLLAEQLCHIDALEESIQRVSAEIAERVRPFETEIALLDTIPGVARQGAEALLAEIGPDMSRFPSAHHLASWAGICPGNHESAGKRKSGKTRKGSPWLRSLLVEAAWGASHTKDTYLSAQYRRLAARRGRKKATFALGHSILVSAYHILATRTPYADLGGTYFDERARTSIEHRLIRRLERLGLRVSVEPLLPATGVA

SEQ ID NO: 277882 - protein, 318 aa, unidentified
MKKHSIACGGIDTGKRKLDVALNGSSDRLQVANVAAGHGEVSAWLRRHKIRRVGIEASGGYERAVVARLRCNGFEVIVFQPAQVRAYAKFHLQRAKNDKIDATLIAACTAAAKKIHPPPDPRLAPMAERQTLIDQIVDQIARFKNYRESCGGPQLRQFWQEEIKRFHGLFRKELKQLVAAIRQHRDLSERLDLIVSIDGIALRTATAILVRLPEIGRLSREQVAALGGLAPYDNDSGDQDGARHIAGGRERLRKSVYTAALAASFHWNAELIELYQRLTAAGKEHKVALVACARKLLIYANAVVARGTPWVSHDAAAR

SEQ ID NO: 277883 - protein, 312 aa, unidentified
MAGLCAAGVDVGRDFFDVGLEPSGRVFRTASGPQGVKMVVERLRREDVGRVVLESIGGYAAHLVRALAEAGFQVGVIDPKRIRALRIAEGKKAKTDRLDAKLIARFALMMQDAARPVPSAKAFEIRALSTRRRQLVEMVAMEKVRLKQTLDEAVAISCRQIIALLSEERAKVEGLLQAELMTDAAGAERSRLLQTIPGVGPAVSMTLMADLPELGSLDRKAVASLAGLAPHPNQSGTRTGQAHIGGGRPCVRAALYMAAVSAVRSDKGFRREYQAMRQAGKPAKVALVAIARKIVVAANGMLKANRSWEKHA

SEQ ID NO: 277884 - protein, 374 aa, unidentified
MANAKANPLSEGELQLYELHIGNGLVPVGVDLAARTFQVCYLTEKHHLKNKSLNRKDFFEFLTNPPFDKPMLVGFEACGACNYFARFIANHGHKYKIMQAKAIRSFLSLNKTDAIDAVGIFKGVLCPSIKTVTARDEENQVLMNLLTIREQLIKQNTQCTNTQRAMLYELGCICGAGAKSVTDATASLQQTLSEQKSPALDNFNVIADALNHTQSNIEAQIKAIDTYLENYAKKNATVKNLMTIPGIGLISAVTLYAVIGNPDDFPSSRHFASFAGFAPSVSGTGGIVNVGSIPHSGNKLLKKILFMCAVARFSLQSRKASEREASKLTVLINDPSRPNKKIICSLANRLARVAWTIAKSGEKFDAKKCRLLGE

SEQ ID NO: 277885 - protein, 431 aa, unidentified
MDTQQFEVIRPKCAGLDVHKKSVVAAVCTSDPVTLTASYKTKIFNTTNTDIAALRDWLLSQDCHDVCMESTGKYWIPIFNILEPHMHVILTHPKYVKAIKGKKTDKRDAKWIANLFRFDIVKASFIPPADIRALRELSRYRLKLSYMRTAEKNRYQNSMTISRIRIDCVLADPFGLSATRIMDYLLSGEPFDEEKCRSLIDGRVKASKDEVMDAVHGYKILEEQKFKMTHAKAHMDFINKSIDEIEAELFLRSRQYDLQIKRIATVTGITELSALFILSEIGADMSVFESDRHLCSWAGLTPANNESASKKKSTRCSKAGQYLKPLLIQCALAAVKSKKEPYFQIKYHRLAKKRGKKKAIIAIARMMLTSIYHMLSKGEDFHPDDYEATVNPKKQKTVVLTLENTLQFLREQGVDPETLKLIQQQCSAQAG

SEQ ID NO: 277886 - protein, 452 aa, unidentified
MAKVAKRKQTSKGLRLEVVNPNAAGIDISPKEMQVCVPSDRDGECNRTFGVYTEDLHYIAEWLKVCCIDTVAMESTGIYWLPVFRILKESGFEVILVNASDVKNFSGRKTDASDAEWLMMLHSYGLLKPCFQPENIARTMRNLVRHRDNLIRSASREVLHLQKAMEQMNLKLDNVFSDILGKSGQSVIKAILNGERDPKVLADLADPRCRTSKEEIEKSLQATWEEEHLFEMRQSDSLYQFYQQLIAECDAKINEIAMQYSATVDAPKTELLRSEKYNAKKNRIGFDVEKVAFELWGVNVMRIPGMSRGALLRLVGELGADFTTKFVDVKHFVSWANLVPNNKISGGALLSSKVPKKKNPVGMIFRQAANTLKVAKNSLGDYFRHMRAKGGHLQAMVATGKKLASIFYCMVQRKVEYNEKVYCNHRKQELQNKVAYLHKRLQRMESELANCG

SEQ ID NO: 277887 - protein, 425 aa, unidentified
MTAINSTTAPTVLVAIDISKHRHEILISVPGKQRRRRLTIRNALEDFERLRELLAAYSLPVRVGFEATGNYHRSLAHHLGRSGFELKLVSSVALARTREALHNSWDKNDPKDAQVILHMLEIGAVQFFHDPLAAGTNDIQELSKTHEIVSRSKTELWHRILTHYLPLYFPEAERFHRSSRTDWFLAFLERFPSPHMITALSQEVFIEAAWDVVGRKVSKERLLSDIYATAAGSVGLPVHPDSDAVRMFRLVLAEGRSLVRQRDEIEARAVELLSDHADYRLLTSIPGIGPINAMTILAEAGDLRRFGHHRQFLKFCGMDLATVQSGMFRGQSRISKYGNARLRRTLWMAGQTAVLKRTNSFRDKFERYISQDRHNPHLRRKAYTAVAAKMARTVHAVIKHGEPYRPFFEGASPGGRTPLFRAVEA

SEQ ID NO: 277888 - protein, 340 aa, unidentified
MPLYGGIDLHANNSVIVLVNEQDEVIYRKRLPNELPTILGQLAPYHTEMQGLVVESTYNWYWLVDGLMEADYRVHLANPAAMQQYSGLKYTDDHSDARWLAHLLRLGVLPEGYIYPKAARAVRDLLRKRAHLVRQHTANVLSVQNIMARNTGARFSVKRIQALTKQELTTLLAEETQVLAVTSSLVVLDCLRQQIQTLEQTVHKRLHHTPSYEQLLTVQGIGTILAQTITLETGAISRFPTVGNSASYCRCVDSTKISNGKRKGTGNVKNGHPYLAWASMEAAQFAMRFQPEAQRFYQRKLAQSRNNTVLARKAVAHKLSRACYDIMRDLVPFEATKAFG

SEQ ID NO: 277889 - protein, 339 aa, unidentified
MEWTHPPYNRHRSVPMWLHDHQQDGESDMNVTTVGIDLAKRVIQIHAEDERGKVVARKQLKRDEVLPYFAQHQPCLIGMEACAGSHYWRRKLSSLGLEVKLINPAYVKPFVKRNKNDARDAEAICEAVTRPNMPFVPTKSIEQQDIQMLHRIRSQAIKQRTALANQIRGLLGEYGLVIPLGIASVRRQLPEMLEATDNELTVLGRELLSELLQELLMLDKRVKRFDDKIKVVMKHSDAYRRLLTIPGVGPLIASALLMTVGDGTVFKNGRHMAAYLGLVPKQHSSGGKDRLLGISKRGDRYLRSLLVHGARSIGYRVKDNPEHSNQWLYQLIERRGFNK

SEQ ID NO: 277890 - protein, 317 aa, unidentified
MAEIATVVGIDLSGGWWDAATWPSGEAARFCNTAEGHTACLAWIGGRCHGGGVVACEASGGLERAAVEVLHAAGYSARVVDPSQVLHFSRAQGRRAKTDAIDAGMIAHFVATFPGKAAVPDPTRKALVDLVGARDLVVGQLTASRNQASHVTHPGACRQMAQIIAGQMRQIASLNAMTRKLIAATAGYAKSSEIMRSMPGVGPATAARLLASLPELGTVSGKQAAGLVGVAPMANDSGNRRGARHIVGGRHDVRKTAYMAALVATQRNPALRNFYARLCAAGKPKKLALVAVIRKLIVILNTMLRNDTAWVDHTKTT

SEQ ID NO: 277891 - protein, 360 aa, unidentified
MTKQSNKLDFSGQNIYAGFDVHKKNWHVTIMSDELTLKTFTQDPKPLLLFQHLKSNYPGATYHTAYEAGFCGYWIHNQLKELGVNSIVVNPADIPTTHKEKVQKEDARDSRKIARSLRSGDLRPIHVPSLITLEDRAMVRMRATLVKDMTRNKNRVKGFLHLHGIELAACFEKSGSHWSNRFFEWLSQIEMSESSGKETLQLLVNTTKQLKASVAQVTKQIRLMSKNNVYAENVKLLRSIPGIGLITAMTIITEVETITRFKNNDHFCSFIGLIPSTHSSGDHDGVGDITSRGNKILRSAIVESAWTAARLDPALVKSYHLYCQRMEPNKAIIRIAKKLANRIIFVLKNKKPYEYSINKN

SEQ ID NO: 277892 - protein, 359 aa, unidentified
MSPFQLLVNSLKLNKYMENLFIGIDYSKKSFDVSAYISSEKSKEEKMKLQLLGHQNFSNDETGYIQMLSWLGTLTSLSPKHWLFCGEDSGLYSYSMSHYLYIKGFSIWLENPLHMKRSMGLVRGKSDKKDSGLIALYSYRFRDRRVDFVPKQDTIQRLQDLEAYRHRLIKAKKLLGDSSKELNLYEQTRDTAVLVYEKSMELVEQIESQLKEVEVQIQQVLKSDKEVYDNYERITSVKGISWKTAVVLLIYSHNFTRFETARQFACYAGVAPFEYSSGTSVKGGTHTSRLANMRVKSLLGMAAMSAKRFNKDIAEYYNSKKEKGKSHRVIMNNISNKLIHICFALVRHQTMYQYTYKLV

SEQ ID NO: 277893 - protein, 428 aa, unidentified
MTVKDCTSVKEFWQLKKDIRGSKDHLIVGIDVAKDDHKAFFGTANGKTLLKRLSFKNDIEGFEKLLTRVKTMKAKHSLNEVVLGLEPTANYHKPLGDFLIKCGHMVVLVSGVSVKRNRELLDGRWDKHDTKDSANVADLISQGKCLYYEYAPVLLRDLRNLLSLKRRLKKQEHGLRIRIRNSLLAQYFPELDKNYSKWEPEVLSVVRWCLDPSVIVGLEYDQFVGLVSPGSKNMRQQGRLEWIWKKAVASIGCDAGEAAEFEAKVMVEELRHIREVIKETDAKIKDVCVEFPEYDYLLTIPGFGPDVSSKVLAAIGNPFRFNSGKQVLKMSGYDLSAKRSGKTSESAVPVISKKGKASLRYALYQAAFIASCKNKYFIAYYTNTLRGREREKGIKTKMKVKLAAKMLVIAWTLMKKKEPFDPGYLKID

SEQ ID NO: 277894 - protein, 354 aa, unidentified
MSQTLNAAIAVVGIDIGKNSFHIVGHDERGAIVLRQKWSRGQVEARFANLPPCLIGMEACVGAHHLSRNLNSLGHDARLMPAKYVRPYSKGQKNDFRDAEAIAEAVQRPTMKFVATKTADQLDLQALHRVRERLVSQRTGVVNQIRAFLLERGIAVRQGQRFLRAELPRVLATPSDVLSPRMVRVIEGLAGDWRRLDERIEGLSSEIEAIARQDSGCERLMSVPGIGPIISSAMVAAIGAGDAFSKGRDFAAWLGLVPKQMSTGDRTILGRISKRGNRYLRVLFVQAAWVVLIKPKSWERHGLKPWIEAAKKRLHRNVLAIALANKLARIAWSVLARGRGFEARKIDEAATQSA

SEQ ID NO: 277895 - protein, 340 aa, unidentified
MSNISTIGLDIAKSVFQIHGVDTAGEVVVRRKLTRGRVLAFFESLPRCLVGIEACSSSHYWARELIALGHDVRLLPAQYVKPYLKRQKNDAADAEAICEAVTRPTMRFVPVKSPEQQSVMMLHRVRLMLNRQRTQISNALRSHLSEFGVVAPIGRNGIEQLLMVVNDENDSRIPADARLCLRMLEAQLKVVKEQILENDRRVRASARETELGRRLMEIPGVGPLLATAFVATVADPHAFKSGRCLAAWIGLVPKQNSSGGKERLGSISKAGNRYLRQLLVVGSMAVIRYAERNGTRRPWLVQLMARRTTKVAAVALANKTARMVWALMTNGERYREPIIA

SEQ ID NO: 277896 - protein, 344 aa, unidentified
MNIASIGIDLGKTTFHLVALGERNKVLLRKKFSRPQLLAYTANLPAALIGLEACAGAHFVGTALREQGHQVRLIPAQFVKPYRKSNKNDFIDAEAIAEAVTKQNMRFVQIKTQEQLDWQAMHRVRDRLMQRRTALINEIRGFLLERGLTFAARPIYLRKNLPTVIEDAEQNLTPRLRWLLDRLWQEWKQTEIDIKTITDEIERISNEDARCRQLRQIPGFGPLVSTATVAAIGNGAAFRRGRDFAAWVGVVPRQFSTGGKQKLYGISKRGNIYLRRMLIHGARAVLLRVKYDTGGFGQWVHRLAQRAPRNKVVVAIANKLARMAWAVLSSGKDYRHQPLQLAAA

SEQ ID NO: 277897 - protein, 345 aa, unidentified
MGSKLEQLLERPSRPFTPRAGPAWPARILEAGVIYHVKEQLVYLGVDIAKYYLDAAIGSEKRRFPNEAVGHRQLIRWINQMESAVQVICEPSGGYERALVRALVGAQLKVSLVPANRVRQFARAAGILAKTDRIDANVLCAFAQAMQPGTVSASQLEQEHLRELESQRRHLTHLMVMEQNRGARVSDICVRRLNRTLIQQIKKQIEQLDLLIKNHIEESAELSAKAQKLTAISGVGARTAALLLAQMPELGQLNRREVAALVGVAPFNRDSGKMRGKRAIYGGRRPVRHGLYMAALVAARHNPILRQFYLRLRAGGKPAKLALTATMRKLLIVLNSALKPDLSYA

SEQ ID NO: 277898 - protein, 334 aa, unidentified
MNDTTIFVGLDVHKKTIAVATVEGRASADVRFYGTIANTPVAIRSLLRKLGKGGQRLHLAYEAGPMGYNLYRLSTGLGHRCDVVAPSLIPRKAGDKVKTDRRDAMTLAQTLRAGQLTEVWVPDEANEAMRDLVRMRALAMKDQRKARQQLHSFLLRHGRSYPGKHWTKAHRRWLGELTFAQPAQHLVLEELLARIERAEELCERLKKAIVDLMPQWTLAPVVAAVQALRGVSILVAATVVAEVGNFSRFDNPRQLMAYLGLNPSEHSSGATIKRRPITKTGNSLARTCLVEAAWTYRHPARVTQIIRERLKGLPEPIRAIAWKAQVRLSGDTAS

SEQ ID NO: 277899 - protein, 371 aa, unidentified
MNSILYVGMDVHKENYTLCCYSFDRDTVEYRQTVPSDYRLILKYLEQVRRKYPEEVEFICGYEAGCLGYSLYHQLTDHGVKYINLAPTTMGITNTNRVKTDRKDAANIARCLAFHTYSAVYVPDGEDNAVKEYLRMRDDQKLALKKIKQQITAFVLRLGKQYTGGKSLWTENHLKWLRGLDLTLLEKETLQEYLITYDHLTDKLERLDARIEELARNERYGERVRRLGCFIGIKPHTALSLLVEVGDFRRFEKAPNFAGFLGLVPSEDSSGGGRNRLAITKAGNSHLRRLLVESSQSYSRGTIGFKSKELKKRQEGNPPEVVAYADRANERLRRRYYRMTLKNGAKRNVAIVAVARELACFIWGIMTDEIA

SEQ ID NO: 277900 - protein, 411 aa, unidentified
METIVQRPAALDVHKEQVTACVRVPAEQGRGREQHLAEFQTTVRGLLALRDWLEAHRVEQVTMEATGVYWKPVWAILEDAFALVLVNARHVKQVPGRKTDVADAAWLCQLAEAGLLKASFVPPKPIRSLRNLTRYRKTQIQERAREANRLHKALEDTGIKLDCVASNILGVSGRAMLDALIEGTTDPQVLAELAKGRLRAKLPSLKEALEGRFDELHALWIGAILAHIDFLDEQIDRLSEAIEEQIRPFAPAVELLCTIPGVQRRGAEVIIAEIGVDMGVFATAKHLASWAGQCPGNDQSAGKRRSGKTRKGSKWLDWTLEETALAAVRSNDTYLAAQYQRLRPRRGHKKALGAVKHSIICAAWHMLCTGELYADLGGDYFQRRDPARTTTRLVRQLEALGHHVTLEAAAA

SEQ ID NO: 277901 - protein, 357 aa, unidentified
MSRPQASEMEAVEHYVGIDVSLELSSVCVVDGRGKIVKEAKVASEPEALVYFFKELGFPVNRIGFEAGPLSQWLHAGLTQAGFEAVLLETRHVKAALSAMPVKTDRKDACGLAQLLRMGWFQQVHAKSIGSQEIRALLVARKQLLGRLLDVELSIRGILRGFGLKVGQVTRKTFEARIRELVTGHTTLERIAEAMLSARATLKAQYEKLHKAVLAIVREDAVCRRLITVPGVGPVVAVTFKSAVDDPSRIAKSKAVGALFGLTPRKYQSGEKDVTGGITRTGDEMVRTALYEAANVLLSRITRFSKLKRWGMDVAKRRGSKRAKVALARKIGVILHRMWVDGTTYRWTEAKPIAAQA

SEQ ID NO: 277902 - protein, 320 aa, unidentified
MTKSSTKTAGIDTGKAYLDIAIHAASDRLRVRNDGDGHHELVAWLKTHKVKRVGIEASGGYERAVVAHLRKNGFEVALLQPRQVRAFAIYKLRRAKNDRIDAALIAECTANLGDLREPPDPRLAALAEHLLFIEEIEFDIARLKTRREHFVDKRILNQVDRDIKAQQRRCDAELVRLQATVRKHDDLASRLELIASVDGVGIRTALTLVILLPELGKVSREQISALVGVAPFDDQSGKRSGERHIAGGRSRVRRALFNAARAASQFWNKALVAQYSRLKSRGKVHHQALIACVRKLLIFVNAVVERGTPWIKNPPPKNAA

SEQ ID NO: 277903 - protein, 411 aa, unidentified
MEVVYRRCAGLDVHKRSISACVLMFVPGEEQPEIQKRTFGTFTAELVELKDWLQSCGVTHVVMESTGVYWIPLWSHLEDRFHLLLVNPRHFRAIPGRKTDQKDCEWLAQLLQYGLVRGSFVPAQEIRELRELTRYRVKLLGQRNQMHNRIEKLLQQANVKLSSVMTDILGVTGRSILMALLGGNQDPAILAECAKGTLRRKKAELAQALQAHLTDHQRFLLGEFIEDLEFVERKIAHIEETIRTRIAPHEEVLSRLSTIPGINQLTASTLVAELGVEMQQFPDASHLASWAGLCPGDCESAGKRKNTRTRQGNPHVRRVLCQAAWAAAHTKHTYLAALFYRIASKGGRKKALIAVARHLIVIAYHLIRAPLVYRDLGANYFDTLHAERTKRRLVRRLEDLGHEVILNRKRP

SEQ ID NO: 277904 - protein, 315 aa, unidentified
MEGEVVVGIDVSKATLDIALLPGEEVFSQEHSSPGVATLVERLKRVAPVLVVLEASGGLETALVAELAAAGLPVAVVNPRQVRDFARATGQLAKTDPLDARVLARFGERIRPELRELPDEQTRQLKALVVRRRQLVEMMVAEHNRLDRAPKVLHPQLRRHIDWLRKQVRTLDHDLDQQLRNSPVWREKEKLLRSVPGVGPVACSTLIAGLPELGSLPRRQIAALVGVAPLNRDSGIMRGRRMVWGGRAEVRTALYMSTVVAVRFNPVLKSFYLRLRAAGKSPKIALIACMRKLLVILNAIVKHRTPWSPLCLDPG

SEQ ID NO: 277905 - protein, 359 aa, unidentified
MAKFIKMISTVMSAIGLDLADVWSDWAGLDESGTVVRRERVKTTESELRRVFGENAPTTIAIEVGTHSAWISRVLSSLGHTVVVANARRVALIHRNKRKNNRIDAEFLARLVRADKELLFPIQHREERSQADLAVLRSRDVTVRSRTKLINHVRGTCKTFGVKLPRCSAEAFVVRCSGLVPVALHSAVNDVLALIADMTAKIKSYDSTIAAMIKRHPAAQLVGKITGVGPLTSLAYVLTIEDPHRIVRSRSAGAYFGLVPGSDDSGEKHEQRRITKEGDQFCRRLLVNAAQYILGPFGAKVDSDLRRHGEAIASRGGKNAKKRAVIAVARKLAVVMHHLWVHNEDYVPLFNAAQKPVAA

SEQ ID NO: 277906 - protein, 326 aa, unidentified
MQGKEASEQETKAKSNVGIDVSKCWLDAHVLPSGEPLRVPNTREGIRKLKRWLQNFELALVVVEATGKWHRALRRSLDASAIPVAVVDPFRVRMFAKAQGIFAKTDQLDARVLALFATLMAPPLRPPAPEALEELNELVVARASAVAQRTALKNQLSAAEGAFLKRQLMRRIASSAKDIAAIDREILKRIKADEDLARRYVILTSIPSFGPVVAATLVASLAELGTCTTKQIAMLAGLAPIADQSGERQGARVIWGGRAAVRRILYLAALTAARVNADMRAFYQRRIADGKPFKVAIIAVARKLVVLANTLISQDRTWELHAPKQA

SEQ ID NO: 277907 - protein, 336 aa, unidentified
MSHYCGIDLHSNNHVVVVIDDEDKRVFEKRLNNDLSLTLKALSPYDETLHGIAVESTFNWYWLVDGLQEHGYDLRLVNTAAVKQYDGLKYSGDHHDAFHLAHLMRLGILPTGYIYPKEQRAIRDLLRRRLSLVRTASSQLISVQSQIWRSTGLRIKSGELRKLEFAPPLVDDYTLQAVQAGLAVYQVIQREIDGLEQTAYQAVKLTEAFKILQTITGIGKILGLTIMLETGTIDRFAGPGNFASYCRCVDSKRTSNGKKKGEGNAKAGNKYLSWAFSEAAHFAVRFEPLAQRFYERKKAKTNGIIAIRAVARKLARASWMMLKHQVPYDAKRMFPG

SEQ ID NO: 277908 - protein, 315 aa, unidentified
MATSSEKFVGIDVSKDKLDVAVLGERKASQVGNDEKGIASLVKKMKSLKPELIVVEATGGYQRAVVDGLFRSGLSVAVVNPSRVRQFARAYGLLAKTDKLDAQVLAVFGERVKPRRYEGKDEKERELSGLLVRRRQLEEMLKAEKNRLRTIRVSLQGSVERMIACLQAEKKVVDEKIRQYMAEQKEWQAEREILESAPGVGPVTTATLLADLPELGKMDRKKIAALVGVAPMNYDSGKKRGYRKTKGGRADVRSVLYMSTLVATRYNPVIQKQYQSLLKRGKLKKVALTACMRKFLTILNAMVRDQVPFRDTAAV

SEQ ID NO: 277909 - protein, 271 aa, unidentified
MDHFAGLDVSVKQTSVCIVDDTGKIVREVKVASEPDALLPVLTNPTYHFKRIGLEAGPLSQWLFSALAEVGLPVICVETRHMRAVLKAQINKTDRNDARGIAQMMRAGLYRPVHVKTLRSQKLRMLLTHRKLLQSKAVAIDNDLRGTLRNFGLKVGMVGTAKFEARIKELVENGAVFGLTPTQHQSGDSDRPGGISRCGDEMMRVMLYEAAQIMLTRTNKWCWLKAWAMKIARHRGMKKAIVALARRLAIIMHRIWVDGTEFRWTREVAAA

SEQ ID NO: 277910 - protein, 346 aa, unidentified
MDKIIRIGMDTSKHVFQLHGVNAADKPVLRKKMRRKEMIDFFTTCPPTLVAIEACGGSHHWARLLTSFGHEVEMIAPQLAKPYVKRNKNDAADAEGLCEAMSRPTMRFVPVKTVDEQAALMLISVRTRLIANRTQLANAIRGYANEFGISAAKGLAHIPMLLERVQVEKTVPELAQELFMSQAEEYAQLEKKIAAVEAKVKAWQRNDERSRRLNTIPGIGPIGSALLIMKTPAPELFQSGRQFAAWIGLTPKDHSTGGKLRLGGITRAGDEALRAVLVAGATAVIHHARRSGKASQWLAELLRRKPPKLAAVALANKMARIAWKLMISGQTYRSLGKHTAHNQEQL

SEQ ID NO: 277911 - protein, 420 aa, unidentified
MFMNIRSPFPYQATVGIDWADQTHDVFVRFANGDTYRRKIDSRPEAIQEWLLELRSAGAEGKIAIALEQRRGALFYHLCTHLNWIDLYPINPHSLASFRLTFFSSRAKDDPIDGQLLEELVRTHCDRLRPYQPESTTERKLDLYCRHRRSLLDLATKTELKLISTLKQYFPLAVNLFAAVGMKSDIALNFLSRWPTLNELHRAKTHTVRSFFYAHNSRSQSLIEKRLQQIGEAHNVTDDLALIEPLVLTSKCLVGQLRQSNQAIKEFDRKIKELFKSHPDHFLFENLPRAGEQLAPRLLSLFGSNRLRWDDATDIQKYSGVAPVIERSGKSIWVHRRLSRPKFICQTFHEFAQQSVQHSSWANQFYRRQRERGKSHHSAIRALAYKWIRIIFACWKANKPYDESFYLQALAKKNSPLPST

SEQ ID NO: 277912 - protein, 356 aa, unidentified
MISSTKYIGMDVHKESISIAVRNAAGKIVMECVIQTKASMILQFFDGLRGDLQVTFEEGTWAAWLYDLLKPHVTKLVVCDPRRNALLQDGNQNDRVDARKLSDLLYMNKLNPVYHGDHGLRTLKELGRSYLTMMKDQCRVMSRIKAIYRSWAIPCSGKQVYGSRHRAEWLGKILEPGVHRRAELYYQQLDALRTLRQEVRKDLLAESKKHKIWKRLCEIPSIGPIRAAELLGILQTPHRFRTKRQLWTYCGFAVESSSSADHKVENDQLRRRKKRKETRGLNENCNHDLKNLFKGAAVVASIKPGPFAEFYAALLAKGMRPEMARLTLARKIATIVLIVWKKGVCFDAQYLKPQTV

SEQ ID NO: 277913 - protein, 332 aa, unidentified
MKLKKEIIGIDVSKLTLDVFILSLKHHFVVSNNPLGFSKLLQVIWEKLPNKKESLFFCFEDTGKYSLSLCVFLNGEKLSFAMVPALDIKRSMGMVRGKSDKKDASVIAMYAWRKRDEIKPTVFPAGSIVRIKQLLSLRNKLIKHKKACQTGMSDVHDYFKDGDSQFYLDVNKRIIKTLCSEIASIEKEIETLIKYDPEVQNNYKILKTVPGIGKIIAFYMIAYTHNFTKFENARKFCCYCGIAPFENSSGTSLKGRTKVNHLANKMIKALLNMGALSAIRNYPEFKSYYNQRVEKGYNKMSTVNIVRNKIVFRAFSVIKRGSPYINLYKFAA

SEQ ID NO: 277914 - protein, 380 aa, unidentified
MNAITLYVGLDVHKDSIVIAIAEPGRTGEIRLFGTITNDLHALEKALTRIRKAHPDASLEVAYEAGPCGFVIARRLKQLKVPCLVAAPSLIPKQPGSPFKTDKRDARGLARLLRAGELTAVYVPEATDEAIRDLCRARTDAVDDHRRCRHRLKGFLLRHGFRYQGKANWSQPHMRYLRELVLPHPAMKTILEEYLQGIDAAHARVQRIEQSMLTLLETWRLKPAVEALMAFRGFQLVAAMITVSELGDIHRFKHPRQLMTYLGLVPTEATSGPRQRLGAISRCGNTHQRWLLTECAEHYAIPPKISKELSRRQEGQSEAIKALSWKAQNRLHQRFTRLLARRLQRNKTKIAVARELCGFVWAVLRTQSCYQQPTTPRPTI

SEQ ID NO: 277915 - protein, 417 aa, unidentified
MKKHNNSKKKSEPTSKVKTRGPMRRDTKEVLADLVGKLKEKLDPKKPAARSAGEKHKRGELRPNLDRLTVGVDLGDQWSHYCILGLEGETLVEGQLRTTQEDIAEFFQALNAARVVFEVGTHSPWVQELIDSCGHEVLVANPRLMEGPKRRKRKNDRIDANKLARLGRVDPQSLHPMQHRSREVRQDLVLLRARDALVAARTELINATRGLVKSMGARLPKCSSESFAQKVEEAIPGEIREALLPLVRMAAALSDSIQGYDEKIEKLGREKYGHTSLLRQVKGVGPITALAYVLTLENPDRFVKSRDVGPYLGLVPKQEDSGESQPQLGISKAGDRMMRRLLVGSAHYILGPFGPDTDLRRYGLRLCERGGKNAMKRAAVAVARKLAVLLHRLWASGEVYEPLRQGTSATIAPAVAA

SEQ ID NO: 277916 - protein, 405 aa, unidentified
MTSARRIVIGADTHLETIHVAALTDTGQPLGDAEFRTTPTGYYVALRWAQSFGEVFIAGVEGTSSYGAGFTQALQDNEIHVVEVNRPDRSARRRQGKSDPLDAYSAARAVLAGHGLAVPKDPNTGALKALLIARRGAVKARTAAIQQIKDLLVTAPADLPERYRRYTTTVRLVQALARCRPTAHTDPTTIAVLIACKALAQRIEFLQRQTDELTAELDVLVTRLNPALRAAYGVGPDTAAQLLITAGTNTHRLRSEAAFARLSGAAPIPASSGKTTRHRLSRGGDRAANNALHRIALVRWSHDSPTRDYVTRQLAAGRSKKDILRLLKRAIAREMFTHITKPCPIDDYSDLRPTRQARNITLTSAATHFGVWPNDISRLERGLKRDDILAANYRRWLNTQLIYAA

SEQ ID NO: 277917 - protein, 347 aa, unidentified
MRFYTHQHKHYCGIDLHARSMYVCLLDQVGTIVVHKNIPATPEAFLRVIAPYRDDVVVAVECIFTWYWLADLCAREGIAFVLGHALYMKAIHGGKAKNDKIDAHKIAVLLRGGMLPLAYVYPPEMRATRELLRRRCHLVHKRAELLAHIHHTNSQYNLPEIGKKLAYKANRDGVEEHFPDPSVRKTIEVDVSLIDHYDKLLGEVELYITRTAKAHDVQTFARLQSVPGIGQILALVILYEIQDIARFPRVQDFVSYCRLVKCAKESNNKRLGTSGKKIGNVHLRWAFAEAAVLFLRHNQPGKEYFTKLEHKHGKAKALTVLAHKLGRAVYYMLTREQAFDLQRFVSA

SEQ ID NO: 277918 - protein, 344 aa, unidentified
MKKSNLIGIDLAKNVLQVVKVSKHGELVTNKAVSPSKLKQLLAKSTPSIVVMEGCGSCHYWGRLALSFGHEVRIINPKKVKGFLQGQKTDANDALAIATAATQASVKFSQVKSEEQQTLQTLETSRKFLDRELTALNNHIRAYLYEYGITMRRGRKSLRETIVLVLDHLDTRLPQCLKNTLSLLWERYQTTLAQLKEAKAYKAALVKQVEPCKRLLALESVGEVGAAMLYANIGDGKEFKNGRGASACIGLTPKQHSSGGKVIMLGINKKGGNKELRAVLYQGALSVISRLPAEPQTVKQAWLIELVKRVGIKRACIALANKTVRTAWALLATGESYQPVMLKK

SEQ ID NO: 277919 - protein, 424 aa, unidentified
MHNRKATRMKAWQDLTHYAGFDWAKDHHVVVVVDREGRIVADLGFEHSLEGWKSFADKTSAWPNLAVAIETSQGPAVDQLLQRDYTLYPVHPVAAQSYRERKAPTGTKTDHLDAWGLADALRTDGHGWKALQPLDPITQQLRLLCRDEVTLIEQRTALVNQLQQALTEYYPAALEAFDDWTDAFTWEFVLAFPTPQRLVLAGKRRWEKFLHTHKLWRPETVEKRLKLFATADQFKASDPIVVAKSQLAVSLCKLLCTLRKQLALYRKQIEALFRDHPDHDLFGSLPGAKKVLAPRLLAGVGGDPERYGSPDVLQSIAGTAPISYQSGKLSKVRVRWACDKFLRHTVHLWADCFRKTSVWGETYYQQKRQEGMTHVCALRCLGQRLLKILFRMIVTKTPYDAELHARNQKKHGSWVLKLAHGSPA

SEQ ID NO: 277920 - protein, 389 aa, unidentified
MSQAFDASRSLTALEQHNTIIAVVEMSQSKWLVAAVVPGIKRQPLKKLDADQESLLKLLHRWRKEAELAGHPIKRVVVAYEAGRDGFWLARWLRMHDVEAYVIHPTSIAVSREHRRAKTDRLDTELLLRALLGWLRGEKRHCSMVAIPTAEEEDAKRPNRERDSLVTEQTRIVNQIKAILIRFGIRSFRPKLRKAEQLLKDLRTAEGSPLPDNTRAEMYRHLVRLRMVREQIRAVETERLQKLKAEHGRKKGPHAMVRLIARVVGIGVETADMLVNEVFSRRFRDRRAVARYAGLTGSPDESGKRRREKGLARAGNARVRTGMIQLAWRFLRFQEDSALAQWFQTRAADGRGSTRKTMIVALARKLLIALWRLVTTGELSDGIVLRPAS

SEQ ID NO: 277921 - protein, 390 aa, unidentified
MERPVKRNDLSRSLIAFDQATTLVAVVELSRGSWLAAGLVPHLTRQPLKKLRSDPDALLGLLLRWRDQAIKAGGRIKRIVLAFEAGRDGFWLARWLRARGIEAYVIHPASIPVSREHRRAKTDRLDAGLLMRAVLGWLRGEPKHCNMAAIPTVTEEDARRPTRERETLVREQTRAVNRIKSTLIRFGIRTVKVRLRQASKHLEELRGPEGEPLPSNTMAELRRDLARLQLIRGQIREIERARLERLKRAPRQGTHPMMRILARIMGIGIETADMLVHEVLSRKLRDQRGVARYGGLTGSPDESGNKRRERGLARAGNARVRHGMIQLAWRWLQFQNKSALAQWYRTRTAGAKPGLRKAMIVALARKLLIALWRYVTIGEVPAGAVLRPAA

SEQ ID NO: 277922 - protein, 334 aa, unidentified
MYYSGIDLHTDNCYITTIDEQGGLVKQQRVENISELIVNYFQTLPGPHRTVVESTSGWYWLNDLLEDHGIELVLAHAKYLKAIAYAKVKTDKVDSQTLAILLRQNLIPRAHKISRQLRGLRDTMRLRLRLVQQRTATLRRIDSIIVKFNTSAVPDPYRFQLSVLHHTQDSFTTEILALEKSLHPVLIPNDDIQHLLGVPGIGKLSAFSIYLEIDGIERFASPKQFFSYCRLVPAADNSNRRLHHRSSKDGNKYLKIAFTEAAVHAIQYYPEFKTFSQRLARRSNLPVARTVVAKELARIVYYILKNKQAYRGFKGQPISRQKSLQWPRLPSPSA

SEQ ID NO: 277923 - protein, 352 aa, unidentified
MDEKYVAMDVHKASVVIGVRDGTGKMIARAMVETKAQTLKDYVRGLSGTIHLTFEEGTQSAWLYDLLRPLVAECIVCDPRRNKLLEDGNKSDEIDVTKLSELLYLGRLRPVYHGAAGTRALKELAHNYEALVKDQTRVKNRLKAIFRGRGISYEGDEIYDCQEAEQWLAKLSERGVRERARQLYQQLAQLAEWVGGARRQMLAESRHQKAKKILQLIPTLGEISVAQLIATVDTPFRFRSKRQFWTYCGLAVVRHTSADYHFEQGELRRRLKPGPTRGLNRNYNRRLKRIFKTAAQTGSTKGPFKSYYQGLLGRGLRPELAQVTLARKIAAITLTLWKKGERFDPEKLVKSD

SEQ ID NO: 277924 - protein, 343 aa, unidentified
MEVYVGLDVSLKETSICVVDGSGKIVSEGTVLSEPLALAEFLRAQAGSAKRIGLETGPTTTWLWHELRALGLPVICIDARHAKAALSLQINKSDRNDAVGLARIMQCGWYKEVQVKSLPCHEVRAVLNSRAQLVKITRDLENQIRGLLKNHGLVIGKAGGNIFRRSAEELVGEHRLLREAVRPLLAVHEAVRREIAGLTRKLLGLARNNDASRRLMTVPGIGPINALAFCAAIDEPSRFRRSRSVGAYFGLTPRRYASGEVDWTGRISKYGDAMVRTYLFEAAGVLLTRVPQWCKLKAWGHRLWKRIGFKKAKIAVARKLAVILHRMWCDGTDFIWSTKEAVA

SEQ ID NO: 277925 - protein, 465 aa, unidentified
MNTDKKLWRNRKAKKELARRLQSENPGLEVVHPHAAGIDVGNGAHYVAVRPDRDPQPVRRFECFTADLYRLANWLQSCGVQTVALQSTGVYWIPLYDILEQRGFEVYLVNARHTKNLPGRKSDVQESQWLLKLHTYGLLNNSFQPPCKIRILRTYWRQRLQHVTGAATCVQRMQKALTQMNIQLANVISDLSGVTGQLIVRAIVAGERDPQKLAELSHPRIQASRAEIAKSLEGNGRRELIFVLQQELEMYDTYQRRVAECDQELQKHLRAFSDSIPAPVKEALPTKKKKKQNKNNPRFHLADELQRITGVDLTRIDGVDVMVAQTVISEVGLDMSPWRTEAHFASWLGVCPDNRISGDKVLARGTRHVLNRAATALRLGASTLLRSQTYLGAQYRRLRSKLGAPKAITAMAHRLARLVYRMLKYGQQYVDKGAEYYERRNRQQQIEFLRKKAAHLGLQLAPAHP

SEQ ID NO: 277926 - protein, 481 aa, unidentified
MSQENHFDFLDFANGDEVQALYPYGVGIDCHRDFIEICIFVREGGSIRKYEGTYNTSWDQLKKANEWVKTLIRAKSKPTILPDPLRYTLESTSTYHLPVTLAFEGKPSLINPLLASPTRRKTDKIDARFMAYNAMTGLWPSSFLVSKEVQAFRLLMKQRNVHQATATAISNRINNYLLRFGHTVGSAGSVRGATVRALVEDMCSPDYVFQENMYNGLSAGDYICPEGLPVDVKKLILEMYAELDRQNLLKDKYEKQALQTAKNMEWETRDGWVKGSDIIKKLITIPSVGEIMALVWLSEVVTPLRFEVKEKLVAFCGCDPSLKVSAGKVTSYTRRSANTKLHHHLVKIAGTCIQRHKEPFGQWGYSIMKRHAKGGYKKACGAVARRIAIAMYFIHLTNQPFTYEKYNFFKIDVDDKPLEEMGFSSRVYKILNDNGLSTSKDVAQKFLTSELHQLKGFGPKSITEVDAWIQQNNKGKVGNKN

SEQ ID NO: 277927 - protein, 316 aa, unidentified
MYPIYYIGLDVHKRTISYCVKRVDGVLIEQGTVAAERKALLQWISNLPGSWVGAMEATMFTGWVYDFLEPHAFELKVAHPEMLKAITAAKKKNDRADAEKIADLLRINLLPECYMAPTELRELRRILRYRNTVVRTATSMKNKMSGLLMEVGATYDKRRLHGKTYFNSLLERVEDVPDSVKQLLKLSRCSLEMFTAVQKKLLKALKEDDLIRQRVKRLMSIQGVGEVLALTWVLEIGEVSRFSSSRQAISYCGLCSAQHQSAGREHRGPISKKRNKHLQTMLIEAAKLTPRWNAELALLHAKEPAEKTSSIRYRSP

SEQ ID NO: 277928 - protein, 409 aa, unidentified
MDGRASPGPRHAGVDWSWEHHAVCILDDVGVVLDRFVVKHEAAGLKELCRRLGGLGVDRVAIERPDGPAVQALLDDGFEVVVIASRQVKALRLRYGSAGNKDDRFDAYVLADVLRTDGHRLRPLRPDSDATRALRALVRARKDLIKHRLALANQLRANLLQAFSGAIGLFAELDSPISLAFLKRFPTAERAAWLTERRLHAWLRSVGYGGRRPTSRLLEHLRDAPAGLTGEVGDGHGIVTVQLVDLLTRVRSRIDVLDERIREALELHPDAQIFTSFPRAGTNRAALLLAEIGDCRERFPDEASLAAAAGVAPSTRASGKHWHVSFRRGCNKKLREALIDFAQDSVQASPWAEDIYRRARDRGMRHPHAARVVARAWVRVLWRCWTDGVAYDPSRHAGFTRLEGGPRLT

SEQ ID NO: 277929 - protein, 395 aa, unidentified
MRFYTQQHPFYCGIDLHARTMSLCILDQAGETRLHRNLTATPEALLKAIAPYRDPIVLAAECMCTWYWLADLCAEQGIPCVLGHALYMKAIHGGKATNDQIDAHQIAVLLRGGMLPQAYVYPAEMRATRDLLRRRMPLARTRGALLAHVHNTNSPYNLPTIGKNIAYKTNRDGVAERFADPAVPQSIEVARALITYDDELLRDVERTIVNTAKRHAANTLYLLHTVPGIGKILSLVLLYAIHQIDRFPRVQDFASYCRLVTCAKESAGKRSGTSGTKIGNAPLKGAFSDAAVLCLRDNPAGQTCLARLEKKHSKGQALTILAHTLARAVYDMLQHKTAFAMPTFLNSYGRGVGKRDASLDKHGMTLTIHALQCMKDCVSERRCASRALSLSATFA

SEQ ID NO: 277930 - protein, 329 aa, unidentified
MNADATSGIDVSAKTLDVSVLRADSDKRKRRKFSNDGQGHQQLIDWLRPFGVTRVVCEATGVYHLDIAFALTAAGVPLMVANPRQVKRFIEARARNTQTDVIDADELAEYARRMDFVPWKAPSINGFELHKLGRAIGQLTKRHTAMLNRLHAARASVHTPKSILKSAEREVQFIERERVKLSKEALRLVKADPDLTRKFELLVSAPGIAEVSALAILAELIVLPPNLAGKAWVKYAGIDPMSKRSGTSVNTNAHIAKRGNARLRGALYMPAMTARQRDPHMRDFADRMIANHKKPIEAIVAVQRKLLLSIHAMFRTNQAWIPQPTPKTA

SEQ ID NO: 277931 - protein, 343 aa, unidentified
MNEISMIGLDLAKNVFQLHGVSASGKVVLRRQLRRGALEKFFAKLPPCTVGMEACGSAHHWARVISRYGHQVKLMPPAYVKPYVKRNKNDGRDAEAICEAVGRPSMRFVPMKSVEQQASLAVQSTRALLVRQRTMIANSLRAALSEIGIVAKQGLEGLRELMERLQAPCAEIPEMMRGALLLLAQHWQALDADERGLERQITKAARCDRDARRLMAVPSVGPMIATTVLAKVPDAKVFRSGRDFAAWVGLTGKDHGTGGKHRPGRISKQGDRVLRALLISGASAHLRQQIARGVSDPWLRDLLARRPYKVAMVAFAAKTARIIWAMLAKGEVYRDRASASAAA

SEQ ID NO: 277932 - protein, 493 aa, unidentified
MGACELESGDVALAAIPIRKMTIGIAQTLLLITDWRIAMPKRTTGDRPELKPVNVGAAAIDIGSKMHMAAVNPASTDVPVRSFGTFTQDLHDLADWFKACGVTSVAMESTGVYWIPVYEILEQRGFEVILVNARYAKNVPGRKTDVSDAAWLRQLHSYGLLRGSFRPDAEIATLRAYLRQRERLVEYAAAHIQHMQKALMEMNLQLHHVVSDITGATGMRIIRAIVAGERNPDVLATYRDVRCHSSIETIRAALVGNDRHEHIFALTQSLELYDVYQAKMLDCDRKLEVLIAALNNTGAKPVGKLSKPRIKTKQVNTPTFDVRSALYGLLGVDLTEIHGLGPSLALKLVGECGTDLRAWPSAKHFTSWLCLAPGNKISGGKVLSSRTRRSSSRAAALLRLAATTVGRSDTALGAFYRRLSSRAGKSKAVTATARKIAVLFYNTLRHGMSYRDPGADHYEQQYRNRVLANLQRRAKSLGFVLQAIPGDADPAVS

SEQ ID NO: 277933 - protein, 352 aa, unidentified
MISVGIDVSKGKSTVCILKPYGEIVSKPFNITHTQKDLSELSSMLFRLNDEVKIVMEATGIYHLPVLTYLQEKGFFVSVINPYLMKSYRNESLRKAKTDKIDSRIIANYGIDHWFKMKEFQTSGEIYEELKLLGQQYRHYMKLHLLSLAELTHLLDLTMPGIKNLLASWNETNRKDKRSDFVERFWHYDVITSMSEQEFTEEYILWAKEKKYVPSQEKAKVIYALAQESIPTLPSETSSFKMLVTEAVRVLKEVDATLGLILSRMQEIAKTLPEYSVVREMGGVGNTLAPKLIAEIGDVRRFRNGKALVAFAGIDPPPYESGQFVGCNRKISKRGSASLRKVLPAVNVPGND

SEQ ID NO: 277934 - protein, 330 aa, unidentified
MSIFAGIDVSAHELTVALLQPDQKAQLSTFEQTPASHKALAKYLKKRKVQQIVMEATGIYYLDAALALHAAGLTVSVINPRSAHNFARTLLESSKTDRIDAVLLARYAQCMRPQPWQPPNIELLAARDLGRRLNQLAGAKTAAQNRLHALSSKQCTDRLLIEDVEDEIQSLERRIERLGQAALERIKQHPELHRMHQILISATGIAQTSAIKLIAELCLLDRSMTSKQVSRHAGLSVKLSESGTSQSKPGRLSKAGNAYLRAALFMPAMVMVQHDPIAKAHYQHLTDRGKKKIQALCAIQRKMLTGLWAAIKSDEPFNTAKLFEILPEKA

SEQ ID NO: 277935 - protein, 369 aa, unidentified
MAEITRALIARVGVDLSKRVYQVHAADKAGRVVLVKAMSPERFFAWCADLPAGCLVAMEACGGAHHVARRLRQTGLDARLIAGHFVAPYRMAGKSGKNDANDAAAICEAASRPRMRFVPVKTAEQQGHLCVHRLREGFKEERTALINRIRGLLTEFGLVFPQSPEALRKVLADVIEDATNELPGPARLALQRAHLHWIEIDLQMAWCDERIAQHVRTDARAAKAATLLGIGPTTASALVVSVGDFHQFDNARQFGAWLGLVPSQNSTGGKAKLGGITKRGDDYLRTLLIQGAKSAVMSAGKRSDRISLWLVQLKERVGWQKTVVALANKNARILWAVLTRDTPFNPDHLPEPPPARCCLPRASAPAPAH

SEQ ID NO: 277936 - protein, 392 aa, unidentified
MYSLFFMEPYRKEHIMHNKNYISVGIDVGSAFSFMTILAPDETVILKPFKITHNNKDSLERAVSEIKKAEELYSLESRIFLESTGIYHFPLFCYLVDCGFNASIINPIITHSTKNGNIRKVKNDKIDSKGIAKLGLSKDIPVSQFPAKLVLELRSLTRKYYDLTDERSAHINKLKGDLHTVFPQYLDVFCDVTGKTSTMILRQYGTPDKILRGHKKTMIEKISKASRKGLAKASERYEKLCAAANAAKTFGCQIDSIYFNIFLTLDLVEKLDSALDSILNRIRQLITFNKNEKFIQQIKLLNTIPGVGFLTAVTIMCEIGDFSAFRNPKQLFAYFGLDPEVNESGKFVGTQLHMSKRGSRIARRAIFAVALASIRTKRNGEASIHTSVSITN

SEQ ID NO: 277937 - protein, 404 aa, unidentified
MELTAIYRCVAALDVHQSKLTVCILYENESGEIITELKEFGGFKRDRRAMADWVASFQPELVVMESTGIYWKSPYAALEKQGLTIWVVNARHVKQVPGRKTDFADAQWLAILARNGLLRGGFVPPAVFRELRLIARQMQKLTGILSGEKNRLHKILSDGGIRLGVVVSDLHGKSAKAMIKGLLAGESPEQVLKYASNRLKASEEELLDALAGDLSPSHQFVLTELMAHIDELEARIETFRQALLQGLAPYQAILRSLQTIPGLDETGAALLLVEIGDDMSAFGTPERLASWAGVCPGNNESAGKKKTGKTRKGNPYVRRILCEASNAASRTQCRLQDMFKGLLIRRGRKRAIFALAHKILKIVFLLIERGDYYRDATVDYEKLSVQRNAPRWIKTLKKYGYIAA

SEQ ID NO: 277938 - protein, 354 aa, unidentified
MNSTQNKKIEQVKETTMIVGIDVGSEKHYFRAFNWRGIELTRKPVAFSNSMEGFNSFYNSVVELMQKNELKEALVGIEPTGHYWFDLGQFMGEKNIKFVMVNPHHVHKTKELDDNSPSKNDRKDPRVIAGLVRDGRYFYSYMPTGVYAELRNASNRRFVLVEEQTRAKNRLQKWVAVYFPEYKGIYTHIDAKGGLLVLKQAPTLEEIVRLGVEGIIKIWKDAKLRGNGHKKAMLILNAAMKSIGLKAGLTEARMEIQDLIEDYELQTKRLERVNDLIEELCQQVRYADKLLEIKGIGITTVAGFIAEVGDITRFDSTKELQKLAGLELVADSSGKHDGNKDKQKRTQASQISTF

SEQ ID NO: 277939 - protein, 333 aa, unidentified
MNKKWFIGIDISKLSLDVAIYSGDGDQHENHVKITNDIPGFKNLLVWLKKKKVDYKQSLFCMEHTGLYGQDIQYFLSRKGITYCMESPLQIKRSLGLVRGKNDKVDAQRIAWYAYTFRDRIKASHLQPEALRILQRLLVERKHYVKQIVSYRQQKADVISHETKQASKRKTKMLKYLDDMLLQVESQMMEIITSDSVINNNYNLLLSIPGIGIINAITTIVNTQNFTAFSNARQYACYIGIAPFEHTSGTSINGRTCVSKFGNKQAKAELTQAARSAVMHDPGIKSYFQRKYNEKGATRDAYGIVLNAVKFKLVLRIFAVVKRGSQYVKLTYA

SEQ ID NO: 277940 - protein, 355 aa, unidentified
MERYIGMDVHAGSCTLAVISEKGRKLKDFPVETNGQALVEAVRMIPGHKHLVMEEGLQSAWLYETLNPHVDELVVAGITQSRGPKSDKRDAYGLAEKLRVGNLDKYVFKSPRQFTMLREFSRAHMTLVGDVIRTQARIKSVYRSRGVLVTGVDVYSSRRREEWLKQLPSSTKIRATRLYDHLDFLLEQKKQAEADLLREGKKHAIVKILETAPGFGPIRAARLVPIVITPHRFRTKRQFWSYCGLGIVTRSSSDWVQTADGAWIKSRVPQTRGLSRQHNHFLKSIFKGAATTVVTQRNKDPIHARYERLLDGGTKPTLAKLSLARMIAATVLRMWKNEEEYDPGRAGLPTQTRKG

SEQ ID NO: 277941 - protein, 314 aa, unidentified
MGGVNAAIEVGKQQLVVQLGSQGEQFTEANEPRAIKRIAKRLGQAGCERVLIEGGSYQSVLIAGLRAAELPVLIVNPRRVREFAKSIGQLAKTDTIDARLLALYGEQTQPPLRELPDEQSQALRALWVRREQLIEMLGMEQNRLEHVAEKAKTVRHNLRSHIDYLRKQIKQADDDLDREVRNSSLWDKYEVLSSVPGVGMVLSVALLSDLPELGRLNRGEIAALAGVAPFNCDSGTLRGKRKIDGGRSHLRRVLYIATIAAVRCNPVLKPFYLRLRAAGKPAKVALVAAARRLLTILNAMLKTKTAWRPPCLVA

SEQ ID NO: 277942 - protein, 344 aa, unidentified
MREIIRIGMDTSKHIFVLHGVDAAEQVVLRKKLSRKQVLDFFAKLPPTVIGMEACGGSQHWARELGKLGHEVKLMAPQLVKPYVMRNKNDGRDAEGLCEAMGRPSMRFVPVKTAEQQAALMLTGIRDGLIARRTQLGNTIRGHAAEFGLIAAKGVDKVEPLLARIAQDETLPALARELFVVLGREYTRLEGELGEIEAKLMAWHRSDATGRRLAQIPSIGPIIATMLVMKTPDPLAFRSGRHFAAWLGLTPQDHSTGGKTRLGKITRAGDEDLRRLLVIGATAVIQQARRGRGHHSRWLLALIKRKPPKLAAVALANKVARIAWKLMATGESYDVARMNPIPAT

SEQ ID NO: 277943 - protein, 358 aa, unidentified
MRFYTQQHTHYCGVDLHTKTMFLCILDNQGNIVLERNMLANPKTFLKAVAPFREDLVVAAECIFTWYWLADLCRREGIAFVLGHALYMKAIHGGKTKNDRQDAHKIAVLLRGGMLPQAHVYPKERRATRDLLRRRTFFVRKRAELLTHLQNTSWQYRLEPLGRRIANRSGREGIVEAFSDESVQVSVAADLELIGYYDRVIHRLEEHLTKTARIDDGKTYDLLRSIPGVGKILGLVFLYEIEAIGRFNSVQQFCSYCRLIRPKKTSAGKPVGLPSYKKIGNAHLKWAFSEAALLLVRESKPVKTYLERLSTKHGKGKGLGILAHKLGRSIYYMLKRDQYFDLRRFLNTDRAQDVSVAA

SEQ ID NO: 277944 - protein, 297 aa, unidentified
MWSTTPLDGDELIAKFKAAGVDLVVLEATGGYERGLVCALQDGGIAVARVNPRQARDFAKSMGVLAKTDQVDARTLRDFADVLARHLDRARYITPLFDEQRQALADLMTRRRQLVDLRVAEGNHLEHAHHKHAVRSIKNVLKTLDRQLAAIDREVDDHLDRHFGPQRALLDSVKGVGPVTILTLTAALPELGQFGRRQIAKLVGVAPLADDSGPRKGKRRIWGGRSDVRAVVYMAALVAIRHNPVIKVFYSRLIAAGKPKKVAIVACMRKLLTILNAMLRDHATWDASLHPMQPVSA

SEQ ID NO: 277945 - protein, 346 aa, unidentified
MEHYAGIDVSLELSSVCVVDAQGKIVKETKVASEPEALVSFFEALGFAVKQIGLEAGPLSQWLHAGLTQAGFETVLLETRHVKAALSAMTVKTDRKDARGLAQLIRMGWFRPVHAKSMRSQEVRALLVARKQLLGRLIDVELSIRGILRGFGLKVGPVTRKGFEARIRELVTGQATLERIAGAMLSARAALKVEYEKLHKAVLSIVRDDAVCRRLMTVPGVGPLVAVTYKSAMDDPNRITKSKAAGALFGLTPRKYQSGEKDITGGITRAGDEMVRTVLYEAANVLLSRITRFSKLKRWGMDVAKRRGSKRAKVALARKIAVILHRMWVDGTTYRWTEAKPIAAQA

SEQ ID NO: 277946 - protein, 343 aa, unidentified
MQTVTTIGLDIAKSVFQVHGVDAAGQVLIRRQLKRRYVLAFFQKLPACLVGIEACASSHYWSRELQALGHSVRLMPPAYVKPYVKRQKNDMADAEAICEAVTRANMRFVPTKTPEQQSGLMLHRTRHLLIRQQTSVINAIRAHFAEFGITAPVGRTGIEELLRVVADPSDKRVPELVRTCLAALGSQLLGLKKQILQFDRMILAWHRSNQTSKRLNCIPGVGPLLATALTASVADAKSFRSGRNFSAWIGLVPKQHSSGGRERLGSISKQGDRYLRRLFVAGALAVIRYAKLHGTNHRPWLTALLARRPTKVAAIALANKLARMAWALMARGGRYNYPIALRP

SEQ ID NO: 277947 - protein, 344 aa, unidentified
MSNLDTCGIEVSAKELVVALRWQGELEPLRNFTNTPEGHELLLRYLRRAGRVVRVCLESTGLYGLDLALALSAQEGIEVMVANPRAVRHFATALMQRSKNDQIDAGVLEQFAARMPFQAWQRPSPAALALHALARRLQELVEMQTAEKNRQHAAGLSQAIPAAIRRDLARSLRAQERAIQRLTREARKLIAQDPQLAERFELLDSVPGIGQTSAVQILAELAVLAPDLQARQWVAGAGLDPRQYSSGTSVHKKPRISKAGNKHLRRALYMPALVAVQHDPHLRAFYQRLRKRGKLKMQALVAVMRKLLHALHAMFKSHQPYDGSKLFRLSSDPLQEVIRALVAS

SEQ ID NO: 277948 - protein, 312 aa, unidentified
MTKLICGVDVSSETLDVVLRPGAEVRRFTNDAPGIEALATFCQEKGVVLVAMEATGGYEKLAFVLLWGHGVPVALANPRSVRWFAEAMGLLEKTDRIDAGVIAWFAETKRLAPQPPASSTQERLEALVTRLRQLTDLRTAQTNQRRLVGEATVLAHFEEMLALIARQIRTLETAVAELIAGDPLWRELDKAFRTIKGVADRTVARVMAEMPEIGTLSNKAAAKLNGLAPLAQDSGKSNGRRPVRGGRADLRSILFVVAEIVRRHDPDFAAFHKRLTAAGKPKKVIRIALAHKLLVRLNAKARDVRSRLASPA

SEQ ID NO: 277949 - protein, 322 aa, unidentified
MQASVEVVGVDVAKAELVAARYPAERISEVIPNATAAIQKWLQTLPEGCIIAMEATGRFHQLLAQLAHAEGFVVYVLNARDVYFYARAVSARGKTDRLDAGVIARYVAEHRDRLRPWQPAQGVPSQLQELLGRRVMLTHQLVTLRLSLNEVATLGETAHRLEQAYQTAFEEIDRQLEQLVDSEPALKQGVQRLRTITGFGAQAAIRLAALFSRIKFDNANAVVAYSGLDPRPSDSGTHKGTRHLSKRGPALLRRQLYLAAFAACRSKALGHIYTSLRAKGFATTQALTILARKLLRVAWAIWQSGKTFDPSMVGTIGACQKP

SEQ ID NO: 277950 - protein, 413 aa, unidentified
MDVLHPRCCGLDVHKSSISACILLREAGRVQKHQRRFGAMTQDLRELAEWLREFGVTQVAMESSGVYWKPVWNILERQFTVVLANAQHIKNVPGRKTDQKDAEWIAQLLQYGLLRPSYVPCEIIRDLRDLTRMRASLSQEASRLSSRIQKVLEDANVKLASVASNALGKSGRAMLEDIISGEDDPELLASLALGHLRVKIPQLRLALEGNIRSHHRFLLRRLLDQMQFVEHEIALLEERLEDIGRQRPELLQAVARWDTIPGIDRVAAWALLAEVGDNMAQFPTAEHLASWAALCPGNHESAGKRLRGTTRQGSPWLRRMACQCAWAAARTKNTYLSSQFRRLAARRGKKRAIIAVAHTLIVIGYHLQKNQSNYDDLGGNYFDRIHSDGLKRYLVKRLQQLGHKVTLEPIEAV

SEQ ID NO: 277951 - protein, 340 aa, unidentified
MEIKRIGLDLAKYVFEVHAVDNDENVVLRKTLRREAVAQFFAELEPCVVGMEACCGSHYWARVMTDLGHEVRLISPQFVKPYVKSNKNDRNDAEAICEAVGRPSMRFVPPKSPEQLEIQAVHRIRQRVVANRTRLVNQVRGLLGEHGVVVPRDINRIRRTLSEIADGRSGGFGGLFVEMLCDIREELAELDARLAGYNQRIKSLYRSNEMCQRIGQIEGIGPITATALVAAVGDKSCFRNGRQFAAWLGLVPKQHSSGGKARLFGISKRGDRYLRTMLIHGARAVLGRSAGKTDTRSQWINRMRERRHPNVVAVALANKNARIVWSLLSNDQEYSRGHMV

SEQ ID NO: 277952 - protein, 473 aa, unidentified
MGSCHSKADKKGRVHQAKAARFSRRYTRVEDMPVVNRKACGIDLSGASTHFTTLEIGDELEEREFGATTPELGAVVNYVAMHGITTVAMEATGVYWMVLYDMLETAGIEVYLVNPSHIKQVPGRSKDDKLDATWLWRLHNYGLLSASFRPSEEIRPLRSWYRQRKRLVEFSADELRRQQKALDMMNIRIHHAITDLGGVTGMRLVRAIVAGERDPHVLAMLRDCRCQCSPEELEDALTGFYVEHLVFELAQALARYDMLLKQIAEIDLKIEVVLQHLLPKVAQFTDVAAALEAVKHPLPTGKHVPLFDVTAYIQLITGHDPTTLPGIGPMSVLGLLAELGQDMTKWKTEKHFGAFLRIAPVKRISGGKILSVRTAPGLHPAAVIFLQAAAAASRSDSALGAFYRRLAVRIGKAKAMMATAYKIARRYYNLMRYGQAYQETGAAQYEEKYRQRQIAYLEKKAKQYGLVITPIAA

SEQ ID NO: 277953 - protein, 419 aa, unidentified
MTQREDSKIIGIMHPICCGLDVHKETISACVIFPDKDGVDQYDIKVFGTFTDDLMQLRSWLLDHGCPVVAMESTGIYWRPVHNVLEDTVQVVLVNARDIKNVPGRKTDIGDSKWLAGLLRHGLLRGSFIPMKEVRKWRDLTRLRKKYVHTVGDYRKRAHKLFESANIKIDSVVSDLFGVTGRNLMNLLVSDKKALTLADIHLCVRGKLKGKEEELYRSIQGFFSDHHRFVLKRLLHTIDLLEEEISMFDEQIRHLMKGHNALLDRMKKAAGIADVSSCEILAEVGPDVTAFPTGEAMISWAGLCPGNNESAGKRKSGKSPVRKHHLKTIMIEVAWAAVKKKGSYFKDKYYRLKSRRGAKKAIVAIAHRILMGLYYVIRDGVEFMDLGEDYLAQRNKAQKMSHLRKQAQLLGFNLVPQTT

SEQ ID NO: 277954 - protein, 355 aa, unidentified
MKLTKKEITGKDNEQENYDQYISLDWSEKTMAVARMRSNSMNPKVIEERSDIKRLKKYLAAIGGRKILTIEETTSTHWLYVELKESVDKILICDPYRNRLLSEGAKTDKIDAGKLCQLLRGGLLKEVYHSDDQSYKIRKIVSAYDDLVKAGVRVQNQKSAIYRGLGLKYKKETIPKDDKIMHYVEESQNRSIQLYREEKKEYETLFSQLKKNNSVIKRLTEISGIGNIFAVTIYSTVIDARRFTTKYKYWSYCGLTYNMKESGGRNYGRKRPRHSRKLRGVYKTAALAAIGGKNDIREYYEYLLSEGYAEKKAQNAISRYIAKVSYGVMKTGESYRAYQWRENNKVTSEKITVNN

SEQ ID NO: 277955 - protein, 317 aa, unidentified
MERMEFSRKTAGVDVGKHHLDVAVHGLEDLARVSNTAAGHEELTDWLKARGVGRVGLEATGGYERAARLALEAAGFEVVVHQPLEVRRFAQLKRRRAKSDRLDAQLIAAATAQVEAVRAAQDPRLAELAERMTAYEQITDQVVELKTFLEHVTLKDIGSALRTQVRALEALKQRLASQILTAIKAHPDLLARYRLLVSLPGVGPIVAATLLIRMPELGGMRRGQAASLIGVAPFDRDSGQWKGLRFISGGRARPRRMLYLAALVAKRFDPGLKAFGETLRARGKPPKIVTVAVMRKLIEAANLVLQRGQPWVKNMPA

SEQ ID NO: 277956 - protein, 438 aa, unidentified
MSNKVIFNLDELFISVGIDVGADFSWMSIALPNQQFVGKPYKILHNSIDSLTTAVSKIKEAEELYSLESRIFLESTGIYHYPLFCYLRDKGFNCSVINPIITKNSTNINIRKVHNDRFDSKKAALVGLKPDLKVSLMPSDLALNCRNLCREYYDLIDNRSAYVNKLQGELRMAFPQYLGIFSKVTINTSLTLLETYTSPSAFLKADKQEIIDIIKSTARFGLTYAQNKYNAIIQAATDANQFGYIIDSNIKRIRLYISFIRKYDEEINSILESLHELVDANEDSDFVKQIHLIETFKGAGFLSAVSIMGEIGDFSAFSKPKQLFAYFGLDPAVKQSGKFEGTKVQMSKRGSAIARRVIHTLTLQSISISRNREAKNPVLREYYLKKCDSKPKLVAMGAVSHKVCNMIFAILRDNKPFKIIAPQEHIKQYNSAKCDIAA

SEQ ID NO: 277957 - protein, 422 aa, unidentified
MKKRMYRAVDVKRVDWERLSATVEGQRVVVGVDVAKERPYAALRVEGGEVVLLWKWRQPWENTQVVERLSGLGASSVEVVMEPSGTYGDALRSQLEGAGIEVFRVSPKRCHDYAEVYDGVPSHHDGKSAVLLADLHVQGKSRRWPVASAEDRERTATLAAWGLYFGTFQRCVNRMEAQLARYWPEVTELLALDSATLLELLMAYGDPRRVAASVAGARRRMRQVGGRFLSSAKIEVVLASAGETVGMEMVAGERWALTELAREVRRLQKELYRVKRRIRRQVAEDPSTRQISEVVGESTALGLRVSAGDPRDYPSAASYLKGLGLNLKVRSSGKFKGQLRLSKRGPGLARQLLYMAVLRWIQKDRIARQWYERKVARDGGLRRKALTAMMRKLARGLWHVGRGEVFDSRRLFDVRRLGLSAG

SEQ ID NO: 277958 - protein, 364 aa, unidentified
MAQEHLQAEAVLSVTIGIDPHKGSHTAAALDSRQCVIGQIRVLATPAGYRELRRWAAGWPERRWAVENVGGLGRPVTQWLLGDGETVIDVPPKLSARIRVLSTGHGRKTDPADAVSTALAACGPADLQAATLESHATTLRLLSDRRDDLVARRTQVLNRLHALLADLVPGTVPSRLSAETAAVLLRRSRPPAGPRRIRRLLASDLVREARRLDSEIAALEARIAEAVTASRTTLTELFGIGPILAAKILGRVGDPRRFPSAARFASYCGVAPIEASSGDVVRHRLSRAGDRQLNFALYMMALCQARQHSEGRAYFLRKRAAGHSDKEALRCLKRRLADVVYRQLVRDARPAQSTAPSAAPAPRA

SEQ ID NO: 277959 - protein, 399 aa, unidentified
MLAVGIDISKSKSVAAILNQDGSMHTSPFEFHHTQPELDAFIKYILNSNQSATILMENTGHYHYPVLKAFREAGLPVCMVNAYQIKKFGDMDLRKAKTDKKDAVRIARYALEKSYSLVPYTSMEQKYEDLRFLARQYNQRMLTLKTNKVFLLNLLDETMPGITNILPLTTRTPETSLSVLFINRFKSYDRIKKMGKSRFLDAFEKIARKSRNRQTKTYGLAIYEAALRNITTRGENEYTLAAQDQCLELVCESQKAADSIILKMKTLAETLPEYAVLRSMAGVGNRLGPLILAEIGDIRRFHSGKALNAYAGNDAPPYQSGIFESHNRHISKRGNAALRKYCFEVMQALKLTRPQNDPVYLFLLKKEQEGKPYNVAKMAGVNKFLRIYYARAMETLKQQ

SEQ ID NO: 277960 - protein, 362 aa, unidentified
MSYRNRNDAQWREKPERTVGLDLGDRFSHYCILNAHGEVIEEGRIATTEKGLRQQFANVPRQRIALECGTHSPWVSRRLQQWGHQVIVANPRAVPSITHSVSKNDRHDAEQLARLAHSDPELLKPIQHRRQTRQQDLNWLRARHTLVRARTLVINSLRGLAKSAGGRLPNCSSESFPKRVAQHIPASLTPLATALLEQVAALNTHIAALDQQIETLAQRYPEIALLRTAPGVGPVVAAAYVLTLDRPDSVAHSRQMGARLGLRPKQHQSGDRDPQQGITKISNRYLRSLLVQSAHYVLGRFGPDSALRRWGLQLAGTGNQGAKKRAVVAVARKLAVLLHAMWRTGQSYRPFPPVRAVPHSNP

SEQ ID NO: 277961 - protein, 317 aa, unidentified
MATSTASFVGIDVSKHQLDVAVRPRGETWTAAHDEAGLSALVARLRALAPTLIVLEATGGWEVALAGALVAATLPVAVVNPRQVRDFARSTGTLAKTDRLDAQMLAQFAEAVRPEPRPLPDAQAQELTALLQRRRQLVEMLTAEKNRLPLASRRIRPQLQTHIEWLHKQIAQFDEDLRQLIRSSPLWREKDDLLRSAPGVGPVLATTLLAALPELGQLTRQQIAALVGVAPLNRDSGTLRGRRTVWGGRAQVRAVLYMSTVVAVRHNPVLIAFYQRLRAAGKAPKLALTACMRKLLTILNAMLKHHRRWAPVRAQHA

SEQ ID NO: 277962 - protein, 353 aa, unidentified
MNSLTDLREVVDVVIGVDTHVLTHSAAVIDAATGGVLGEITVEATAQGYVELVAFADEHATLRAWAIEGTGGHGSGLSRHLTGRQEIVVELDRPKRAKRRNGAKSDPLDAIRAGREALARTRLGTPRSGGDRQGLSVLLAARRSAVHAATEAQQQVFSLVIAAPEPIRARFRGQKLPGMLTTAAGLRVHPSWDVETTTTVIALRSLARRFRVLTKEAAGHQKTILAIVRSWRPDLLEQLGVGPIVAATVLCAWSHPGRIHSEAAFAMLAGVAPIPANSGQVTNRYRLNRYGDRQLNRALHTVVQSRIRYHDPTRDYVARRTSEGKTGREIKRCLSRYIARDLYRLLESGPNIA

SEQ ID NO: 277963 - protein, 412 aa, unidentified
MEILYRACAGLDVHKETVVVCVRRSGAAGQVHQEVRTFGTMTRDLLALSDWLTTQEVTHVAMESTGVYWKPIFNILENQFQVILVNAQHIKHMPGRKTDVKDCEWIAQLLQLGLLRASFVPPRPVRELRDLTRQRAQLVQERARTANRIQKVLEDANLKLGSVATDILGVSGRDMLEAIVAGETDAEKLAELARQRLRAKIPALRLALEGRVTEHHRFLLRTLLDHVAHLETVIGQYSARIEAVLSPFEAAVDRLKTIPGVDRRAAEVIVAEIGKDMSQFSSDDHLSSWAGVCPGNDQSAGKRRSGRTTKGSRWLRTLLVQVAWAASRTKGSYFSAQYRRLAPRRGKKRALAALGHAILVIAYHLLKDGTTYQELGADFFEKLEPERLVRYLVRRLEKLGHKVTLEPREDAA

SEQ ID NO: 277964 - protein, 316 aa, unidentified
MAKAVCKITLGIDVSKDELLICDWHSEQITRLVNEVAAIEHYLDGLSGPVQIAIEPTSNYHLALLEHAHARGFAVYLINPRQLVHYRKAVNVRNKTDPADAWLLARYLAHESLALRAFNPPCARAQRLWALLKRRGVAVRTRQTLKQSFREIRLPAKALFTEIQRVIARIDQQICALVRELGWWADYQRCQSIPGIGTVNAAALLAVYHRGAFASSDAYIAFIGLDVRVRESGKFKGQRKLTKCGEAEIRRLLFCAAQGARSCRSFDNYLQRQLDKGLSKIAAKVILARKLARIAFALISKQQTFKNQEIIYSQSP

SEQ ID NO: 277965 - protein, 428 aa, unidentified
MKKNSTCKLEAITPETLIVGIDIAKRLQWARFTDYRGLEIGKALKFKNNKNGFETILTSIKALCKFKKLDKVIVGMEPTGHYWKPLANYLILNEITVVMVNPYHTKRAKELDDNSPTKSDKKDALTIARLIRDGRYYEVYMPQDVFAELRVLSNARVSLMKRNNAIRNTITAILDEYFPEYATVFKCPLKGKASLQILKSCPFPSLILELGTEGVLGEIRKAVKKTVGLKKARQLVEAAKESVGVTYGVASAKMRLGLLLEELELLTKQLGQIEEAMEEALADTGIKETILSIPGVGIVTAAGFLGEIGDPLRFEHPRQISRMAGYNLVEDSSGKNVSGTTISKRGRKNLRNVLYQMARTMVAVNTEMKELYQYLKTRPSNPLKGKQALVVISKKAVTIIYNLVKKQMSYEAELALGDYRRTQIQQVA

SEQ ID NO: 277966 - protein, 359 aa, unidentified
MVRHIFVGIDLGDKNSVARIALDQEKSQRRAFINNRQGRARLLEQVKRQAEQAGGAKIVMAYEASSCGFVLRDEAEAMKIQCWVLAPTRMEKSVDQRKHKNDDRDADDVLEKLRGHVLAGNRLPTVWVPDRQTRDDRELIRARLDLSEKQTQVKAQIQMLLKRQGLEKPSGLGAAWTVAYRRWLDGLKEWTGLGWGRRQALSSLLSQLSFIEAEIRRMEKPMEQLADEPRHQAIVAELTQEPGVGRLTALVYRTEIGYAGRFRRGRQLGKFTGLTPTSHESGQQNDRKGHISRQGPPRLRKILCQASWVHIRHDPQARRVYQELVCRNPKKKKIALVAIMRRLAVRLWHRMRQIELAQA

SEQ ID NO: 277967 - protein, 416 aa, unidentified
MTDPEKSSTFERYLAIDAHKHYVVVGGLNAQLEIVLPAHRMDLERYPQWTKENLTSRDCLVIEASTNTWDLYDITAAVAGKVVVAHPLAVKLIANARVKTDKQDVFRLARLLAGGLIPEVWVPPVPVRELRSLIAHRRRLIQMRTMTRNRLHSLAHRHNLILPEGGAFTDKNQGWWKGLSLSLVEKLHLQQNLALLEFLDPEVKAVDAELARLSTCDPWKEAFPYLMQLPGFGLIVTMTVLSAIGDIQRFPTSQQLVGYSGLGASLHQSGETNYSGHITKQGRRDLRFALVEAAWTAITSSPYWREQYQKLSHRMATNKAIVAIARRLLVAVWHVLTERTIDRRADPDMIASKLMIWSWKLNDVQRGGLTSRQFVRYGLMRFKIGQEITRIRRLNNRPIASVEEVLERLPDLNLNI

SEQ ID NO: 277968 - protein, 339 aa, unidentified
MENNNNPYYKHYLSIDWSQQDVSIARMRAGSNQPETKLFPSDIKKIKEYLKGLQGKKILTIEETTGSHWLYVELLESVDKILICDPYRNSLLKEGAKNDKIDARKLCLLLRSGLLKEVYHTSNEDYKIRKLASAYIALVKSGVRIKNQNSALYRGEGLKYKKDKIKKGEEILSFVEGQQKRAIKLYEEEKKKYEEVFKELKKKNEVIKMLCQVSGIKETSGVKIYSVVIDARRFENKYKYWAMCGLVKHDRESGGKNYGKKNPRYSRILKNVYKSAALAAIGGNNDIREYYEVLLQKGYPIAEAKNQIARYIAKVTYAVMKNKKPYKAYQWRELNKQKS

SEQ ID NO: 277969 - protein, 343 aa, unidentified
MDHFAGLDVSVKETSVCVVDDTGKIVREVKVASEPEALLAVLKNPAYHFKRIGLEAGPLSQWLFSALAEAELPVVCVETRHMQAVLKAQINKTDRNDARGIAQMMRVGLYRPVHVKTLRSQKLRMLLTHRKLLQSKAIAVDNDLRGTLRNFGLKVGMVGTVKFEARIKELVENLPDLAGLVEPLLVVRRVLREQFVILHRRLLAIVRDDEVCRRLMTTPGVGPVVALTYRATVDVPARFRKSKSVGAVFGLTCSKYQSGEIDRSGRISRCGDEMMRVMLYEAAQSMMWSKKWSWLKAWAMQIARRRGMKKAIVALARRLAVILHRIWVDGTEFRWTREQAVAA

SEQ ID NO: 277970 - protein, 353 aa, unidentified
MAGTTAPRITVGVDTHLDVHVAHANDQLGCRVDTLSIPTTPTGYQDLLVWARGLGEPIAWGVEGTGSYGAALARFLAAHGQVVLEVNRPDRQARRGHGKSDPLDAEAAARAVQAGQATVTPKTGAGQVEMIRSLRVARQTAIRARTQAINAIKALLVTAPVELREQLRGLPATMLVPAAAALEPGAVTSPIAATMLALRTVAQRYQALDEEITILTAELDRLVATAAPKLIALFGAGQDSAGALLVAAGDNPDRLHSEAAFSMLCGSSPIQASSGKTVRHRLNRGGNRQANAALYRVVLVRLRYHQPTKDYVARRLAEGKSKQEIIRCLKRYVAREVFAVLQELRQTNSTNAT

SEQ ID NO: 277971 - protein, 375 aa, unidentified
MSSYASPRMIVYLALELSASSWVIAYRLPANEKAKLRRLEAGDNDGLVAFIADLRSQLHPSDDAEVLVVSCFEAGRDGFWLHRLLTAHGVINHVVEPTSILVTRGARRAKTDRLDAVGLLRVLATRFAGDVDACRVVNVPSVEEEDAKRPHREREFLVQERIRVENRIAALLATQGIRKRPSLRSWGADVNALRTGDGRPLPTHLVAELNRLRRRLSLTLEMIRELDAEREIALEEQQDPASQTVKMLCTVRGIGVNFASVLTREVFYRTFDNRRQIASYLGLTPTPFQSGGMDRDRRINRAGNSRARKTLVQLAWLWLRYQPESSLAAWFRERVGTLQGRARRVAIIALARKLLIAIWRFVTLGLAPEGAIITA

SEQ ID NO: 277972 - protein, 413 aa, unidentified
MYIVGIDIAKKTHMGGITDDKGKHIGKSFKIDNSVEGFENLLKKLAEISADISQFVFGMEATGHYWLNLYTWLCDRNFTVHVINPIQSDALRKLEIRQTKTDAIDSYLIADCIRLGKYCDTNLADDDMLALRDLTRQRFYLVDMTSDIKKKVIAMMDRIFPEYESLFSDMFGKTSRDLLKECTTPEEILALDTTHLAEILRKSSKGRFKQEKAEELQKTARNSFAVLLSSQTNSLLVKQMIEQIELLLESQISEIEKIIEQLYSKFDCKLTKIPGMGITLAAVILSEIGDISRFPDPKQLTAFAGLDPVLKQSGMNKGLGYHMSKRGSPYLRRALWLAANSIKKWDPSFAYAYQKKIDSGKNKSQALGFISHKLLNVVFTVLKNNIDYVPIFPPDVDVSKLAEKALKNASSND

SEQ ID NO: 277973 - protein, 393 aa, unidentified
MQRDTKEVLAELVGKLKEKLDPKKVAATSAGEKHQRGELRPNLDRLTVGVDLGDQESHYCILGLEGETLAEGQLRTTEEDFAAFFQGLNAARVVEEVGTHSAWVQEVISGCGHEVLVANPRLMDGSKRRKRKNDRIDANKLARLGRVDPESLYPIQHRSREVRQDLVMLRARDALVAVRTEIINTTRGLVKSMGARLPKCSSRSFAHKGEEAVAVEMREALLPLVRLAATLSADIKEYDKKIETLGREKYGHTALLRQVKGVGPITALAYVLTVENPQRFVKSRDVGPYLGWVPKQEDSGESQPQLGISKAGDTMVRKLLVGSAQYILGRFGPDTDLRRNGLRLCERGGKNAKKRAAVAVARKLAVLLHRLWVSGEVYEPLHNAMSAPIAAAA

SEQ ID NO: 277974 - protein, 321 aa, unidentified
MGKELKFADVYVGVDVSKARLDVAVWPSQQVFSDTNDAEGIGRLATRISGLNPKIVVLESTGRLEVPMALELGERGVPYRIVNPRQIREFARSMGKLAKTDRIDALILARWAESAKPEAKPLPDPDRRELRALVTRRAQLIENLTREKNRLQGETVPHVRRSIKDSIAWHERQIARLDKELNQFMKNSANFSGQSDRLQSVPGVGPVLTRMIIACLPELGTLNRYQIAALVGVAPLNRDSGKSSGKRFCWGGRIEVRCALYMAALVGTRYNPIIQALYERLRAKGKPAKVALVACMRKLLTILNAMMRDQTCWRQTSPAEA

SEQ ID NO: 277975 - protein, 343 aa, unidentified
MQMVTTVGLDIAKSVFQVHGVDATGQVVIRRQLKRRYVRALFEKLPPCLVGIEACASSHHWSRELKALGHTVRLMPPAYVKPYVKRQKNDAADAEAICEAVTRANMRFVATKTPEQQSCLMLHRTRHLFIRQQTAVINVIRAHLAEFGIVAPVGRKGVEQLLNVVTDSSDKRVPVVARMCLAALGAQLRRLKEQILEFDRMIMAWHRSNEASRRLDAIPGVGPVLATALVASIADPKAFRSGRNFSAWIGLVPKQHSSGGRDKLGHISKQGDRYLRSLFMAGALAVIRHAKIHGTKHRPWLTALLARRPTKIAAIALANKIARMVWAMMARGERYKEPVALAA

SEQ ID NO: 277976 - protein, 356 aa, unidentified
MGQNGSVNIPFNKSGVGIMKITTIGLDIAKSIFHAYAINHTGRLIRKKQLKRKQLLAYFAKLGPSIVVMEACGGANYWAREFIKQGHQVKLIAPQYVKPFVKGNKNDYNDAQAIAEASQRSSMRFVPIKSVEQQDLQNVHRQRERVKKERTALANQIRGLLAEYGIVIKKGISAIQNELPSIIEDAENDLTVISRELFNELLEEFRAMDDLLEHCDTKIKIANKNNDVCTRLGDVLGIGDITSSALYAAAGDGKDFVNGRHFSAWVGLVPGQHSTGGKPRLLGISKRGNSYLRTLLIHGARAVLRHCEKKNDRFSLWAQALLKRRGQNKACVAVANKLARMAWVIMAKGETYRPVV

SEQ ID NO: 277977 - protein, 339 aa, unidentified
MNRIVVGVDIAKRVFQLYWVEPETGEIVALQLKREKFLEHFVKRSSCLIGMEACGGSQHWARSLQELGHEVKLMSGRMVKPFVVGNKNDVADARGIWMAVQQPGIKAVAVKSEEQQAVLALHRMREQLVKFRTAQINGLRGLLTEYGEVMPQGRAGIKRDIPGALGRLSDRLPAIVIETLREQYARLSELDEQISQIERRLRQWQREDSATQRIAAIPGVGLLSATAAVATMGDAKAFKSGREFAAWLGLVPRQTGTGGRVRLLGISKRGDKYLRTLLIHGARSVLTHSKFPPEWLSELVKRRPKNVAVVAMANKMARTIWALTAHERAYQSGYVSRPA

SEQ ID NO: 277978 - protein, 347 aa, unidentified
MNLYQTQHPFYCGIDLHANEMYACVVDQDGKKLLHRNFKTRQPEKLFEQLEPYGSDVVVGCESTFNWYWLCDACEEKKIPFLLGHALYLKAIHGGKVKSDKIDSEKLARLLRGGNFAVSYAYPSRWRATRDLLRRRGHFVSRRGETLAHLQIVNHQQNLPAFPKKLQYKSNRQGIAERFSDPAVAFSVETDVAMLDAYDKIIRDLERFLEQSAKIHDANNFYLLKTIPGVGKIIAMTMLYEIHEIKRFPEVGDFLSYARLVRGSHTSAGKNYGSPGKKMGNRYLKWAFSEIVPLIKRQSPEVKKFLERIEKKHGKARAHSTLATKLGRAIYFMLRRGETFDIAKLLR

SEQ ID NO: 277979 - protein, 409 aa, unidentified
MEVIHARCAGLDVHKDTVVASIRVAEAGRVHRETKTFKTMTGELCALLDWLEARKCTHVAMEATGVYWKPVWHVLGETFELVLANAADVKNVPGRKTDVNDAEWLADLLAHGLIRSNYVPEEPVQVVRELTRTRKQLVREATRHVQRVEKVLQDANIKLSSVLSDVMGKSARAMLKAIIDGETDPNRLVGHIHTRIGASHDEVKAALRGTVTKHHRFELKLHLKLYDQLREAVKEVEERISEALEPFQAVVERLTSIPGVSDTVAAVIAGEVGVAVEKFPSPGHLVSWAGLCPRMDESAGKRRSTRIRHGNSWLKTALVQAAWSAVRTKGGHLRALFHRLKARRGAKKAIVAVAHSILSSVWHMLKYGSAWQDLGEAYLEKKDKARLARRYTTRLEALGFTVALSAANP

SEQ ID NO: 277980 - protein, 415 aa, unidentified
MALKIVYKICCGIDVHKTFVVACVATTNKQGVTTYDSHRFSTYTKGLKELLQWLLAHNCKDVCMESTGKYWIPVYNVLEEQCAIVLAHPKYVKAIRGKKTDKKDAKWIADLFKHDLVSGSFMPPADIRQLRDLMRYRYKLTCFSSSEKNRLQNCLTVSNIQLGNVVSDTLGKSSQKILDKILENPLDTSFDIEPLIHGSMKKKLSELELAIDGYITPEQAGKLKIIRGHFKDLESRKAELEQLILALASPYQQKLDIILTAPGINNPFTAIGVISETGVNMEAFPSAKHLCSWAGLTPTNNESAGKKKSVRVSKAGCYIKPLLVQCANAVVTSKKHPEIRNRYLRLKKRRGHKKAIIAIARMLLTALYHMLKNEENYNAELYRKSDILPTEREITIEQAVIMAQFQGYKIKSAAE

SEQ ID NO: 277981 - protein, 386 aa, unidentified
MKKNSKNETSKSKREMKKVAELQAGLEAREANTVVMGIDLGDRTSAYCVRLTLGEQIVKEGTVGTTATAILEAFQGLRRQRVVIETGTHSRWVAQLLELMGHEVIVANARKLKLISENNQKSDKVDARLLSQLGCRNVDWLHPVYQRSEESQVDLMLLRARQALVDTRTALINHVRGTVKSFGSRLPKCGTERFVEVAREELPEALKPALSGVLATLEEVDEQIYGYDCQIEHLCDTKHKDAAKCLLQVNGVGPVTALTYVLTIEDKDRFEKSRDVGPYLGLVPKKRQSGARDPQLGISKAGDEMMRKLLVNCAHHILGYKGQDSDLRRWGLELVRAVERKGKQGARKLAAAAVGRKLAVLLHRLWVTGAKYEPLRNRGAQQAPAA

SEQ ID NO: 277982 - protein, 388 aa, unidentified
MNYCGIDVAKRKHSAMVLNEKSEVVEQNFTFKNDRQGFDKLLHELEPYAEQVLIALEATGHYWLSLYEVLTTAGYQVVVLNPLQVHAYQRSGIRKRKNDRIDSFWIADFARISNPQATPQQATEHLQLRDLSRFRFRLTENMGNCKRKIISILDRVFPEYEKLFSNVFLTSSRQLLAHAVTAQEFADFDLGELTALLSSASRGRFGQEKAEALQAAARQSIGIHFLADSVRVQMRCLLEQIDLLEAQRQEVDLMLEHLMQQLPQYITSIPGIGLATGAAILGEIRDVNRFESPEKLVAYAGIDATVYQSGEFEALETHMSKRGSPYLRHALWQAASMAVMYDPQLKNYYQTKKAEGKHHGTVIGAVCRKLVARIYIILKENRPYEVRY

SEQ ID NO: 277983 - protein, 406 aa, unidentified
MNKLFVGIDVSSQNNVSYLMDSDGVKYSSFSVQNNLGGAKLLKEKIVSAMETLKLSDVVIGMESTSIYGNHLVHSLREDGTLGRYQRKIHVLNPKQVSKFKEAYPDLPKNDWVDAFVIADCLRFGRIRSEVYMDDYRYEALKTLTRARFYAVQNLAREKQRFANLLFLKCSGLAQSADIKNTSSTVLSLMEEYETVDDLANADLEDLTVFVTAAGRGRFADPENTAKTLQAAARGSYRLPKTINDSVNQAMSVSIATMRSMKEQIKVLEKAIEQQFEIIPNTLTSIPGIGKVYSAGIIAEIGDINRFQSQASVAKYAGLVWTQHQSGNFEAENTRMIKSGNRFLRYYLLEAANSVRGCDPEFQRYYDLKYHEVNKGQHKRALALTARKLVRLLFRLLKDNRLYNRW

SEQ ID NO: 277984 - protein, 379 aa, unidentified
MIVIGADTHKRTHALAAVDEGTGRVRGQRQIEAEELGHLAAVRWARELDDERVWAIEDCRHVARRFEQTLIAAGERVVRVPPHRMGASRRGEREPGKSDQIDALAIARAVVKDGIERFPVAHLDERAMEIRLLSDHRKDLVAERTRVQNRLRWHLLELCPELERSLKRGSLAAARQLERIDRRLRRIGGGERVRVAREQVAQLRVLNRQVDALERELLVLIQAHRPQLLAETGCGALTAALLIGRTAGTARFASDASFARQSGTAPIRCSSGQRNRHRLDRGGDRQLNHALHVIAITRARHDPDTKAYLARKEAEGKGKKGALRCLKRHLARRFHHLLSLPAETPQSDPSTSTDVDPAAPGRRDTTIVSAAPAPMPCIS

SEQ ID NO: 277985 - protein, 365 aa, unidentified
MLIIGCDFHPSGQQVYGIDTVTGEVFADQWLDHSGKAMDEFYASLPPGAEVGVESTGNLLWFERRLAKYGHRLRIGDAFKISREETRKQKHDRRDAERIARLLLEKRFPELRWVPTLGQRDQRQLLMHRHKLVRMRAQIKNQLQHIALNAGYQKKQQLWTKAGRELLEKLELEPWTARRRDELLKLLDTLEPYCASLDLAVDQAAAANADARLLMSHPGIGSVISLAFVLTIGDVNRFSRTRELISYLGLNPSEASSGERRRTGSISKQGSSFMRLLLIQGAQTATRDEELGRQYRRLAMRKNKAIAKVMVARKLVVRMFWMLKTKTQYPEVVRMRGSSSHPLVKAPSACVSTPPPQVVRKRTGA

SEQ ID NO: 277986 - protein, 347 aa, unidentified
MRFYNQAHEHYCGIDLHVKTMHVCILDATGRILLHRNVRSTPEAFRDVVAPYRQGLVVAVECMFTWYWLADVCADDGIAFVLGHALAMKAIHGGKAKNDKIDSHKIAVLLRGGLLPQAYVYPATMRSTRDLLRRRLHLVRKRGALLAHIQNTRAQYNLPVFEKRLAYAANRVDVLEHFPDPSVRKSVEVDVSLIDHYDGLITDLELTIVREAKRHDADAFHRLRSVPGIGKILALTILYEIHDITRFERVQEFASYARLVKSRHESAGKVVGGGGAKQGNVHLKWAFSEAAVTFLRQNREGQRLKARLERRHGKGKALSILAHKIGRAVYHMLARHTTFSMERFLAA

SEQ ID NO: 277987 - protein, 403 aa, unidentified
MNNVAGIDVSKGKSMVSVLRPFGEVVAKPFSVGHTGSELKELADYLKSLDGETRVVMEHTGRYYEPVARFLHDEGVFVSAVNPKLIKDYGNNTLRKVKTDKADSRKIARYGIDNWAELRQHTPMDTIRMQLKTLNRQQSLYTKTKTMMKNNLIALLDQTYPGVNALFDSPVREDGSQKWVDFATTFWHVDCVRNMSLTAFAERYRKWCKRHGYNFSQSKAVEVHAGAQDLIAMLPRDALTKTMVRQAIDALNAISASLERLKAEMQALAAQLPEYPVVMAMHGVGDSLGPQLMAELGDVTRFTHRNAITAFAGVDPGADQSGTHEAKSTRVSKSGAPELRRALFLVMDCLLKTQPQDDPVYRFMDKKRAEGKPYLVYMTAGANKFLRIYYGRVKEYLASLEGN

SEQ ID NO: 277988 - protein, 310 aa, unidentified
MEPIFVGIDVSKDRLDVHVRPGGEAFVVTRDGNGLEELVGRLQELGPTLVAVEATGGFETIVAAAVAGAALPLAVVNPAQIRHFAQAVGKRAKTDPIDAGVIAHFVEAVRPVPRALPDEASRLLAELVGRRRQIIEMMVAERQREKRAANVRVRKSLARHIAMLERELGAIDQDINTLVRGSPVWRVKEDLLASVPSIGKTLARTLLAELPELGSLDRRNIASLAGLAPYARQSGRWRGRSMIGGGRAAVRSATFMAALVASRCNPPLKDFYQRLISVGKPKMVALIAVARKLLTILNAILRDNRPWQSA

SEQ ID NO: 277989 - protein, 326 aa, unidentified
MENKTIIGIDISCKTLDLCIRVNGTTNYTVIKNDVKSIHKYFKQYNVSELVVAMENTGRYNWNLFQIMEQLNIRAYVISPLHLKKSIGLVRGKNDKIDALRICSFIEKNMQDIPQWKPSAKEITKLKILITERNSRIKIKRKLVTQQQDYKLMKGFEIDKKLIDLNKKLIKSIEGQIKEIEIQIEDTINMNTELSKQAELIKSVPGVGKVLSWLLISKTDGFTTINCPRKLACYSGVVPFENQSGTSIYRKPRVSIFADKNMKSTLHLAAMSAIQNNEELKKYYKRKVEEGKNKMLVINAVRNKIIHRVFAVIKRQKPYEINLVLS

SEQ ID NO: 277990 - protein, 327 aa, unidentified
MEPAYIGIDLHKAFFQVCAVNGAGERTWEQRWPTTDAGIAALLTRCDTQSRLAVEASSPTWAFVDRIVDHVATVTVVDTRKTRIKAGYAAKTDRLDAQRLADALRRDSVVGIYYPSPAIRDLRELCRYRCHLARLQASLKQRIHALLLRQGVDAPRALFTKRGAQWLEGCSLAGWAGHELQGLRRVMTDVRTQLVPVVAAIRTIAATDPVAHALDQRRGFGPVFSVTLRAEVGTIRRFPDGPHLASYAGLVPRVERSAGHRWTGRITKAGSPWLRWVLIEAAIHQFRRQDAFGRWARRLAVKAGMLKTRVAVARALCTEVFEAWPRE

SEQ ID NO: 277991 - protein, 321 aa, unidentified
MYKYNKFYGVDISKDVFDVMNSKGEHFQLRNDETGFKKLVKAIDKGSLVVMEATGYYHYCLAQYLYEKGYFVSVVNPLSVKRFIQMKLSKVKTDKSDAKAICEYAMSNEVPLYTAKDKSQAECLQLIRLIDTYLKHRTAVKNKLHGEKTLGIPSKAVYRSLNRSLKSIDKEIKVLENRLTELVKEHQQTQITLLKSIPGMGMKTALMLIVMSDGFNRFENAKQLCSYAGITPTIRESGSSVRGRSRISKMGNKKLRNLLFMCSFSACKHNKACKEIYERIIAKGKSKKLALIAVCNKLLKQAFAIAKSGLPYDENFVSALK

SEQ ID NO: 277992 - protein, 387 aa, unidentified
MQKPHDNSKASPAAFMQDNTLVAVIELSLSSWLVAGLIPGVSREPLKKLEPNPEDLLKLLHGWRDEAIKAGRLITRIAVAYETGRDSFWLARWLRERGIDAHVIHANSVAVSREHRRAKTDRLDTAMLKRGFLGWLRGERGHCTMAIVPTMEEEDAKRPHREREGLVHEQTRVVNRMKSALIQFGVRNFNPKLRKASVKLETVRTPEGKSLPPNTIAALRRDMERLKIIKQQIKAIEQARLQQIEQKPEALANRMIYLLVRIYGLGLETADLLVHELLSRTLRDRKAVARYAGLTGSPDESGSKRREKGLSRSGNARVRKIMIQLAWRMVKFQPDSALVQWFKQRTENAKRSRKPMIVALARKLIIALWHYANDGVIPEGFRLHSAA

SEQ ID NO: 277993 - protein, 317 aa, unidentified
MAMQVGKLIVGADVAKAELVIHHDDRDEIVRLKNSKPEIKKWLKQQPLNTAIAVEATNVYHLDLVELAHSLGFEVYVIDGFQLSNYRKSVGGRVKTDPSDARLLSRFLRNEGEDLRPWSPPPAVYGKLQSLLRRRAALVSARTAMTQSWANEGLLKAAFSTFVKSIDRLELLIQKKIKEVLREAGLHEQVARCQAVEGIGFLTATALVMAFMRGEFKSSDAYIAFLGMDLRVSDSGQKSGQRRLTKRGCSEIRRLLHNAAMAASKSPVWKGDYERHRNNGKATTQALVILARKLARVAFALMKNQDEYITKGAKTAC

SEQ ID NO: 277994 - protein, 340 aa, unidentified
MRQLYVASDLHGNNNLMGIIDGEGKRIFKKKLPNDPLVIRDVLKPFKEEIVGIVVESTYNWYWLVDGLMEEGYKVHLANPAAIQQYSGLKHADDKHDAFWLAEMLRLGILPEGYIYPKEERPVRDLLRKRGHLVKLRTSLILSLENIISRNFGRKLPVNKVKGLREDHVTPLFEGKEDLGLAGRVSKETIDFLTHQIRQIEGAVEKRITLKEQYRNLLTLHGVGKILGLTIMLETGPIGRFETVGDYTSYCRKVPSQWISNGKRKGSGNRKNGNKYLSWAYAEASDFARRLHPESRAYYNRKMQQSNPAVAHSALSHKLARAAYYIMRDQVAFCPEKLFG

SEQ ID NO: 277995 - protein, 371 aa, unidentified
MGESSKMLFVGLDVHKDTIAVAYAPEDRGADVESLGAIGTRQCDIDKLIRRLESKGATLVFVYEAGPCGYWLYRYLTRRGFSCAVVAPSLIPRKAGDRVKTDRRDAVTLARLLRSGDLTSIYVPTVADEAIRDLSRGREDAVGDLKRSKVRLKAFLLRQDIRYEGRANWNAAHLRWLARVVCPTPAQQIVFQEYVHTVTEQSERLRRLESELHTAVKTWRLYPVVEAVQALRGLDLTGAGTLIAEVGDLTRFDTPRKLMSYLGLTPSEYSSGAHRRQGGITKAGNGHARRALVEGAWAYRYPAKVSRHLQLRLEHVSPDARAIAWKAQVRLCKRYRLLSARGKHVNQVVVAIAREMAAFAWAIARTVPVAS

SEQ ID NO: 277996 - protein, 320 aa, unidentified
MSQNTSAIMNDKTTSVYAGLDIAKASLQLHLQSKSYDLPNTSQGHVQLIKRLAAIPGGHVICEATGGYERAAVAALHAATIPVSVLNPARVRQFARASGELAKTDPIDATMLTAFGQAFTPQPTAARTASEIKMAALVTRRVQLLELRVAEAQRADTCADLDLRKLFIPWLAQMEKQITKIEALIEALLKTQAPLADQVRRLDDIMGVGRITAVMVLATMPELGQLNRRQAAALAGLCPYNRDSGQWAGKRCISGGRAQVRRALYMAALSASRSNHLLKPFYDRLMAAGKPAKVALTAVMRKLIVLMNHLLKNPNFSLAH

SEQ ID NO: 277997 - protein, 370 aa, unidentified
MQFIGVDLHTNKFTCCYRGEESPAEGKRGKTTETFELTSYGLAQFIKTLTPETYVLVEATITTFCFVRLIQPLVKEVLVANTYELKQISLARKNTDKIDADILCRIIKMQVLSGEKAVSAVTIPPLEIQELRGLFTDYRLLKKQTTQIKNRIHSALKEKLYGFTQEEIFDRKSRKMLREMKEDPVLSFQLDLHFTHLEQVETLIGTLEDKIKEQAEPFMREIEILTSMKGVSVFIAIAIIADIIRVDRFKNSKAFTSYLRSAPRVSNSNTSVSIRGTNKKGRKTSATLLTQSLNHVLDASEKLNAWYTRLTKYKKKGLVRTGLRRRVFAEIYQMLKKGEYHYGREAEKHEAKMRQYRIFLKKRKILLETA

SEQ ID NO: 277998 - protein, 343 aa, unidentified
MYYIGLDVHKKTISYCVKDAAGQIQQEGKIGSTRRELDAWIRTLPQPRMIAMEATIFTGWIYDHLLPHAEKVKVAHPLMLRAIAAAKRKNDKIDAGKIADCLRCDFLPECHMASTEIRDRRRILRYRNLVLRQAGQIKNRVSGLLMETGVSYNKLRLHRMGYFAELMSTNEEVSQSIRPLLRLCREHIDRSIRLDTTLLRSLERDPLLSDRLRRLRTIPGVGPITALTWALEVGDTSRFRSIKQAISYCGLCSAEKSSADKMMRTPISKQRNKHIQQVLVEAARLAPRYSEELALLYEKERQRGNGNRATLAVARKMVALMLAVERRNTDFVPAGEFRRTAAA

SEQ ID NO: 277999 - protein, 333 aa, unidentified
MTMNPALSAFNHVVAFEVAKDSLVVHVLPADKQSVAANKPKAIRKVLLAERQRNAEDGLGAMLVVCEATGGYERHVLAICVELGIAVHKAHGSRVRYFARYLGLLAKTDPIDARVLALYGLKTADLRLYVPPAPEVLALRDLRTRRDQLQQMLFAENSRLEHARHSSVSRSLKAHIASLRKALAALEAEIAACLKASETLSRKACLMKTLKGVGPATVTAILAYMPEIGAFTKAGAACMAGLAPINDESGKLNGPRHIEAGRAAVRKALYMAALVASQHNPVMRLFAEKLKRNGKPAKVVITAVMRKLIVTLNAIVRSEKPWSHAKAACLQRR

SEQ ID NO: 278000 - protein, 396 aa, unidentified
MYYIGVDIAKNTHEAGILDEAGDRLGDSLSFTNTESGFAKLVARLAKAGVDPGNSVVGMEATGHYWLALYCHLTGLGFTVFVVNPIQTDAFRNVGTVRAGKTDKIDAFLIADLIRFGKFSATHLADESMVALRQLTRHRAGLVKQRTAIKNQLTGIIDMVFPEYPTLFADIYGAASKRLLATCPTPAQISKMRTSSLTKLLAEASGGHMGQAKAGAIKQVAGASVGITIATDALSFEIKQKIELVAFIDAQVETLETQIAATLRQTGTRLDSIPGIGPVFASVITAEIGDINRFERPAQIIAYAGMDVPANQSGEFTGTRGHMSKRGPAQLRWALLEAADKARIWDPYFKDYYDRLTARGKHHYVALAAVARKLVNVIYTILKENRAYQPTPPTRS

SEQ ID NO: 278001 - protein, 341 aa, unidentified
MSIMTVGIDLAKNVFAVHGVDENGKAVLVKPKVARERLLELIAQLPPCLIGMEACSGAHHWARQFRAHGHSVKLMAPKFVMPYRMSGKRGKNDAADAAAICEAVTRPKMRFVPIKDVDQQATLCLHRTRQGFVTERTAVYNRIRGLIAEFGVVLPLKIERLRHDILVQLEELPGWVNRCVGDLLRHADTLEERIAEYDKAIAQVARQDERSRRLMRLAGIGPNTATALLASIGAGHDFKHGRQVAAWIGLVPSQYSSGGKTRLGWITKTGDAYLRGLLVMGARSILAGLGDKQDRFSRWARSLVERRGYWKAVVAIAAKNARLAWAVLRYGDEFRLHADAV

SEQ ID NO: 278002 - protein, 345 aa, unidentified
MMIIGIDAHKRSHTAVTIDGNGRQQATKTVGTTTQDHLKLLKWATALGGERLWAIEDCRHMTRRLERDLIAAGESVVRVSPKLMADVRDSARTYGKSDPIDALAVARAALREPDLPVALLDGVERELRLLIDHREDLIAERTRIISRLRWHLHELDPGWLPPANIDRTSAFTAITAHLDALKEDGLVLRLSRRLVQYLQVLTLEINALTAEITERVTIVAPSLLAIVGCGPLTAAKILGETAQVRRFRSKDAFARLNGTAPIPVWSSNKQRHRLSRTGNRQLNAALHRIAMTQARMHPPAKELLARRKAGGDGGMEALRILKRRLSDVVYRAMLTDETQSTFAAA

SEQ ID NO: 278003 - protein, 363 aa, unidentified
MSHNEFKKIREPIEPQEVSPMKQEMTVLGIDLAKHVFHAVGMDNTGKIVFRKRLSRHDLMPFIAKLPMVLIGLEACGGAHYWARRFRASGHEVKLMAPQFVKPYVKSNKNDSRDAEAIAEAVTRPTMRFVPAKDVDQQDIQALHRVRERLISERTALVNEVHGLMHEYGIVMPKGVSKFRQAVVGKLESEKDKLTPLSQEMFWKLVEEFAALEEQLAYYQKKLEALATTHPECQRLMTIPGIGPLSATALVAAVSDASAFKNGRQFAAWLGLVPRQHSTGGKERLLGISKRGDSYLRKLLVHGARTTIRWVGRKTDRRSQWIRQLVERRGKNRTAVAVANKNARIVWALLTSHQDYQLATGEG

SEQ ID NO: 278004 - protein, 339 aa, unidentified
MKLYGAIDLHSNNSVLMLIDRQDKVRFQGRLPNEASYILETLRPYRPQLQGLAVESTFNWYWLVDALQEAGYPVSLVNTAAVKQYEGLKFTDDASDARWLAHLLRLGILPQGYIYPKEERAVRDLLRKRAQMVRQRTTNLLSIGNLVQRNTGGKLAGGQIKQLDESAVDEMLPESDLGLAVKCNLRVMQCADAQVAVLERAVLERVKLKPAFKYLRTVPGIGQILALTIMLETGDIRRFGGVGNFASYCRCVDSKKLSNSKKKGEGNRKNGNRYLAWAYVEAANFAQRYDPSIRRFYQRKQAKTHPVVAIKTVAHKLARACYYIMRDQVPFDRARAFGG

SEQ ID NO: 278005 - protein, 415 aa, unidentified
MALKIVYPICCGIDVHKTFVVACIASTNSKGLTTYKSHRFSTFTQGLNELSQWLCEHDCKDVCMESTGKYWIPVFNLLEHSCNITLAHPKYVKAIRGKKTDKKDAKWIADLFKHDLVAGSFMPPLPIRQLRDLMRYRFKLTNFTSSEKNRLQNSLTVSNIQLGSVVSDTFGKSAMNIIDKLLNDPRDTSFDLEPLIHGSLKGKLAELALAVDGFITPEQAGKIKVIKQHYEDLESRKAELESIILSLADAYTEELNLILTVPSFKNIFSAIAVVSEIGVHMDVFLTAKHLCSWAGLTPSNDQSAGKRKSVRISRAGVYIKPLLVQCATAVVKSEKHPEIRNRYLQLKRRRGHKRAIIAIARMLLTAIYHILKNKQPYNPDLYKKADVHPADREITVEQAIKLAQSQGYRIMAAAT

SEQ ID NO: 278006 - protein, 349 aa, unidentified
MKYYVGLDVAMEETAICIVDDERRIVREGKAASEPEAIAAFLSATGLTFERVGIEAGPLAPWLCDGLAAAGLPVICIDARHMKAAVSAMPVKTDRIDARNIAFAMQVGWYRAVHLKRPEARKLRLLLSSRQMLLRTRIDLDNHIRGVLKAFGLKVGKVATGQFEARVWELIDEGDAQIRWIVGTLLTTRAAVVSQLALLHRAVLAVVKQDQVCRRLMTVPGVGALTALAFRTVVDEPERFASSAAVGAYFGLTPSKYASGETDYTGHITKCGDKAVRVLLCEAANALLTRVSRWSWLKRWGLEVLKRRGKMRAQVAVARRLAVIMHRMWLDGTDFRWQREPDAPAGAAA

SEQ ID NO: 278007 - protein, 397 aa, unidentified
MSAVVGIDIGAYKHAAAVCRAGEREAERGVFRLSADRAGFDELDRWLERHAPVERVVLESSGHYYWPLASHLHRRGFQVAVVNPLQAKYFAKSRLQRSKSDPADARTLAALGMSEEPRVKDPLLGAEAKEAARFWGGLVKEQAQIRNKLLRLVEIGFPELKECFEDPLCETALAVLREAPTARVAARKRVSTLAETIRPGGRRRLGESKARRLHELAAKTIAPPELDAQMNFEVGMLIQQFDLLDKQIEIAEQRVAEVLDSELARRLQTIPGVGPALAASFIAEIGDIWRFDDFDQLASYAGVHPKELSSGTKGQNPETSWRMAKTGNAYLRSAAYKMAVVGTQHNPVIRAHYLRKRAQGKSAMNALGHSMSKALAIVWGVWRSGRDFDPTLGGPRT

SEQ ID NO: 278008 - protein, 315 aa, unidentified
MLYDGIKGRIKTRNIQNNRHSVENILRWFRLQHCGPEDVHVVMEATGVYHERLATELHDAGFYVSLANPHRSREFSRGMGIMTKTDKVDAYMLACYAFLKNPHRWEPPAPEIRYLGALLRRRDVLLGDALREENRLEKYLSTDTPADIISSCMHMAQLLREEVSNIERQIKAHIKASPALRRDYTLLTSIKSVGPQLGMHMLVVLRSHDFSSAEQAAAFLGVVPIEKRSGTSVRSRPRMSKIGPPQLRAKLYMSALCGKIYNKRMRNIYDEMCLRGKPKMVAIGALMRKLVHWCYGVLKTGIVFNDEGLKQVLST

SEQ ID NO: 278009 - protein, 383 aa, unidentified
MDTAATRTREYSAGGPVLYLAFELGNKEWKLGFSVGFGQRPRVRTISARDLESLQREIELAKRRFGLADTARVVSCYEAGRDGFWLHRYLVEAGVENLVVDSSSIEVNRRFRRAKTDRMDVGKLVDQLMRFERGEKKVWHVVRVPGAEAEDRRQLHRELEDLKAERTQHINRMKGLLAGQGVRLEIKAGFPERLSTIRLWDGRPIAEGLKTRLEREYERLQFIQGQIHELEVKRVEAIRRSADPEIEMVRQLLRLKGIGLNSAWVNTMEFFAWRDFHNGKEVGGLSGLTPTPYQSGDSSRERGMSKAGNRHVRALAIEIAWGWLRYQPESELSRWYQRRFGDGSSRLRRIGIVALARKLLVALWRYLETGLIPEGAVLKTRLI

SEQ ID NO: 278010 - protein, 349 aa, unidentified
MTDQRISYCGRIVYVGIDVHKETYTVTCVCNKQIVKTATVQADPAALAASLPRWFPGATLYSVYEAGFSAFVLHRVLTKAAITNIIVNPASVAVAANDKVKTDRRDSKRLAIDLADGRLRGLYVPTEAEELARLLPRTRAQIVKHRATIARQIKAKLHPFGLIAPSSRRLISSRYLREIAAWSLPPELSVSLTLLAEQWRFATRQLIEMRRLLRDQAKAQEEIEKVYRSVPGIGAVVARTLATELGDMTRFANERALFSYTGLTPSEYSSGASVRRGHISRQGASRVRHLLVETAWRAMPRDGVLKEMFDRIAATRGKKRAIVAIARRLTGRIRACFRQGTTYAVGTYA

SEQ ID NO: 278011 - protein, 310 aa, unidentified
MDFIAVGIDVSKDRLDIAVRPGGEAFTVERNGAAVEQLADRLPTLAPHVVALEATGGFETIAAATLAAAGLPVVIVNPAQVRAFAKAIGQRAKTDPIDAAVIAHFAEATKPQVRPLPDEATRLLADLVARRRQIVEMIGAERQREKRITAAHLRKSIERLVRALEKELAGLNTDIDDTVRGSPVWHAKQDLLKSVPGVGRVIASTLIAELPELGRCDRREIAALAGLAPFTRQSGQWRGKSFIGGGREVVRTALFMGAMVAMRSNPVLKAFYDRLVAAGKPKMIAIIAVARKLLTILNAIVRDNRPWQTA

SEQ ID NO: 278012 - protein, 353 aa, unidentified
MKTDSTLILAIDLGKYKSFACVYEPEGGEVKTATVDSNRFELVRVIERWRPAVVVIEACALSGWVSDLCGELGVRCRVANTASEAWKFKHAKRKTDRDDALRLAQLQALGQLPEVVVPPKATRESRALISARQALVCRRVALQNRVRGILLGQGLPMPRGGRAWSATGLKGLDQLARPLADCAATELWRGLLHSALAEYRQVLTLIDDMEAQLDAIAAADAGAQLLSSVPGVGPRTAEAVAAHLGDARRFATGKQVSAYAGLVPKQYQSGETDRRGHITKRGPAVLRKLLVECAWCCLRYNAWARALYLRLTHGGKTRKKPAVVALARRLLVRLWAMLRDGATWRGDPTPLAA

SEQ ID NO: 278013 - protein, 386 aa, unidentified
MICVGIDVGKNTHYACIANDRQTVLRQPFAVQNDEAGFAKLYAAIRKHPKEKVVVGLEATSFYGENLITFLAGHGYKVALINPIQTSALSRGNIRNAKNDKIDSRGVCKFLATEEYRLLRPGELQMLELRGLCRFRQALRKSTTRLKTQLTSYLDLGFPEFHLAFSSVHGKGAYAALMEYPTAKAMQKANVVKLSGVLQKASRGRIGRARADDLKLLAKRSIASDSRDMSLQIQLTIPQIRLIEEQIKAVEKQIEFIYNALDSVIQTVPGIGLVTGAIILSEIGDINRFSNPGQLIAFAGLDPVVRQSGKFRASSTRMSKRGSSLLRFALIRAAGHISVHNETFKKYYQDKKAQKGGHYRTLGHVAGKLTRVIFMMLKSEVAFNLP

SEQ ID NO: 278014 - protein, 449 aa, unidentified
MASYAGVDWASERHDVVVQDAAGEELLAATFNHDEAGLTVLCRTLVRLGVELVAIERPDGVLVERLLDAGLRVLALHPNQVAATRSRFRASGGKSDRFDAFVLCELARTDHHRFRVLEPDSDETKALRALCRGREDLVRARQALCNQLRAELERFWPGPVGLFADLDSPIPLAFLERYPSPIDARTVGEKRLAAFLARQHYPGRKNPGELFAKLRSAPEGRAGEAEITIRRQLVLALVAALKPLVAQLKQLERQIAKAIGQHPDGEIFTSLFRDPASVITAAELLSEIGDCRARYPTAEALCGDAGQGAVAVESGKRRVACFRWACNKRLRDAFCTLADTTRHWHPWAQQRYAAARARGQDHQRAIRTLGRAWCRVVWRCWQDRAPYDPRRHRRLQQHCTVTIPTSSGPRPDLAATQRMLGAAVTEMAAHRAEREALDGKPTSAIPLGG

SEQ ID NO: 278015 - protein, 452 aa, unidentified
MREPQEVEDREDEQAVARVAAVDVAKASAVVCTRVPREGGPGAGRFVTRVWPVGATTNEIIELAAHLAGQRVEKVVLESTSDYWRPFFYLMEAAGLHVELVNARDVKNAPGRPKTDRLDAVWLAKLAGWGMLRPSFVPPAEIRQLRDYTRLRTDLTRERTRHWQRLEKLLEDALIKVTAVASRIDTMSVRDMVEALIAGQRDPRKLADLARGRMKAKRAALIEALTGRFDAHHGELAAILLAQIDGLTAQIGALGARIEELIAAIPGAQGVDADGTTGPQAGRGPDAAVLPAIDRLQEIPGISRHAAQVIIAEIGLDMTRFPTAGRLVSWARLCPRTIQSGASERPGKTAKGNPYLKGVLGDAAAAAGKTTTFPGQRYRRLARRRGKLKALVAVARTLLVIIWHLLADRAARFEDLGDDYYLNTIDTDRRARSHIRQLQALGFTVTITPAAA

SEQ ID NO: 278016 - protein, 355 aa, unidentified
MFVGVDTHKKTHVLVALDTEGRTHGSRTVPNTPEGWAAALQWGRGQQQQQPVRWGVENSGSLGKGFAQFLLAQGEADVREVVPHRTAQYRRRGRSQDKTDVADALAMARLLRAEGEGLPLVQADDASTELRLLRDHRDNLVVDRTRLTNQLHAQMLQLDPGYVERSGPLTRAAGVRYCQDLHLPEGDGVVQTRLLVVRQLAARIAHLDVAIKEVTATIQQRVAATETRLTALPGVGAVVAARLLGELGCIPRVRSAAALAALAGIAPLAVASGGRHGHRVNPGGNRKLNRALHIVALVQRRCEPRAQAYYEKKRAEGKTGRAAMRCLKRRLVDVVFRLLVPTAQTTPAVVVPQAA

SEQ ID NO: 278017 - protein, 353 aa, unidentified
MKPNTETTAAPLAVIGVDIGKEVFHLVGFGTDGKIAFRKKIRRLDLKGAFEQLPPCIVGMEACLSAHFVSRTLRALGHEPRIIPAIYVKPFLKGQKNDYNDAEAIAEAALRPNLRLVKEKSQDQLDLQACHRVRSRLVSRRTATINQIRAFLIEQGIAVRAGARALRNSLFAILENRKDEISPRTAKLILGLYEDWCHLDERIESVTEEIESLGKAEAKCQRLISVPGVGPLISTGIVAAIGSGEAFERGRDFAAWLGLVPRQHSTGGRSILGRISKRGSKYLRTLLIQAARVLLMRPHNWPRFSFGAWLKTASERLHRNKLAVALANKLARIAWSVLRHDKSFDTHLEVAAI

SEQ ID NO: 278018 - protein, 321 aa, unidentified
MTYIGIDVSKDTFVVAYSPNKNSKTKTFKNTTRGIHEFIRTISKEEHHCVMEATGNYSALLVYLLSEVGITTSLENPLKVKNFARAMLSTVKTDEIDARLIALYGEKMQPAPYKLRSDAILTLKQKRTVIRQLKKQLIATRNLKGSMEVLPFFDAKCKKSIEKTIAFLEKQIKDLEEDLTTLARSEYKKQMDLLTSVKGIGITLAAALIMATGGFTYFDNAKQLTRHLGLSPTYQQSGTSVNFKGHINRNGDSSLRSQLYVAAFSSIRCNTECRACYDRLRSKGKPGKVAVIAVANKLIRQAFAVVTQEKPYVDGYISSKK

SEQ ID NO: 278019 - protein, 351 aa, unidentified
MPRTSTVQAVTTIGMDMGKNTLHMIGLDSHGAIVLREKVSRGRITSRLANLPSCLIGIEAGMATHYVARELTALGHDVKQVPPTYAKPFRQGHKNDFRDAQAVAEAVQRPTTRFVPAKTDEQLDLQALHRVRSRLVSERTAVINQIRGFLLERGIIVRQGLRFLRQALPDILAKRPDVLSPRMVRIVADLASDWRRLDERIQPVTDEIETLAKSDDGCRRVMTVPGIGPIISSAMVAAIGNGAAFARGRDFSAWIGLVPKQMSTGDRTILGRITKRGNGYLRTLFVQAARVILLRPASWPRHGFGVWLARAAQRLHRNVLAAALANKLARIAWTVLAQERSYEARIVKAAA

SEQ ID NO: 278020 - protein, 337 aa, unidentified
MVKGVAPSYERGDRGRLGVDVLGVDVGKRELHAFLLQGGRAASKSVPNSPAGIAQFQTWLNNRKAHRVHACLEATGGWSEDVAFALADAGHVVSLVNPSRIKAFAQSELLRTKTDKIDAALIARFCNLHNPEPWTPPAPEIRVLQGLVRRHQSLVAMRTDEQNRLDAPLVGAVVKDSLEATLAHLEREIERVDREIEQLFNQHPPLRRQRDLLTSIPGIANTTAARILGEMPNIVEFRSVKAVAAFAGLSPRHYESGSIRWPTRIAKTGNSALRRALYFPAIVAMRHNPLLRAFAERLRARGKSNMSIIVAVMRKLLTIAYGVLKSGRAFDPAYATS

SEQ ID NO: 278021 - protein, 354 aa, unidentified
MSQPIEVIGGIDTHTDFHQAAAIDTIGQHLAAEAFPTTPAGYRDLLEWLRSHGRVLVVGMEGTGSFGAELGRYLRTNQITVIEVDRPGRRARRAAGESDSIDAYAAATAVLAGRATGTPKHRDGAVEAIRGLRVVRASAVKTRTRTINQIKSLIITASAEVREALRSLTTTELVRRLAVSRPGTDLAAPATAVRLALKRLARRYRHLSEEIADADRDLRVLIARTAPGLLALTGVGTETAGQLLVTAGDNPDRLASETSFAHLCAAAPVPASSGRTDRHRLNRGGDRQANRALHTIVLVRMRHDPRTRDYVARRTLEGLKTKDIFRGLKRFVAREVYHHLTSASSGTPGPSPTA

SEQ ID NO: 278022 - protein, 343 aa, unidentified
MQTITTIGLDIAKSVFQVHGVDAVGQVVIRRQLKRRAVLTFFQKLPSCLIGIEACASSHHWSRELQALGHRVRLMPPAYVKPYLKRQKNDMADAEAICEAVTRANMRFVPTKTPEQQSCLMLHRTRHLFIRQQTAVINSIRAHFAEFGIVAPVGRKGVEELLQVVADPSDKRISEVARACLAALGAQLLSLKQQIVEFDRMIMAWHRSDETSKRLRYIPGVGPMLATALVASVADPKTFRSGRNFSAWIGLVPKQHSSAGKDRLGGISKQGDRYLRSLFVAGALSVIRYAKIHGAKHRPWLNALLVRRPTKVAAIALANKLARMAWAMMARGERYRKPAALAA

SEQ ID NO: 278023 - protein, 340 aa, unidentified
MGQVVTIGLDLAKSVFQAHGVDEAGEVVVRRKLRRSQLLAFFARQPACLVGMEACASSHHWARELIALGHQVKLMPAQYVKPYVKRSKNDAADAEAICEAVTRPTMRFVAIKSPDQQCAMMLHRVRLVLCRQRTQLSNALRAHLAEFGIVAPVGRLGLERLIEIVADPGDRRLPAGARTSLQMLVAQLAVVKAQILENDRRIMADARRTELGRRLMEVPGVGPLLASALVATVADPRSFRSGRDLAAWIGLVPRQNSSGGKERLGSISKAGHRYLRQMLVVGSMAVIRHAGRRAEQRPWLAQVLARKKAKVAAVALANKIARTVWAMMITGERYRELLAA

SEQ ID NO: 278024 - protein, 405 aa, unidentified
MDIQPIFRCAVGIDLHLALICVCIIIAEPGVEPVVHRREFGGFQRDRRAMADWIASFKPDIVVMESTGIYWKSPYAALEKVGIHAQVVNARQVKKVPGRKTDTSDAEWLAMLARAGLLRGSFIPPERLHTLRQVSRHHQKITAMRAMEKNRLVKVLSDAGIRITAVVSDPHGVAATAIIDCLLDGGTPAQALTLAGRLKAPREDLLAALQGELSADHRFVANTIRHHLRALDTQLADLERYLVEALQPHEAALQLLMTMPGIDRLAAAKLLVEIGVDMAAFGNAGRLCKWAGVCPGNDESAGKRRRGDTAPGNRYVRTLLCQIAWAAVRTTSQFKSRFQNLVSRRGTKRAIVAIGHKVLKTVFVLLSRQVPYHDSTVDYEALAVKRNAPRWIRQLRKFGYLPKMA

SEQ ID NO: 278025 - protein, 461 aa, unidentified
MSANKPKGAQKRSVPKKVDWKALEVVHPDAAGIDVGGSEHGVAIAPDRDPEPVRRFGCFTVDLREMARWLIEKGVRSVAMQSTGVYWMPVFEVLEQQGLEVYLVNAQHTKNVPGRKSDIQECQWLLKLHAFGLLNNSFQPTDEMRIARTLWRHRGNLVAEASSVVQRMQKVLTEMNLQLSNVLSDLSGVSGMKIIHAILDGARDPWELAALVEPGVKATPEDIVKSLEGNWREELLFVLRQHVELYQIYQKKIHACDLQLRKHLQSLGSKLDLQAQPLGPRPKGKHLSRNAPAFDLRTELYRITGIDWSQINGIDVLTAQTVISEAGADLSAFPSEKQFASWLGLCPTNQQSGKKILNRRTRKVVNRATVAFRNAAMTLLRSQSYLGAQYRRLRTRLGAPKAITAMARKLACLFYRLIKHGQQYVDQGTEYYETRYREQQIRSLAKRAQKLGLQLVILKTA

SEQ ID NO: 278026 - protein, 359 aa, unidentified
MTNLKYSIGIDIAKDEFKACISLIDHQQKVTVKSSGSFKNNSTGFNDFYVWVTKHIREPISSHFLMEATGIYYEQLAWYLYNKDCQLSVILPNKAKKYLQGLGQKSKNDKIDAKGLARMCAEQSLDLWKPLSKNIYRLRALTRLHEDLTIQTTSLKNRLDALESSMFDLSDSRKSLSKLINATKKELKNLESQIEETIQQDQLLKAKYDKISRIKGVGLMTFAVVIAETNGFELFHSISQLTSYAGYDVVENQSGKKSGKTRMSKKGNSHIRRVLHMPAFTVVKHEPSFKIFYNRVFTNTTIKMKAYVAVQRRLLTLMYTLWKRDTEYNTNHSEAGIADPLWVDSEGIKKSQAQSALAL

SEQ ID NO: 278027 - protein, 369 aa, unidentified
MKTNQSVSSSSSNQASLANYVNRVLKLGLDVHYRQVTVAMQEDGGRIKAAGKMSHGVFWTWVDKKLKEGWQIYSCYEAGASGYWLHRQLVEQGVKNLVVAPKAMGQGGKKQKTDKRDGAELCDSLDRYLRGQEKALSVVAVPSVEEEQKRALIRYHRQIMADRGRYEGRGKGLLCAQGIEVHGRWWQGKAWQELKTEPRLADWMKEQLDGWRSKVLSAQEHQEGLRERIEALAPAILPKGVGAYSAAVLQYEMKGFGRFKNRRQVASYTGLCPGIHLSDGRGKEGSINRCGNGAVRWILVEMVWRLMFWQPQYPPVRRLAAGLVKGKRAKKRLVVQAARRLAIDLWRLATGQTTPEKLGLVMQCNPQSK

SEQ ID NO: 278028 - protein, 334 aa, unidentified
MNYNFFIGIDVSKKTLDFAVFKGKELHFKWVGENDEPGIKKFWGQLKLQQGFCVKEAMFCMEHTGIYNQYLLNFLYSKKAFVCLEAAVHIKLSSGLQRGKSDQIDAVRIAQYACKNSSELRLWQPKREVIQRLKHLSGLRNRVINARKQLTVALNETIGFDKNAACECKKLCKASLKALDDDIKRIEVKMDQVIASDTELKKLFSIVTSVEGIGKVTATEMIITTNEFKDITDPAKFACYSGVAPFEHSSGSSLKGRPRVSHKANKTMKSLLHMAALVAINYNADMKAYYQRKVEEKKNKMLVINAVRNKLIWRIFACVRKNRPYQKNYQLSLV

SEQ ID NO: 278029 - protein, 377 aa, unidentified
MKRILKIGMDVHSTNYTLCAMEPVFGADDRIYATIQVTPDYKNILMFIEKVKQKLNPNDTYDIECGYEAGCLGYSLYNQLTSAGVKCVILAPTTMLTQQGKRIKTDTRDALMIAQCLSYGGYHPVYIPTEDDDSVKEYLRMRDDHKLSLKKVKQQINAFCLRHGYLYPQGKWTQMHLDWLAAIKLPPLYQETLDEYMATYFELTDKIEKYDTRIEEIAAQEKYADKVKKLGCFIGVKTHVALSLIVETGDFYRFAKGSAYAAYLGLAPGEHSSSDKINRLGITKAGNSNLRRLLVEAAWGICKGNIGYKSKDLKKRQQGNSVQVISYADRANSRMRSKYYRLIRHGKKKNVAIAAIARELACFVWGMMTDNIEERVA

SEQ ID NO: 278030 - protein, 343 aa, unidentified
MQNPIATLGIDLAKDKMHVVGLDEHGKVRLRRQFSRSALMRFLGKHPVCRVAMEACAGSHHIARKAEAFAHDAHLLPAQYVRAYVKSQKNDYADAEAIAEAATRPTMREVSIKSVSQQELQLLHRERDAWVGQRTDTANRIRAVLLEFGITVAKGLNQLRQAVPFILEDADNGLPERVRDLVAELWADLYRLDERVDTLTGELEQRARQDERTRRLLDVPGVGPIVATALVAAIGDGAALRCGRDLAAWLGLVPRQHSSGGKPRLLGISKRGNRYLRTLIIHGARAVLRHAGRRRDALGAWLRRLLERKHPNVAAVALANKLTRVSWAVLRRGDAFDVEAMVA

SEQ ID NO: 278031 - protein, 375 aa, unidentified
MSNHSEAFVAFDSSKLRNAVAIADSGRTGEIRFLGEIENSTTATAKLVRKLASKYERLTFCYEAGPTGYELYRQIRILGQECIVVAPSLIPKKPGDRVKTNRRDAVSLAKLLRAGELTAVWVPDRHHEAMRDLTRARDTAVDDLRSKRQQISAFLLRQGLHYCAGKKTWSQAHLNWLARQKFEYLEHRLVFEEMMTAMRQAQERLERLEQAIRAAVPDWSLADLVTALMAMRGIDLISAATFLAEIGDLSRFQSPSELMAYLGLVPSEDSTGDSVKRGPITKTGNRRARRMLVECAWSYQHPPRVGKDKQEKVAAAPRAVREIAWKAQSRLNRRYRALIRRGKLKTVAITAVAREFAGFIWAIAREATAARAAAK

SEQ ID NO: 278032 - protein, 384 aa, unidentified
MNKDSIIFIGLDTHKSFIQVTVLQEHRGANPQHLGRIKSNKSALIKLAKQLQSKYPKATLHFVYEAGPCGYWTYRLMTSLGHCCYVVAPSLIPKKPGDRVKTDKRDAAKLAKLLKAEELTPIYVPEAEDEAIRDLSRARETAMKDLKDAKFQLKGFLLRNNIQATVNDNWSKKHLRWLTDLILPHHSQQIVLQEMIITINERIQRLQRLDNELLHQVKNWRYYPVVKAIQAMRGVRLLVALGTIAELGDLRRFDHPRKLMAYLGLVPTENSSGGKTRRGSLTKCGNSRARRLLVEGAHTYKHKANISVELQLRQEGLPKEIVDIAWQAQQRLCRRYQRLLQKGKHRNVVVVAIAREMIAYIWAITREVVISDVDPKTRIARLPA

SEQ ID NO: 278033 - protein, 391 aa, unidentified
MNEAGDKLASARLAHGMSGMSRFHELVASHAKEPGDVIIGIEVDRGLWVEALIAAGYQVFGINPKAASRYRDRHSVSGAKSDAGDAKMLADLVRTDCHNHRQVAGDSDTVAGVQVLARAHQNLIWERTRNTNRLRNALREYFPAAAEAFSGELAGMDAVAILAKAPTPALAARLSQAQIRSALKAGGRQRNIDTKAEQIQVLLQTEHLSAAPAVEAAYGATTRSQVAVIVELNKQIAALEEELAQVFSSHPDTDIYRSLPGFGPVISARVLGEFGDDPERYADAKSRRNYAGTSPLTRASGRSHIVTARWIRNRRLYDALDQAAFCALTASPGCRTFYDQRRAKGDLHHQALRALANRLVGYLHGCLKTRTPYNEHTAWAHRQPTDLTIAA

SEQ ID NO: 278034 - protein, 416 aa, unidentified
MELIVERAAALDVGKDEVVACIRVPDPAGAGRGRGRRRQEVRTYPTFTSGLETLAGWLQAEGVTQVVMEATGQYWKPIWYVLEERGLELLLVNARHVKILPGRKTDVGDAAWLAELLEHGLLRGSFVPPPAIRQLRDLTRYRKRLIQAHSAECQRVQKTLEDAGIKLDSVATDVLGVSGRAMLAALVAGERDPKALAELAKGKLRKQLPQLRQALRGRFGDHHALLVGLALDHLEHLEGAIAALDGRIDEVIAPFAVARDRLDTITGVGKRAAEVIIAEIGVDMTVFPTAGHLASWAGRCPGNNITGGKRRSGKPTKGNRWLADVLTECAWAAARSRDTYLAAQFWRLARRIGKKKAAIAVGHSILVIAWYLLDGDCDYHDLGGDFFIRRDSDRARQRAVAQLQALGYEVTLQPAA

SEQ ID NO: 278035 - protein, 401 aa, unidentified
MKTVLSVDVAKNKSMIMLMNSDGEIFIDTKEINHNLEDFEKVKEEIKEINPQNLTVFMESTGTYHLPVERYFKENGFNTLVINSLTTKNNYDTIRKTKTDKKDCYRLAKLFFVNEVEYHDLSKKDLYANLKAMTRQYFYLLQNNVSCKNRYKRLINICFPELEKIFKSTRIYDDTALNFIKEFPHAEIVKEKRIDALYNNLYKTNGRNLNFYKKLATTIKTASINSYPGVDKEHEDVKNLSYMAKIVQNNNNIINELRGKMIETAKQSPYYKIINSFYGIGDTLTAEILGELGDITRFDSPKEIIAFCGLDPTIKQSGKSINVKGAISKRGNKYARYILFNCSQMVVKLGASNYPEHPVYIYYQNKKAEGKHYYESLTACSTKILRMLYSMCKNNKQFLEN

SEQ ID NO: 278036 - protein, 340 aa, unidentified
MSEITTIGLDLAKHVFQVHGIDAQGATVLRKRLRRGQVLAFFSRLPRCVVGLEACATAHYWARELGALGHEVRLMPAQYVKAYIKRNKHDAADAEAICEAVQRPTMRFVPVKTAEQQATALLHRGRERLVRQRTMLVNALRAHLAEFGMVAAQGLRNVGELIAIVRDDGDTRLPDVARQVLQVLANQIEQIEAAVTALERQLLAWHKTNPVSQRLASIPGIGPIIATAIATTVADPNVFRSGREFAAWLGLVPRQNSTGGKTRLGGITKRGNRYLRRLLINGASANLLRSKATKADPWVIGIRRRRPPLVVAVALANKTARIAWAVMLRQKEYQPRALAA

SEQ ID NO: 278037 - protein, 355 aa, unidentified
MDNRKYIGMDVHKEAIAIAVLNAAGKLVMESIIETKANTILEFLKGLRGELHLTFEEGTWASWLYDLLQPHVKRVVVCNPRRNALLKEGSKSDRVDARKLAELLYTKMLRPVYHRDNGMRAVKELARSYVTISKDQARVMTRVKALYRSWGIACSGKQIYTVRHRVSWLGKIKEPGVRRRADFYYQQLDGLRSVRRQVRRELLAESEKHKASKLLRQIPSIGPIRAALLLALVQTPHRFRTKRQLWTYSGFGIETHDSAEYRCVAGQLERSKKPQQVRGLNRNYNHDLKNLFKSAATNAVAKSGPLQECYLALVKRGIRPEMPRLTVARKIAAITLAIWKKGVSFDAERLKQQTA

SEQ ID NO: 278038 - protein, 345 aa, unidentified
MIVLGADMHKGSHSLAAVAAGSGELLGDKVVKVGQPGFAAALAWARELEAERVWALEDCRHVSGSFERFLLVNGERVVRVATRLMAGERRSSRERGKSDLIDAIAVARAALREGVERLPVAQLAGVELDIRLLVDHRERLVRMRTALNNDLLWHLHDLWPEQTLPGGALLSQKWTARLGRRLARAEQTARVRIARDELRQLRELSRSIDALEREISGLVAEVAPQLLTEPGFGPLTAAKLIGEIAGAQRFTSDAKLARAGGIAPIPVSSGKTNRHRLDRGGNRQINTAIHRIAVTRARCHPETRDYIERKRSEGKTNREAIRCLKRHLTRRIWHLLQPPHPAPIS

SEQ ID NO: 278039 - protein, 408 aa, unidentified
MNPLYVGIDVSSKSNVVFLMLPDGGKHSNFSVANSLDGSSQMVKRILSAITSHSLDTVVIGLEATSVYGDNLVYFLREDASLAPFNRKIHILNPKQVKNFKEAYNDLPKNDFVDSFVIADCLRFGRINKEVYLGDYRYKALQNLTRARFFAVQNLVKEKQRFINVLFKKYSTMTQEKVFSDTFSTTALAVYEEFESAEALAAMDLQELTDFIMEKGKNRFPNPDAVAKAIQKAARSSYRLPKTVNDSINQVLSISITSIKALDAQIKEFNKAIEAQMELLPNVLISIPGIGPVISAGIMAEIGDINRFPSQAQLGKYAGLAWTQNQSGNFEAENTKLIRSGNRFLKYYLCEGALSLVRCDTEYSSFYHSKYKEVNRHQHKRALALTARKFVRLVFRLLKDNRLYRAAE

SEQ ID NO: 278040 - protein, 345 aa, unidentified
MDVAYDGRQVVGMDLHRRRSVLVRMTMDGRRLETARIENSPAALRGVLARCGQRPLVVLEATYGWYWAADVLEQAGAEVHLAHPLGVKAFSYRRVKNDERDAADLADLLRMGRLPEAWIAPPAVRAVREVVRYRHKLVGQRTSCKDQVHAVLAKCGIPVTHSDVFGTGGGLWLDQLVPPAPYAAKVASLRALIAVLDGQIAGLGAEAAVMLAGQPGYAALRELPGIGPVLAAVIISEIGDITRFRKPAQLCSWAGLTPRHYESDLKVIRGHVSKQGSRLLRWALTEAIQHQPAGTRPRAAREAIIARRGPQARNIAKTASARVLLTQVFYALRDGHVRRASDPAA

SEQ ID NO: 278041 - protein, 344 aa, unidentified
MVVQPLKTTKMEFRNFIGIDISKNTFDFALIKDNNVSLFTSDEVSNDHSGIVKLEEFLKKQGLNMEETLFCMEHTGIYCRLLSHYLTERKYHVWLEMPVQIIRSLGIQRGKNDLVDAKRIAEYACLKKDKAVLWQPPREVVIQINDLLTLRDRLIESRKSLKQPIKEFKDAGFKDAAKLIESRCINTLKAIDKEIRQIEKDLDDLINKDSNLKKLYKLSTSVPGIGKITALALLYFTNEYKLYTNGKQLACYCGVAPFEHTSGTSVKGKARVSNFANKRLKKLLHLVAMSTLSNNRELSQYYSRKVGEGKNKMLVINAIRNKILQRLSAVIKRGTPYQIEYQLA

SEQ ID NO: 278042 - protein, 374 aa, unidentified
MDTSITKIALDTHKKQHTVAWVNCQTGETDVFTVLNTNKDITKMVKKLRKKTGTKLHFCYEAGVCGFALKRLLEKQGCMCDVIAPSLVPVKPGDRIKNDRRDAKKLLEHFIVCQLTTVYAPDIKQEAVREITRCRQAAKENLNRIRHQILKLLTRHGYRFTEGKNNWTLKHMVWLRALKFDSADLTKVFDYMLTELMHCEQRLDNLNKEVEALGDRPELKEIVGVLRCFRGVDTLTAIIIVTELFDLGRFSSPRALMAYLGLIPSEYSSGDKQCKGHITKAGNSRVRRILIESAWHSRHRICLGRALKIRRKDQPQWAIDIADKAMARLHKRYKNLNDRGKMHCKITVAVARELAGFIWAMCREYSVRQSLKVS

SEQ ID NO: 278043 - protein, 412 aa, unidentified
MEVVYPCCCGLDVHKKSITACVLWAEAKGKGRKEKRRFGTFTHDLLQLADWLQECGVTHAAMESTDVYWKPVWNILAEQFEVLLVNAQHIKAVPGRKTDQKDSEWIADLLQHGLLRGSFVPPPPIRELRDLTRYRVSLAQEINRIANRIQKVLEDANIKLASVATDALGASGRAILEAMLAGEQDSAQLAEMARGKLRNKIPELQLALEGRMTEHHRFLLRQLFDHLHFTESKLSEIEQEIDRRMRPFEDQVTRLCTIPGVDRVTAWGMLAETGLDMNQFPSSGHLSSWACLCPGSFESAGKRLSGKMRKGNVSLRRCLSQAAWAISMTKNNYLWALYRRIAARRGAKRAIMAVAHALLVMAYHMLKRKEDYRELGADHFDRIDVNRTRRSLVRRLERLGHRVILEPLAQTA

SEQ ID NO: 278044 - protein, 348 aa, unidentified
MRIIGCDLHARQQTLAMLETTTGEIVNLVLQHEGDEVREFYSQLPLPVLVGIEATGSMHWFLNLMEELGIECRVGHPATIRAAAPRRQKNDRLDADLILKLVAENRFPAIWLPTKELLDLRALLLHRHQWVRIRTRIQNALQAIALANGLRRGPSLWSYDGQAKIAFLPLLPHASYRRSMLQEMYKKMEEEIESLTQRVAEQAELRSAARRLMTHPGVGPVTALATEVFLGDPRRFADSKALASYVGIIPREYSSGGHQRLGGVTKQGSPLLRFLWGEAGAHAVRRDPELKRFYRRKLVQKGLGKARVAVARKLGIRLWIMLRDEIDYQEFCRRGQKQQSGAACGGDA

SEQ ID NO: 278045 - protein, 337 aa, unidentified
MIHVGVDLHQRFCYVTALKASGELLRQQALANDAVTLQRWLGTLPGPCQVVVEACGFWPAFARAVGPVAQRLVMVHPARVKAIAAARLKNDRVDSATLAHLSRCDLLPEAWMADAATQQLRLRVRLRVTLGRQRARLKNLLQAVLHQEGLRKPVSDVFGKRGRQWLAAVELSPAARAAVATYLQLIEQLEGVIAQQEAELKRAAAADARARWLQTIPGIGPYSAMVILAEIGEVQRFGSKKALASYAGLVPRVRESAGKRSYGGITRHGSETLRWIMLQVAQVAARHSPAARDYQQRLRRKKRPQVAKVALARKLLCCVWALLQHGVCYDDTVFAAH

SEQ ID NO: 278046 - protein, 454 aa, unidentified
MTRPVLAVGIDPAKHIHHAAAVLYPDRLILDTVFANDRDAIVDFDTKVVALAAEHDAQLIYGIEDHRRYGRAVAQTLQQAGRQIRVVNPLWTHRQKDFYGQDKDDRIDARSVAAVVLRRADKLPDAGDASALSAAIREAERTLDDLGRQRTRALNRLHGHLSDVYLASYETFFASLKRPWALRFFARFPLPQDLHGQSVEDLARTLQELAGRHLGAARKSLGERAQHILTASAALQTQPRDQSLALKAELIRQLSEEILVNLDRTGRLEQLLHDELLPAIGQKLESVPGIGTITAATILGEIGDVRRFPTRHAFAKYNGTAPASKSTGGRQRHTARRGCNHRLKRALWQSALSAVRHDPLAKAYYQRRLTGGLSKVDAIKRVARRMSDMIYAMLRTGEAYDRKRLKQAIANRQVAASKTGGTSSKDRRDGPSRPQALPAFDTASLPKSRHGTNR

SEQ ID NO: 278047 - protein, 432 aa, unidentified
MRKTSKSEKEVENVAAYVGIDWADNAHEVRMLIVETSQVETMKLKQEPESLREWVERLRERFNGRKVAIVVEQRKGALIYALMSYEFLILYPVNPATLARIREAFNVGGTKTDHTDAELLLDLIRLHRNKLRAWVPDDADTRLLQMLVEERRRLVDEVTRETNRLKSTLKQYYPQALEWAGELNEEMALDFLTRWPTLGSIRRAGSNAIEKFYRDHRVRSEEKLERRLKSIKEARELTSDQAVLIGSKTKALVIVQLLRVLKKSIGRINKQIDELFEKHPDHQIFSSFPCAKKVLAPRLLAAFGSDRTRYESASEIQSFSGIAPVTKRSGKSKSVNKRLACPKFLRQSFHEYAGQSIKQGGWARSYYRELRQRGMKHHAAVRSLAYKWIRIMYRCWQNQEPYDETKYIASLKRRGSPLTAALSAQAGFKAAV

SEQ ID NO: 278048 - protein, 455 aa, unidentified
MPKATTGDRPELKPVNVGAAAIDIGSKMHMAAVNPNCTDLPVRAFGTFTQDLHDLADWFKACGVTSVAMESTGVYWIPAYEILEQRGFEVILVNARYAKNVPGRKTDVSDAAWLRQLHSYGLLRGSFRPDAEIATLRAYLRQRERLVEYAAAHIQHMQKALMEMNLQLHHVVSDITGPTGMRIIRAIVAGERSPDVLATYRDVRCHSSIETIRAALVGNDRDEHIFALTQSLELYDTYQAKMLDCDRKLESLIATLTEKGAKPVGKLSKPRVKTKQVNTPSFDVRAALYGVLGFDLTEIHGLGPSLALKLIGECGKDLKAWPTAKHFTSWLCLAPGNKISGGKVLSSRTRRSSSRAAALLRLAATTIGRSDTALGAFYRRLSSRAGKAKAVTATARKIAVLFYNTVRHGMTYRDPGADQYEEQYRSRVLANLKRRAKSLGFVLQAVPFSAEVAVS

SEQ ID NO: 278049 - protein, 488 aa, unidentified
MGKRKTNKKSPRRSEGRGSRRGLRRLPSKTQVSTETMTPVHHRAAGIDVGATEHWVCVPTECDEQPVRRFGAFSCDLRAIADWLTACQITTVAMESTGIYWIALFELLEARGFEVKLVDARAVHHVPGRKSDALDCQWIQQLHTFGLLSGAFRPADDVCKLRVYLRQRSMLTEHAAQHIQHMQKALSQMNLKLQHVVSDITGVTGMAIIDAIVDGERDPKALARHRHCRCARSEEEIAKALDGAYRDEHLFALRQALELYRAYRQQIQACDEQIDAYMVTMDRKTEESPPDDREYKRKRKGRIQKNSVRIDARGHLYRITGVDLTRIDGIDATTALKLIAEIGTDMTRWPSAKHFASWLALCPGVKKSGGRIMSSRTKPSANRAAAILRMAAQTLVHSKSALGAYYRRMRSRLGAPKAVTAAAHKLARLVYSMLRYGQEYVDQGEQYYEQQYRVRVQRNLARRAHELGLKLVPINGLGADANRDGGGG

SEQ ID NO: 278050 - protein, 343 aa, unidentified
MSISMIGLDTAKSVFQIHGVNETGKAELKRKLRRSELIAFFEKQERCTVVMEACGAAYHWARILTGLGHTVKLIAPEAVKPFVKKGKKNDAADAAAICAAAARPDVKFVPAKTVEQQGILALHTARSLLVKQQTMLANAIRGLATEFGHVVPKGLHNLEPLVALVNADEAMPERARQAITELYKRFGELAKGIQSCEAEIVKHARNDATARRLATIPGIGPITASLIAATVVDISLFKTARQFAAWLGLVPRQNSTGGKTRLGRITKAGNREIRKLLVLGATSMLGHAEGWHSAVGGWLRSILERRPARLATVALANKMARITWVVMTRNEVYRPQGGVAAKA

SEQ ID NO: 278051 - protein, 341 aa, unidentified
MKVSTLGIDLAKNVFQLHGVDHEGHTILRKKLTRAKFVQFVIQLEPCLIGMEACSSSHYFARLFTRYGHKVKLIPPQYVKPYVKTNKTDAADAEAICEAVTRPNMRFVQIKTEEQQAVLALHTERGILIRERIACANSLRATLAEFGITIAAGQSHLTRELPAILEDGENGLSPFVRTSIYRQSKHIRELEEQVKQVEEALASWYRTQEACQRMAKIPGVGMLTATYVVAAVGNARQFSTAKQFASWLGLTPKEHSSGGKQQLGGISKRGDGYFRYLLVHGARALTAWVNRNGAVEENSWLQGLLERKHYNVAVVAMAAKTARIMWSMLSHNTEYQPRQLA

SEQ ID NO: 278052 - protein, 435 aa, unidentified
MSRQNPDPNPIPSTLSSPVFAAFIGLDWGDETHAVSLCAAGSATLERTTLEQTPEALADWANALRTRFPNGQIALCLEQARGALLAALLAYEHLVAYPVNPKSLARFRQALYPSRSKNDPVDGDLLLELILKHRDRLRPWRPDTVQTRQIALANEQRRHFIDHRTALTNQLTAHLKAIFPQALELVGEELASPMATDFLKKWPTLQALQKVSPSVLRKFYYGHNSRSEALMTQRLRVVKTAMALTQDPALLAVHSLAIQTLAAQLQALRPFLDQFDEQIAQLFAAHPDAALFESLPGAGAVLAPRLLAALGTDRDRFQSAVAVSCYSGIAPVTEQSGKTQHWVHVRWSCPKFLRQSWHEFANASRRFSPWARACYEHLRTKMDHHEAVRKLAYKWQRIVWRMWQERQPYDEARYLGSLQQRGLEIYAKLPAQTGG

SEQ ID NO: 278053 - protein, 397 aa, unidentified
MEVMDEAGRVLAKRRLPEGAAGMVLLHGLIGQFVPEDGMDSAEVVVGIETDRGPWVAALVAAGYTVFPVNPLQAWRYRERHGVSGAKSDRGDAHMLADMVRADSHQLRPAAGDSPEAAGIKVLARTHKTLIWERTRAVQRLRHQLREYFPAALAAFEDLDAADTLELLGKAPEPARAARLTRAQVSAALKRARRRSIRERTDAILAALRGEQLSQPEALTAAYAATVQSLIAVITVVDEQVKTLQGQVEEHFGRHPDAEIILSQPGLGPVLGARVLAEFGDDPRRYRDGKARRNYAATSPITRASGKKKVVAARFIHNDRLVDALSAQAFASLNASPGARACYDQLRARGIEHNDALRRLANKLVGILHGCLKTRTLYDEATAWGHSKNLPQSSVAA

SEQ ID NO: 278054 - protein, 387 aa, unidentified
MAKVDDLSRSLTPFDQSSTLVCVVELSRSSWLIAGMVPGVQRQPLKKVELDAPALMRVIERWRSEATKANRAIGRLVLAYEAGRDGFWLARWLRARGVEAHVIHSTSVVVSREHRRAKTDRLDTAMLMRVFVGWLRGERGHCTMVAVPTIDEEDAKRPGRERESLVGERTRIINRMKAALARLGVSGFKPELRKASARLETLRAPENIVIPPNTLAEIRRDVARLAVIREQIKAIEQARVESLRRDPHRPAHVMVRLLARVIGVGIESADMLVREVLLRNFRDRRAVARYAGLTGAPDESGPKRREKGLAKSGNSRVRRGLIQLAWRFLVFQKDSALARWYVERTSGAKGARKTTMIVALARKLLIALWRLATTGVVPDGFVLRSAV

SEQ ID NO: 278055 - protein, 400 aa, unidentified
MNSNRRVAGLDVHKDSIYLCIMGHDENIILQKTYGVLTPELRQMREDMLFHGVTECAMESTAVYWIPVWNELYGSMELKLVNPYFIKQLPGRKSDVKDAQWIAECVLKNLIRGSFVPEPIIQDMRKLNRRIMDLNEDMTYNCNKLDAALQRCGFRLSNYVSSTKSKSYQSVLRSIIEGRSNPDELVGLVHGRTLNKHGRSSIKASVTASFSRTDMTIFKQLKETIDLIERQIDECQKELTELCKEHFPKQYGRLQTIPGVKERAATAIIAETGVDMKMFATAACLVGWCGLKPRNDVSNGRFKSRKVTHGNRYLRQILIEIAWAASRSRNCFFSHFSYIQTTLKKKGKMKIQVAIARKILVAVWHMITKEEDFIDIYLKRLEELKSTKERIRQFESCMAK

SEQ ID NO: 278056 - protein, 388 aa, unidentified
MHTVGIDIGKRHHVAVILDPNGQQVGKALRFANDQAGFGQVLDRLSAVGEIALIGLEATGHYWLALYSALVEAGYNLVVLNALQIHAYRQSGIRKRKNDRYDAYWIADYIRISRQPPASQPQPELLQLRELTRFRASLTDQIGDCKRKVISILDRVFPEYETLFSNVFIQSSRRLLAEALTPDEFADFDLTELTRLLTQTSRGRHGQAKAEEIQALARRSVGIGFLGDVLRVQMSCLLQQLALLDAQRQQLEVEITALMAQLPQHITSIPGIGPVTGAIILAEIGDVQRFAAPEKLVAYAGIDPTVYQSGQFTASQTRMSKRGSPYLRHALWQAAFMATQHDPQLRDYYHRKRAEGKAHGTAVGAVCRKLLHRIYVVLKEERPYVIRD

SEQ ID NO: 278057 - protein, 479 aa, unidentified
MAVRSKHATTGADGKDAATVAEHGGDGAEVAEERVQVVERAAAIDVAKGSGMVCTRVPGSRPDRRRQKVWQVTATYGEVTALMDQLRCEGIQRLVLESTSDYWRIWYYLAEAAGLEVWLVNARDVKHLPGRGKSDRLDCVWHCKLNERGMLRRSFVPPQAIRDLRALTRTRARLAQDQARHQNRVEKILEDALLKISVVISDLFGASGRRFLDALVAGERSPKALAALGDTRLKASRKELEDALTGRFRDIHAFEITTHLRLIDAINDEIARLDEAIGQQLAKVPGTAPACTACGLAGGGHAPGCGAGGTVLLPLAQRLDEITGVGERNAAVIIAELGTDPSIFPTPGHAAAWARLTPRTMQSGETTRPGRTGKGNRYIRGGLGQAAMATARTDTRLGALYRRIARKRGKQKAIVAVSRVICEIAWILICDPAARFEELGPDYYSPRSPARRTRDKIREIERLNPGKKVILADASPDAA

SEQ ID NO: 278058 - protein, 346 aa, unidentified
MRYFAGLDVSLEETSICIVDETGRIAKELRAASEPEALVAALRDVGLTLERIGLEACSLTAWLHDGLMQAGLPAICIETRQANAAMKTMPNKTDRNDARALAQIMRTGWFRQVYVKSRQCRQWRSLLVARRTIINEMRSIENVVRAILREGGVKLGTPSRADFVERARILAGDDSVVTPLVEPLLAILGTMLRELARLTKLVLDTVRKEEICRHLIGVPGVGPITALAFRATIDRPERFQHSRDVGAHLGLTPARYQSGETDIQGRISRCGDELARTALYEAAHTLLTRSRKWSSLRAWGMKIAKHRGMARARVAVARKLAVILHRMWADGTKFRFGKQPAAALVA

SEQ ID NO: 278059 - protein, 450 aa, unidentified
MNLYIGVDIGKELNYASFLNEKGLEIDKRFKFKNNYLGFLKLKDNIDKLTYDYNLKYDDILVGFESTGHYWINVDWFLTEKLNIKTVMVRNDAVRHTRALNSQGKGKNDSLDSRTIAECLKNGYYFDVQGRKEDYIVLRRFTRERSELEKEIARYKNRFRAWLDVNNPIFLENFSNVFSSGALALLKVYPSPLDIIKDSYLEVREKLREVGYSRTNKTFKIYYEEVETYKNIINGISYADRLEISEYIEALEMYMKKKENLDERIEALMNFLEGKVYTSLSEIKGMPKAQVASLIAEIGNINNFKSAIHLISYAGLNLQGEGSGKNKGHSWISKTGNRKIRKELYVITFNLVRHNDYFRGLYCYYKSYKRPNEKSSKEMLIALMCKLLRVVYGMLKYNVEFNLNEMLKNYDFRNINKEKFIDEFLGNSEKKQKIIPQEIEDIFLNNRKSN

SEQ ID NO: 278060 - protein, 362 aa, unidentified
MAYRTSIGLDVHARSVAAAAFIPETGEVIEKSFPYDPCAVAAWARSMPQPAGCVYESGPTGFDLQRKMAEAGVECCVGAVSKMLRPAGDRVKTDKRDAVFLARMLAVGNIVEVAVPTAGMEAARDLARAREDCRRDLARARNLLSKFLLRKGVAYGAGRKAWTKAHAAWLSSLSFGDPCERLVFGEYLEGIRSLELRRGRLDAAIAERAAAPDLAPVVSALKCLRGISTVTAFSIAVEIGDFSRFPNARSFMSYVGLVPSESSSGGVVARGGITRTGNCHVRTLLVESAWHHARSYSPMSPAAAAEAAGVPAAVAEAAARANRRLHERCLRLRGRGKPANVVNAAVARELAGFVWALAVLAA

SEQ ID NO: 278061 - protein, 384 aa, unidentified
MTPEGKAIATFGTMTKDLRALVAWIKEKGCTHVAMESTGVYWIPVYNLLETENLNVIIVNANHIKNVPGRKTDVSDAEWIADLLRHGLLKGSFIPPREQRELRELTRYRRSLVAEHTREVNRIQKVLEGCNLKLSSVVSRITGTTASLILKALIHGEIDPEVLARFAKGRLVRKKHELMEALDGFIGPHQQKLLAVQIDHLAYLEKQITALDEEVAKRLHPFEDDLIRLDTIPGVGRRNAEDILAEIGPNMDLFPSAQHLSSWAGMAPGNHQSAGKRKSGRTTKGNRYLRVTLCESAQAVGRMKPNFLSNQYHRIAARRGRNRAAIAVGHSILVICYHLLKQKTNYAELGASFHDQRKEESIVRHVLKRLESLGYSVLLEKVGA

SEQ ID NO: 278062 - protein, 471 aa, unidentified
MATPYSSPLNRKRRKELTRRLRAADPGLEVMHPNAAGIDVGNSAHYVAVRPDRDSMPVRRFECFTADLHRLADWLHQCGVTTVALQSTGVYWLPLYDILDTCGFEVYLVNARHTKNLPGRKSDVQESQWLLKLHTYGLLRNSFYPSAEIRVIRTYWRQRADHVSAISTCIQRMQKTLTQMNIQLANVISDLSGWTGMRIVRAILGGERNPQALAALSHPGIHASRDTIAKSLEGTWRADLLFVLQQEVTMYDAYLQRIEECDQALEQHLKSVADKAAAPTDTGGSPTAPSPARPRIKRRRKAGSHTPQFELGRELQRISGVDLTRIDGIDVGVAQTVVSEVGLDMSRWKDEHHFASWLGLCPDNRITGGKVIRKGTRRVINRAATALRVAATTLLRSQSYLGAQFRRFRSKLGAPKAITAMAHKLAVLVYRLLRWGQEYVDKGVQYYEERHREQQIRLLKKRAATLGLVVI

SEQ ID NO: 278063 - protein, 320 aa, unidentified
MTYIGIDISKDSFVVAYPRKSGYTTKTFMNNTKGVRSFITSLPEDCHCVMEATGNYSMLLLYLLQQAGIPTSMENPQKIKHFSRAMMTVTKTDEIDAKLIAMYGEKMNPAPYKIPSESIILLKQKRTVLRQLKKQLTAMTNLQHSLSVLPKQDPTAKVATEQTIKFLHKQISKLEAEITNLSNKEFKRQMELLTSIKGIGESIASALITATGGFANFSSAKQISRFLGLCPTYQQSGTSVNIKGHINRNGDSHLRGQLYIVAMASIRCNTACRETYERLCDRGKPGKVALIAVANKLIRQMFAVVTYNRPYIDGYVSSLA

SEQ ID NO: 278064 - protein, 382 aa, unidentified
MSQTASRGDFTAMGSVLFVSFELGWSRWRLAFASAMGQRAWQITIPARNVVALTDAIRKARRRLGLSEDCPVFSCYEAGREGFWVHRLLEQMSVANLVVDSSSIEVNRRARRAKTDRLDAEKLLSMLLRYHAGEKKLWSVIHVPTPEQEDRRHLQREIRTLKKEQTRQINRIRGLLANQGTAVKANQRGLLEPLDAIRIWDGSPLPSGLQCRLETEVARHAFVHRQLLDLESERDALIRQSQDRAAQIARRLMTLRGIAEVGAETYARELSWRAFQNRRQVGSLIGLASTPHQSGDSSRERGISRAGNRHVRGIAIDLAWIWLRQQPHSELTLWYNRRFANDSPRLRKIGIVALARKLTIALWRYADFAEIPKGALLKSKAI

SEQ ID NO: 278065 - protein, 407 aa, unidentified
MRLFVGDDWAEDHHDVEVMDGAGRRLARARLPEGVAGMARLHAMIGELVGEEVDGAEVLVGIETDRGPWVAALVAAGYTVYAVNPLQAARFRDRLGVSGAKSDAGDAHVVADMVRTHAHELRPVAGDSAEVEAVKVVARTHKTLIWERTRHTQRLRHALRDYFPAALVAFADLDAVDTLELLAKAPTPAKAARLTLAQISAALKRARRRDIAGKAELVQAALRAEHLGLPEVLTSAYATSVTALIAVLTVLDTQVKAMQGQVEAHFGRHPAAEIVLSQPGLGPVLGARVLAEFGDDPTRYATAKARRNYAGTSPITRASGRKKVVLARFVHNDRLVDALLTQASTALRVSPGARAYYDKQRARGSGYNAALRQLANRLVGILHGCLKHGTHYDETTAWSHHANSAAA

SEQ ID NO: 278066 - protein, 360 aa, unidentified
MFTERTSVGLDVHARSVVAHAMDVQTGEIFKARLCPDPVEVTAWIKALPGPAAAIYEAGPTGYGLARTLLGNDIRTVVAAPSKLQRPAGSRVKTDAIDAEHLSMLLRLDAFTAVAVPDELTEAARDLVRTREDCRSDLMRARHRLSKLLLRHGIVYSGGQTWSNAHDAWLKRQHFDSPLVQATFDEAYDSVVTITARRDRLDERITAMAADSPWTNTIHRLGCLRGISTLTGFGLAVEIGDWTRFTGNSIGSFVGLVPSENSSGQSRSLGPITKTGNGHARRLLVEAAWHHQHRYVPGKTIRDRWDLASPAARARGDLGNRRLNHRWNQFKARKKANNIANAAIARELAGWCWSLAVLDD

SEQ ID NO: 278067 - protein, 410 aa, unidentified
MIKENYIYVGIDLHKETHTAVMIDCYNQKLGEITFPNRPADFPKLVAKVKKCNTDGKTIVFGLENAYGYGRPLAVWLIDKGYFVKDVNTAISHRQAKHRGAMYRKSDSDDAEAIALATLNMLDKLPDACPNDAYWSLGQLVHRRDNIMKQRTRLVNQLHEQLCIAYPSYKSFFNDISRPTALYFWEHYPSKKYLKGKSVEDLRAELVPVSHNKCSTKTCEKILDAVASDKVKNNAYQDARDMVTLSIVSDLQHYDSQLAEVDKMLEQMYKMLGCTLTTIPGVNVITAVKILAEIGDIKRFSNANKLAQFAGIAPLHLSSSGKGKDLATKQGNRRLQATIYFLAIQMVQISSKGTPRNPVVRAYYEKRKAEGKTSQQALICISRRLISIIYGMLKHGTEYRMPVVESAGEK

SEQ ID NO: 278068 - protein, 339 aa, unidentified
MEHYAGIDVSLECSSVCIVDGNGKIVREGKVASEPEALIGWLKAAGYELSRVGLEAGPLSQWLFAAMRDAGLAVELLETRHVRKAFEAMPVKSDRNDARGIAQLMRLGWFRPVHCKSMGAQEARSLLTARKLVQSKLRDVENSLRGILRGFGLKVGKTTECGFAGRIRELVAGHPHLQMIADALLAVHAVLRKEFKSFERQVRKLARCDARTRLLMSTPAVGPIVALTYASAIDDPGRFKSSKRVGAHFGLTPKKYQSGETDYTGRISKIGDGSVRTALYEAANIMLTKPLKGCSKLKSWAMRIARRAGMSKAKVALARRLAVIMHRMLVDGTVFNAAA

SEQ ID NO: 278069 - protein, 323 aa, unidentified
MNKDIKYFGIDISHLVFDVTDSEGNYYQFKNSISGFKKFVKLLDFNSHCVMEATGYYHYQLAYYLQEEGIKVSVENPLAVKRFIQMKLSKIKTDKSDSKLICEYAKGVKLKLWKGNSKHQLECLQMTRLLGVYTKQSTMLKNKLHGEAVLGNPSKVVVSSLKRSLKQVQKELKTIEDKLLALVKEVHQDVLTRLKSIPGIGPKTSLMLVVLTDGFDRFTSGSELCSYAGLTPVIRQSGSSVKGRPRISKIGNQKLRNLLFMCSFNACKYNHACKAIYDRLVAKGKSKKIALIAVCNKLLKQAFAIAKSGLTYDNNYRSVLLKN

SEQ ID NO: 278070 - protein, 452 aa, unidentified
MEEKISLDVVNKNAAGIDIGSRSHWVAVGQTDKDIKEFGVYNENLYDLADWLTEHKIETVAMESTGNYWQNLHAVLLAKGFEVTLCNGKFTKNIKGKKTDVKDCQWIQKLHTLGLLSSSFLPDEDTEILRTFTRHRENLIKQAASTTKKMQKYLRLMNLRLDVVVKDIVGLTGLKIIRAIALGETDSKKLASLRHYNCRKSEEEIAKALHSNGRKDYLYALKDELDTYEFVQKKIRECDDQIAEKLNEIIGKDPEKQEHHIDKKPYKRINKNTPKNIDINLKSYQMFKGVDLLAIEGMSYNTVLSIMSEVGYEGIKKFKTAKQFTSWLRLAPNNKVSGGKVLSSKVGKGSSRLKIALRNAANSIGNLKDSTPLRDFFHRINFRKGRVSAITATARKLAVIIWNMVVKATPYVNPEEYYYLDQKRKLGMVKRIRKQIDKFGITNDDLTININN

SEQ ID NO: 278071 - protein, 341 aa, unidentified
MNVTRMGLDMAKQVFQVHGVDEHDKVVLRKTLKRAPVLTFFANLPPGRIGLEAGGGSHYWARELTRLGHEVKLIAPQFVAPYRKSGKTGKNDRNDAEAICEAVGRPNLRFVPIKSEEQQAVLTIHRVRELAVSERTALVNQIRGLLGEFGIVVAPGRERFEKELPIVLADLEKGLPVLARETLTNLAARLRAVNEHVTGYDQRLQQLARDSEPARRVMAVEGIGPVTATAVVATVGDGHEFHSGREFAAWLGLTPRQSSSGGKSRLGGITKRGHEYLRRLFIHGARSVLRLTGSRTDRKSRWAEGVKGRRGENIAAIALAAKHARILWALLTRGEAYQVAA

SEQ ID NO: 278072 - protein, 342 aa, unidentified
MEAAVRIGLDIAKSVFQVHGVSASGEVVVRQRLRRSNVLQFFAKLPPCLVGLEACGAAHYWGRELRKFGHNVRLMPPGYVKAYLKGQKNDAADAEAICEAVSRPTMRFVGIKSPEQQSVMALHRVRLTLTRQRTQLSNSIRGHMAEYGLVAAVGRNGLAGLIAIVKDGDDERIPTLARECLVMLVMQWEMLNDQILETDRRVREDARSTEAGRHLMEIPGVGPVLASAMIAAVPDPFVFKSGRDLAAWIGLVPKQNSSGGKDRLGSITKRGNGYLRQLLVVGAIAVVRYAERHGTRRPWLLHLLARRKAKVAAVALANKTARMIWALMTSGERYREPLPAAA

SEQ ID NO: 278073 - protein, 416 aa, unidentified
MKKNSKSPMNKEQKAKRAKAQRPVQRGPKEVLAELVEKLQGKLELKATSARPAEAGRGAELGPNLDRLTVGVDWGDQWSHYCILGLQGERLSQGQVQTRQAEVAEFFHALPPARVAMEVGTHSAWMQEIIAGEGHEVVVANPRLMEGSKRRKRKNDRIDGKKLARLGRVDPQTLHPIRHRSREVRQELVVLRAREALVAARTELINATRGLVKSMGTRLPKCSSPSFGHKVKDAIPEKVREALLPLVQLADALSDCIQSYDQKIEELGSEKYGHTKLLRQVKGVGPITALAYALTLENPEHFAKSRDVGPYLGLVPKQEDSGESQPQLGISKTGDTMVRKLLVGSAQYILGPFGPDTDLRRYGLRLCERGGKNAKKRAAVAVARKLAVLLHRLWVSGEVYEPLGYASSRAIVQQAA

SEQ ID NO: 278074 - protein, 421 aa, unidentified
MKSTAARKLGQVPGGYLVIGIDPHKKKHAAVAITQDFTTRDKFKFSNSREGLEMMLQRAKVEMMKTGCRGVIFAIETGGHYWRNLAYFLDERGIPFRFINQFTLKRRREGKDLNCRKNDYRDSEVAAQLLCTGEFTESSLPQGVYAELRAAYNAYRRLVKERTRITNLIKGLLDGLYPEFTRVFKDPCGHTALSVLSTCPVPRVISGMTEEEFVTTIKARHQGRLMRRKLRVLHYAATTSIGIEAGAWSVSSEISFLVEKLRLIKRHIRSIDGTLVRLVDETKEGKYLLSIIGLNYISVAGLLAELGSFRSYRSAKQMIKMAGSNPTESESGGKRSSHTPMSKKGRPGLRYCAWTAVIPMLRFNPDFRAWAKKRRERPVYANPLNGREVVGAALNRLLRLSFALVKKQTFYQVPEPARIAR

SEQ ID NO: 278075 - protein, 281 aa, unidentified
MREVRKISFKEKSIFIGIDVHKKSWKVCILCEGTEHKVYSQDCSAEVLGKYLRRNFPGAKYNSVYEAGFCGFWVHEALKSEGIDNIVVNPADVPTTDKEKKRKTDGVDCRKLARSLRNGDLSSIHIPGRYKQEDRSLVRLRTLMVKDQTRSKNRIKSALSCFGIIIPEEKVGSHWSKKYIEFLRQEITKVSTLSETIEVLLIKLENERGMVADVTKRIRRLSLEPRYLNKVEKLRTIPGISILTAMTILTEFGDFEKYHSLDKLVSFVGLTPNERSSGDTE

SEQ ID NO: 278076 - protein, 397 aa, unidentified
MSMLFVGIDVSKDYSSGQGLDPEGKKLFYLEFGMNGEGFSRLLNTLKTHCKDLSEVTVGMESTGCYHTNLFAFLCSEGIACVVINPLLISNFARLSLRKTKTDKKDALTIAQFLLAHRSKLSQVSYCQNSQDLKDLARERESLAVMIAGLKNDVRRLLQMSFPELEHRCKLFTETMLRFLMKFLSARVIRTAKATEISKALIHAEGKRKRVFISAEEIINLAKVSVASDSVAKELILSEKIETLLYLEGKQKRITEALVEACRSMRVDELDIITSVDGISAITGSTFLAEVGDIELFSSSKHLIAFAGLDPSIHQSGQYEGISRISKRGNRHLRRVVFLMTLCAVRSQNAFREYFLRRKEEGLPPKKAILATAHKLLRVLFAMLSSKSCFRKEVVEV

SEQ ID NO: 278077 - protein, 336 aa, unidentified
MIYKFIIGVDISKLKLDIALRLDSTNFVMRECLNEEKQISKNFKTLLKEHRLKKEDVLIVAENTGNYTNPMTWALVEEGYNLWIACPNQAHYSLGLIRGKNDKLDAKRLADYGFRNDDKAKLCELASESLVSLKYLNSEKELITKQKSMLKGQLTDHKQYVDTLDYKDRSKRHNKTLKVLEVNLKAIDKRISEIIKNDPQLKHQMKLLNSIVGVGPKIALEVLIATLGFRKFPSAREFSSHVGVAPFEYQSGSSIRSKGKTSKRSNRRIKRYLHMGVCSAVHHGKGEFTKYYERKIKEGKEKMLVLNNLRSKLIHIMFAVIRNNTAYQRDYKALWT

SEQ ID NO: 278078 - protein, 387 aa, unidentified
MSLDHRPTQTAIRTDLAAIFVSMELSRSVWLITSLSPGTGEKMSKHAMPAGDIAGLLMRFAQLQEKAQARTGQVPPIIAIQEAGLDGFWIHRVLLSEGIESYVVDPASIATSRRRRRAKTDRIDGEALVRALLAYKRGEPRVCAMVKAPTPEEEDQRRVSRERQTLTAERVQHVNRIKGLLFAQGIRDYEPLRRDRRQRLDALTTGDGRPLPRHLKAHISRELDRLELLLEQIRTVEAERDALLERARAAETAPAPGLLLGLKGIGADIAGILWAEGLFRTFSNRRQVAAYAGLAPTPWKSGSIDCEQGVSKAGNPRLRTIMIQLAWLWLRHQPHSALSQWFRDRVRASGSRQRKTTIVALARKLLVALWKYVTAGVVIEGAVMKAG

SEQ ID NO: 278079 - protein, 371 aa, unidentified
MEKCIMVACDLHDETMLLKMARGRGAAEKRRVENTPSGRRQMLRDLQRRSKDSAGAKVVFAYEASAAGFGLADELAEAGIVCHVLAPTKIARSAQHRRRKTDERDADRILEILRGHLLAGNELPAVWVPDAQTREDREILRGRLDTGEKLTALKTQVRTLLKRNSIRKPAGLSKNWTGAFEAWLRGLLGAHSPLTHGAKVALGSLLRQRATLEEERAGFDQEIVALAETSRYAHPARAMMQLQGVGLLTAMVFLTEMGDLSRFANRKQVGAYLGLAPASDESGDQADHKGHITHQGPWRVRRVLCQATWSRVRTDPQEKAVYERIVRKNPQHKKIAVVAAMRRLAVVLWHIGAETQRRHGCFAEDKPARAA

SEQ ID NO: 278080 - protein, 407 aa, unidentified
MSVEKPRPSRFVGLDVHKHYLVAYALDADLNRLFGPQRVPLDELEAWREKRLTPQDAVVLEMTTNALQLHDDLLPHVHSVTVVHPPHVTAITRGRVMTDKIASRILATYLAKELLVSIWVPPQPVRELRALLAQRSKMVRLSTQAKNRLHAVLHRHRLLPPKGSPFLDAARQWWLGLPVDPLERTRIQADLDTLAFAQRQIAALEECLATAAAQDERVPFLVQTTGISMLTALTLLAAIGDIKRFPSARHLVGYAGLGASVHDSGQSHREGRITKAGRRDMRAALVEAAQTAANTHPHWRAELQRLGPRLGRNEAIVAIARKLLVVVWHTLTEETADRHAEAEMVARKLLAHAERIGRRNRATGQSAAAYVREQLDRLGLGRELTVIQRGRKRIVLPPSRLQAPSHS

SEQ ID NO: 278081 - protein, 337 aa, unidentified
MNYSGIDLHSNNSVVTVIDEADRVMAEKRLPNDLTKILAFLAPWQAELAGVVVESTFNWYWLVDGLQAAGFTVHLANTTAIKKYDGLKHSGDETDARYLAHLLRLGILPTGTILPPETRSVRDLARKRMQLVRSRVTHVLAIENISARQHGARISSTQVRDLTANTIDHMGLPADVALAMQANLAVIRTLSTQIELLEKRLAEKVGPRAEYALLKTVPGIGPILATVILLETGSIERFASAGNFASYARCVDSRHMSNGKKKGEGNTKNGNKYLSWAFIEAANFALRFCTEAKRFYERKKARTNPTLARKALAHKLARACFHILKERKPFDMTRCFA

SEQ ID NO: 278082 - protein, 353 aa, unidentified
MHYIGVDYHKKYSYIVVKDEQGRREQKGTVNNNRQEFERFLRPYLPGKAALEATRNWGLIYDWLEEILDDVALAHPLKVRAIAEAKIKTDKISADILADLLRSDLLPTAYVPDKETREAKNILRQRMFFVRIQTMVKNRIHTILDRHPEILSQAPDVSDLFGASGMEWLKGIVLPGQDNQLLLSELELLEILKPKISQSDGLVRELGKHDWKAKLLRSIPGLGPFFSVLIAKEIDDISRFKGDKKLCAYAGLVPSTHASGGRIYHGRIIKTGNKWLRWAVIEAVPHAIKSDPELYAYYERVRLKKGNNTAKVATARRLLTIIYRVLSQRRPYERRCERTRRRKNLAPVALVTS

SEQ ID NO: 278083 - protein, 343 aa, unidentified
MKQKATVLGIDLAKRIFHLVGMDDRGNIVLRKRLTREALMPYIARLPPMIIGMEACGGAHYWARRFRAHEHTVKLITPQFVKPYVKSNKNDPADAEAICEAVTRPTMRFVPIKEVEQQDLQALHRARERVVKARPALINEIRGLGMEYGLVFPHSVTKFRHTCTATLEAEQDKLTPLSAELFGQLYDEFGTLEKRLAYYNEKIEAICAAHPVCQRLGTIPGIGPLTATALVAAVSDASHCKHGRQFAAWIGLVPRQHSTGGKVRLLGISKRGDVYLRTLLVHGARATLRWVGLKTDRRSQWGRGRVERRGKNKAAVAVANKNARIVWALLTTEQVYTAAHGGA

SEQ ID NO: 278084 - protein, 406 aa, unidentified
MKQYLGIDIAKHEHVLGSRYESGEQHGKAFAFANDEKGFASLLERFRELGAEPEESLVVVESTGHYWMALWEFLVAHGYDVAIVNPVLTDAFRKADTLRKTKTDRVDAFLIAEYARFKNLGPTRVSPEGAEGLKQLTRYRHHLVSERTALKNRLTSVADRIFPELAGLFSGKHSATARAILGEYGTAARVAATDIRTLTRTVREASRGRHGRAKAEEVKEAAKRSVGTTFAAEALAFEAGHIASLVGPRDAGGASLDAEIARLLDPEVGALLQTIPGIGPVCAAAIAAEVGDPDRFDDPKKLMAYAGMDSTKSQSGGFDGDEQHMSKRGSAPLRNALMTAADGARRLDPYFGDYYDSLRARGKHHYVAVSGCARKLCGVILAVLRERRPYEPRPSIQSQQKQPGRG

SEQ ID NO: 278085 - protein, 374 aa, unidentified
MSDRSEAYVAFDTSKLRNAVAIAEAGRSGEVRFLGEIDNTPAATAKLVKKLSGKYDRLTFCYEAGPTGYGLYRQIKSLGHECLVVAPSLILKKPGERVKTNRRDAVSLVKQLRGGDLTAVWVPDPQHEAMRELTRAREVAVEDLRRKRQQVSAFLLRQGLHYPGERAWTKAHRAWLVSQKLEYAEHRIAFEEMLLAMRQAQERIERLEQAIRVAVPDWSLAEVVTALMALRGIDFISATAFLAEIGDLSRFRTPRELMAYLGLVPSEASTGDTVKRGPITKTGNRRARRILVECSWSYQHPPRVGKEKQERVAAAPPAVREIAWKAQCRLSARYRALIRKGKLKTVAVTAVARELSAFIWAINRQVANPGAAAR

SEQ ID NO: 278086 - protein, 361 aa, unidentified
MLYSTSIGLDVHARSISAAAFVFETGEVVQRTFGYDPDAVAAWAATLPQPAGCLYESGPTGFDLQRRLVALGLPCHVGAVSKMVRPSGDRVKTDRRDALFLSRLLAVGEFVECAPPTPAMEAARDLSRAREDAREALMRARHQLSKFLLRKGHVWPKGRSAWTKAHREWLRSIELGDPCERLVLEEYVAQVRECEERRDRLDSAIAERSGADDLAGVTSRLRALRGVSTVTAFGIAVEIGDFSRFASPRALMSYVGLVPSESSSGETTSRGRITKTGNPHVRRLLVEAAWHHARPLSPASETDVASSAGLPAEAAGIAARANRRLHRRYLDLRAKGKGANVTNVAVARELVGFCWALALCG

SEQ ID NO: 278087 - protein, 418 aa, unidentified
MLSPNAMGALFFVGIDWAAATHAVCVLDATGQKIAAFTVEHSADGLAGLVRRLARLGEPDTMPVAIERPDGRLVDILLEAGHPVVPVKPHAIKTWRESEAGSGAKSDPGDAEVIADYLRCRQRKLTVAVPYSAETKALRTVVRTRGDLVDMRVAATNQLAALLDAHWPGAKAIFADIESPIALEFLTRYPTARHAVGLGAKRLAAFCAKHGYSGRRSADQLLTRLRAAPTGTTDQTLCEALRDAVIALVTVLKALGAALKDIGRSVTATLGEHPDAEIFTSLPRSGQINAAQMLAEWGDARPAYAGPESVAALAGATPVTKESGKHRAVHFRWACNKRFRQAITTFADNSRHESAWAAQVYTNARARGLDHPHAVRVLARAWIRVIWRCWIDRIPYDPGRHGNAVRLAESGQPTQVAA

SEQ ID NO: 278088 - protein, 349 aa, unidentified
MEVTTIGIDIAKRIFQVHGVDKKGKTVLKKKLMRDQVLIFMANLPKCLVGIEACGGANHWAREITKLGHEVKLMAPQFVKPYVKTNKNDSADSEAICEAVSRPNMRFVPIKSVEQQDILSIHRVRTRLVKNRTALANEIRGLLLELGFIIPQGINKIMDKLKEILDSNKLSGISYRTFSELQEEFIDNNNKVKALEKRLKELAGQCELYERLHTVPGVGLIIGTALVATIGNASNFENGRQLAAWLGLVPRQNSSGGKEKLLGISKRGDVYLRSLLIQGAMSVLNAKLRYGTGEQKDKKSTSKFTHWMMNLAERCGHNKTVVAVANKLARVIFSVLSTGEVYAENKVCS

SEQ ID NO: 278089 - protein, 419 aa, unidentified
MKIVFSVCCGVDVHKNVIVATIAITDKNNLTQYFVESFSTINADLYRFRTWLLEHRCFNVCMESTGKYWIPVFNILEEADIKVLLTHPKYVRAIKGKKTDKKDSKWIADLFKFDMVRSSFIPPKDIRALRELGRYRYKLVCMLSSEKNRYQNCMTVSNIGLASVLSDPFGKSATGIMRYVLSSDVFNEEHCKTLIHKTAKKKTELILASIRGSRIESDQRFKMNEASAHMDYLEQAILRTEVELYTRIQPHYHLVEHLSSQLPGISQLSAALIISEIGVDMSVFESDKHLNSWAGLAPANNESAGKKKSVRISKAGQFLKPLLVQCALAAVKSNKQPYFATKYQKLKKRRGHKKAIIAIARMMLTCIYHLIQTGEAFNPSDYESFNNPAPRKVALTDENAIAFLAAQGYDVSSLTKIAI

SEQ ID NO: 278090 - protein, 298 aa, unidentified
MNQIIRIGIDTSKSVFVLHGVDAAEQPVLRRKLRRGQVLGLFGKLEPTKIGIEACGAAHHWARELTALGHEVVLLPPQYVKAYVKRNKNDAADAEAICEAMSRPTMRFVPVKTTDQQAALMLAGRRDGLIRRRTQLSNTIRGYAAEFGLIAAKGLDKIAPLLGRIAADNDLPELAKELFADYGREYTALGRQIVKIEAKLMAWHKNNELSRRLAEVPTIGPIGASMLTMKVTDPHAFGSGRDFSAWIGLTPKDHSTAGKMRLGVITRAGDEALRSTLVAGATRPAARRSAFAARTATW

SEQ ID NO: 278091 - protein, 419 aa, unidentified
MTDPSLQVWSRYIAIDIHKHYLMIGGIDAHKRIVLQPRKVELHRWREWAEANLHPTDAVVIEATTNAWVIYDLLVTLVGRAVVVHPAKVKLIAEARVKTDKVDVLTLAHLLRADMLPEVWVPPQHVRDLRALLSHRRRLVSLQTTAKNRLQSVLHRLNLRPPEGELFANKQREWWKALELSATERLRVDQDLATLDHIVPQIAAVDAELRRLSTSEVWAEQVPYLLQLPGIGLLTAMTILGAIGEVTRFPSAKQLVGYAGLGAGVHDSGKSHRDKGITKQGRRDLRFVLVEAARTAVQTHWYWKREFARLAKRIGEHKAVVAIARKLLIVIWHVLMARSADRRADAEQVAFKLMVWSWKLSDEQRGGLTTRQFIRAHLIRMGLGQDLKHITRGGIKRGLATIEEVLALRPELRGPPDTA

SEQ ID NO: 278092 - protein, 401 aa, unidentified
MVSDFMKGRYNLMKIFVGIDIAKLNHFAAAISSDGEILIEPFKFTNDADGFQLLVSKLESFDKNSIIIGLESTAHYGDNLVRYLVAEFYQVCVLNPIKTCQMRKNNVRKTKTDKVDTFVIAKTLMMQDDLRFITFFDLDMMDLKALGRFRQKTIKQRTRLKIQLTTYVDQVFPEIQYFFKSGLHQNAVYALLKEAPSPKEIASMHMTHLANLLKVNSHGHFTKEQAKELRVLAQKSVGANDSAISIQITQTIQQIELLDSQLEKIEAEMTDIMKFNDSVIMTIPGIGYINGGMILGEIGDIHRFSNPNKLLAFAGLDPSVYQSGNFQAKTTRMSKRGSRVLRYALVNAAWNVVRNNATFKAYYDAKRSEGRSHYNAPGHCAGKLVRVIWKMLTDEVEFNLE

SEQ ID NO: 278093 - protein, 454 aa, unidentified
MAKRSKKSNFNVQSLPEHLRHINLNAAGIDIGSERHMVAVPEGRDEVSVREFGAFTADLQALANWLEQCGVTTVAMEATGVYWIPLFELLDSRGFEVKLVDARHVKNVSGRKSDVLDCQWIQQLHTYGLLAGAFRPTDELCVLRSYLRQREMLSQSSSMHIQHMQKALQQMNLLLHNVVSDITGVTGMKIIKAILAGERDPRRLARNRHKRCHNTSATIAKSLVGNYRAEHLFALQQAVDLYETYQAKIADCEEAIVKQVDKQPDLTADSLPPSEKPIQARERIRSGVDVRELLFKKSGVDLFATPGLAADTLLTLSSEVGFDMSPWKTIKHFTSWLGVCPGTKISGGRVLDKKTKRRPNRAAQAFRMAAATQARSKTALGAFYRRIKSRAGGKQAITATAHKIARIYYTLLTKGTSYVELGQEAYEQKYKERRLHHLMTQAKSFGFQLVPCAT

SEQ ID NO: 278094 - protein, 371 aa, unidentified
MKKSSMFIGLDIHKTSIEIAIAEAGRDGEVRSYGGIDGTLEALDKVVRKLVSKGCNLHFVYEAGPCGYDVYRHLTAQGFDCVVVAPSKIPRQSGNRIKNDRRDAQMLARLHRAGELTAVYVPCVEDEAMRDLTRAREDAKALERKAKQRILAFLLRHGHCYSGKSPWSRAHFRWISILKMPHPAQQIVLQESLDTLAECTRRVDRLTEQIQTLSPQWRLFPVTQALQTMRGVSLIVATTTIAEIGDLTRFERPTELMSYLGLVPSEHSSGRVTRRGSITKTGNGHVRRVLVEAAWAYRLPARVSRKLLIRQEGMSQEVCAISWRAQLRLCARYKRFIAKGKSHQLVVTAIARELCAFMWAIANEVQGPVRV

SEQ ID NO: 278095 - protein, 357 aa, unidentified
MEQFIGCDAHKKFSLFVAMNEDGEYGRAIRVGHDREAFRAFLKDLPPGSQIALETSGSYYWLVDEMERAGHRPQLAHALTAKRRMEGRHKTDARDARGLAMLFRKGTLPRVWIPPAELRDQREMLRLRMSLVRMKTQLKNRIHGVLLRYNLGIQASDLYGDQGRAELISRQGELPQWSRESVLEQLQMVDSVQSQIVDCEKQLEAILYPNAERDLLKTLPCVGKVLSAVIALEMGDVRRFGAAKYLVSYAGLVPSARESAARKRQGRCPRDCNVYLKWAFVEAANLIASKQKAWSGRHAVRLYQRVKQNTKMHGKATMAVARHLAEASYWILTKQEVYREPKSKAAGSFVDARVSAN

SEQ ID NO: 278096 - protein, 370 aa, unidentified
MAEDSTVFVGIDAAKAKHAVAVAEPGRNGEVRYLGEIEASPEAVRKLLTRLAVRHGELHVCYEAGPTGYGLYRQVVGLGHACTVVAPSLIPRKPGDRVKTNRRDAVQLARLLRAGELTPVWVPDEAHEAMRDLVRAREAAVEDLRRKRQAISSMLLKHGRAFPGKTTWGARHERWLAEQAFDHPAQQVVLQELVLAARHAKERLERIEAAIAEFLPGWLLAPVVEALQALRGIRLATAATIVAEVGDLRRFDNARQFMGYLGLVPGERSTGETVRRLGITKAGNGRVRRALVESAWTYRHPARVGKAKLYQLQRVPPAVRDIAWKAQSRLCARYRALSARGKKLTVAVTAVARELAGFVWAIGRREVKPA

SEQ ID NO: 278097 - protein, 369 aa, unidentified
MKKHKHYVGLDVHKDTIVVGIAEGGRGGEVRSYGTVPNTLHAFDRLIAKIGGESVELHVAYEAGPTGFVLYRWMKKRGIDCIVVAPSKIPQSAGPRQKTDRRDAVQLARLHRAGELTAIHVPDETDEAIRDLTRARLDAVADRTRARNRLKGFLLRHGHRYPGTANWSEAHMRYLRNLELASSIHKSVLEEYLLTIDQAIERVDRLEALIEVKAAQWRFYPAVQALMCLRGFQLTAATVLVAELGDVKRFAHPRQLMGFLGLVPRENTTGKARHLGSITKTGNVQARWILIEAAHHAFHPPKVSAPLALRQSGQPELYKALSWKVQSRLHKRGWHLLKRGLMKQKVVTALARELAGFVWALLSQVPSPA

SEQ ID NO: 278098 - protein, 355 aa, unidentified
MNSEKYIGLDVHQATISVAVMDSQGKIIMESILETKASTLLEFLAGLRGSLFVTFEEGTWAAWLYDLLKPHVTEVLVCNPRKIPLHKQGNKSDKIDARKLAERLRLHDLKPVYHGETGVRMLRELARSYLTVVKDLSRVMNRLKALYRSWAIPCAGRDVYYTRHRSQWLEKIPEAGTRRRAEQLYQQLDMLQHLRQQARRELLAESRQHGITAKLRQIPALGPIRSALAVALIQTPHRFRSKRQLWTYSGLGLETRDSGEYHYVHGQVRRRKKQATIRGLNKDYNHDLKGLFKGAATRASVQPGPFQEFYQRSLAKGIKPTMVRLTLARKIAAITLTLWKKGEDFDINKLNAQAA

SEQ ID NO: 278099 - protein, 364 aa, unidentified
MVVLIGADVHKNSHTFVAVDAAGKQIGQITVRATHSGHEKAYRWARKSFIEQERRWGLEDCRHLTGLLERDLLAHGEPVLRVPAKLMARQRAAVRTRGKSDPIDALSVARALAREDDLPTAFTDEQAREVKLLLARRDDLIAERTRVINRLRWHLHELDPELDPAPRSLTHGPAQKRVHEVLDASDGVVAEIAGMVLDDLERLCKLIGELDVRIRSRVRDVEPVLLEIPGCAETTAAKIIAETAGIERFATEAKYAMFAGCAPIPVWSGKTEGRVRLNRGGNRQLNCAIHRIAVTQIRVEGPGKEYFERLREQGKTKMEALRCLKNAIARRIWRTLTRAHEQQSATNAPAPLTPTSTTCIQQAA

SEQ ID NO: 278100 - protein, 408 aa, unidentified
MEILYPRCAGLDVHKDVVVAAVRCVLAPRHSEVRSFATTTSGLLALSEWLASHACTHVAMEATGVYWKPVWHVLEGDFELVLANAQHVRNVPGRKTDVGDAAWIADLLAHGLIRGSFVPPAPIQALRDLTRTRKQLTREIAQHTLRLQKILEDANLKVASVLSNILGRSGRAMLEALIAGESDPERLADLAQGTARKKRSALIESLNGRVTPHHRALLRLHLQLVDALQAALREIDASLGKALAPIRQAVRRLTTMPGLSDIAAHVIVAEIGLDMGRFPTPAHLISWAGLCPRSDESAGKRRSVRVRKGAPWLKTTLVTVAWAAVRTKDSYLRAQFLRIKARRGAKKAILAVAASMLNASFFMLRNDVDYQDLGSVHFDRFDRRKTIRRLVRRLEDLGCQVEINAHAA

SEQ ID NO: 278101 - protein, 339 aa, unidentified
MDTVRFLAIDLAKNVFQVHGVDAAGKLVLRRRVGRAQLTELVLRLAPCTIGMEACSSAHHWARQFQQQGHTVKLISPQFVKPFVKGNKTDGNDAEAICEAMQRPSMRFVPIKSVEQQDVQSLHRARSRLVSNRTGLVSQMRGILTERGIVFAQSITRARREIPAVVADMSNALTPLAREMLADLMDQLRELDKRIAGFDRRIDAVFKASETCQRLAQIEGVGPKTATAIVAAVSDPKDFRNGRHFAAWLGLVPRQSSSGDRTHLLGISKRGDRHLRTLLIHGARAVLRTAPTKHDKKHAWALALQARRGANRAIVTIANKMARVIWSMLATGQSYQKAV

SEQ ID NO: 278102 - protein, 359 aa, unidentified
MEAQVKKIDFTDQNIYVGFDAHLKSWKVTVMAENVVYKTFTQPPKPEVLYNYLKNNFPGGNYHTAYEAGFCGYWIHDKLVSYGINSIVVNPADIPTTDKERVQKEDKRDSRKIARSLSNGTLMPIYVPSIKTQRDRSLLRARAMLVKDLARYKNRIKSFLYFYGINIDESFTNPESHWSNRFMIWLESIEIDGGSGKEAILVLISECKNLRTSILAVTKLIRKLSQTTAYQENVILLKSVPGIGLLTAMIILTELESIDRFNNLDKMCGYIGLIPSTKSSGEKEKTGDITPRGHSVLRTAIIESSWTAIRNDPSLMKSYLSYCKKMESNKAIIKIARKLLSRVRFVLSNKKPYVCLIEK

SEQ ID NO: 278103 - protein, 426 aa, unidentified
MYNSEKLEAITPNTLIIGVDIAKKLQWARFTDYRGSELSKALKFYNDKKGFDSILARIEALCKFKKLDKVIVGMEPTGHYWKPLANYLILNQITVVLVNPYHTKRAKELDDNSPTKSDRKDALTIAKLVSDGRYYEVYMPQDIYAELRVLSNSRISLMRRHNALKNTIMAVMDEYFPEIVSVFKNPLKGKASMQILKSCPFPALILGLGVDGVLVEIKKAVKRTVGIKKARQLVDTAKTSIGVNYGTTAAKLRLELLLEEFELLTRQLAQVEKGMEEALTETGLKEILLGIPGIGVVTAASFLGEIGDPLRFSHPRQISRMAGYNLVEDSSGKNISGTSISKRGRKNLRNVLYQMARTMVAVNTEMKELYRYLKTRSDNPLKKKQALVVISKKVVTIIHTLVKKRTTYKAELVFSEFRKNQMKQAA

SEQ ID NO: 278104 - protein, 413 aa, unidentified
MEQMIDCCGGLDVHRDTVVATVRAPGSQQRERRIATRTFTTTTSGLSELGDWLVAEHVELVGMESTGVYWKPVFFALEERIDQVWLLNAEHLRNVPGRKTDVADSVWIAELVEHGLVRPSFVPPADIRALRDLTRYRRTLVEERTRAIQRLEKVMQDAGIKLTSVASTLLGKSGRAIIDALLAGVSDPVMLAELAKGRLRSKIPALREALTGAFRVEHHGLLVRQMLAHIDFLDESVAVIDAKIESAITVHEPVIERLVTIPGVARKTAIGLIAEVGVDMSVFPTPADLASWAGICPGNNASGGKRRSGRTRHGSVWLRTVLTEAAQAAARTKGTYLAAHHATVRGRRGRFKAIGATRHDLLIAYWHVVHDEVDYRELGADWAVRRFSPEHQLKRLIRQIERLGKTVTVTDAA

SEQ ID NO: 278105 - protein, 458 aa, unidentified
MSRNKSTHRVRRTMAVVHPNAAAIDIGATMHMAAVNADCTTEPVRSFGTFTTDLHRLVDWFAECGVDTVVMESTSVYWIPIFELLDTRDEAVFLVNARDAKHVPGRKTDVSDAQWLQRLHSFGLLRASFRPKGQIAELRAYLRQRERLLEYGASHIQHMQKALTEMNVQLHHVVTDITGATGLRIIRAILGGERNPAVLARMRDRRCHATVETIEKALAGNYRAEHLFALEQALALYDTYQQKASACDARIEAVLKELSVRRGREAGPLPSPRQNRSRQQNSLLFDVRTALFALLGKDLTQINGLGPYLALKLIAECGDDLSAWPSAKHFTSWLCLAPSNKISGGRVLSSRTRRSGSRAASLLRLAAVTVGRTDTALGAFYRRLSARIGKAKAVTATARKIAVLFYNAVRHGMDYVDPGASSYEIRYRARVIDNLHRRAKAFGFMLQPMAPTPGMAVS

SEQ ID NO: 278106 - protein, 398 aa, unidentified
MRYVGLDVGRDFAHVAVVEERGTARRLPRVPMGDPFRDFAATLGPDDVVALEASTNTWALAELLGRHAGRVVVSNPLRTRAIADAKRKTDDVDAATLAELLAADHLPAVWIPDEATRRLRRLVAHRAGLVRDRTATRNRVTAILSRRLLRSPASDLFGVAGRRWLTSLELPPDERLALDSALRLDALLSEEVGAADRAIAGMVVDDPRVRRLLTIPGIGLVTAAGILAIVGDVSRFSRPAKLVSYLGLDPRVRQSGDRPAFGGHMSRQGRAHARGLLAEAAHAAIRSPGPLAGFHARVKARRGGSIAIIAVARKLAVIAWHLLTKDQDYRDARPDLVRTKHRALERMAGRQVSGTRSPQRGATGSSHDRGRTRLAVEVVEMRGLEPLASAMRTQRSPS

SEQ ID NO: 278107 - protein, 315 aa, unidentified
MDEQPTIFVGIDVSKDRLDVHLRPSDQAFRVPRNTKELDAFARRLSGLPVALIVLEATGGFEASVAAALAAVGLPLCIVNPRQIRDFARAMGRLAKTDTLDAEVIALFAERIRPPARPLPEPERRHFAELVSRRRQIIGMINMETNRRDQAVDKHLTRRMDRHIGFLEKELAELDSDIGQAIKASPVWCKTEALLKSVPGIGDVTARTLLAQLPELGTIGRHQIAALVGIAPINRDSGLMRGRRSIAGGRTSVRGVLYMAALTAIRRGSPFRSFYEQLTQRGRPKKVALVAVMRKLLVTLNAIVRNRTPWRPLTA

SEQ ID NO: 278108 - protein, 351 aa, unidentified
MMLLGVDYHPSFQTIAFFVEETGECGEQELNHSGGEAERFYRDLQQRGVSVRVGMEATGYSRWFERLLAELGFELWIGDPAQIKAKRVKKQKTDRKDAQLLLRLMQEDNFPRIWVASPENRDLRQLLWHRHRLVQMRTRIMNQLQALAMNEGKRWKKKLWSERGRAELEKLPLGFWANRRRQELLELLDRMNPKIEELTAAVEREARKRPDVLRLMTHPGVGPLTALAYVLIIGTPARFPRGKQIGTYVGMIPSEDSSGGKQRLGHISKQGSSLLRFLLVEAAQTAARIHPDWRRRYVHLAMRRHKSIAKVAMGRRLAIQLYWMWRNGCEYSQSGKCGSYAGQLGTGHGGK

SEQ ID NO: 278109 - protein, 385 aa, unidentified
MAQFEDLSRCLAAFDQNSTLVMVVEMSQSSWLVAGLVPGVARQPLKKLEPDGAALLRLVQRWRSEAVKAGRMIDRIVLAYEAGRDGFWLARWLRSHGIESYVIHPTSIPVSREHRRAKTDRLDAAMLLRALLGWLRGEPKHCAMAAIPTIEEEDAKRPSRERESLVSERTRIVNRMKGALARLGIRGFKPELRKAAQHLGGLRTPESTPIPPNTLGEFRRGMARLAVIHAQIKAIEVARLEHLEQAPDSGPPAMVRLLARVLGIGVETADMLVYEILYRKLRDTKAVARYAGITGSPDESGAKRREKGLAKAGNARVRRGLIQLAWRLLLFQPDSALVQWYRARIAGGARKTSMIVALARKLLIALWRMVNTGEIPDGFVLRPAV

SEQ ID NO: 278110 - protein, 431 aa, unidentified
MAVRVEGADVLGVGIDWAEEFHDIALGTAEEGVIEQFRIEHGPAGVARLIGRCLRLEPDPAEVRVVLETRHGLLVEALLDAGFTVVPVNPDLVARRRGPARKKDDAEDARICCLLALDRHAALKRLVGHGQLGGELRAIARDDERAARDQRRLLNRLRADLQSTYPAALTLAGADLGAPTVLRLLERWPTQHQLAAATRDELVAFARAGRHGWPDRFADRVTAALATPTLPVRDYLVRAKTAGIRLAAVQLLALHEARRGWERRMGEILLGAPRTGRDHTAKDPDPGNAFPGGEIYLSFPGLGDCLAARVAGEIGEHHTQFDTPNALQCYAGRAPVTRRSGKSDFVVARRLAHNRYLGDAVHQWAFCSLNLSPWAREFYDSKIAAGKSHHNALRALGNRWLEILWHCLNKGVLYDEATHQANRNHALGRAA

SEQ ID NO: 278111 - protein, 343 aa, unidentified
MHTITTIGLDIAKSVFQVHGIDAAGQVVIRRQLKRRAVLAFFQKLPPCLVGIEACASSHHWSRELQALGHAVRLMPPAYVKPYVKRQKNDMADAEAICEAVTRANMRFVPTKTPEQQGCLMLHRTRHLFIRQQTAVINSIRAHLAEFGIVAPVGRKGVMELLQVVADPSDKRVSEVTRACLAALGNQLLSLKEQILEFDRMIMAWHRSNEPSRRLRHIPGVGPMLATALVASVADPKTFRSGRNFSAWVGLVPKQHSSGGKDRLGSISKQGDRYLRSLFVAGALSVIRYAKIHGTKHRPWLTALLARKPTKVAAIALANKLARMAWAMMARGERYRNPVALAA

SEQ ID NO: 278112 - protein, 355 aa, unidentified
MLIIGCDYHPGFQQIALVDTETGELSERRLAHREQAEQFYRERKQQNLCARVGMESSGHWRWLERLLHELGFELWIGDPAEICSKRVRKQKTDRQDAQLLLQLMLEKRFPRIWVPDAENRDLRQLLWHRHRLVQMRTRVMNQLHVVPLNEGLQRKKALWRPAGRKELESIALAPWASRRRQDLLDLLDQLTPKIQELTHALEEEVEKRPVTRRLMTHPGVGPLTALAYELVIGTPERFHCGKQIASYIGLVPEEKSSGDRRRLGHISKQGNVLLRFLLVEAAQVTVRSQPQWRSKFFHLAMRRGRKIAKVAMARKLAVHLYWMWRQGCDYGQLEKFGSQGRKLSSHTVVTKGSTR

SEQ ID NO: 278113 - protein, 316 aa, unidentified
MKTAEVKPCFVGIDVSKETLDICILPEKKKFTVPNSDFKELCKQLRPFKPSLIVLEPTGGYETPVLKALIKAGFKVSRESAQKIHYYAKSRGKLAKTDGIDAENIASYAQKYVDEIKTTSLPDKESEVLRQLIARRKNLVNERAREKTRIKKPDICKEVLQSCEKRIQQLNKEISKLEKQIQVRMKSHSEFQKKMEILQSFKGIGETTASNLLIYLPELGQIKSKPLAALSGVAPYQRESGQYKGEQHIRGGRKEVRTSLYMAALSAIQFNPVIKEFYERLINKGKDRMVAIVACMHKMLRILNAMIAKGEEFKPI

SEQ ID NO: 278114 - protein, 340 aa, unidentified
MNTTVIGLDIAKQIFHLVGLDATGKKVIKKTLRRAKLLSYFANLKPCVIGMEGCASSHYWARELSKFGHQVKLLPAQYVKPYVRGNKNDYNDALAIAEASRIPEMREVMVKTIEQQSIQALHRLRRGAVGDRTKLCNQVRGLLAEFGIIMNQGISSLRKGLPEILEDADNELHWVFRDALALKYQQLCQLDTLVNELTTFIEKEAKQHPQIKQLQSIPGFGAIVASTFFSVIGDGKAFKKGRDVSASLGLVPRQHSSGGKNTLLGISKRGDKYLRSLLVHGARSVVNHAHKKDDALSLWVTKLVNTRGKNKATVALANKLARIAWAVIMSRKPYQTNFAV

SEQ ID NO: 278115 - protein, 400 aa, unidentified
MRVVFGIDVSKASSEVAILVNGEKVHGYTISNDAIGFARLLGDLRTVHKPEIIFEATGVYSHRLQTFLEDNGYAYTRLNPLEAKKQLDSLRVRKTDQLDAEKLAQSQFVLNRKTTYVQEEVYQNLRDLSRFYQNLTEDIVRAKNRLHKALQVTFPELENILSTPTGEQYWNLVIAFPCKDFVLKLSKDKLSKSIRLSTSKRISDKRVAYLAEKLIALANQSYCAVKKTSPILEEVRYYAKELLRLSEQRQVVLDEMVELAQPLPEYDILLSIPGIAETTATSIIGELGDIRRFQSANQINAFIGIDLRHYESGNFLAKEHITKRGNPYARKILFKCIHNIASASHTNPCHIADFYEKRKRQSQTTSTKPHTIASINRLIRTMYYLIMHNKLYDYASTQNR

SEQ ID NO: 278116 - protein, 350 aa, unidentified
MKYIGCDFHPSFQQIAMLDQETGEVVERRLLHTEEARAFYEGLQGPVLVGVEASGNMHWFESLLASCRHRLWIGDAAAIARQEGRKQKHDRRAAALILKLMLENRFPRIWVPTVEERDLRQLLMHRQQLVRMRTRVKNQLQHIALNQGWQKKRKLWSEAGLELLRNLKLGPWTQLRRDTLLELLEELEEKIRPLDQAVAKEAEQREAARRLATHPGVGAVISLATVLTMGDVHRFADSRSWVSYLGLNPSEQSSGQRRRLGSISKQGNPFLRQLLVEGAATAARGDKDLARMYARLKAKKHHGVAKVAVARKLAVRLYWIARTKKSYPEVVRTQGSQSHPVAERKGRSLE

SEQ ID NO: 278117 - protein, 347 aa, unidentified
MVTLGVDCHKQTHTLVAVDDNGQQLGLKTVPAVQEGHLEALDWARQWPERRWALENCRHLSRRLEADLLLAGELVLQVSPKLMAGSRRSAREWGKSDPIDALAVARAALRESELPVAQLEGKSRDVKLLLDHRDDLVGERTRVQNRLRWLLHELEPGFEVPERSLDRKVVLKQVAEVLAAHRGVAADIAVEVLERVSQLTQRINELERQLGILVTDLAPNLLQLDGCAALSAAKLIGETAGIARFKTPARFAMFNGSAPIPVWSGNTTRHRLNRGGNRQVNVVLHRIALTQMRLGGRGHAYVEHRQACGDTKKEAIRALRRRLSDEVYRRMWLDSARASSELEGAAA

SEQ ID NO: 278118 - protein, 317 aa, unidentified
MHAIGIDMSKDSFHAAFDVDHVEIFENTNRGIAKFIRRMASLGFGSSDTTIGVEATGAYHLLFAETLRKNGWILFVINPLLTNRLNKTTLRKVKTDRVDAISIRNAVLLGYGYRYTDTPDLLKLKTLVQQRLGLKRMETECKQRRHAHSFKERAIDIPIPDCFQGVESSIHKEIKALDRQIAMVDPKTQDLLRSIPGIGALSAASLVAYVGDIQRFASPEKLTAYIGLDCRVHESGTSIHGKGYLTKRGNKYLRSTLFNAAFIAQRHNPELKQFFEKKLREGKHHFVALCAVERKLIHLVYAVWKRGTPFERRKPVT

SEQ ID NO: 278119 - protein, 321 aa, unidentified
MSPFHLGIDVAKAKLDCALRLPNGKFRAKVVANSPEGFALLVTWLASHKAPQPHVCMEATGIYWEEVAQYLATAGLTVSVVNPAQIKAYASSRLTRTKTDAVDAKLIADFCAERQPSAWQARSEAEIALRALVLRLDALQTMRTQESNRLEVSRDAVRDDIQQHLDWLDADIKQLVETINDHIDHHPDLKQKRELLNSIPGIGERTSAVILAFYSDTERFANSRKAAAFAGLDPRQHESGSSVRGKPRLSKIGHAFIRKSLYMPAMVTLYRTGWGKQFKERLAIAGKPPKLIIGAMMRKLIHVAFGVLKSGKNFDPALHGA

SEQ ID NO: 278120 - protein, 340 aa, unidentified
MTWTVAIGIDTHRDEHVAVALDRFGGALGSISVSTDAQGYLSLWRFAHELGEPAFAIEGAGSYGAGLARFLTAAGGAVYECERPRRTSRRNGKSDLIDATLAAGLLLSGTPLARLRGGGRREDLRLLLLERRGAVRAQTAALNQLQAVVVTAPDSLRSRLRGLSGHELARRAAGLRDRQDETIVRGVLRRLARRVRSLDHELAELDRELEAIVCQLVPEILSECGVGSVCAAQLVVSSGDPTRMASEASFAALGGTSPVEASSGLQQRHRLNRGGDRQLNRALHVISLNRVRFHPETAAYHQKLIASGKTPREARRCVKRMLARYFYRRLRAIPALDLTP

SEQ ID NO: 278121 - protein, 343 aa, unidentified
MAQHMIIGIDLAKHVFQVCMVTPQGTLKTNTTVARGKLFALIARQPPALICMEAGGGAHDWARRFGALGHEVRLLAPQYVTPFRRGQKNDPNDALALTEAGQRPNIPTVPIKTIEQQDLQALHRVRERLVKHRTAVVHQVRGLLLEYGIVIPQGIARLRKRLPRVLEEADNGVSFLMRDLLQSLQRELSALDTRMTEVTSQLTRLSHEMEACQRLQEMEGIGPLSATALVAALGNGHDFQTGRQVAAWLGLVPRQHSSGGTTRLGGITKSGNSSVRRLLIHGARSVIGHVRDKPAAKSAWIRQLVARIGVNKACVAVAHKMARVAWALLHTGEHYRKPIVLSI

SEQ ID NO: 278122 - protein, 459 aa, unidentified
MSHARQNPNPTTPAVAEVDMLTIINSNAAGIDIGQAESWVSVPADRDPQPLRRFEMNTPDLIALADWLKACGVTSVAMESTGVDWIPLYEILEARGFKVYLVNARHAKNLPGRKKDETDAQWLRRLHAFGLLHNSFRPEGEMCAVRAYLRHRAELIEHRAAHIQHMQKAMQQMNVRLSPTVTDITGVTGMAIIRAILAGARDPHRLVELRQPTCAQPVAEFVKALTGNYRDEHVFALKQAVALYDCYTEQIRECDQEVERKFSALKPLHDDDDLPPLDTADKRNTHSKNAPAYDGRRLLYQLLGVDLVAVHGLNEVTAQIIISEIGTDMSRWPDEKHFCSWLGLAPHNDISGGKVLRSRTLKTHNRAGQAFRIAAQAVSRTETAYGAFFRHMRAMHGPKKAIVATAHKIARAVYLMLRDHKPFDVQSADAYLKRDRAREITRLQKKATKLGYTLAPMPA

SEQ ID NO: 278123 - protein, 409 aa, unidentified
MEQQLDRVAGLDVHRKTITVCVRIPGEGGERVQLVRTFGTTAAELLILRDWLEAHRVTDVALESTGVYWKPVFYVLEESMQCLLVNPQHVQKVPGRKSDVQDCVWLAQLLEHGLLRGSFVPPPPQRELRDLTRYRKALIQDRTREANRLHKILEDAGIKLATVATDILGVSGRSMLQALIGGTTDPDVLADLARGTLRKKLPALRQALAGRFRAHHAFMVSQHLSHLDYLDETIDTLSARVEEALRPFEAELTRLDSIPGVGRRTAEVLLAEVGLDMSRFPTAANLASWAGLCPGQHESAGKRASARTRPGNKWLRTALIEAASMAARTRDTAFAARYHRVARHRGHKKAVVAVAHAMLVTAYHLLDRQADYRELGAHYFDHRQAERLTRRALQTLERQGYRVTLEPAA

SEQ ID NO: 278124 - protein, 405 aa, unidentified
MKPTSLRKRYAYFCGIDVAKNRHVACVLDGDGTVAVRSQSFANSAEGYEQFLGRLQPLGGPRQVAVAMEATGHYWYSLRDHLVEQGYDVAVLNPLQTAQQAKKGIRKTKTDRIDAGHIATLRKNGDYKPALVPGPFAMQCRQLTRLRYALIRQGSRVKQRLWAYLHPVWPEYEGLFANPFCRTGRTLLATAPTPADILALEAHTLAELIRRTSRGKYGAAQAEKVRQAAQRSVGARRCVEGARPAIRLLLTQLDGQAALRQQLELEIAPLADRVPAYLLTLPGADAISAVSLFGETDPIETFGSPEQLVAFAGLDLVVSESGEYQAPRRRISKRGSPVLRHTLWSMAHRACYQEGDLRDYWLRKKAQGLHHLAAVTAVAVKLSRVAWRILTDRRDYLPQRPAKKP

SEQ ID NO: 278125 - protein, 439 aa, unidentified
MRQVYKKCAGLDVHKKTVVGCRVQIDEQGEWHQEVRTFGTMTCDLLQLVDWLLAGGVTHVALESTGEYWKPVYNLLEGCVEVLLVNAQHVKHVPGRKTDVKDAEWLAELLVHGLLKASFIPAKPQRDLRDLTRYRVTLVEERARVINRVQKVLENANIKLASVATDVLGVSGRRMLEALVEGTADAATMAELAKGRLRNKIPILQQALTGVVDEHHRFLLAQHLAHIDFLDEQVEAVSEQIGKQMQEMPALPSLSPSSPDADGEATETPLAAPLTWQAAADILDTSPGVDQKAASQILAEIGVDMRQFPSANHLSAWGGLAPGNRQSGGKRFHARISDGNRQLRKVMVQCAWSAIRVKDSYYSALYHRLAARRGKKRAIVAVAHSMLVSFYHMLSKRQPYQDLGADYFDQRSKGVKTDWLLKQLNKLGYTAKLEPLTVV

SEQ ID NO: 278126 - protein, 387 aa, unidentified
MPQLNDLSRSLVALDQDSTIIAVVELSQSSWLVAGVLPGIERQPQKKLEPSAERLLGLLHRWRDEAVRAGKKITRIALAFEAGRDGFWLARWLNARGVEAHVIHPSSVAVSREHRRAKTDRLDTELLKRGFLGWLRGERGHCTMARVPTIAEEDAKRPNRERECLVGERTRIVNRIKSTLARLGIRNFKPTLRKAAERLATVHTPEGMPLPPNTLAELQRDMARLGFVVSQIREIEQARQKRLEQETETGPHAMVRQVARVIGIGIETADMLVHEVLSRPMRDRKAVARYAGLTGSPDESGARRREQGLARAGNARVRRGMIQLAWRFLRFQKQSALAQWYRARTADSRLGMRKTMIVALARKLLIALWRFVTTGEILEGVILRPAG

SEQ ID NO: 278127 - protein, 357 aa, unidentified
MGEVVIGVDAHKRSHALVAVDEIGRKIAERTVGTTSEHHLQVLEWARQWPVVRFALEDCRHVTRRLEADLLRAGQKVVRVPTQLMAASRRAGRQPGKSDPIDALAVAHAALREPNLAYAQLDGPAREVKLLTDHRRDLVVERTILVNRLRWHLHELDPTLQVPSRGLRRYCVIDELAERLADVEGLVARLAHELLTRCRELTVRINSLERELRDLVRVLAPSLLAVPGCGVLGAAAILGETAGAQRFRSKDAYARFTGTAPIPVWSGSTSGKVRLNRGGNRTLNCALHMIAVTQVRGVGPGKAYVDKLLAAGKTRTEAIRLLRRRLSDVVFRTLLADERAEAKSTEGLVEDHHPQAA

SEQ ID NO: 278128 - protein, 455 aa, unidentified
MPKPKRIRNARTSPVPRILEPDAAGIDIAATEVYVAVPTDRDPEPIRCFSTFTDDLHRLADWLRACNVQSVAMESTGVFWIPLFQILEDRGFRVCLVNARHVKNVPGRKTDVSDCQWLQYLHSVGLLRASHRPAQTICAVRSIWRHRESLVQMAAAHIQHMQKALDQMNLQLHHVISDISGTTGLAIIDAILDGERNPETLAALRDPRIVASRKTIARALVGDYRTEHLFTLQQSLRAYRQYQQWIAACDVEIERQLRVLPNNLADDQKPLSKSKDHHKPRRNEPSFDLRSQLYRIFGVDLTEVPGVSSLTAHALLTEVGPDLRRFPNAAAFASWLGLCPDNRISGGRVLSVVTRKVKNRLTMALRMAAQSLHRSQSHLGQYFRRMRVRLGTPAAITAAAHKLARILYHLITTRQPYQESTFAAMEERSRHRQLLRLQKQAASFGFQLVPGSSVP

SEQ ID NO: 278129 - protein, 392 aa, unidentified
MNPCALGWDNHRKFSKVSLMEQTPDGEIRVVERARLEHHDKQAMRTWLMHLDPEIPVALEATFGWPWVADLLEELGHPVHLAHPPVIRALAKHEAKTDRCDSDRLGKFQLRGILPESYLAPPEVRQRRERTRYRMALSALRTAVKNRTQAILHRHGILHDFSDLFGKAGRRFLEELALPEGSRQALQGCLQLLDSLTLLIGEVEQWMVENLEEDAIVRLLMTIPGIGLILAHVIRAEIGEIERFPTFRHLASYGGLAPMSDDTAGREGPRHCSSACNHVLRWAFIEAVHGVQRTKGPHGFRLRQLYARLCGQARPKGRKSSAVVAVAHELSKLVYVVWTKGVPYSDTPPPRPGSRQGQPEPKEPPTAKTALRSDQPRHPMVRRRATAGQTRL

SEQ ID NO: 278130 - protein, 386 aa, unidentified
MPPNDLSRSLVALDQDSTIIAVVEMSQSSWLVAGMLPGIERQPRKKLEPSAERLLGLLHRWRDEAVKAGRKITRIALAFEAGRDGFWLARWLRARGVEAHVIHPSSVAVSREHRRAKTDRLDTELLKRGFLGWLRGERGHCTMARTPTITEEDAKRPNRERECLVGERARIANRMKATLARLGIRNFKPTLRKAAERLATLHTPEGSALPPNALAELQREIARLGFVTRQIKEIEEARQKRLEQEPETEPHAMVRHLVRVVGVGVETADMLVNEVLSRPMRDRKAVARYAGLTGSPDESGAKRREQGLARAGNARVRRGMVQLAWRFLWFQKESALARWYQARTADSRAGTRKTMIVALARKLLIALWRFVTTGETLEGVILRPAG

SEQ ID NO: 278131 - protein, 392 aa, unidentified
MTATRVRHSTTPGRILYLALELGWNGWKLGFSTSPAQPVRQRSLRARDLAGLLKEIAAAKQRFGLPPETPVRSCYEAGRDGFWLHRYLTDRGIDNVVVDSASIEVNRRARRAKSDGLDAEKLVKMLMRYHGGDQKIWSVVRVPSVADEERRHLHRDLQEMKAERTRHNNRIKGLLAGVGLDVEVAADFPERLKELRTWDGAEAPGQLQQRLLREFERWRFVHLQILALDTERARRIRQGTGEQVQKVRDLLRLRAIGPSSAWLFVMEFFGWRRIRNRRELAALAGLTPTPYQSGNSDREQGISKAGNRRVRTMAIEIAWCWLRFQPQSHLSLWYQKRFGKGASRLRKIGIVALARKLLVALWRYLEQGELPEGAEIKAEGQPLLASVEAAFT

SEQ ID NO: 278132 - protein, 358 aa, unidentified
MPTKKSLLQVIVNGFYFGDLIMSYLGVDLHSNSFTVCRRTKQGKNSIATFQITRIADFCKTLRKRDLLAVEATGNTAWFVSQVRDRIKKVTVVNPFQFEVIRRSVKKTDKNDSKTLAFFLSKDMLPEARMKTKENAQLHSLATTRDKLVKQRTALINKVHNVLNSYGIKFKKESLGSEKGLKSVWAYDWDVIVRIELEVLIEQIRSLNKSIKTLDKEMTDHGQKLKGHKSLTSIKGIAGRSATVLLSIIGNVNDFADENKLAAYFGIVPRVSDSNETVRHGRITKHGSKLGRTTLVQCTLVAKRYSPYLSQYYERIKSHRGSGKAIIATARKFLGIIYNTLKNGWVFEDFPNFVIANS

SEQ ID NO: 278133 - protein, 352 aa, unidentified
MQFYTTQHQYYCGIDLHTKSMYVCILDQAGEILVHKNISTSPQALLRIIEPFLPDVAVSVECIFTWYWIADLCREENIPFILGHALYMKAIHGAKTKNDKIDSHKIAVLLRGGMIPMAYVYPAEMRSTRDLLRRRMHFMYKRSELLSHIQNTRSQYNLPEFDKCISRKKNRTGISEHFEDVSVRKSIELNLTLLKQYDLLLNDVELYLTRHAKEHDPNNLYILHTIPGVGKILALVMLYEIQDITRFQRVQNFTSYARLIKPQKKSAGKVTGSGNRKIGNAYLKWAFSEATLLLIREKQEIKELHLELKNKHGKARALAIISHKLGRAVYYMLKNHQAFDMRHFLQVKDRAA

SEQ ID NO: 278134 - protein, 350 aa, unidentified
MPQPIEVIGGIDTHTDVHQAAVIDTIGRHLATEAFPTTPEGYRHLLARLHSHGQVLTVGMEGTGSYGAELARHLRASQITVVEVDRPDRRARRASGKSDPVDAYAAATAVLSGRANGTPKDRDGTVEAIRTLRVVRASAVKARTQTINQLKSLIITVPAATREALRSLTTTELIRRLAASRPGSDLTTPAAAVKLALKRLAKRYQHLSEEITDADAELRALITHTAPGLLALPGVGTETAGQLLVTAGDNPDRLVSEASFAHLCAAAPVPASSGRTDRHRLNRGGDRQANRALHTIVLVRMRHDPRTRDYVARRTLEGLKTKDIFRCLKRFIAREVYRHLTSASSTSPAT

SEQ ID NO: 278135 - protein, 354 aa, unidentified
MNSPITIGIDLAKEVFAICVLDERGAVRERRVLRRAAFERWAVQAPSGTIAMESCSSAHHWGRWFSARGHTVRLIAPEFVAPFRKGGKNDAADAEAIAVAARQPTMRFVTIKTVEQQAILSWHRARLGWIEERTALINRLRGLLAEFGIALGRSRSTLRAALPRLTDDAALPSSIRALLLEAREQFAALEARVTRCDAEIAAHLAGNGPARRLRELLGIGPLTASALVATVSNAFSFRNGRQFGAWLGLTPQQHSSGGKSRLGKVTRHGDGYLRSLLVQGARSALQSALRCLPDRLSRLGRWIVDLFHRKGYHRTLVAIANKHARMLWAMLAHDEAYDPLAWQRYRAPAASATV

SEQ ID NO: 278136 - protein, 352 aa, unidentified
MIIIGVDFHPEFQQIASVDTATGEFQEKRLAHREEAENFYRALAGKKVRVGMEASGHARWFERLLAELQLELWIGDAAEIRTKRVRKQKTDRQDARLILQLLLEERFPQIWVPSWENRDLRQLLWHRHRMVQSRTRIMNQLQAVALNEGLRCKKRLWRERGRQQLESFRLAPWASRRRRDLLELMDRLNPTITELTQAIEQEVEKCPEAKRLTTHPGVGALTALAFVLIIGRAERFRCGKQVASYLGLVPLEESSGNRRRLGHITKQGSSMLRFLLVEAAQVTVRSVPEWRSRYFHLMLRRRRKTAKVAMARRLAVRLYWMWRQGWDYEQLTQFGSHPGQPGNREGVPSNTE

SEQ ID NO: 278137 - protein, 413 aa, unidentified
MIELEVLRCAGIDIGKAEVVVAVHTPGHDGGRSKTLRSYGTMTRQLLLLRDWLVELGVTRVAMEATGVYWKPVFYLLEDVIDECWLVNPQHVKQRRRGRKTDAVDAEWICQLAEHGLLAPSLVPPPPIRALRQLTRRRATLLAERTREKNRLQALLEDAGIKLGVVVSDVVGVSGRRILAALIDGHRDPHLLADLAVGTLIRKYSALVEALTGRFTDHHALLAGQILAHVDYLDTAIGQLDTHIELQIAPFRHLIDLLITLPGVAARTAQVIIAETGGDMTAFPTAAQLAAWAGLCPGISASAGTRHPTGAPKANKWLRRALGEAATATARTHTHLGARYRRLATRRGANRAKLAVGHSILTATWHMITTDSPHHDLGEDHYTHHINPDRRRRHLTTQLEQLGYTVTLTPTAA

SEQ ID NO: 278138 - protein, 347 aa, unidentified
MAEYIGIDLHKQTSYVTKMDAQGKILEQHNLRNDPDTLRGYLTQQPADTRFAVEATGNWMYLYELIEDRCPDLVLAHPLKTKAIASARIKTDKIDSTILAHLLRADLLPAAYIPPRAVRDTREVLRYRAALVRVRTSLKNRIAAIISKTGLRPPTKTAVGVKSRRFLATVSVRPCYRLALDGYLRLLAQLTEEIRRVTDVITTQVEQDPQAQVLCTMPGISAYSALLILSEIGDIRRFPDSRHLCSYAGLVPAVYASGGKTRLGRLTKQGSKWLRWILVECAVHAIHGAPQFRRLYLRVAKKHGANTGRVAVARAMLKTIYAMLKHREEFRPIVGTAGQRRGVMTPA

SEQ ID NO: 278139 - protein, 341 aa, unidentified
MAYFAGLDVSVKETSVCIVDDAGKIVREVRVASEPEALLQVLTNPIYRFKRVGLEAGPLSQWLYSVLAEAGLPVICVETRHMRAMLKAQINKTDRNDARGIAQMMRVGLYRPVHVKTLRSQKLRMLLTHRKLLQSKTIAIENEPRATLRNFGLKVGVVRTVKFEARIKELVEKLPDLAVLVEPLLIVRRAIREQVDILHRRLLAIVRDDDVCRRLMTVPGVGPVVALTYRVTVDVPARFRNSKAVVFGLTPAKYQSGENDRTGAISQCEDEMMRMMLYEAAQIMLVRAAKWSWLKAWAMKIARHRGMKKAIVALARRLAVIMHRIWVDGTDFRWTREVAAA

SEQ ID NO: 278140 - protein, 355 aa, unidentified
MTSSKYIGMDVHKESISIAVRNAAGKIVMESVIQTKASTILQFIEGLRGEVHVTFEEGTWSAWLYDLLKPHVTKLVVCDPRRNALLKEGNQNDRVDARKLAELLQNNQLRPVYHGDHGLRALQELVRSYLTITKDLSRVMTRVKAIYRSWAIPCSGTQVYSARHRAEWLEKIREPGVRRRAETYYQELDGLRSLRQEVRKELLAESKKHEVWKRLGGIPSIGPIRAALLLGIMQTAHRFRTKRQLWAYSGFGVEGHSSADHQVVKGQLQRKKKPIEIRGLNKNCNHHLKNVFKSAAVVASTKPGPLQEFYAALVAKGMRPEMARLTLARKIATIVLIVWKKGVCFDANHLKPQTA

SEQ ID NO: 278141 - protein, 341 aa, unidentified
MSEVSIIGLDIAKHVFQAHGVDAAGHAILRKKITRSKLLPFFSAHPRCLVVLEACGGAHHWARELLKLGHDVRLIAPAYVKPFVKRQKNDAADAEAICEAAQRPSMRFVPVKTEEQQAAAMVFRARDLLVRQRTQISNALRGHMTEYGWIAPKGLAHLEALRALVSDRSAVPEGVRSVCMVLLDTLATLDRQIALLDKEIVRRSREDAVARRLMTIPGIGPITATAITALAPPSETFAKGRDFAAWVGLTPRQHSTGGKQKLGSISKMGERTPRRLLIIGSSAVVLQASKRGAAKGSWLEQMLARKPRMLVTVALANKTARIVWALLTKDEVYKAQVAATA

SEQ ID NO: 278142 - protein, 362 aa, unidentified
MNSIHYVGLDIHPSTTELAIIKASGPIFQRQRCRTSISDLVETLAKIPRPIHIAMEEGPLADWLYRNLLPYVNHIPVADPRRNRLIAKDSDKDDALDAEKLAQLLRGGYLKPVHHAHSLDRMMFKQHVALYHDCVRQRVRTANRIIGFVGRHGVFVREPAFAPVEKRPRILARLPAHPHLRKDLKLLWQTYDLAAKHVTDMRRRLKRLARKEEPIRRFVQLPGIKWVRAATFFAYIDTPGRFASKQKLWKYAGLGLEHRQSGARHQRVRLARRANRVLKYILLGAARSAVVKGSNPFAHQYHNWLAKATPPPVALRNTARSLAVTLWVMWKKGVAYDPNRVANSAQLETALTPSTPANGRIS

SEQ ID NO: 278143 - protein, 309 aa, unidentified
MERFVGIDVAKDKLDVHVRPEDQAFCVARDAKGLAELVERLRALTPALIVLEATGGFERMVAAALAAAQLPLVVVNPRQIRDFARATGRLAKTDSLDAAVIAQFGDAIRPEPRPILDEDAHALDEMVSRRRQLIDMIVAETNRRKAVANKRIAREIDRHLQYLQKLLNDHDGDIDTMIRSSPVWREKEELLVSVPGIAEKTARTLIAELPELGRLDRRRIASLVGVAPMSRDSGTLRGKRRVQGGRPWVRSALYMAAVTAARCNPVLRETYQRLRQAGKPTKVALIAVLRRLLVILNAIIRDRTPWKPA

SEQ ID NO: 278144 - protein, 401 aa, unidentified
MHGDYQVFLGLDVGKDGHHAVALNREGKRLHDAALVNTEAKLRQVFDKLARHGRVLVVVDQPASIGALPVAVARACGHQVAYLPGLAMRRIADLHPGAAKTDARDAYVIADAARSLPHTLRRVDVGDDALAELEVLVGFDDDLAGEATRLANRIRGLLTQIHPALERVLGPKVQHKAVLELLSRCGGPAGLRKAGRRKLVAIAGKNAPRMGERLIEQVLAALDEQTVTVPGTAAAETILPRLADSLRDVLQQRDQVAAEVERMLDAHPLAEVLTSMPGIGVRTAARILLEVGDGTAFATPGHLAAYAGLAPVTRRSGSSIRGEHPPRGGNKQLKRAFFLSAFAALADPVSRAYYNRKRAEGKRHNAALICLARRRCDVLFAMLRDKIPYQPRPLPALASAA

SEQ ID NO: 278145 - protein, 288 aa, unidentified
MDATVVGIDVSKDRLDVHVHPGGEAFAVTRNGEGLDALIARLVPLKARAVAVEATGGFETVVAASLAGSGLPVIVVNPAQVRAFARALGQRAKTDPIDAAVIARFVAATHPAIRPLPDAETRVLADLVTRRRQIVQMIVAERQRERQMPSAHLRKSAARLIKALEKEDLLKSVPGVGDVTARTLIAEMPELGRLSRRQIASLAGLAPWTRQSGKWRGRSFTGGGRSSGRSALFMAALVAKRCNPLLKTFHQHLIAAGKPKMVALIATARKLLTILNAILRDKRPWQTA

SEQ ID NO: 278146 - protein, 348 aa, unidentified
MTEAYDGRQVVGIDLHRRRSVIVRMTEDGRKLETVRITNSAAALRAVIARAGKNPRVVIEATYGWYWAVDVLEAAGAEVHLAHPLGVKAYSYRRVKNDERDAADLADLLRMGRLPEAWIAPAEIRELREITRYRHKLVKARTSVKDQVHGVLAKLGIPVTHSDIFGVHGQAWLDELPMPQPYAGKVASLRQLAGDLAGEITLLEKVTADLLAGHEGYAAIQALPGIGPVLAAVIVAEIGDIRRFPGPGQLASWAGLTPRHYESGTKVIRGHVTKQGSRMLRWAVTEAIQRQPAGSRPREVKDAIIARRGKEAKNIAKIAAARELLTLVFYGMRDGRVRRLAAPRRPAA

SEQ ID NO: 278147 - protein, 391 aa, unidentified
METAYDGRQVVGIDLHRRRSVLVRMTEDGRRLGMARITNRPQELRREIARAGTSPRVVLEATFGWYWAADTLAAAGAEVHLAHPLGVKAFTYRRVKNDERDAADLADLLRMGRLPEAWIAPAEVRELRELTRYRHKLVHLRTSCKDQVHGVLAKLGIPVTCTDIFGTAGSAWLDGLGLPQPYAGKVTSLRHLTGELATEIIMLSAVIADLLAHHRGYQVIQQLPGIGPVLAAVIIAEIGDVTRFKNAAQLCSWAGLTPRHRESDTKVTRGHVTKQGSRMLRWALIEAIQRVPGDSVIGTVKNGIIARRGKEAKNIAKVAAARRLLTLVFYGLRDGQIRCLSSTPRRPAAGDPGPAGGMNSFPWPAARREVAFVSAPPPSPGGAGAVLIDPA

SEQ ID NO: 278148 - protein, 416 aa, unidentified
MSFALPEALFFTGIDWAAETHAVCVTDAGGKITAEFTVEHSADGIAPLVRRLARYGQAGVMPVAIERPDGRLVDLLPEAGHPVVPVSPNAIKTWRDGEVLSGAKSDAGDAAVIAEYPRLRAHRLKTAAPYSDETLALRTAVRARGDLVEMRVAATNQLSALLDAHWPGAKAVFADVESPVSLEFLTRYPTPAAAAHLGEKRMAAFLVKHGYSGRRPAAGLLARLRAAPAGTGREALTEALSDAVLAAVGVLTALNAAVKSLDRSVAAHLGEHPDGKIFTSLPRSGQVSAAQVLAERGDCRQAYDGPDSVAALAGVTPVTSQSGKHRDVHFRWACNKRFRVAVTTFADNSRHASPRAAKVYTDARARGKDHPHAIRILARAWIRVIWPCWLNSVPYDPAQHGAAAALAEQSAKQIAA

SEQ ID NO: 278149 - protein, 320 aa, unidentified
MMAQNDLVVVGIDVSKDKVDACIRALALQQTFPSSAQGHRQLVAWLRKHQVNKAVMEASGGYERGWARVLREAGIEVRIVDPKRVRSFAQSAGRLAKNDAIDAQMIAWFAETFSQAPGQVHDAAHEELVALVKARIALVDLKTRLEVQHQHAAPASVQKARARVLKSLVGEIAKLEAIIAATIKATPCLAERAEIIESVPGLAETTSANLVAGMPELGQVSNEIAAALIGIAPYDDDSGNRRGERHIKGGRRWVRNALYMPCVGAATLNNPVLKAYYDRLIAKGKKPKVALVACMRKLIVILNTMIARGQKWDPSRYALN

SEQ ID NO: 278150 - protein, 353 aa, unidentified
MEQFIGCDAHKAFSVFVSIDEKGTFGRPLRVGHDREVFRKFLEHLPANSQIALETSGCYYWIVDEMEKAGHRPRLAHAFSAKRRMEGRHKTNEKDARGLAMLLRNGTLPEVWIPSAELRDQREMLRWRMQLSHTRTRIKNRIHAVLQRYNVAIGYADLFGDGGRTELLARSEELPRHSRESVIEQLQTVDFLETQIATCEQKLEEMLYPSTERDILDTLPCVGKVLSAVLALEIGDIGRFNGPDHLVSYAGLVPAARESADWRKQDRCPPDCNVYLKWAYVEAANLISMKCKCWPERHVVQLYQRVKSSTKMHGKAAVAVGRHLAEASYWMLNKQEAYQEPKVKRPALSSTHG

SEQ ID NO: 278151 - protein, 356 aa, unidentified
MKNSTPPNSAPATLGLDVGDRFSSFCFIAANGDVADEGKVRTREAELIQRLAPFKGSRLVLEVGVHSPWLTRLLRKEGFTVIVANPRKVQLIRQSYHKSDRSDAEILARVGRLDAVLLSPVEHRSEQQQSDLAVIRSRAALVAARTMLINQVRGSVKSFGGTLPRCDAHTFHKHAPAHLPPALADALTPLITAIASLSTQISAMDDTISRLIVSRYPAAKALQQVHGVGPITSLTFVLTLGDHSRFTKSRDVGPFLGLTPRLHQSGDSSPQLRITKAGDSLLRSLLVQCAHYILGPFGKDSDLTRWGRQRLERAGKNAKKRVFVAVARKLAVLLHRLWVTGEVYNPFYRSGGEAAA

SEQ ID NO: 278152 - protein, 462 aa, unidentified
MERYRGPEQPHSIAPRQCAVCPVQASTERTERDMRTESTPGARGPVFCGVDTHADSHWLHVLDWRGRKVLSRRFPADAAGYEALAGAIAAAGEPACVAMEGTSSYGAGLTRHLASLGMPVREALSPARMQRRRPGQGKCDEADAERAARAAMSGSKLGTPKSQDGWVDGVRCMLAARSGAVKARTSAINTARSLLATAPEGLRSRFRGMGGPRLMEELPSVRSEGALGAALGALADLWAAARDAALDMERAIEASLEENCPALLAMYGCGPVSAAKLAVAAGDNPGRLRSEASFAAICGACPIPASSGKTVRHRLNRGGDRQANSALHEIARQRVMRDPETAEYAERARGRGKSDREVMRCLKRYVAREAYRALMRPHEIRRPEDASELVAARRAARVSQVRAASILGTSEKHISMLERGQRELKPIRRAYEAWVEAGLPLDWDRQAFEAERKMDSKKHLAK

SEQ ID NO: 278153 - protein, 399 aa, unidentified
MHGDYGVFLGLDVGKGDHHAVGLAPDGKRLHDGPLPNTEARLRQLFDKLGRHGRVLVVVDQPASIGALPIAVARACGHQVAYLPGLAMRRIADLHPGAAKTDARDAYVIADAARTLPHTLRRVDTGDETLAELEVLVGFDDDLAGEATRIANRIRGLLTQIHPGLERVLGPKVQHKAVLELLSRCGGPAGLRKAGRRKLASIAAVHAPRMGQRLVEQIMTALDEQTVTVPGTQAAETILPRLADSLREVLRQRDQVAVEVDRMLDAHPLAEVLTSMPGIGVRTAARILLEVGDATAFPTPGHLAAYAGLAPVTRRSGSSIRGEHPPRGGNKQLKRAFFLAAFAALADPVSRAYYDRKRAEGKRHNAALICLARRRCDVLFAMLRDKIPYQPRPTTPVPT

SEQ ID NO: 278154 - protein, 311 aa, unidentified
MDGLNAAIDVGKHQLEVALGSNGELFAEPNQARAIARLAKRLGKLGCERVLIEGGSYQNVLVAALRAAELPVVIINPRRVREFAKSIGQLAKTDHLDARVLALYGERIQPPVRELPDEQNQVLRGLWVRREQLIEMLVMEENRLEHAPKALHRSLRAHIDYLRKQIKQSDSDLDSEVRNSPLWDKYELLSSVPGVGPVLSVALLSDLPELGRLNRSEIAALAGVAPFNCDSGTLRGQRKIQGGRKRLRRVLYAATVAAVRCNPTLRPYYQRLRASGKPAKVALVAAMHKLLLILNAMLKTKTVWRPPCPAV

SEQ ID NO: 278155 - protein, 422 aa, unidentified
MLEETHDNDQIIQRVAALDIGKAELVCCVRVPHPDRPGKRLQEVGSYPTMTRSLLVLVDRLGELGVTRVVMEATSDYWRSPFYLLEAHGFEVWLVNARDVKHLPGRPKTDRLDAVWLCKVAERQMLRPSFVPPPAIRRLRDVARYRVDLVGVRTAEKQRVEKLLEDAQIKLSVVASDIFGVSGRQMLAALIAGERDPKLLAQLARGRMRAKLSVLAEAFTGFFTDHHGFLLAKMLARVDALDADIAELDRKLEELIVPFGQAVDRLDEITGVGRTAAQLILAEIGTDMGRFPTAGHLASWAKFTPGVKESAGKTKGKSSTGHGNRYLARVLGEAAVAAGKTNTFLGERYRRIARRRGTKRAIVAVGRSILVIVWHLLSDPDARFHDLGPGFYDTRIDAEHKKRNHIRQLEALGYKVTLQPAA

SEQ ID NO: 278156 - protein, 313 aa, unidentified
MSSPSCYLGVDVSKNTLVVAGSGRRWQFANTKDGHRKFIAQIKKLSGSGHVVCESTGSYHLSMCLALQEAGLAFTVANAARIHYFGLSEGIIAKNDPIDAGLIERFANTKQPLADPPLCREQLALSESVTHRQQLVEMIKVLRTHRQQVLHAPLVTEIDKSITALEKRLEALERKLRAQVDAHPLWKKKLALLVEVQGIGFITALSLLAKMPELGTLTREQAAALAGVAPINRESGKLRGKRMIAGGRAVVRSMLYLAGHAARRGNATLRAFADRLKAGGKAPKVIRVALARKLVILANAVLRDNTAWTLKTA

SEQ ID NO: 278157 - protein, 310 aa, unidentified
MDIIVVGIDVSKDRLDVAVRPSGEVFAVERNASGVDRLIERMRSVSPCMIALEATGGFETVVAASLAAAALPVVVVNPAQIRAFAKAVGQRAKTDPIDAAVIAHFAEATRPELRALPDEATRLLADLVARRRQIIEMIGAESQREKRIAVPRLRKSIRRVIGMLEKELAELDAEIDDNVRGSPAWREKEDLLASVPGVGPIISRTLIADLPELGTLSRKQIAALAGLAPFTRQSGQWKGRSFIGGGRASVRTALFMGALVAMRHNPVLKAFFGRLIAAGKPKMVAIIAVARKLLTILNAIVRDKRPWQVA

SEQ ID NO: 278158 - protein, 552 aa, unidentified
MANRKRTTFERINLERMNRRQRRELGQRLEKSDPGLEIVHPHAAGIDVGNQSHFVAVPGDRDAQPVREFGCWTGDLVKLSQWLKAGGIQTVLVQATGVYWIALKDIVEQHGIEVVVANAQHTKNLPGRKSDVQECQWLMKLHTYGLVRGSFQLAKDMQGVRAVWRLRGRHVEEAARAVQHMQKALTQMNVQLANVLSDISGKSGQAIIGAILMGERDPDKLAELCDRRVLASPAEVAESLRGNWRDEMLFELGQAKESYQFALQQIQSCDRKLESYLNVLPARQVEITLPSPATAVRARKAPRQRGHTPDIPGLRDQLVRICGVDLTTIDGISVITAQTILAEIGTDMSRFPSEQDFVSWLGLTPSRDLSGGKVVRVVRRKVPSRAALALRMVATALRCSNSYLGRPLPAPAEAATQQSFRCQSHGSLPGRTRVSLADERTGVGGSGSGEVRAKTQSAEPGLTAGPGSRQRIPAGPCNRRVNRHHPLFFSAGLHAGRSMAKLCPQHAMLHAANPESLLYIETFVQPSLRRRAIAEEVSGETMYSNYVRYAVK

SEQ ID NO: 278159 - protein, 309 aa, unidentified
MKQSVVYIGIDVAKAHLDVAWAGTFRRLPNERSGHAVLVRWIKQSATPVQLICEASGGYEQGLLESLEKSEVKVTLVQAVRVRQYARAAGILAKTDQMDAKVLAAFGSAMQPPPTPPLCAEQKRLRQYEAQRRHLSRVLVAEQNRLAQLSCAELRNLSRGLISKIKKQIETIDTRIGDLIAQDQTLREKAQKLTAIGGVGVRTAALLLAQMPELGQLNRRQAAALAGLAPFNHDSGSIRGKRAIFGGRRALRSGLYMAALSAARFNPILSRFYQRLRAKGKPHKLALTAVMRKLLLALNQTLKPIPSLA

SEQ ID NO: 278160 - protein, 355 aa, unidentified
MSNEKYIGMDVHQATISVAVTDSQGKVVMESILETKASTLLEFFAGLRGSLFVTFEEGTWAAWLYDLLKPHVSEVLVCNPRKIPLVKQGNKSDKIDARKLAERLRLHDLKPVHHGETGIRMLRELARSYLTIVKDLSRVMNRLKALYRSWAIPCAGRDVYYRRHRSEWLEKIPEAGTRRRAEQLYQQLDLLQHLRQQARRELLAESRKHAITAKLRQIPSLGPIRCALAVALIQTPHRFRSKRQLWTYSGLGLETRDSGEYQFVQGQPRRRKKQATIRGLNKDYNHDLKALFKGAATRASVKPGPFQEFYQRSLAKGIKPTMVRLTLARKIAAITLTLWKKGEDFDIAKLNSQAA

SEQ ID NO: 278161 - protein, 350 aa, unidentified
MSPRNAPRPAAVYGVDIGKNIFHVVGLDSDGKPVQRVRFRRDTLMKFFERAAPAIVGMESCAGSQWIARRLQALGHKVRLIPAQFVKPYVKSNKSDIIDAEAIAEAATRPTMRFAAIKSEEQADLQAVHRVRDQMIGTRTRLINQMRAFCLEYGIALRQGAGLFKLDLPLVLDDLSNDLSPAMRKLLVDLFADLRQLEQRINDVTREIAAIADREDVARRLMTIPGIGALGATALLAAVGTGCQFQKARDLAAWLGLVPREYSTGGKQKLLGISKRGNRYVRKLLVHGARSCFRHLDRNRDRLGSWLDGLQSRMHPNKAVVALAAKMARIVWVVLTKPGALYERRDPAFA

SEQ ID NO: 278162 - protein, 397 aa, unidentified
MDQTIYVGIDWARAKHQGCVVSETGKPLFEGAFDHCAEGISAWADRLLAMVDGDGSRIKVAIETPHHAVAEMFMERGMRVFSINPKQLDRFRDRYGVAGAKDDRRDAFTLADSLRTDGDRYRPVEFQEAHIVVLRELTRMHVALGQELVSLSNRILELLVRYFPQAANLGSPHSDRWLIKLLEQFPSPEDAARATLEDMNALRCRRDRQKLLDALQAPALRTAPGVNESSKRHLLSLIARWQLTDAEKSKVVLEIDRLLKAFRPQNENEHSTVAIIQSLPGAGTIITATMLSEANQLLQQRDYSTLRCKSGVAPVTRQSGKKKLVLMRYAYSHPLGNALFYLAKGASRLDPDLRKRYQTFRARGIAHAAALRRIADHLLSVLCALLKKNSLFLPSAA

SEQ ID NO: 278163 - protein, 359 aa, unidentified
MSNQELFPNLTIGLDLGDKVSRTCEIDAAGKMVKTAAVATTPGAIERYFGGRPPCRVVLEVSTHSPWVSRQLKSLGHEVVVANTSEIFSRRRRKRRNDKLDAEFLARQGRADVKLLYPIQHRGVEAQQDLALLRARDQLVQARTQLISHVRGAVKSLGARIGKCDADVFAKRAAAQLPESLRPALAPLLEVIGELTRRIRGVDRQVERMQEKYPEAVHLQQPVGVGPLTALAYVLTVEDPRRFKHSRAAGPFFGLVPKLDDSSDSSPQLHITKAGDALVRRYLVSAAHYILGPFGPDCDLRRHGQAIAARGGKNASKRAAVAVARKLAVLLHHLWVIYGTLKHLSAAEQPNTGPKAPGA

SEQ ID NO: 278164 - protein, 379 aa, unidentified
MRNDSTVYVGLDLHKDSITVAYAIDAGEVELLGKTGTTGADIDRLCTRLQSKAPHVRVVYEAGPCGYGLYRQLVQKGFDCMVCAPSLIPRKPGERVKTDRRDAIKLARSLRAGDLSAVYVPGIEDEAFRDLARAWAAAREDLRHARQRLKSFLLAHGVRYTGSANWGEVHRRWLGRCSFPSAWQHLAFDEHRRTIEDRLAQCARLETALREAVISWRFYPVVLAVQAMRGVQFVTAVGMVSEVGDLSRFEHPRQLMAWLGVTPSEHSSGGKRRQGSITKTGNSYARRLLVEAAWSYRHPARVSPEIQARLEGLPKAIIDRAWDAQVRLCRRFRRLTARGKPINITVVAIARELAAFIWDISRLAMALAIPRSKLPAPCT

SEQ ID NO: 278165 - protein, 397 aa, unidentified
MLKTNLQNSIDFNGQNFYVGLDVHKKSWAVTIRSMGIQIAHFTQPPGADVLAGYLQRNFPGGCYHSAYEAGFCGTGTHEQLCKLGINNIVVHAADIPSTDKQKKNKTDLHDSRSIAEHLQRGNLHGIYVLSREQQELRSLFRLREGNVKDVTRANNRLKSSMMYFGIVLPESISKKEFLSSRVLTWLGNYEMTSPAGKITLQHYIDELRYQRKHLCQVTILLRKQIQATHLESYQYALSVPGIGGITGMGMLAEIADFSRFDDPDEFCSMLGLCPWEDSSGNTIKIKGIQPRCNRHLRPLLIQASWTAIRKSPEWFAYYSKHAVKDSKKAIVKVARKLALTVRAVVIKQQPYQAGYLQNKKMEQNAQKNLLNNRFSSGITEQHENKQPGNVFSSWPG

SEQ ID NO: 278166 - protein, 338 aa, unidentified
MKVTTVGLDLAKSVFTVHGVDARGNTVLRKTVRRAKVLEVFAQLPACLVGMEACSGAQHWARELRQLGHDPRIMAAEFVEPYRQGGKNDANDAAAICEAVSRPKMRFVALKSVEQQAVLAVHRLRQGLVEERTALANRVRGLLTEYGLVIGAGLDRLRRTLPEILEDGANGIPSIAREVFADAAEHLRQLDDRIAAYDRRIAVLARMSEAVQRLMKVEGVGPVTATALVASVGDAKVFNNGRQFAAWLGLTPRQHSTGGKQRLGAMTKHGDVYLRTLLIHGARAVLRVTAYRSDAKSRWAERLRRRRPDNVAAVALAAKHARIIWALLARAQDYHPAT

SEQ ID NO: 278167 - protein, 381 aa, unidentified
MQSNHTVPTILVAIELSTATWLVAVRVPGSEKPHLHRVDGGDTAALLALIASVRARAAHQLNAEIGIVCCFEAGRDGFWLHRLLTTRGITNYVLEPTSVLVNRRARRAKTDRLDAEGMLRVLAAYLRGDHQVCSMVRVPTPDEEDAKRMHRARENLVQERLRIENRIEALLFTQGIRKGPSLRSWERDLAILRTGDGREIPRHLLAELDRLRRRLVMTLELIREVEAERDQATKTKPQDQACRKIAALCRIRGISDNFAAVLTREVFYRSFDNRRQIASYVGITPMPYQSGGIDRDRRISRAGNPRARTTMIQLAWLWLRYQPGSELARWFRERVGTLAGRTRRIAIVAMARKLLIALWRYTESGVIPAGAEIRAETPVAA

SEQ ID NO: 278168 - protein, 320 aa, unidentified
MSEEIFIGVDVCKAWLDLARVPAAPADKSGALSPRVGNDEPGRAALVLQLKELGPTLVVMEATGGFEAALASELCAAGIAVAVVNPKKVRDFARATGVLAKTDRLDAQVLARFAQAIRPQVYSLPGETQQEIIELVDRRAQLVTMRAQEKNRLSTVKHVARTSVRQHIEWLDNRIKEIDKDLDGRLKDSTIYQPKYELLDSVPGVGRVTVTMLLGRLPELGTLDRKRLTALVGLASFADDSGKRRGQRYIQGGRADIRTAMYMAALTAKRCNGPIKALYERLRLAGKPFKVAMTACMRKLLIILNAILKTGQPWRNAEAA

SEQ ID NO: 278169 - protein, 461 aa, unidentified
MTKRKKKSPIDIPSLETLLQLNLNAAGLDIGDEEIYACVPADRDEQPVRVSPTFTVDLYALADWLAACGIDTVAMESTGVYWIPIYEILEARGFKVYLVNARHLKNVPGRKTDVLDCQWIQQLHTYGLLRASFRPPEEICALRALARHRDNLIRYRAAHIQHMQKALQLMNVKLTQVVSDITGVTGMSIIRAIVAGERRPGELARLRNPKCAKSEAEIAKTLQGNYKTEHLFVLKQSLDQYDFYHQQIQECDAEMEAMYAALPPSEADDQACPPPKPRRGKPRKNQAHFDLTTSLYQMVGVDLTAIDGLDALTVQAIITEIGVDVSPWPTVKHFTSWLCLAPYNDISGGKVLRRRSKKTQNRATTAFRLAAQSVSRSQSALGGFYRRMRAKHGPAKANKATAHKLARIVYHMLKNQTAYVDPGQTYYEEQYRERTLRNLKRKAANLGMDLVPKTAQTLVVS

SEQ ID NO: 278170 - protein, 405 aa, unidentified
MGAEQVAHGWAGIDVGKGHHWVCLVNEAGSTLWSSKVVNDEAAILDAIAEVLARAQQVSWAVDITGTSSALLLALLSAHGQAATYVPGRTVNQMSTAYAGEAKTDARDAYVIAETVRLRGDLTPVDVPATLVAELRLLVTHRTDLVADRVRMINRLRDVLSGYFPSLEREFDYATSRGAVVLLTGYQAPAAIRARGRARLTTWLRARKVRSAEQIATAAVKAANAQHTTVPGQDVAASIVAEIATALLELDQRIRVLDARIGDTFHAHPQAQIIESMPGIGTILGAELIAAAGDLSRYVDAGHLASAAGLVPVPRDSGRRTGNLHRPLRYSRKLRRVFYLSAQTSMMREGPNRDFYLKKRGQGHGHVQALIALARRRVDVLWALLRDNRVFELTPPTREKLPQTV

SEQ ID NO: 278171 - protein, 347 aa, unidentified
MRFYTRQHKYYCGVDLHARSIYVCILNQEGAVLVHKNLRAKPDAFLAVIAPFREDLVVAVECMFTWYWIADLCAREGLTFVLGHALYMKAIHGGKAKNDRIDSHKIAHLLRGGNVPFSYVYPEAMRATRDLLRRRNFLMRKRAELLAHIQNTNSQYNLPDIDGALRYPANREDLSERFTDDSVKKSIETDLALIDVYDRNLKEVELYLTRHAKVDDPNSYHILKTVPGVGQILGLVLLYEIHDIARVPSVQDFVSNCRLIRCSKESAGKKLGTGGRKIGNAHLKWAFSEATCLFLRGNGAAQKYLARLESKHGKGKALGILSRKLGTAVYYMLKRQEAFDMNKFFEK

SEQ ID NO: 278172 - protein, 374 aa, unidentified
MIATTRSASSVSEPTLFVALELSKQVWKLALTSGFGVAPWVTSVPSGGMVALRRVLARGGRRFGLPARARVVSCYEAGRDGFWIHRALTAEGVENRVVDSASIEVSRRARRAKTDRLDALKLVAMLVRVWYGEQRVWREVRVPTVADEAARHVSRERSGLLQERTRMMNQMRGWLATYGATLPRRRPAAWWTTVRDWAGAALPAAVQARVARTEARLTVLGEQLTALEAQQRAAIAAAAPASAGQRLVQLKGLATTSASVLLDEGLVWRAFRNRRQIGGLLGFAPTPYDSGEVTREQGISRAGNARLQATMIQLAWSWVRWQPLSPITQWFHAHFGPGKRGRKIGIVAVARKLLIALWRYVTDRIVPAGAILRA

SEQ ID NO: 278173 - protein, 400 aa, unidentified
MLSIGIDVSKGKSTVCGMKPGGEIVYTPFEVQHTREGMSELVSLLRSSGEEVRAVLESTGSYHCPVVAALLENGIFVSVVNSLRMKRFCSQSIRKVKTDRIDAMQIALYGLAYWQELQPTRLPEDTYRELQLLARQYYQMTSMLIKAKVDFNAICDQVLPGMQELMNDHAGRHKLSDFVLRYHHTTHILEMGETRFRKDYCKWAEKKGYRNCERMAALIFATAQNGIPVLPNAPSTQIVITEAIRVLHTVEASRDAILTQMQALAKTLPEYSLVREMPCIGDTLAPRLIAEIGDVRRFHSKRALIAYAGIDAPPYQSGKFCANNRHISKRGNRYLRKTGYEVMQSYVMHKPANDPIFTFIEKKRGEGKSGKLAMVAGLNKFLRVYYGKVTELYRSLPAIE

SEQ ID NO: 278174 - protein, 407 aa, unidentified
MRLFVGDDWAEDHHDVEVMDGSGRRLAKARLPEGVAGMARLHAIVGDLVGDDADEVEVLIGIETDRGPWVAALVAAGYTVLAVNPLQAARFRDRLRVSGAKSDAGDAHVLADMVRTHAHELRPVAGDSARVEAVKVVARTHKTMIWERTRHTQRLRHALRDYFPAALTAFEDLDAADTLELLAKAPTPAQAARLTIAQISAALKRARRRNIADKAAAIQAALRSEQLGQPEVVAQAYAASVQALLAVLTVLNTQIKTLQGQVDAHFGKHPAAEIIASQPGLGSVLGARVLAEFGDDPARYASAKARKNYAGTSPITRASGKKKIALARFVHNDRLIDALLAQAFSAILRSPGARVYYDRQRARGVGHNPALRQLANRLVGILHGCLKTGTHYDEATAWPGPAEKAAA

SEQ ID NO: 278175 - protein, 392 aa, unidentified
MSQQDYHFDASRSLTALEQDSAIIAVIEMSQSKWLVSALVPGVERHPLKKLDAQEEGLLKLLHRWRNEAGQAGREIKRIVVAYEAGRDGFWLARWLRARDVEVYVIHPTSIAVSREHRRAKTDRLDTELLMRAFLGWLRGEKCHCSMVAIPTIEEEDAKRPNRERQNLVTEQTRIVNQIKAIFARFGIRAFRPTLHKVEEKLKGLRIAEGTPLPENTRAELCRHLARLRVAREQIRAVEQERLRKLAAAPAAEKGSHVTVRLIARVLGVGVETADMLVNEVLSRRWRDHKAIARYAGLTGSPDESGKRRRERGLARAGSARVRCGMIQFAWRFLRFQKGSALAQWFAARTADGRGGTRKTMIVALARKLLIALWRLATRGEVPQGVILRPAS

SEQ ID NO: 278176 - protein, 420 aa, unidentified
MFKIFRFNCCGLDVHKTWIYACIGITDSNGRTEYKEKRFSSFSKGLHELDEWLTLYSCDEVCMESSGKYWIPVFNVLEKNHKVTLAHPKYTKPQKGNKTDRKDAKWICDLFMCDMIKPSFIPPPDIRQLRDLLRYHRKLTNMETGEKNRAQNCLTVSNLKLDDVFSDVFGKSALSITKYILDHPGESFDVSPFVHGRCKTPIEEIQAAVDGAISKEQAIKLRQCLEHIDQLEEHKQSIKNEILTITEPYSETLELLRTIPSFDKNPITAITVLSEIGSDMTVFPSAKHLCSWVGCCPRNDQSNQKVKCRRISQAGTYLKPILVQIANALIKSKSHTEFVERYRRLKARRGHKKAIIAICKMLLTAIWNILSKHVPYTNEGYFTSSPNIKKDKMLTTAQALTLLRLRGYTISDDNNHLTAS

SEQ ID NO: 278177 - protein, 345 aa, unidentified
MNYYAGIDVSLKCSSIAVVDANGEIVREAKVATDPMVVIEWFRSYGLQMERIGLEAGPFSQWLYAGMKEADLAVELLETRHVRAAFKTMPVKTDKKDARGIAQLMRLGWFRPVHCKSVPAQEVRAVLTARKLLQGKLHDVEMSLRGILRGFGLKVGATTPKTYPARIRTLVDGHPALEVIATALLKARETLAEELRGFERRVRAMARQDERAHRLMTTPGVGTLVALTFVAAVDDPERFRSSRAVGPHFGLTPKKYQSGETDYTGRISKIGDAGVRTALYEAANVILTRPVKGSDLKTWALSVAKRAGLRKAKVALARKLAVVLHRMLRDQTSFVSHKAAPIAAA

SEQ ID NO: 278178 - protein, 426 aa, unidentified
MKVMHDRVAAIDVHKDMVKVAVRVPGERRGTRKTDVLEFRTFYGVREEMGRELRRRGVTHVVMEASGVYTEPVYYALAGLDFTEVMVINPAHAKALKGHKTDARDAIRLLDLYECGLLSGSCIPAPDLKEVRDLTRYRIKTVQARASEIQRLQKTLETAGIKLSSVVSDVTGVPATAMIEALTGGERRGAVLAGLAQGRLRTAGKMAGLPVALAGRFTDHHALMCRLHLDRIQSLGEAVAGLDAEIAPRAARHAREAGLLKTLPGFGDVIVAGWLGAIGPAPHQHFATAQRLASWATVCPGNYMSAKKSKGGRTGDGGNYIKPLLVQAAWAAVRVPGRLQARFRRLVRRFGGARNKGAIKRAIMAIARTLLKIACQVLKTGTPCTDLGAGFYASRETPQARQDYLIRQLQKLNPGCIITVTPAEAA

SEQ ID NO: 278179 - protein, 322 aa, unidentified
MSILHLHVGIDVSMDTLDVAFIGARGKPCSFKVPNDREGFDETFRRLAGAAPPEAWRIALEATSAYHRAVVAAMLERGVEVLVLNPKQARDLARGLGVLRKNDKTDAGVLALCAKMAWRKPERLAQGAGYEIQEVSRRIEGLTAQRAGEKKRLLKPGLCRLVRESCERHVRALDEEIRLMERAWTELLERSCELKAAFDNVRTVPGCGRATARKVVSEMLVVPRARTTAQCVAYAGLAPHEQTSGSSFRRKSSTFSSGNKALRTALYMGAVSALRHDAQSRDLYLRLVAAGKPKKVAITAVMAKLMRRIAAVANRGTPWVKA

SEQ ID NO: 278180 - protein, 467 aa, unidentified
MAARKHKQRRMSAQVVEDEDYQLRYEVVAGIDVAKESAVVCVRMPPVRGKKHRTSHLQTVPATVPAIGELAAELMALGVQMVSMEATSDYWRVWFVVLEEAGLAVQLVNSSQARNLPGRPKTDKEDARWIARLTEMGMLRSSFVPPPEIRALRVYTRHIWDLTADRTRYWQRLEKLLEDALCKLAAVVSKLAGHQTARAVVEAMIAGERDPRVLAALGRGRMRNEKLPALAEALSGMRFGPQHAHAAASLLRAIDLLDAELRELQERVTEHLAAIPASWGVDADGVTGPQAGRADGAAVLPAADRLDEIPGLGREAAAALIAEIGLDMSRFPTPQALVSWAGLTPTARQSGPRNGRGKKGHGNTYAKRIAVLAAYAAANTDTFLGERFRRLASRPGGGGRKKAGCAVGRSILIIVWHLLNDRAARYQDLGSGWHARHTDRSRKARNARRQLEALGYDVIITLREDAA

SEQ ID NO: 278181 - protein, 355 aa, unidentified
MTGTKYIGMDVHKESISIAVRSAAGKIVMECVLETKASMILQFFDGLRGDVHVTFEEGTWSAWLYDLLKPRVTRLVVCDPRRNALLQEGNQNDRVDARKLAELLQNNQLRSVYHGDHGLRTLKELVRSYLTITRDLSRVMSRVKALYRGWAIPCMGKQVYSSRHRGEWLGKIQEPGVRRRAEFYYQQLDALRSLRQEVRRDLLAESRKHKAWKRLGQIPSIGPIRAAMLLGILQTPHRFRTKRQLWTYSGLGIEAYSSADHQVVEGQLQRKKKRIEVRGLTQNCNHDLKNLFKGAAVVASTKPGPFEKFYAALLAKGLRPEMARLTLARKIATIVLIVWKKGVCFDAQHLKPQTA

SEQ ID NO: 278182 - protein, 362 aa, unidentified
MRMGGTAKSPLVFGTVGELGPSILGSCPQQMKGSTSRMQGKEVSEQETLKCTAGIDVSKSWLDIHVLPSSESLRVANTTGGIRQLKRWLLRRKVELVAVEATGKWHREVARSLSASHLAVAVIDPYRVRMFAKAQGILAKTDRLDAKVLAMFAAMMSPSVREPAPQALEAMQELVTARVSAVDEQVALKNQLAAAREAFLKRQLERRIRELGGHIQAIEKECLKQINQDEALARRFAILTSIPSFGDVVAITLIACLPELGLLSDKQIGALGGLAPIADDSGQRQGVRVVWGGRGAVRRILYLAALSAKTYNNDMKLFYRRLTERGKEAKPALIAVARKLLVLANLLIAQDRLWQPTAPQNA

SEQ ID NO: 278183 - protein, 353 aa, unidentified
MTDTPSIAWLGLDAHSRNCVLAQLDDQGNEINHWRFPTDPRQLLKHLQAIPAAVKRLMLEESNLARWISQLLRPHVQQLIVCDARRNRLISQDAHKHDRRDAFALARLLRLNEYRSVWQPTDDQRVLFKRAAQAYENSVLRQTRLKLQLKSLFQHWGLFPTGATVFSKAGRSGLLQKLPYHALRSQALLLYELLDQALAGQSQARRLLCQAGRLFPEVQRLRSAPGVGLVGAHLFVAYVQDPHRFAKFSRLTRYCRLAIRDRTSDNKPLGFKQLDRQGNGVLKAISYRAFLQAAKRRSGPLWDFYQASLRQTGSNTHARLNTQRKILLVLWTLWLKGEEFDPNKFSHPQPINV

SEQ ID NO: 278184 - protein, 417 aa, unidentified
MINDIQWFVGIDWATQSHCVCLLDAEGRRVGQREFTHGGAGLAELCDWLLEKTQAAPGQIAVAIETPHGPVVEMLLERGFVVFAINPKQLDRFRDRFTVAGAKDDRRDAHVLGSSLRTDRAAFRQLAADNPVMIELREWSRMADELKQERTRLANRLRQQLWRYYPQAAKLTDDVADDWFLALWQKVPTPDSAAKAREKTIARVLTAHRIRRLDAATVLKTLRETPLFVASGTTQAACAHIRSLAARLHLVNQQIKEAQQNLDRLCAQIEGEENASGQSFEQCDVTILRSWPGIGRINLATLLAEAAEPLRRRDYHALRALAGVAPVTRQSGKQRFVVRRLACNRRLQSAVHHWSRVAIQHDAAARQRYDALRQRGHGHARALRSVGDRLLCGLCAALKRKIPYDAGHNSAKTSAKA

SEQ ID NO: 278185 - protein, 518 aa, unidentified
MCSKVIQPEARRVTENSPEPAVNNFAAAASKKTFSKPLRPGKVPPGRIAPRRSRSDVPKPARLQLRTPVGAAAVPPTSERTEPCEGPYTRMTPGRPTMPRKEPMKTYSELSHFGGLDWAKHHHDVCVLDPGGQIVERLRFEHSGPGWEKFREQIRKYPALGIAIETSQGAVVEQLLGSGVTVYPIHPKAAKAYRQRQAPSGSKDDELDSWSLADALRMDGGHWRALSPQDPMIAELRLLCRDEEELIEQRTALVNQLQAALGEYYPAALEAFADWTVPYTWEFIARFPTPQALAGASAHRRRVFLHTHKLWRPGTAEARLEIFARADQFCGGAAVTRAKSRLALSLVKLLQALQKQLDEYRAAIERLFAEHPDHDVFGSLPGVGEKLGPRLLGSLGADRGQYPDVQGLQCVAGSAPVSFKSGQMRRVKIRWHCDRFLRHTVHLWANCSLKTCAWAAAYYKAKREAGMSHACALRCLAQRWLKILWKMWQTHTLYDPEYHARNQQRHGSWVLQLNPKKA

SEQ ID NO: 278186 - protein, 366 aa, unidentified
MKKVSTARAKQSRNFSEQSLTIGLDLGDRSSWYCVLDETGQILVESKVSTSPNAMKEVFGSKRRSRIALETGTHSPWVSRLLNELGHEVIVAHARNVRLIGESRRKDDRLDAQTLARLARIDPQLLCPVKHRSAEAQADLTVIRARAGLVRARTALVNAARGLAKSYGERLRGCNVRNMNPEKADALSPELQTALQPLLAGIEAVSEQIGEYNERIEKLAEESYPEVNLLQQVKGVGTLIALTFLLTLEDPHRFRKSRDVGCYLGLQPGRRNSGQSEPQMHISKEGDPYLRTLLVQGAQHILGPFGSDSDLRRWGLKLAERGGRNAKKRAIIATARKLAVLLHHLWTSGEVYEPLHNSQRVIAAAA

SEQ ID NO: 278187 - protein, 414 aa, unidentified
MAKFSVYIGIDWANDKHDVCVQVANSGERSFEVIKHSSKSINEWITTLHKRYKGQIAVAIELSKGPIVYALQKFDFVTIHPVNTTMLAQYRKAFSPSGAKDDPTDAELALDLMLRYPNKIKALKMESESVRKLTYLVEQRRKLVEDKRRFSNRLIVTLKEYHPHLLDWFSHRGSGIFCDFITRWPNLQKLKRARPETLKKFFSSYPGRTASYSVKRIQSISEAEPLTLDNAVIESHQLLAVALANQLLVAVKVIKVFDREICELFNALPDAELYKSLPGTGPCLAPRLLVAIGENRSRFNSASEIQMYAGIAPVTVRSGKKSWIHWRYQCSKFTRQSFIEWAAKSIRQSYWAAIYYQQQREKGNTHQAAVRSLAFKWVRIVYRCWKTKEQYNEAKYLKALSDRNSPLLFKEKAC

SEQ ID NO: 278188 - protein, 446 aa, unidentified
MDMSDVIRSTPSEPEFAALVAIDWADKKHVWALEAVGTGQRERGELEHTPEAIEAWASNLAGRFGGRPIAVGLEQSRGSLLYTLTKYAHLVLYPIHPTTLAKFRAALFPSGAKDDPADADLLLELLLHHRSYLRRLEPDTMETRKLQLLVEQRRQVVNEKTRQSNRLTAQLKIYYPQMLQWFDEVDSPLMGHLLQRWPTLEKLQRARPDTLRRFFHQHNCRGAQRIEQRLEQIREAVPATQDAAVLESSVITVQLLVRLIETLRKGIAELDRKIEKVATTHPDFVIFDSLPGAGKVMVPRLIAAFGTRRERYCKASEIQSYSGIAPILERSGQSQWIHFRWTCPKFLRQTFHEWAGHSLGKSEWARTYYQQQRVKGKSHHAVIRALAFKWIRIVFRCWQTRTPYDEQAYLHALGRRHSPLASAASPIVNLQWKKCGGFWKLSADPS

SEQ ID NO: 278189 - protein, 312 aa, unidentified
MADMVRLAGIDVSKDKLDVHILPSGESQTVAYDGRGLAGLRRWLIGLGVALVALEASGGYEREVSEVLEEAGLIVHRLNPLRVRRFAQLKGRLAKTDRLDARTIAEFACAHPQERQLRRDPRRERLAEHLLVRRHTQDAILDCTNQLEHLRDGELRRLVIARKTSMERALAKLDRGLAKLIAEHDDLAELSERLRSVPAVGPVLAITLIALLPELGSLTRRQVASLVGVAPFDRSSGRQNSPKSIEGGRAFVRKALYMAAMVASRHNPVIAAFSDRLAGKKGKVRLVACMRKLIVTLNAIVRDGAQWQPRPA

SEQ ID NO: 278190 - protein, 262 aa, unidentified
MEASYYVGIDIGKHRLDWHVNDTQNTPLTTGQAANTPKGIHKMIAQWKRGKICLDELIVCFEHTGPYGLLLATILEQSGGCYVMVSAAQVQLSLGIRRGKSDPIDARRLAEYLWRFRDRLAPSRLPSKALLELRSWLIWREKLVKMRTALANGIKANVLTSQVMDLVEINDQMQAQHDQLTTLLKQVDRTINSLLRTCNTTEGQYDLLACIPGIGPIIAGWLLVYTEGFTRFPNARQQACFAGSAPFPKQSRQHSSPDRVSQ

SEQ ID NO: 278191 - protein, 345 aa, unidentified
MGISTIGLDLAKNVFQVHGVDERGSALLRKQLRRDQVVPFFARLQPCVIGIEACSGAHYWAGKLRELGHTVRMMSPQFVTPYVKTNKNDAIDAEAICEAVARPNMRFVAAKTPEQQAVLALHTARAGFVKARTAQANQIRGLLAEFGLVIPQGIRNVYKRVPALIERAETWLPGRFRALLERLLEHLKRLDRQVQELEREIVGWHRESEISRRLEAIPGIGPITASALVASAGDARNFKNARQFAAWLGLVPRQRSSGGKSQLLGISKRGDVYLRTLLIHGGRTVVRYAAAHTGKASSWLTHLIGRRHANVAAVAVANKNARVAWALLASGRRYDTSGKARAAAA

SEQ ID NO: 278192 - protein, 317 aa, unidentified
METSLIFVGIDVSKAQLDVAIRPSGEKESFANDKVGIKALVKRLAKIGPTLIVLEATGGYERQVTRALVSADLPVVVVNPRQVRDFAKATGQLAKTDSIDAAVLAHFAEAVRPQLRPLPDGVTLELRALTSRRRQILEMIVAENNRRAMTSKAVAKRIGAHVRWLEQELERANQELDRAIEQSPIWKEHEELLRSAKGIGPVTSRTLLAELPELGTLDRKQISALVGVAPFNRDSGSLKGRRSIWGGRAPVRCALYMATLVATRRNPVIRDFYNRLTAKGKIFKVALVACMRKLLTILNSMIKHKTSWSETFSRQTT

SEQ ID NO: 278193 - protein, 387 aa, unidentified
MQKPHDNSKASPAAFMQDNTLIAVIELGLSNWLVAGLIPGVSREPLKKLEPNPEDLLKLLHGWRDEAIKAGRPITRIAVAYETGRDSFWLARWLRERGIDAHVIHATSVAVSREHRRAKTDRLDTAMLKRGFLGWLRGERGHCTVANVPTMEEEDAKRPHREREGLVHEQTRAVNRMKSALIQFGVRNFNPKLRKARVKLETVRTPEGKSLPPNTIAALRRDMERLKIIKEQIKAIEQARLQQFEQKPEALANRMVYLLVRIYGLGWETADLLVHELLSRTLRDRKAVARYAGLTGSPDESGSKRREKGLSRSGNARVRKIMIQLAWRMVKFQPDSALVQWFKQRTENAKGSRKPMIVALARKLIIALWRYANDGVIPEGFRLHSAA

SEQ ID NO: 278194 - protein, 340 aa, unidentified
MNSLTDLREVVDVVIGVDTHVHTHSAAVLDTATGGVLGEITVEATPGGYAELVEFANNRATLRVWAIEGCNGIGRHIAMRLLTDGQEVIDVPPKLSARARVFSTGQGRKTDATDAHSVALVGTRMAGLRPVVNDEQLAVLRVLVDRRRALGEDHTRMISQVHHLLLELIPGGAKKDLSAAQAKALLAKVRPRDAAGKARRRVAAELIGDLERIYQRSKAADKELKELVAATGSSLMDLHGIGPSGAARLLVEVGDITRFPDRDHFGSWTGTAPIDASSGDQVRHRLSRGGNRQINRVLHIMATVQLRHPTEGRAYYDRRKADVRLPPAEGQHLAARRGPR

SEQ ID NO: 278195 - protein, 376 aa, unidentified
MNEKLRFLGLDVHAETIAVAVAEANGEVRSLGMIANREDSIHKFIRKLGSPEHLRACYEAGPTGFVLYWQLTQLGVKCDVVAPSLVPKKPGDRVKTDRRDALKLARSHRSDDLTAVWVPDEGSEALRDLVRAREAAKQDQLRAKHRLTKFLLRTGQRPPLGVKAWTEKYVEWVQQVRYTHPAQEATLLDCLNEVQHMEERVKRLEQSIVEVIQLAPAPMQEVVRGLQALRGIAHISAVTIVVELGNITSRFESARDLMGYSGAFPSEDSTGKRIRRGGITKSGNAHLRRIVVESAWSYRHRPAIGARLRRRQEGLPAEITEIAWKAQNRLHKRYMTLMARGKEQRKTMTAIARELLGFIWAIGIKAEAACKQQMAA

SEQ ID NO: 278196 - protein, 344 aa, unidentified
MYFIGVDHHKQASVMTIVDKDGQELKNGRVLNLRERVKRFLEGYHPFTAVLEAGRSSYVMADLLRELGGEVKMANALQVKAIAHARIKTDKRDSRTLAHLLRTDLIPEVYQRGERNRRAQRVMRLRAHWVAKQTEVKNKIRALLAHQREEIQLEVEKREERLFSGKGVEFLKTLPLEDPDKMVLDDLIQGYEEAQAHIQKTDGLVGHLYGEIEEAARIDTVPGFATTLSVLVAVEIADIKRFPTVGDLHSYAGLIPSTYASGERMHHGRITKQGSAWLRWAAVEAVYPAIKKDLGLRVLFHRLAKRKGPNVAKVAVARRLLTIIYRVLTEKREYIPDKMTRSAA

SEQ ID NO: 278197 - protein, 427 aa, unidentified
MPYKIAGIDVHKRMLHVVVSDVQVDGEYDFTRRVFGSLPEALRSLAAWLVEQQVEEVVMESTAQYWKPVWGTLERYWKRICQTREGALATSGTLHLALALSNRGRRGRKKDFRDAERLVKRLVAHELTLSFVPDVEQRLWRTVVRTKYQLTRNRVQLQNRLEALLEEAHIKLSSLVSDLLGASARRMLEAIAGGETNRETLAALADRGLRATQEQLQDALGVCQELNPVYRRLIKMVLDEVASIDKRIDQLNQEMASLLRPHEDQVKRLAEVPGLGVDSAQQIIAEVGAIAATFPSEKHLSSWVGACPGDEESAEVNHSRRSPQGNRHMRRILNQAANAAAKHKGSIFQILYGRYVPRLGHNQTIGIIAHKLCRLVWKILHRGIRYEERGPEVSKASKQKRTRKMILQLRRLGYRIEPSPSPSAITA

SEQ ID NO: 278198 - protein, 455 aa, unidentified
MKHEPEEIPDAEHELVIERVAAVDVAKASGKVCVRVPGKAGRRVSRVWDVAATTAAVTELAEDLVELGVERVTVESTSDYWRIWYYLLEAAGLEVQLVNARDVKNVPGRAKTDKLDAVWLAKLTEKGLLRPSFVPPTEIRRLRDYTRLRADLTHDRSRQVQRLEKLLEDALVKLSTVATDIIGVSGRAMIEALIAGQRDAKVLAGLARGRMKTKRAALIEALSGRFDDHHAELARMLLDQIDALTAQIDTLTARIEQLLAAMPEAQPVDPRRDGPTSGHPVGVTADTLAECARLTTVERLDEIAGIGEHNAQVIIAEIGLDMSRFPTPAHLVSWAKLCPRTIQSGPVTRGGHSGKGNPYLKGVLGDAAAAAAKTNTFLGQRYRRIVKRRGKLKALVAVARSILVIVWNLLNDPTARFHDLGPDYHTNRIATERRMRNHIAQLTAMGYRVTLEPAA

SEQ ID NO: 278199 - protein, 295 aa, unidentified
MMKNKGRVVGLDVHPDSFAEAVVEGRDPASAVVSSTSTRVELERLEEWALRHTSTEDTLVLEASGNAFAVGARLRAIGREVEILDSHRAGKVGKVYCANDRVDAVKIARIYLSALSPIVWQPDQKTLERREIFSAYQAVVKESTRAKQQLRSMLNEHCVRLEKGFRLCHPYAIGRLLKVREWTPARRMLLQQLHGSLLAARARRTMLRRHMAQEIVAEEALLRLSRLCGINLITLYGVVAAVGDVRRFTHSKKLVAYLGLNPSVPQSGNFQGSGALKRHGRGALRALLIQSGLST

SEQ ID NO: 278200 - protein, 350 aa, unidentified
MLIIGLDYHPGFQQIAYVDTETGELQERALQHREEAEGFYRDLAAQGMKVRIGMEASGHARWFERLLAELNIELWIGDATEISRKRERKQKTDRQDAQHILRLLLKDDFPRIWVPSWENRDLRQLLWHRHRMVQARTRMMNQLQAVALNEGLRYKKRLWREGGRKQLEAFRLAPWASRRREDLLQLLDRLNPTIAELGQAIEQEVEKCPAAQRLMTHPGVGPLTALAFVLIIERADRFQSGKQIASYLGLVPLEDSSGSRRRLGHITKQGNSLLRFLLVEAAQVTVRSDPEWRSKYHHLMMRRGRKIAKVAMARRLAVRMYWMMRKESNYEQLKKFGSHAGQPRNRDGVR

SEQ ID NO: 278201 - protein, 342 aa, unidentified
MIIKQIGIDIGKNCFHVIGLDEDDRIVLRKQFSRSQLIRFFEHRSGEALNVAFEACSGAHWLAHRLIALEHCVKLLTPESVRPFAKAQKNDWNDALAIAEAARRPGRHAVGIKSEEQLDMQALHRVRQRLVTARTAIINQLRGLLRERGLVAPPGRARFERFVQTELVEGRNDLSPVSRALFATLITEYESINGQVCEIDRELDAFAKSNPLCQALLPIPGIGVIVATALYSAVANISDFRSGRDLAAFLGLVPRQRSTGGRTMLLGISKRGNTYVRTLMIHGMRSAFYNRKKRENQITGFMERLVARGMHTNKIVVASANKAARIVWAVLSKNKPFLPLAA

SEQ ID NO: 278202 - protein, 400 aa, unidentified
MTTRLEKIFAGVDTHADTHHAAVIDSNGKQLGDAQFPTTPAGYAALAAFLTAFGTVVRVGVEGTGSYGAGLARHLGEAGFVVAEVLRPNRQLRRTRGKSDPLDAYAAARTALAQEEHATPKAGAGQVEAIRYLLVARRSAVKARTAAIVQIKSLLVTAPDLIRERYRSLGDKALIAALARLRLSTDPLLAAVGQGLRSLARRHQLLGEEVSDLDQALAALTAAANPALVAAKGIGTITAAQLLVTAGDNPDRLRSEASFAALAGVSPIPASSGKTNRHRLNRGGDRQANAALHRIALVRMSYEPRTRDYVARKRALGHSNKEIIRCLKRAIAREVFTLLTTIVEVPVTDDLRPLRQARKLSLTTVAEHFNVWPATISKLERGTHRDDDLANSYREWLTAA

SEQ ID NO: 278203 - protein, 311 aa, unidentified
MNTKNDPIHYVAIDVSKSTLQVQDDRRAFPVGNDPNGHRKLLGFLKTRANPLVVFEASGGYERALLQSLHKAGMPLAMVNPARVRDFARSEGVRAKTDPIDGKMILAFAKSKALRAMEVPSEACTKLAALLDRRGHLVEQLAREKNRLQNSEPFIHRSIKRMIRILEKEIAAIEEAIDQLVGSDPGLKPRSEIIGSVKGVGNITAWTLLAYLSEIQEINRNRLVALAGIAPFNRDSGKFSGRRSIVGGRAKVRKCLYMAAHTAASCNPVIAAYVQGLRDRGKPYKCAIVAAMRKLIIHIQSLLKNAQLSPC

SEQ ID NO: 278204 - protein, 346 aa, unidentified
MLHAGLDLSRRRLDVCLLSEEGELLEQTACPPDAEGLRSLATRFDHYSEPIRAAIESMTGARYVHDTLEELGWDVLIADAEKVKPFGSVACKSDKVDSRVLARLSQLALIPEIWLPDPRVRQERELTRFRMHLVKHRSTLKHRIHATLMSFGKPCTVTDLFGAEGRRILDRLEIPEPWRSNVDASLALMDELDRKIDDCNRRLQAGHADHPYVPLLMSVPGIGRVLAFTIAAEIGDISRFPSAKALTGYSGLCPRVNQSGDKDRRGPLAKNGPRYLRWALIEATMHASRHPAYAERYQRNKRRLGKQRGAKVAQIDIARKLCVAIWHMLSRNEKFSPRGAAFRLAA

SEQ ID NO: 278205 - protein, 321 aa, unidentified
MQGKAHVDAMSAFYVGIDVCKARLDVYLHPTGERIAVANDAGGWRHLRRRLNDLTVELVVMEATSKYHRAIHRQLDGAGIRVAVVNPLRARLFAEACGALAKTDAIDARMLALMGVQLDPAVTPAPSLQAEAIEELVRARSSAVDERVAIANRRDITVSAFLRAELARRIKTLETHIHRLEVEIARLIAADSMMAARYAILRSIPGIGSVSATTLVAGLEELGRLDGRQIAALAGLAPFASDSGPTFGHRRIRAGRAHLRRPLYMAALSAIRSNPDLKRFHQRLTENGKPPKVAITAVMRKLLVLANSLIAQNRKWTTVPA

SEQ ID NO: 278206 - protein, 426 aa, unidentified
MKYNTQNAKIKSITEKTLIVGIDVGSETHFARAFDWRNYEYSKKPLEFSNTEAGFMTLKAWMADFAEKYGKNVVIPGMEPTGHYWFNLGAYLQDNGMKPVHVNPHHVKKSKELDDNNPNKNDRKDPKTIAALVNEGRFSYPYIPTGIYAEIRSLSNLRLQTQEEITRIKNRIARWFSIYFPEIKDVYRNPDSVSGLMILKEAPLPQDIVKLGVDGINKIWRDAKLRAAGLKRAKTLVTAAEHSIGSQEAPDSARIELKNLLNDYEIYKNREEDLMSLTELSEIPHIDKLLEIKGVGLKTVSGFVAEVGDITRFDNPKQLQKLAGYAIVECSSGKHKGESHISYRGRKRLRYVLYEAAISLIARITEFKEIHRYYRTRKENPLKKMQSVIAVACKVLRIFYTILTKGVTYDGAKMMQDIKRPQMLAA

SEQ ID NO: 278207 - protein, 353 aa, unidentified
MTNDKYVAMDVHKASVVIGMRDGGGKMIGRAVVETKAQTLRDYVRGLSGTVHLTLEEGTQAAWLYDLLKPLVAECIVCDPRRNKLLESGNKSDDVDVEKLSELLYLGRLRAVYHGGQGTRALKELAQNYEALVKDNTRVKNRLKAIFRGRGISYEGSEIYDYEQRAQWLAQLSERGVRQRASQLYEQLAQLEQWVAGARLQMLRESRKQKAKKILEQIPTLGEISVAQLIATVDTPFRFRSKRQFWTYCGLAVVRHTSADYQFAQGELRRRAKPGPTRGLNRNYNRRLKRLFKSAALAGSSKGPFKPYYDRLLARGLNPELAQVTLARKIAAVTLTLWKKGASFDREKLVKPE

SEQ ID NO: 278208 - protein, 371 aa, unidentified
MGRRRTLDYWMGPVRPWAISGPPALRSDTRTVERALSPHAIQRADQIDILSEVSSMGKMMIGIDIAKEWIDIAVAGEGRVRRIKNNELTIDSWLAETGPGSIALIAFEPTGGYERPLRRCLSRAKLAFEQVHPNEVVAFRGRRGIKAKTDRIDARLLADFAAEELVRRDRLAVPEADEALRELAARRRQLQELLHAETCRRDLADSAMVRKSLRTVIAALERSLAAVETAIAEHIAGSIHAETSRRLQTFCGVGPGIAETLIAELPELGHLSGKKIAALCGLAPRTRDSGKQRGHASTGHGRPGVRKALFNGARSAIQHNPVMSAFYRHLIQDNHRLGKVALTAVMRKMLVTLNAMVRDGADWKHAANPAA

SEQ ID NO: 278209 - protein, 405 aa, unidentified
MAAVMIGVDPHKGSHTAMAIGADEGPLGQVRVRACAAQAQQLLAWAAAWPERTWAVEGAGGLGHLLAQQLVSAGERVLDVQPKLAARVRLLAAGAVNKNDPNDARSVAIVALRSAACLPVRPDDHAAVLKIWAKRHRDLSRARTQVACRLHAVLCELVPGGVSKEIYAAHAAKIVEETEPGGAVQQARLELAAEFVADLRRIDAQLLETRKKLAVAVRASGTTLTEVFGIGPVIAAMVIGDVRGVSRFAGRDRFAAYNGTAPIEVSSGNRIIYRLSLRGNRRLNHAIHMAAITQIRYKHSEGRVYYDKKLAEGKTPKEALRALKRQISDAIYKHLKADAARAAAAGAQGPGGQPGNDSVASAAGSHPEHQLFGRATPGPATTLRHPADQQKRASSRARKKTARTT

SEQ ID NO: 278210 - protein, 369 aa, unidentified
MADRITYVGLDVHKDSIVVAVAEGGLRGEVREYGRIANTSAALERLLRKLGGDGMKLRFCYEAGPCGYGIHRRLSARGHECVVVAPSLIPKRAGDRVKTDRRDAASLAKLHRAGELTAVWVPDCRHEAMRDLVRARLDAVHSLRRARQQLSGFLLRQGCHYRRPAWTKLHRRWLAGLSFAQAVHHIVLEDYIAAVEGAEARRDRLTAQIEAMLPDWTLAPIVAAVQTMRGMALVNAATLIAELGDLSRFANPGQLMAYLGLVPSEYSSGATIKRGGITKAGNGAARRLLIEAAWSYRFPARLSREVLLRQERQPKLIRDIAWKGQLRLCARYRRLVRTGKPANIVTTAIARELTGFVWAIARQVTVTTG

SEQ ID NO: 278211 - protein, 321 aa, unidentified
MNKYTEIYGVDISKDVFDVMNSKGAYIQYANGLKGFGQFSKKLPKGSLVVMEATGYYHYRLAQYLYEHGHSVSVVNPLSVKRFIQMKLSKVKTDKSDARAICEYASVNEVPLYTAKNKDQAECLQLLRLMDTYLKHGTAIKNKLHGERTLGIPSKTVYRSLERSLKSLKKEIGLLETRLAELVKEHQQGQLTLLKSIPGMGNKTAMVLLVLTDGFTKFENAGQLCCYAGITPTIRESGSSVRGRSRISKVGNRKLRNLLFLCSFSACKHNKACREIYERITSKGKSKKLALIAVSNKLLKQSFAIATSGLPYDEEYVSRLT

SEQ ID NO: 278212 - protein, 411 aa, unidentified
MRIVGFDVSRSVAEIAYLEHGALHAGGRTGLRYDELERFAATLRATDHVVLEATGNTAAIVNVLRRHVARVAIANPLQVRLIAEARVKTDKIDAAVLAQLYASGFLPEVWMPDEITLALRRQISRRSQLVRQRTRLKNEIHAVLAAHLIERCPASDLFGKKGRTWLSVQPLPLDERLGVEQRLRELDRLGEDLREVEQALEQATINDARLRVMLTITGVNTTVAIGLLSAIGDIARFPNPEKLVSYFGLNPSVYQSGPTPARHGHITKRGRSYARAMLVEAAWGATQAPGPLRAFFLRVRDRRGQQIGIVATARKLAVIVWYVLTRGEPFAWDRPALTAHKLRALELQAGLPAQHGSRKGSAAAYSLKSIRQQERAVAEQAERTYQSLFNRWKQSRPKSDSAPVRWPGARA

SEQ ID NO: 278213 - protein, 410 aa, unidentified
MTDDFKLYVGVDWATEEHEVCAQDASGKKVGARSFKHSGDGLADLTAWLLAKANPDSIAISIEVPHGSVVETLLERGFAVYSINPKQLDRFRDRFTMAGAKDDRLDALVLADSLRTDTHLFRRLSQLSCETIELREWSRIHDELTTERGSIVNQMRAQLARYFPAFVGVAPDPGEDWAIAVLASIPDPKAALKADPVRIAKLLKDHRIRRLTASEIVDALRSLPVYSAPGTASAASAHLKLLGERARLLNRQLKDTKKQLAAALEQFDAGESPGNESEQCDATIIQTMPGIGMIVAATLLGEAGELLRARDYPALRAFAGVAPVTKRSGKKCSVTRRTACHPRLRNATYHWARVAAMHDPISKLRYAALRARGKPHGQALRSVADRLLGVLCAMLRDHTPYRRPEVPAAA

SEQ ID NO: 278214 - protein, 344 aa, unidentified
MISTVIAADLAKNVFEVAVSHRPGQVAERHRLSRRKFLPFFAERKPATVIMESCASSHHWGRQLQALGHSVRLLPPRQVRPYVLGNKTDRSDAKGLLEAFRNEDLKPVPVKTVVQQTLTSLHRLRSTWLATRTARLNTVRGLLREFGHTIPVGARHVVPRTWALLEDADVGIPDPLRVALAEACLEIRDLEQRVKAVEKQLGLLAKDLPVVERLLTIPGIGLLTGTALVAFVGDVQRFPTGRHFASYLGLTPREHSTGQARRLGRISKRGDVYLRMLLIQGGRAVLQGAARSKARLDHLRAWGLQVKARRGHNKTCVALANKLARIAWAIWKHERHFEPRFLAK

SEQ ID NO: 278215 - protein, 432 aa, unidentified
MKKIKVNQRLDEITEATLVVGIDIAKTTHWARFTDYRGSEVGKAISFTNNRKGFEKIVAQIEALCKVSVRRRPFDEVIIGMEPTGHYWKALAYYLAKTDYRVVGVNPYHTKKAKELDDNSQTKSDPKDALTIARLVKDGRYFEPYLPEDVYAELRVLSNERVRVVKRSNSVKNSITAILDEYFPEIWEVFKYPLKGKASRQILRSCPYPVQVLAMGEAGLMAEVKKAVKKSVGIKRVRKLMEIAKASVGVSQGLESSGLRLRHLLDELEMIEKQIEEIESSMEMKLYKTGYGESILSIKGIGVVTASSFLGEVGDPLRFRNARQIANYAGLNLVEDSSGKSKSGTSISKRGRSQLRSLLYQMAFTMVGKNAEMRELHQYLTTRDKNPLKKKQSLVVVSKKIITVIYSLLKNKALYDPALALGTVRRAMLKAA

SEQ ID NO: 278216 - protein, 369 aa, unidentified
MKHFITFVGLDVHKDTIDIAIAESGDNKEVRHYGKIGGDLAALDKAIRKLRSKGAELHFVYEAGPCGYDIYRHLTKQGFSCIVVAPSLIPKKSGDRVKTDRRDAMSLARLYRSGELTAVYVPREDDEAMRDLSRAREDAVNASRVARQRLGAMLLRLGYRYRKTLWSTAHFNWLSTIKMPHPAQQIAFQEYIHAIMECGDRVNRLTEQIQKLIPDWRLAPVVKALQSLRGVSLMVATTTVAEIGDLSRFANPRQLMAYLGLVPSEQSSGKKEKRGGITKTGNGHVRRALVEAAQAYHHQARVSRILLARQEDLPDSIRKISWKAQVRLCGRFRKLTGRGKTRNKVVTAIARELSAFMWAIAKEVPIQYA

SEQ ID NO: 278217 - protein, 368 aa, unidentified
MHEGITAYIGLDVHKDSIAIAAAGKDREVPHFVGTVRPDFKHVRKALSHYGTPSSMQVVYEAGPCGYTLARQLLADGFDCRVIAASRITRSPTERIKTDRRDAITLARLARSGDLVAVRIPDERDEAIRDLSRARQDAVSACLKTRQQLKAFLLRHGRPLRGSKPWSPTGELYLSKISFAHPAQNIAFADYRQAVLDTRARVEQLTEALRAQCEDWRMQPLVSALACLRGVDFLTAVILVAEIGDFSRFAHPKELMGYLGLVPSEYSTGRQHHRGDITKTGNAHARRVLVEAAWNYRFPARLSHTITRRQEGQSKPVRDIAWKAQLRLGHRYRKLQSRKLHQNKIIVAIARELSGFLWDIARHVALPA

SEQ ID NO: 278218 - protein, 343 aa, unidentified
MKITRVGVDLAKKVFQVHGVDAAGRRVWKRQLKRSSWLSVLTEAVEPGCEIGMEACGGAHHWARELKSRGFEVKLISPQFVKPYLKSLKNDVNDAEAICEAMSRHHMRFVAVKTVEQQNIQAMHRVREGLMNHRKAKANQIRGLVAEYGLVAPRQMGPLRKAIPCWLEDAENGLRPAFRVLLHGLWEDLQNLDIRLKVLDKEIFALSESHADAKRLKQLRGIGPLIATALVAQFGDGRHFKRGRQASASVGITPRHAGTGGKNYLFGITKKGNPYLRSILIHGARSVVSKAKHKDDRLSRWVTELARRKHPNVAAVALANKTVRIAWAMLRNGTDYDPELAMA

SEQ ID NO: 278219 - protein, 408 aa, unidentified
MDLVHPRCAGLDVHQKTVVACARIVADGAVTQEVRTFGTTTRELLALAEWLAAQGVTHAAMESTGVFWKPVWHLLEGQFELVLANAVHVRHIPGRKTDVNDAMWLADLLAHGLIRASFVPPAPIHALRDLTRTRKQLVREVAQHTLRLQKILEDANLKLTTVVSDILGVSGRAILEAVIAGEQDPERLADLGRGRLKASRRSLVDALRGVVTDHHRFMLQLHLAQIDGLEAAIRTVETRVGEALAPFRAAVEHLITMPGVSQTVARVILAEVGLDMTRFPTAGHLVSWAGLCPRLDESAGKRRSTRTRPGAPWLKTTLVQAAWAAVRTKETYLRAQFLRLKSRRGPKKAILAVAASMLTASYHILKHSVDYHDLGPDHFARRDKAKLARRLIRRLHDLGLSVEIRPAA

SEQ ID NO: 278220 - protein, 404 aa, unidentified
MYNAVGIDVSKGKSTIAVLQPGGTVIRKPFDVSHTSQSLHELTDYLGSLDGSTKIVMECTGRYHEPVVKALSEAGLFVSVVNPHLIKNFGNNSLRKVKSDPADAKKIARYTLDNWAELRQYSGMNNIRTQLKTLNSQFSFFMKQKVAAKANLIALLDNTYPGLNKLFDSPVREDGSEKWVDYAYSFWHVDCVRRIGLKTFTERYRAFCKKHHYIFQPDKPEKLFNASKELVAVFPKEKTYKLLIQQSIQQLNLASEHVERLRKEMDELASTLPEYSTVMGIYGVGKTYGPQLIAEIGDVSRFTHREALTAFAGVDPGVDESGQHKSKSNRASKVGSARLRKTLFQIMTTLLQNAPQDDPVYRFLDKKRSQGKPYYVYMTAGANKFLRIYYGKVKECLRNLEQAE

SEQ ID NO: 278221 - protein, 310 aa, unidentified
MIPQNYVGCDVSKDTLDFFDPQSGRLRQIRNHPKAIGSFVAGLDGGCDFVVMEATGVHDRLLRHALAEAGIGFARRNPMQMRRFAQADGQRAKTDKIDARVLSRFGERYRPQADALPSRELERIAALSRRRDQLVETRAREKRHLGEAFEGAIIADIKGVIDELSARIDVLEKAIAQAVRNADSDTARDYDILVSAPGISLITAAALIAHLPELGHRTPKTIASLVGLAPFNNDSGKKKGRRAIAGGRRRIRCALYMASLSAKARCPRLAAFYQRILARSGSRKLAIVAVARKLLTILNAMLRDQVRFNA

SEQ ID NO: 278222 - protein, 387 aa, unidentified
MIYVGIDIAKLNHFASAISSDGEIMLQPFKFTNDYDGFHLLLHKLHSLDPDSLIIGLGSTAHYGNNLLEFLVKHNYKVCVINPIQTSAMRKNNIRKTKTDKVDTYIIAKTLMMDPHRFFSQHDLSIMHLKELGRFRMKLIKKRTQGKIQLMSYVDQAFPELQYFFKSGIHQKSVYAVLKEAPTTKDIASMHLTHLSHLLEVSSHGHFKKNTATELRILAQKSVGCNDSSISTQITQTIELIELLDSQVHDVESEMELIVNSLDSVIMTIPGIGFINGGMILGEIGDITRFSSPSKVLAFAGLDPTVYQSGNFNASHTKMSKRGSRPLRYALINAAHNVVKNNKTFKDYYDQKISEGKSHYNALGHCAGKLVRIIYKMLTDNVSFNLD

SEQ ID NO: 278223 - protein, 416 aa, unidentified
MRRVIGIDTHRTFGEVVIWEDGSLRHAGRIGMTRTALEGFGKNLLATDEVVIEATGNCMAVSRVLTPFVKRVIIANPLQVKAIAHSQVKTDKIDAGTLASLYAAGYLPEIWTPDASTERMRRLVCRRYQVVRHRTRIKNEVHSILYAYLIPKCPHADLFSNVGRAWLLKQPFPDDERIAIERHTRELDRLEEDLTALDKEIAGSALTDPAIKRLITITGVNVTVAAGLVAAIGDIRRFGSPQKLVSYFGLNPRVRQSGLGAAHHGRISKVGRSHARAMLVEAAWAAAKTPGPLHAFFVRIRAKRGHQIAAVALARKLTVLCWHLLTKETDYLWVRPALVANKVRKMELQAGQPQQKGNRRGPTYAYNIKELRAREMNVAHHAEVAYENFVRQWQPRGPKKRCASASKRQGTNSQAT

SEQ ID NO: 278224 - protein, 398 aa, unidentified
MLSIGIDVSKGKSTVCGMKPGGEIVYTPFEVQHTREGMSELLSLLRGSGEEVRVVLESTGSYHCPVVAALLENGIFVSVVNSLRMKRFCSQSIRRVKTDQIDAMQIALYGLAYWQELQPTRLPENTYRELQLLARQYYQMTSMLIKAKVDFNALCDQVLPGMQELMNDHAGRHKLSDFVLRYRHTTHILEMGETRFRKDYCKWAEKKGYRNRERMAALIFATAQNGIPVLPNAPSTQIVITEAIRVLHTVEASRDAILTQMQALAKTLPEYSLVREMPCIGDTLAPRLIAEIGDVRRFHSKRALIAYAGIDAPPYQSGKFSANNRHISKRGNRYLRKTGYEVMQSYVMHKPANDPIFTFIEKKRSEGKSGKLAMVAGLNKFLRVYYGKVTELYRSLPQ

SEQ ID NO: 278225 - protein, 321 aa, unidentified
MTYVGIDVSKATFVVAYSSAKGSRTNSFKNTIKGIHEFIQTISVAEHHCVLEATGNYSSLLVYLLSEAGIAVSLENPLKIKNFARVMLSITKTDEIDARLIAMYGEKMQPAPYKLRSDTILVLKQKRSVIRQLKKQLVATGNLKGSMEALPFFDPKCKKTIERTIIFLEKQIKELEEELASLAQSEYKKQMDLLTSVKGIGVTLAAALIMATGGFTYFDNAKQLTRYLGLSPTYQQSGTSVNVKGHINRNGDSSLRSQPYVAAFASLRCNTECKACFDRLRSKGKPGKVALIAVANKLIRQAFAIVTQEKLYVDGFKPEKP

SEQ ID NO: 278226 - protein, 387 aa, unidentified
MAQVIIGVDPHKRSATIEVIDQRERVLRQGRFGTDRDGYQDMLAAGRKHTDRVWAVEGCNGIGRHVAQRLVADGETVVDVPAKLSARARVFSTGQGRKTDPVDAHSVAVVALRTAGLRQVTVDDTTVALRLLVDRRDQLGRARTDVVSRLHHLLLELVPGGAKKFLSAQQARALLNTVRPRDVVGKTRRWLASELIHELVTIDKKIKIANEELTELVASTGSQLQDLHGIGPSGAARLLGDIGDISRFTSRAHFASWNGTAPLDASSGDQNRHRLSRAGNRRINRVLHIMAVVQLRNDTEGRRYYRRKLAEGKTSMEAMRALKRRLSDVVYRQMTADAKRLATGPGGHVGATLQSSAADPNPQADTSEKSLPGPAKPQPRTLIPATS

SEQ ID NO: 278227 - protein, 346 aa, unidentified
MPIVGGLDIHRKQITFDYLDTVTGQVCRGQISPADREHLRAWLVRFAGHGDTAFAVEGCTGWRYVAEELAAAGVTVHLAEPADTAFARGRKRHAKTDKTDCRHLRALLAEGRLPECWIPPGHILESRALLETYHDLRREHTAWVQRIHAVLFHQGAPALGEGALRGEQGLAALREVSAAHLSLAGQLQIATALEVLEALEARLHELRHQLLDAARHLAGARVLAERLYGVGPVTALAMTCWLGGASRFSSSRKAVRFAGLDVTVYSSDRKGPPGRLSRQGPPVLRWAVYEAGKTHARASAPDHRYYAQVKDRQGGKRAALSEARKILRQACHILAELGDDALAPAA

SEQ ID NO: 278228 - protein, 418 aa, unidentified
MGDGLLFVGDDWAEDHHDVELMDASGRRLAKARLPEGVAGMARLHAMIGGRLGDDVWDVGDVGDVAGRVKIGIETDRGPWVQALIAAGYTVYPVNPLQAARYRDRLGVSGAKSDAGDAHMLADMVRTQSHQLRPAVGDSAEVGAVKVVTRMHKTLIWERTRAGQRLRHALREYFPAALEAFEDLDAADTLELLGRAPDPASAARLTLAQISAALKRARRRDIPTRAAAIQAVLRTAHLGQPPVVTAAYAASVRALVAVLGTLNEQVKILQEEVEAHFGKHPDATIVLSQPGLGAVLGARVLAEFGDEHKRYVSAKARKNYAGTSPITRASGKKQTVLARFVHNDRLVDALLTQAFASLNNSPGARAYYDKQRARGANYNAALRQLANRLVGILHGCLKTGTPYNETTAWSHHPTEATT

SEQ ID NO: 278229 - protein, 368 aa, unidentified
MFTETTSLGLDVHARSVNAAAIDCSTGEVIEKSLPNDLVAISEFVEDLARGHGPLRITYEAGPTGFTLARFLLDAGHSVQVAAPSKLLRPTGERVKTDRRDAMLLARLARNDDIVAVRVPTLAEESARDLVRSRDDARRDLMSARHRLGKLVLRRGHVFPGKTTWGREHDAWLRAIRRDHLAEYGSGTVAAFDDAYDAVTHTLARRDRLDVTILNLAEDSEFTEITHRLACLRGISTLTAFGLAVEIGDWDRFTGSTIAAYLGLVPSEHSSGQTRSLGGITKTGNSHARRFLIESAWHHKPGYYPGKTLRQDWAKVPAVIAERADRGNRRLHHRWMVLEARRKRHAIANTAIARELAGWCWSLATMEE

SEQ ID NO: 278230 - protein, 340 aa, unidentified
MGEITTVGLDLAKHVFQVHGVDAEGATVLRKQLRRAQVLAFFSRLPPCLVGLEACATAHYWGRELRALGHEVRLMPAQYVKAYIRRNKNDAADAEAICEAVQRPRMRFVPVKTAEQQASQLLHRGREQLVRQRTMLVNALRAHLAEFGLVAAQGLRNVGELIAIVRKQDDTRVPDMARQVLQVLANQIEQIEAAIAALEKQLLAWHKTNAVSQRLASIPGIGPIIATAIATTVADPNVFRSGREFAAWLGLVPRQNSTGGKPRLGGITKRGNRYLRRLLINGASANLLRSKATKADPWVIRLRQRRPPLVVAVALANKTARIAWAVMLREREYQPRAVAA

SEQ ID NO: 278231 - protein, 405 aa, unidentified
MKHLSPLFVGLDVHKDSIAVAYAPDERGAEVIFLGPIGTRQCDIDRLIRQLHSKASRLLFVYEAGPCGYWVYRYLQKKGEDCMVVAPSLIPRKPGDRVKTDRRDAVQLARLMRSGDLNPVYVPSLEDESIRDLCRAREDLMGDLKAAKHRLKSFLLRHDIRYTGKADWNAAHLRWLADDVALPTAAQRIVFQEYVRAITHLVDRLAQIDEELHEHAKGWRLTALVTAYQALRGVQFHVAVTIVAELGDLTRFDTPRQLMSYVGLHPSEHSSGNARRQGGIGQDRKRSCPASVGGRSVGLPLSTQGLPTDPSSSGIVAPGDPRYRLESTAEVVQAFPKTRGSRQAPQCGSYRDRSGAGGVYVGHRPTGSVSYELTRETGKLTERYRENLGIRERRGPGEWRNPRCR

SEQ ID NO: 278232 - protein, 356 aa, unidentified
MSTMPEIAGEVILGVDTHEREHVAALIDEFGRLLATRSFPATVRGFRMLLAWAREHGPVCRAGVEGTGSFGAGLTRFLADEGVQVVEVTRPNRRGRRHLGKSDTLDAEAAARMLLAGEASATPKRRDGIVESIRVLQIARRSAIKARTQAGQQIRSLVVTAPAELNSALAGLTVAQQVDRCARLRSGGSDGAAASTRRALRSLARRWQQLEREVRELEHELHALIKAAAPRLLAEPGVGPDTAGKLLVIASDNAERLRSDAAFAALCGVSPIEASSGKTRRHRLNKGGDRQGNNALWTIANNRLIHHPETREYAARRTAEGLSRREILRCLKRHLARRVYRLILADLTADATADLT

SEQ ID NO: 278233 - protein, 319 aa, unidentified
MNMSCVGIDIAKRTFVAAVEISDKVKIKSFDNSSLGFSELMQWLNEFNLFMLCFCMESTGKYGDELALYLYEQNHSVSVVNPAKIKYFAKSQLTRNKTDSIDAKVIMQYCKLFKPSPWKPAPIEIKKLEIVVKRVDSLNDMIAQETNRLEKCDKSIKSSIEKHIKYLKKEVNEIEQQIAQHIDNHPQLKKDAELLDTIPGIGKRTANKLLTILGGNQKFESAKEVAPYVGLNPEHSQSGTSLNSVRLSKTGSSEVRKMLYMPALTAIKYNPILKQFYEKLIGKGKPKKLAICAVMRKFWHIIYGVLKHQVPFNEKILDV

SEQ ID NO: 278234 - protein, 418 aa, unidentified
MQEEVSTVELLVPRCAGLDVAKDEVVACVRVPDGQGGRRQEVRSYPTFTSGLEALADWLTAEGVTQAVMEATGQYWKPVWWVLEEQGFQLLLVNARHVKILPGRKTDVADAAWLAELLEHGLLRGSFVPPAVIRQLRDLTRYRKRLIQAHSAEGQRVQKTLEDAGIKLDSVAADVLGVSGRAMLAALVGGERDPQVLAELARGRLRSKLPQLRQALRGRFSDHHALLLRLALGHLEHLEGAIAALDTEVDRVIAPFARARDRLATITGVGKRAAETIIAEIGVDMTVFPTAGHLASWAGRCPGNNRTGGKRRSGKPTKGNRWLGEVLIECAWAAARSRDTYLSAQYWRLARRIGKKKAASAVGHSILVIAWHLLANDCDYQDLGGDYFVRRDADRARQRAVAQLQTLGYRVTLQPLAA

SEQ ID NO: 278235 - protein, 316 aa, unidentified
MTEAHSYVGIDVSKGYLDVAARPTGEQWRVSNTEEGLGQLVERLQGLSPALVVLEATGSLEVPVTAALGATGLPVAVVNPRQVRDFARATGKLAKTDRLDALVLALFAERVRPTPHPLPDPQTQELNALLARRRQIVAMLVTEQNRLGTALPSVRPGIQEHIAWLEGKLGELNDRMGKLLRESPLWREKEDLLRGVPGVGPVLTLTLLAELPELGTLGRRQVAALVGVAPLNRDSGTLRGKRTVWGGRAKVRAALYMAALVATRFNPVIKAFYQRLLAAGKAKKVALTACMRKLLTILNAMLKHRSPWQPNHALTS

SEQ ID NO: 278236 - protein, 355 aa, unidentified
MEQSTRITIGMDLGDRYSQLCALDGEGEAVEEVRVRTEERALRAAFGARSAAHVVMEAGTHSPWVSRLLEALGHEVWVANPRRVRLISHSDRKSDRHDAETLARLGRMDPALLRPIRHRSAETLADREWLRARAALVASRTQLVNHVRSAVKVAGGRLPSSSTAAFVRKVTEAIPERLRAPLSPVLNQIDALTAALHHYEEQLEALAEAKYPETACLRQVAGVGVVTSLAFVLTLEDPHRFAKSRAVGSYLGLRPRQRQSGDMDLQMRITKAGDRELRRLLVQSAHYILGPFGPDTDLKRFGKRLAERGGKAAKKRAVVAVARKLAVLLHRLWVTGEVYEPVRSTSLPTPEAATA

SEQ ID NO: 278237 - protein, 407 aa, unidentified
MLFIGDDWAEDHHDVEIVNAAGDRLVRRRLSEGVAGLAGLHALIADHLGPADEPNQVVVGIETDRGPWVQALIAAGYVVYAINPLQVARYRERHATSGAKSDPGDAHVLAEVVRLDRAHHRPIAGDSALAEHVKIVARAHQSMVWSRQRQTNTLRSMLREYYPGALAVFGADLAGRDALAVLALAPTPEQGARLSEHRVGAALRRAGRQRNITTRAADIVAGLRAAQLPARPGVVGAYAAAAQALLAVITELARQTQVLEGEVEAGFGRHPDVEIYLSQPGLGQILGARVLAEFGDDPDRYPDARARKNYSGMAPVTRTSGKSRAVLARHARNRRLADALYQQAFAALTSSPGARAYYDTHRARGNTHHQALRALANRLVGILHGCLRHHTPYDETQAWAAHTAAAA

SEQ ID NO: 278238 - protein, 342 aa, unidentified
MEISTIGIDLSKTSFHAIGLNARGEIVLRRKFSRRQLLLFTSNRRQMLIGMEACGGAHFLGRALRTQGHDARLMPAQFVKAYRKSNKNDYLDAEAIAEAVQRPTMRFVPIKTDDQLDLQALHRVRDRWVARRTAVMNQMRGFLMERGITVRKGPSHLTTQLQGMLEDPATPLSGRLRLLILELKHEWDELETRIDSADSELQRIAKQDDACHRLMEIPGFGPLVSTALVAAIGNGITFRKGRYLSAWLGLVPRQHSTGGKTRLLGISKRGNEYLRRMFLHGARSVVAQIERNPSALGQWLKDLSGRSHRNVTVVALANKMARTAWAILSKGTSYCAPVFAAA

SEQ ID NO: 278239 - protein, 338 aa, unidentified
MKITTIGLDIAKLVFHAVAVNKAGKLVRKKMLKRKEVLGFFAKLEPCLVAIEACGGAHYWNREITALGHQVKLIPPQYVIPYRQGNKNDYNDALAIAEAAQRPNMRFVPAKSIEQQDVQMLHRVRERLTQQTTALVNQVRGMLAEYGIVLAKGKTAFRSQLPDILEDGENALTAKGRAIFHGLYNEFVELENRLKGCEKQVLQENANNPICQRLGTVLGVGPVTATAFYAAVGEGKAFHNGRHFSAWCGLVPRQHSSGGKDNLLGISKRGNAYLRTLFIHGARSILRHCEHKTDKLSLWAKALVERRGFNRACVAVANKLARTAWVIAAKEETYRPAT

SEQ ID NO: 278240 - protein, 360 aa, unidentified
MFTERTSVGLDVHARSVVAHAMDVQTGEIFKARLCPDPVEVTAWIKALPGPAAAIYEAGPTGYGLARTLLGNDIRTVVAAPSKLQRPAGSRVKTDAIDAEHLSMLLRLDAFTAVAVPDELTEAARDLVRTREDCRSDLMRARHRLSKLLLRHGIVYSGGQTWSNAHDAWLKRQHFDSPLVQAAFDEAYDSVVTITARRDRLDERITAMAADSPWTNTIHRLGCLRGISTLTGFGLAVEIGDWTRFTGNSIGSFVGLVPSENSSGQSRSLGPITKTGNGHARRLLVEAAWHHQHRYVPGKTIRDRWDLASPAARARGDLGNRRLNHRWNQFKARKKANNIANAAIARELAGWCWSLAVLDD

SEQ ID NO: 278241 - protein, 308 aa, unidentified
MIAQNYVGCDISKQWLDFFDETSGRLRRIDNQADAIAAYVADLEPSRDFVVMEATGVHDRLLRHALAKAGVPFSRHNPAHTHHYAKSTRRRAKTDPLDARMLSDYGRRYHPEAEPAPRKEGERLQSLAGHRDHLVDMRARLKKHLAEAFDEIVVADLEETIAYFDTRIKALEGLIAKVIRQNQDTARDHALMVSVPGVSKVSALSLLAHLPELGQRSPKSIAALAGLAPFDNKSGKLNRRSQIQGGRSRVRRALYMAALTAIRTCDRFKAFYAALAARSGSKKLAIIAVARKLLVVLNAIIRDKTAFA

SEQ ID NO: 278242 - protein, 445 aa, unidentified
MFIQSQDDSHCCYSLFIKVVILMMKLKYSICCGLDVHKNIIVATIVTTNKEGISEYTRKSFSTINSDIQKFHDWLIENNCYHVCMESTGKYWIPIFNYLEKDIDVCLTHPKYVKAIKGKKTDKKDSKWIADLYKFDLVRCSFIPPKDFRQLRELARYRFKLVCMKSSEKNRIQNCMTVSNIGIASVLKDPFCKTATEIMSYLLEHTSDTIDEKAVRRLIKKGTKATSNEIIEAIKGYNIETDQAKKLELARNHLDYLENMITQTEVELYVRIKPYYEFVEFVSTMPGMTELSTTIVLAETGVNMEIFDDAGHLCSWCGLAPANNESAGKKKSVRITKAGEYLKPVMVQCALSAVRSKKQPYFAVKYNAIKKRRGHKKAIIATARMMMVCIYHMISEKKPFAPTDYEELMDSREQNKRVVLNEENALAFLAAQGYDTSQLVKCNDN

SEQ ID NO: 278243 - protein, 351 aa, unidentified
MLATTGQTIRVVGIDIGKNSFHIVGLDGRGAIVLRQRWSRGQVQARLANLPPCLIGMEACVGAHHLARRLQALGHDARLMPAKYVRPYSKGQKNDFRDAEAIAEAVQRPTMKFVIVKTSDQLDLQALHRVRARLVSQRTGIINQIRAFLLERGIAVRQGQRFLRAELPRILTAACEVLSPRMARVIEALADDWRRLDGRIDELSAEIQALADADSACERLMSVPGIGPIISSAMVAAIGTGEAFTKGRDFAAWLGLVPRQMSTGDRTILGRISKRGNRYLRVLFVQAAWVVLIKPTSWHRHGLKAWIEAAKKRLHHNVLAVALANKLARIAWAVLAKRGLYPEQIAATPAA

SEQ ID NO: 278244 - protein, 410 aa, unidentified
MSEDTTEIVYVGLDWAAATHAVCVLSAVGKVMAQFMIDHSAEGIAILIRKLAKFGDPADVHIGIERPNGRLVDLLLEAGHPVIPVSPNAIKTWRDGEVVSGAKSDTGDAVVIAEYLRLRHHRLHPVAPYSPQTKALRTVVRTRDDVVAMRVSATNQLSALLDDHWPGAKAIFADVGSPISLTFLRQYPSATSAARLGEKRLAAFLAKHSYSGRRPASELLGRLRSAPAGTTNPTLCTAVTDAVLALVTVLEALNNAGKNLDKAVVARLGEHPDAEIFTSLPRSGQINAAQVLAEWGDSRAAYDGPDAVAALAGTTPVTKASGKQHAVHFRWACNKRFRRALTTFADNSRHQSPWAADIYTRAIARGHDHPHAIRILGRAWIRVIYRCWQDGVPYNPNLHGGAQRLLPQTA

SEQ ID NO: 278245 - protein, 366 aa, unidentified
MKKIITVAKNRNEIFKQQQLTIGVDLGDRISYYCILDETGNVILEQSVPTTPKGMQQVFSKISHCRIALETGTHSPWVSRLLTQLGHDAIVAHARNVRLITESSRKDDRLDARTLAKLARIDPELLGPVRHRSAKAQIHLTAIRARATLVSARTALVNAARGLTKSYGERLPKCGTEQMNREIAKGLSPELRDVLEPLLREIESLKERIAEYDRRIEQIAKEGYPEVALLKQVKGVGTLIALTYVLTLDDPHRFRRSRDAGCFLGLRPGRRNSGRSEPQMHISKEGDAYLRTLMVQGAHYILGPFGQDSDLRRWGLKLAERGGKNAKKRAVIAVARKLAVLLHKLWVSGEVYEPLRNNHKVVSAVA

SEQ ID NO: 278246 - protein, 409 aa, unidentified
MQYFVGLDWAAREHAVCVVDRRGAIVLQFTVAHTAAGMTSLVARLVKLAPPTELRIAIERPTGLLVDTLVEGKFVVVPIHPNVVKSARPRYSAAQGKTDLGDAYLLADLLRTDGHRFRALTPLSDETKALRGLVRVRDDLVGQRVAVANQLRSLLEQFWPGAAELFSDVDSPIALDFLDHYPTPRSASGLGQKRMAGFLARHSYTGRRTADELVQRLRAAPTSHAGELEAAAKGKCVLALVAVLRPLVAQLATLSAAIERAVDAHSDAKTVTTLFRSGRICAAQLLAEMGDDRARFVSADHLAAEAGAAPVTRASGKHRAVSFRWACNQHLRKALNTLADTTRHTHPWARSIYQRARDRGHAHPHAIRILARAWCRVIWTCWQQYTSYDPSKHRAARPFTPRPVDQEAA

SEQ ID NO: 278247 - protein, 315 aa, unidentified
MALRRIFVGIDVAKDWLDLWLAPSNRFERIANGSAGWVQLVTLLEPLGAGVVVAFEATGGYEDGLRRTLLAAGFDVRRLNPLRVRLYARSLGRNAKNDRIDARIIARYAEVADTTPEILDPARERLAELVSHRRRLVEERVAVGNQTAVLGSALLKAQNGKRLALIEQQVDQTDELIADAIGAAPDLCAKRALLMTLKGVKQVTATTLVALLPELGRITRKAIAALVGVAPFDRDSGRFSGTRSIAGGRAAVRTALYMAARAAALSKSTLGSFYKRLITAGKPPKVATVALMRKMLTTLNAILRDNKPWNFAAST

SEQ ID NO: 278248 - protein, 447 aa, unidentified
MPVIHQNAAGIDIGSQFHVVAVPPDRTDKPVRTFKSFTGELHAMAKWLKKCRVDTIAMESTGVYWIPAFEILESYGFEVFLVNARAAKTVPGRKTDVNDAQWLQKLHQFGLLQASFQPSQKIAGLRAYLRQREKLLEYKAAHIQHMQKAMMQMNIQLQHVVTDVTGKTGLAIIRAIVQGQNDPNELVKLRDPHCKNSLEVMTAALTGSYKPEHLFALTQALELIDFYVEKIEACDRVIESTLKQLQQENDSTSPPPTLQKARGRESSKNNPSFDVRQSLFSFIGIDLTQIHGIGSSVALKLVAECGTDMTKWPTSKHFTSWLCLAPCNKISGGKILSSRTRRSSSKVATMLRLAAVVVGKTNTALGAAYRRYAARIGKAKAVTAIARKLAILFYNALRYGMAYVDKGANYYEEQYQKKVINNLHRKADALGYTLQKKALSISAAGVS

SEQ ID NO: 278249 - protein, 313 aa, unidentified
MASIGEVLIGVDPHPKSHTACAVDQEGRELGRMDVGSGVDGARQLLEWARDYEPRRWAIEGPGNAWARPLVTTLLGAGEAIVAISPAMTAEYRKRRWRGKDDRIDAANAARALKANPDLPRYSPPDYERALKELTRTYQRVSQQLTATRMALRLLEAPEARQALLKVEDALKAARTQLKTTLARTVQPLAGPLLARRGVGPVVAAMVLAETGSISRFRSRDAFASFAGCAPVRWASGAHECVRVNPGGSRRLNWAVHIIVLGRLRLEARTREYRDRKLNEGKTQREVIRALKTYVCRELYWILKSLDPHPSTA

SEQ ID NO: 278250 - protein, 452 aa, unidentified
MAQRNPSQTGKTRKSQQAITITHPNAAGIDIGSSVHYVAVPPDRDDQPVREFPSFTSDLNALADWLKECGVDTVAMESTGVYWIPLYELLESRGFTVRLVNARHVKNVSGRKSDVLDCQWLQQLMSYGLLSGSFRPDEAICVLRSLWRQRSMLLRGQARQVQHMQKALTQMNIQLANVISDVVGTTGQKILRAIIAGERNGDVLAKMKNGRIVASKAEIAKSLQGNWRSEHLFALKQAMGLFDFIGTQLDECDREIEQQLITLKVHDHEPAKGKRAGSRNAPAYDLRTQLFKMCGVDLTRIDGINVTTAMAVISETGTDMSRFATAGHFTSWLGLCPGTKITGGKLMNGKTRKVVNRAAQALKLAAASLRSSQSALGAYYRRMCARMDKPKAITAAAHKLARLIYTMLTKGEEYIDQGQEYYEERYRQRLLYNLAQRAEKMGMKLVSTELAV

SEQ ID NO: 278251 - protein, 309 aa, unidentified
MGIDVSKAVLDVAMLPTDEKWSVPNSNQGMQELVQRLKGLEIRLIVLEASGGLERRAIAALAGAGFPVVAVNPRQVRDFARATGKLAKTDAIDAAVLALFADRIRPEPRPIKDAEAQELEALVVRRRQVVDMITAEKNRLSAAPPSKQVRTAIGRTIEWLQKQLDENDRDLEKAVKRSGAWREKDDLLRTVPGVGKVLSRTLLSLLPELGTLTHRQIAALVGVAPLNRDSGTLRGRRIVWGGRAQVRNTLYMAALAAARFNPVIRAFRQRLAAAGKLPKVAIVACMRKLLTILNAMSASNTPWRTEIAS

SEQ ID NO: 278252 - protein, 337 aa, unidentified
MNDCTVFVGLDYHQASVQVCVLDESGRVMLNRACRNDWRAIVLAVESQGRARRVAIESCTGAANLAEELVRLAGWSVDLAHPGYVHRMKGSPDKTDFTDARMLADLTRVGYLPKVWLAPESVRELRRLVRYRQQLVADRRNIKLRVGALLRDQRIRDVPARPWTKAWVEWLRETNALSEQSRWIIDRLLPRMALVVDQIAEVEAQLASVTRGDPMVAALCALPGIGPVTAWTIRAEIGRFDRFESGKQLARFCGLSPRNASSGTRVADAGLVKAGNRQLRATLIEAAHRLIRFDEYWNDFADDLLDRGKPKCVVVAAVANRWMRRLFHQMQPAKLAA

SEQ ID NO: 278253 - protein, 345 aa, unidentified
MSIVGGLDIHRKQLTFDYVDTDTGELRRGQLAPADRRHLAAWLGRFDDRETTFAVEACTGWRYVVEELRRAGAVVQLAEPADTAAARGRKRRAKTDRSDSKLLRELAVGGRVPQCWIPPFEVLEYRALLECYHDLRREHTGWVQRLHAACFHQGVAALGTGTISTDDGRVRLRRIAAAELSPAGQAQIAVGLSMLEAIEVHLDELRRQLVGIARHQLGAKTLTDRLYGIGPITALALCCWLGGGDHRFRSSRQAVRFTGLDVTVYSSDGKRSPGHLSRQGPPVLRWCVYEAGKTHARTSAPDHDYYTGVKDRIDGKRAALSEARKLVRQAHHILAELGDTAFDAA

SEQ ID NO: 278254 - protein, 393 aa, unidentified
MALDHHFDEPTAIRTNLDAVFVSLELSRSTWLITSVSPGGGEKMSKHGVSAGNVAALLTRLSELKQKAFARTGKSFHVVAIQEAGLDGFWIHRVLQSEGVESHVVDPASIATSRRRRRAKTDKIDGEALVRALLAYKRGEPRVCAMVRAPTPEEEDRRRLCRERKTLTNERVQHVNRIKGLLFAQGISDYQPLRRNRHQRLDELKTGDARPLPPHVKAQISRELDRLELLLEQIKAVEIERDALISAMKPGGMNADAVRSPPAMLTKLNGIGPEFAAVLWSEGLYRSFANRRQVAAYAGLAPTPWQSGSVRHEQGVSKAGNSRLRTTMLQLAWLWLRHQPQSALTLWFHERVRRNGARLRKTTIVALARKLLVALWKYVNAGVVIDGAVTRAV

SEQ ID NO: 278255 - protein, 342 aa, unidentified
MTQFTFFVGVDIASVSFMACVGTTPWKIVEKPMKFENDEDGFVSFLGWLKEHNLPSEKTVVCMEATGVYGEGLSYFLSANGYTVAVEPPLNIQRKFPVNASKTDELDCQYIAEYACRYADKLSFWKPRAEILEKVKVLLTTRQHFTVQLTGHKNALHALKRKVVSSDLAQQVHQDLVDQLTKHIKTIDKEIHRLIDSDPTLGQTLLLLMTVPGIGLQLAAHLIILMQTTLDPRVLSAFTGISPIQHESGTSVFSTPTSRHYGPPILRKLLYLAACSVRTHQKPFQQYFFRKVAEGKHKKVVLNNIQNKILKIACAVVRTQKPYIPNYVSVNPLVFQKTLTKS

SEQ ID NO: 278256 - protein, 419 aa, unidentified
MSKGNVEIAAFVSLDWADQKHAVALQEAGSDQRHRFILDHTPEALQNWIQSLRDRFGGRPVAVAVEQKRGALIYALMHVEFLHLYPVNPVTVAKMREAFRPSGAKDDPSDADLLLDILMSHRHYLRVWTPDDALTRSIQLLTEDRRRVVDERTALTNQLTAVLKTYFPQALDWFGDLHTARACAFLQRWPALEPLKQASPSSIRKFYKAQGYRGDDKLEQLLANIKKAQPLTQDSAVLLSCSMKVDTLVQQIPLLTQAIQRYDEKIAALFQQHDDSTLFGSFPGAGPALAPRLLAAFGSNRDRFEFASEVQELSGIAPVTEKSGQGIWIHWRLACSKFLRQTFQEFAGCSILQSDWARACYDQLRKRGKSHHAALRVLAFKWIRIIFRCWKNRTPYDEALYCNSLKIRRSSLADELPAS

SEQ ID NO: 278257 - protein, 330 aa, unidentified
MTTNPPQIVFNHILAFEVSKEQLLVHTLPADEQCAIDNKPQAVRRLIKAEIKRNRNKQLGQMLVVCEATGGYERHVLDAAVEMGLSVHRAHGTRVRHFGGYCGLLAKTDPIDARLLAQYGLKTENIRLYSPPPPETAALRALHARRTEIQQMLIAETGRLDHAQHKNVLKSLKDHIASLKAALAAIEADIAQLVEKCEVLRKKVALMQTVIGIGPISAMVVLAYLPDIGRLTRGQAARLAGLAPINNDSGKKRGARHVEAGRTAIRRALYMAAGVAMRTNPVVKAFADRLRGKGYPFKYVVTTVMRKLVVILNAVLRDGQSWRGAQVASV

SEQ ID NO: 278258 - protein, 412 aa, unidentified
MQTLVERGCGLDVHQATVVACLLMVRQDGKVQKQIRTFGTTTRELVGLREWLLSEGCTHVALESTGVYWKPIYAILEGTLEIVVANAQHIKKVPGRKTDVKDAEWIADLLCHGLLRSSFVPPKPIRELRDLMRYRRKLTESQAAERNRLLKVLETANIKLANVATDVFGMSGRLMLRALIAAKATPQEMAELAKGLLRKKIPELQLALEGKLEEHHRFLLELQLQRLEAAEKDLATLEQRIRQKLEPYAAQLALLDEIPGVDWTLAAVIIAELGVDMSVFGSVSQLASWAGVCPGNNESAGKRKSSRIPSGNVYLKSGLVEAANAAARAKGTYLRDKFFRLKARRGYKRAVVAIAHKILVAIYYMLSQQVSYNDLGDLYLDKLNKNHLTRNLVHRLERLGYNVTLTLQQKAA

SEQ ID NO: 278259 - protein, 356 aa, unidentified
MDNRKYIGMDVHQASISIAVTDAGGKLLMECVIETKAATILEFLQGLRGSLWVTFEEGTSAAWLYDLLKPRVAKVIVCNPRKNALLKAGNKNDQMDARKLADLLRADLLTPVYHGESGVRTLRELSRSYLTVTKDLTRVMNRLKAVYRSWAIPCAGQEVYAPRHRAAWLKKLEETGVRRRAELLYQQLDALVQVRRVARRELLAESRKHAASKLLQEIPRLGPIRAALLIALIQTPHRFRTKRQLWAYCGLALQTRSSGEYRSTGGHLQHSRKPPALRGLNVNHNHDLKNIFKSAAIQAGASNKDPLGDFYRNLLARGMQPPMARLTLARKIAAIVLKIWKKGERFDPAQLKQQAA

SEQ ID NO: 278260 - protein, 347 aa, unidentified
MRFYTTQHPFYCGIDLHARSMYVCILNQDSQIMLHRNMKASPETFLKAIAPYRAEIVVAVECIFTWYWLADLGAQAGSPFVLGHALYMKAIHGGKAKNDKIDAHKIAVLLRGGMLPQASVYPAAMRATRDLLRRRLYLTRKRAEWLAHIQNTNSQYHLPEIGKKLAYKANRDGVAERFPDPAVHQSMAVELALLGSYEPLLRALEWPIVKAAKQHDPNTLYLLQTVPGSGKILSLVLLDEIHDIQRFPSGQDFVSYGRLVKCAKASAGKRYGTAGAKLGNAYLKWAFSEAAVLFLRDHPAGQKYLTSLEKKHGQGKALTLLAQKLGRAVYYMLKRHKACDMDKFLQA

SEQ ID NO: 278261 - protein, 365 aa, unidentified
MQKISTMRRSGKNIFQGQLTIGLDLGDRSSAYCVLNEAGEIVLEHKLATTPEAVKQVIGSMPRCRIAMETGTHSPWMSRLLTALGHEVIVGHAQKVRLISKSRRKDDRLDARTLARLARIDPELLSPVKHRSAQAQLHLTEIRARAVLVNARTAMVNAARGLVKSYGERLRKCDTQQVRREASSGLSAELRKALEPLLQEIESLNERIKEYDRRIEKMAKETYPETALLKQVKGVGDLIATAYVLTFEDPNRFRKSRDAGCFVGLQPGRRNSGESEPQMRISKEGDEYLRTLLVQGAHYILGPFGEDSDLRRWGQKLAARGGKNGKKRAVVAVARKLAVLLHRLWVSGEVYEPLRNSQKVMNAAA

SEQ ID NO: 278262 - protein, 406 aa, unidentified
MNQNTCITIDVSQNKSQIQGFIGPNKPLSKARTMRNTKQGFQFILILKNLIESKTNETPLIVFEFTGIYHKPLEKFLISQNLKYHIVAPLKAAKARNSEIREQKTDARDCLSLSKLFYSNNLGIFYSENETYSNLRKLNGYYDTCMKHLIKIKVNFRETLAVVYPNYKKLFSSIYSDDSLTFLKEFPHPSLYTSKLEDRIIEILKNKWDHLESWTSSKVKILTPLINEVVSGCNVTEPDIIMLLSYISQIEYYLNQIEITVSQMNELAKKVPLYNLVHSLPGIQDILTCKFIAEVGDISRFSNYKQIVAYAGIDPMIRQSGDKDGLHLKMSKKGNKRLRTILHLMVSSLIKANREPNAIKDKYQKKTHQLNPLKPKVASMACANQLVRIIFYMHKTSSTYTYHECK

SEQ ID NO: 278263 - protein, 344 aa, unidentified
MQYYVGLDVSVKETSVCIVDKAGKVMREVKVATKPEAIFAVLTEEGLAIERIGLEAGPLSQWLYSALAEAGLPVICVETRHMKAALSAQINKSDRNDARGIAQMMRVGLYRPVHVKTLVSQKRRMLLTSRQLLQAKALDIENDLRGTLRNFGLKVGMVGTVKFEARIRELVADHPDLAAIVEPLLIARRVLREQLGVLHRQLLEIVRHDEVCRRLMTTPGVGPVVVLTFRATVDVPSRFTSSKAVGAAFGLTPRRQQSGEIDRMGGISKCGDVMMRKMLFEAALVLMTHSRKWSWLKAWGMKIARHRGMKRAIVAVARRLAVIMHRMWVDGTEFRWTREEAAAA

SEQ ID NO: 278264 - protein, 342 aa, unidentified
MSTIMRIGMDTAKSVFQLHGVDAAEAVVLRRQLRRREMIKFFEALPPTLVAIEACASSHHWARLLQSFGHEVKQIPPQYVKPYVKRGKNDAADAEALCEAVTRPSMRFVPVKSREQQAACMLMTVRERLVGVKSQLSNAIRSYAAEFGIVAPAGRQNVAGLIKRILEEDKLPEMARDLFRLQASEYGSVVARLAEVDAKLMIWHRADDLSRRIATIPGVGPIGSTMLSMKAPPAETFKSSRQFAAWLGLTPKDHSTGGRVRLGGITKAGDPAIRSVLIVGATALLRHVRKGRTKPTPWLAAMLDRKPPKLVAVALANKFARIAWRLMMSGGVYNRPPALMPA

SEQ ID NO: 278265 - protein, 367 aa, unidentified
MCVGLDTHKAKIAVAVAEPGREGEVRFHGEIANQPEALRRLIERLADKHGRLKVCYEAGPCGYGLQRQVTALGHDCTVVAPSLVPRRPGDRVKTNRRDAVALARLHRAGELTAVWIPDPVHEAMRDLVRARTAAMEAVRRARQQLQGFLLRHERVFTGRKTWSPAHRRWLAGLRFAHPAQQIVLQEQIDTIEEAERRRDRLGQQIRELVPDWLMAPVVTALQAMRGVAFLSAVVLVAEVGDFRRFTTPRQLMAWLGLVPSEHSSGAKVERGGITKAGNGRARRVLVEGAWSYRFPARVTSPIQARLDDVPEAVRAIAWKAQVRLCARFRRLVAAGKNVNVVTTAVAREMAAFAWAIACQVQPKEAAA

SEQ ID NO: 278266 - protein, 315 aa, unidentified
MDTTVVGIDVSKERLDVSVQPAGTALGYSRDAAGIELLIGMLASAAPQLIAVEATGGFETVVAASLAAAGLPVVVVDPARVRAFAASLGKRAKTDRIDAKVIAQFAAATNPPVRDLPDAATQALSDLVTRRRQIIQMIVAEAQREKRAAPRPRRSIGRLLKSLRAELSEIDAEIDESVRGSPLWCEKESLLTSVPGVGSTTARTMLADLPELGTLTRRQIAALAGLAPFTRQSGKWRGKSFIGGGRASVRTALFMAALTAMRWNPTLRAFHHRLRATGKPKMVALIAVARKLLTMLNAILRDNRPWQTADQQDSR

SEQ ID NO: 278267 - protein, 340 aa, unidentified
MSDIRVVGLDIAKSVFQLHGVDAGGATVLQKRLTRGRLLAFFAKLPPCLIGIEACASSHFWARELTSLGHEVKLMPAQYVKPYVKRGKNDAADAEAICEAVTRPTMRFVGIKSPEQQSAMMLHRVRLILSRQRTQLSNALRAHLAEFGIVAPIGRNGIDRLLGVIADPADDRLPAEARICLEMLAAQLSIVKQQILENDRRIMASARSTELGRRLMEIPGVGPLLASAMVATVPDPAIFRSGRNLAAWIGLVPRQNSSGGKERLGSITKAGHGYLRQMLIVGAMAVIRYAERNGARRPWLVQLLARRKAKVAAVALANKNARIIWAMMISGERYREPQAA

SEQ ID NO: 278268 - protein, 461 aa, unidentified
MGIDVSKGYADFMIINSRKKPVAQTFQLDDTFEGHRTLYNTLGSFLAKHDDATLFAAMESTGGYENNWYHSLIQFQGSLNIQTTRLNPLGVMHNSKADLKKNTTDKISAQNIAEYLVSHPEKVNYQQEDNLAGLRKQWGFIRMLTKQCTQFLNELNALLYSTYPELLSDCQDGVPNWVLKLLVKYPSAANLKKAHAKTLAKIPYVSMKRAQELIEKAKRSVAATTDLTTQQLVVATVQQILHLKKTIAGQTDLMLQECSTPEIELLKTFPGISDTSAIGLIIEIQTVKRFASAKKLASFFGVHPVYKTSGDGAGGYKMSKQGRSEPRRILYMVALAAIRCNPLIKEIYEKHKRQGKQSRAAIGICMHKILRILYGMLKHNQPFNPHVDLANRLRSVPMQNDNAIDKTSRRLQGYDQSAPVSRRQRKKRQERERSHNVIDTKSGITAPAPLADIIADILPQL

SEQ ID NO: 278269 - protein, 331 aa, unidentified
MNYSHFVGLDVGKKTFDASLMSADEKELSHKSFDNTPEGIQSLLDWIAGYHLSLSKLLFCAENMGSYVTELSVSSVSMGFSLALVCPLTIKKSIGLQRGKNDRIDAKRIANYAVLHYRKLELYKLPDKDLVRLQGWIIIRDNLVKQKVSSIKLLETFSQMAKLANVTEAISFLEEQLKSIKEKILEVEEDMEQLIAVSTSLYTNYLLLRSIKGIGIINAIVLLYVTDNFQRFDNPRKFACYCGVAPFEHTSGISIRGKTQTSSLANKEVKVYLTRAAITAISWDPQMKAYYKRKIAEGKHKASVINAVRAKIIARSFAVIRRQTPFVTLAV

SEQ ID NO: 278270 - protein, 423 aa, unidentified
MNNSTLCIGADIHLKDIVLRGVDKASGQEVLKRFSVTNNLPGARSAAATIAQTATDLGYTNLEIAWEATGLLWLPFYRFLASNPLLQPFAPKLVCFNPKLVAKFKDSIDLRGRKNDNLDAYDIAARLRFGELPLSYVPDDFWQGLRRLTRYRYRLSRALAREKMRFQSFAFLKYSDWKRVKPFSDLFGATSIALLTQLTAAELRALSQQQLADFIARTGRGRFHDPDATARAVQQALDSSYPIDPQLDEMVTFSLATLRDHIRFISRLMKRLDKQIARTIAPLPNPLITVPGLGPVITAGILAEIADISRFPEHKHLAQYFGLTWHNHSSGGSVSQNTRLTKMGNAYGRYYFILGANTLRMFNLEFKAYYWRKYQEVPKHQHKRALVLTARKLVRLVHALLTKNVPYVRPRTPTHLQEDISLQ

SEQ ID NO: 278271 - protein, 345 aa, unidentified
MKYYAGLDVAMKETFICVLDEEGKRVYESRSTTDPQPIYEELLKSGVVLEKVGLETGSLSNYLTKGLQALGLEVICIDARKMAAILSVTVNKTDKNDARGIADAMRCNHYKPVNIRDADNSSLMILLKSRTTLVQHRMTFKNTVRGFLKTYGFRLGEVSHEKFSKKVREIEDVPISAKLGIESLLKSYEAIHEEIKRIEKKLSKIAKLDEEVKLLMTTPGVGMIVALSYKADMGDPTRFEDSSCVGAYYGMTPRQYSSGETVRQGRISRCGSKEVRYLLTEAAIVLLTRSKVWCPLKAWGLKIQKKHGFKKAAVAVGRKLSIIMHRMLMTGESFKFSRDEAKLAA

SEQ ID NO: 278272 - protein, 366 aa, unidentified
METIYIGVDFHARQQTICYLTTNGGEILLHVLKHQDKEAVRSFYAQFTGRVIVGLEASGYSPWFERLLEELGCEVWLGNAMQIRRRARGRHKNDRRDAELILDLLLHDEFPRLYLPPQQSREVLRMLRYRQKLIKIRTMAKNSLQALALQAGLAKGSHLFTKAGQQELLTAPMSPAMQWQRTQWLQLLEPLNERLLETMLWLKQQSLNDQRIGRLRTHPGIGLLTSLCLVHSLEPVSRFRNTRKVVAYAGFDPLDRSSAEKTRFLGISKAGSRVLRYLLVEAVHTAVKHDADLKQFYQRLAERRGRPKAKAAAGRKLLIRAFIMLRDEIDYAEFRRRAVAARLARRGQGPTNVPEVLIGQPTSPGV

SEQ ID NO: 278273 - protein, 324 aa, unidentified
MLTRNKGIGIDVSKAELVLWDSISEQLIKIANTGKGMKQLRKYLFKINSDIVTIEATGKYHRLAARTCQECSVPFIVAQPYRVRQFALGLGIIAKTDPVDARVVCQFGLKSDLNVSTLESKEHEALRDLVVHRMQLAEDKAKFQARHTEASSKDIKVFCAQSLTFIEKQLKMVQKKIVQEIKKFADLQPRFQLLQSIKGIGEITAAVLVLLLPELGKLSKSQIASLVGVAPFDDQSGKSDKQKSIFGGRTRVRSALHMAVMSAVRYDPFLSHFYKKLKENKKKTRVATTACIRKIVVIANQIIKSGVPYDPSIPLALSLRAKKA

SEQ ID NO: 278274 - protein, 367 aa, unidentified
MKKISTRAAAQGRNISQQKLTIGLDLGDRNSWYCVVDEAGQIQLEQRVRTTAKALQEVFGTMPRSRIALEIGTHSPWISRMLSDLGHEVIVANARKVRLIGESRKKDDRLDAQTLARLARIDPELLYPVKHRSAQAQADLTVIRARAGLVRARTGLVNSARGLAKSYGERLRGCNVRNMNPEKAEGLSPELQAALEPLLDAIESLSERIVEYNERIENLAQQDYPQVALLKQVKGVGTLIALTYLLTLEDPHRFQKSRDVGCYLGLQPGRRNSGRSEPQLHISKEGDPYLRTLLVQGAQHILGPFGIDCDLRRWGLRLAERGGKSGKKRAIVATARKLAVLLHHLWVSGEVYEPLHNSSRTTVAAAA

SEQ ID NO: 278275 - protein, 349 aa, unidentified
MLVDQLDYVVGVDTHLYEHVLAVVAAPTGAVVARQTVRANARGYQAALRFAGEAANGTRAWAVEGTGSYGAGLARYLAGRGESVLELSRTPRSERRLRGKDDSLDAIRTARAALASETHALPRSGEQREALRLLLIARRGAVDVRREALVQLRSVIVTAPDPLREQLRGLPVGRLLERCRRLRRSSSARPDELATRLVLRSLARRIEAASSEAAEHEREILAHVRALAPQLLDEPGVGPVVAAQLLVAWSHRGRVRSEAAFARLAGVAPVPASSGQTSRQRLSRGGDRQLNRALHTVVLHRRQHDPQTKDYIARRTAEGKSRREATRLLKRYLARRLYRLLENREPLLA

SEQ ID NO: 278276 - protein, 413 aa, unidentified
MDVLHPRCCGLDVHKSSISACILLREAGRVQKHQRRFGAMTQELQELAEWLRQFGVSQVAMESSGVYWKPVWNILEGKFTVVLANAQHIKNVPGRKTDQKDAEWIAQLLQYGLLRPSYVPCEIIRDLRDLTRMRASLSQEASRISSRIQKVLEDANVKLASVATNVLGKSGRAMLEDIISGEDDPEHLASLALGHLRVKIPHLRLALEGKVRSHHRFLLRRLVDQIQFVEHEIGLLDERLEEIAQQRPELSQAVARWDTIPGIDRVAAWALLAEIGDNMAQFPTAGHLASWAALCPGNHESAGKRLRGTTRQGSPWLCRMACQCAWAAARTKNTYLTSQFRRLAARRGKKRAIIAVAHTIIVIGYHLQKNQSNYEDLGGNYFDRIHSDGLKRYLVKRLQQLGHKVTLEPMEAA

SEQ ID NO: 278277 - protein, 388 aa, unidentified
MLLDHPSDGPAAIRTQFGAIFVSLELSRSNWLVTSLSPGKGEKMSKHSVTAGDIAGLLKLFADLECKAQARTGENYPMITIQEAGLDGFWVHRVLQQEGIESHVVDPASIATPRRRRRAKTDRLDGETLLRALLAYKRGEPRVCAMVVAPSPEEEDRRRLCRERRTLIAERITHVNRIKGLLFAQGISGYAPMRRDRRARLETLRTGDGRMLPSHLKAQVSRELDRLELLLDQIKAVEAEQDALLAAARKPAAEKAPDPVTMLLALKGMGANFAAVLWSEAFWRQFANRRQLAAYAGLAPTPWRSGSIEREQGVSKAGNPRLRTTMIQLAWLWLRHQDQSALTRWFKAHSQRGRKSTIVAMARKLLVALWKYVTSGVVIEGAKMKIPT

SEQ ID NO: 278278 - protein, 378 aa, unidentified
MSQTENCQNVCCIALELSQSKWLCAFSPPDGNIRLHTVRAGDHGQLLEWLDRQQARADSDAGQSLHRVLCYEAGYDGFWLARLLLQHDIRTVVFDPTSFLKPRRGRLAKTDRLDAEAMTRILRSWLNGDRSVAREVRVPTVEEEDAKRICRERKHLVNERTRLAGRIKGLCALHGVVVPGKGIGTRWASRIDHVLTGDGRPLPPCLKREIGRMLRRYDFVQDLIAEVEQDGRAMVAEATSSLPGREKVKSLATLGGVSETSALLLITEVYHRRYESRRHLASFLGLAPSPYASGEVSRDRGISKAGNKLARQTLVELAWSWLRYQPKSGLAVWWRERFASAGMRGRKVGIVALARRLAIAFWRFVEDGVIPEGATVKA

SEQ ID NO: 278279 - protein, 412 aa, unidentified
MKQQVIEDVNIMPQLDKACGLDMHKDKIVGFISGKDGSNQEFMEFGTYTCELKKIRDWLQENDIHHCLMESTGIYWMSLHAILTEAGIEVIVANPVHIKQIPKRKTDRKDAKWLCTLLLHGLIRPSFMPDSTQRIIRDYCGNRLFYTWQLNQIRNRLLKILESNNIKLRSVISSIHTLSAMDMIRLLAKGVTDQEQLLSCARGKVIKKKEQLIKALDVTLQTYHHTQLQMLLEDYDHVQKQVDFLDKSITEIIIEHYAQAFECLDSISGIGVKSAEIIISETGKDMSRCPTADHFTAWCGIAPGNNESAGKRKNTAIKKGNSYLRVAIVGAAWAAVRMKESYWHALFDKLRKRMKAQKAIVAVARRLLKVVYNTLETLTIYKEKGIAHFVDLQAKAALYNNAKLSWPQSNID

SEQ ID NO: 278280 - protein, 438 aa, unidentified
MSNNVIFNFDELFISVGIDVGADFSWMSIVLPNQQFVGKPYKILHNSMNSLALAVSKIKEAEEMYSLESRIFLESTGIYHYPLFCYLRDKGFNCSVINPIITKNSTNINIRKVHNDRFDSKKAALVGLKPDLKVSLMPSDLALNCRNLCREYYDLMDSRNAYVNKLIGELRMVFPQYLGIFSKVTIDTSLILLETYTSPSAFINADKQEIIDLIRSTARFGLTYACNKYNAIIQAANDADEFGYILDSNIKRIRLYIGFIRKYDEEINSILESMHELVAANEDTDFVKQIRLIETFKGAGFLSAMSLMGEIGDFSAFSKPKQLFAYFGLDPAVKQSGKFEGTKIQMSKRGSAIARRVIHTLTLQSISASRTGESKNPVLRDYYLKKCESKPKLVAMGAVSHKVCNMIFAILRDSKPFEIITPQEHIKKYNAAKCDVAA

SEQ ID NO: 278281 - protein, 411 aa, unidentified
MRIVHQRCCALDVHKKSITACVLVWDGKEAVEERKKEFGTWKKELERLRFWLMASKVSMVAMESAGVYWKPVWHVLERQKQFQLKLVNAQHYHGVDGQKTDQIDAAWLAELLQCGLLKGSFVPPQWQRELRDLTRLRVSLLQDQNRVQNRIEKLLEDANIKLGSVASDTLGVSGRKILNAVVDGKRDPGWMADYAQGRLRARRKELEDALHGFVTEHHRQLLALLLRQIDHLDRDIAALEVDIRKRLEAHQDLVQRLVEIPGFGEVTVWTVIAELGLDMKVFGTPERAASWCGLCPGNRKSAGKRGHGRTRKGNRWIRRGLTQSAIAASNKKDCYLRSFYWRMASKRGPKKARIATAHKQLKIAFLIIRDGTRYQDLGPDHFDRRNTEKTKRYLVQRLEGLGLKVSIEPAA

SEQ ID NO: 278282 - protein, 375 aa, unidentified
MKEKVRFLGLDVHAETIAVAVAEPDGSVRSLGTIANRGESVRKLVKKLGPVEQLRACYEAGPTGYVLYWQLAELGVKCEVIAPTLVPVKAGNRVKTDRRDAEKLARSYRSGDLTAVWVPDEGSEALRDLVRARESAKQDQLRARHRLGKFLLRTGRRPEHGVKAWTQEYMKWVRQLRFEQIAQEATRQDYLDEVEHMGERVRRLEQAIVEAVKAASPGLRQVVRDLQALRGIAHISAVTVAAELGNISRFEGARQLMGYSGAVPSEDSSGERVRRGRITKTGNAHLRRIAVEAAWSYKFRPAVGPALRKRQEGLPEEIKEIAWKAQHRLHKRFCRLAAAGKDRRKVVTAVGRELLGFIWAIGIKAEAAARQRLAA

SEQ ID NO: 278283 - protein, 353 aa, unidentified
MKTYYVGMDVHRASIVIVVLNGAGKLVMQYVTETSAARVRDFLRQLRGKVYVTFEEGTQANWLHDLVRPLVTEVVVCDPRQNKLLHSGNKNDRIDAQKLAELLRNGALKAVYHGDNGMRMLKELVHCYDCLVSDTTRVMNRLKAIYRGRAIACGGHDIYRPDRRPEWLQKLKEPGARQRASFLYQQLAALKPLRHEAKRLMVKEARRQTAYPWLMSVPRLGVVSVAQLLAIVGTPHRFRNKRQFWPYVGLAVVTRTTADHEVVNGVLQRSRRPLATRGLNRNHNHVLKRVFKNAAITACHSGPFKAAYDVRVAQGMDPSLARLTIARQLAAITLALWKRGEQFNPERMKQQAA

SEQ ID NO: 278284 - protein, 354 aa, unidentified
MSQNPNAGIAIVGIDIGKNSFHIVGLDQRGAIVLRQKWSCGQVEARFANMPPCLVGMEACVGAHHLSRKLKEFGHDARLMPAKYVRPYSKGQKNDFRDAEAIAEAVQRPTMKFVATKTADQLDLQALHRVRERLVSQRTGIINQIRAFLLERGVAVRQGQRFLRAELPRILATPPNVLSPRMVRIIENLAGDWRRLDERVQNLSDEIEAVARQDAGCERLMSVPGIGPIISSAMVAAIGTGDGFSKGRDFAAWLGLVPRQMSTGDRTILGKISKRGNRYLRVLFVQAAWVVLIKPKSWERHGLKSWIEAAKKRLHPNVLAIALANKLARIAWGVLARGRNFEARTNTNATVQAA

SEQ ID NO: 278285 - protein, 400 aa, unidentified
MISVGIDVSKGKSTVCILKPYGEIVSKPFNITHTQKDLSELSSMLFRLNDEVKIVMEATGIYHLPVLTYLQEKGFFVSVINPYLMKSYRNESLRKAKTDKIDSRIIANYGIDHWFKMKEFQTSGEIYEELKLLGQQYRHYMKLHLLSLAELTHLLDLTMPGIKNLLASWNETNRKDKRSDFVERFWHYDVITSMSEQEFTEEYILWAKEKKYVPSQEKAKVIYTLAQESIPTLPSETSSIKMLVTEAVRVLKEVDATLGLILSRMQEIAKTLPEYSVVIEMGGVGNTLAPKLIAEIGDVRRFRNGKALVAFAGIDPPPYESGQFVGCNRKISKRGSASLRKVGYETMRSLKMRSRPEDPVYRYVVKKEAEGKSKKSAKIAGLNKFLRIYYARVTELYKNI

SEQ ID NO: 278286 - protein, 506 aa, unidentified
MTTPTTRTTRRKPDPSSSSGPQGQAHAHCQAHNRRKTRAKAKSEALHQKEAAQVQALPVLHPHATGIDIGSRSHWVCVGFTTEADSGLIQEFPSHTDGLKALAAFLHEHQVTTIAMESTGIYWIALYELLESEGFEVLLVDPSYTHQLRGRPKTDRRDCQWIYRLHSVGLLAAAFRPDEKTCQLRAYLRQRANLIRQASRHVQHMQKALEQMNLKLTEILSDITGATGRTILRAILRGTRAPEKLAQYRDKACKASETEIAQALTGSYREEHLFALKLAYEAWQFSLKQVEKVDTQIALQLGRMKCDRALPPLTLKKRLSRKINVPRFDVRMALYYVVGLDLTEIEGISELTALTIISEIGPEVSKFPTVKQFCSWLGLCPNWKKTGGRVKSSRTRRGVNRAATAFRLAAHGLHRSQGALGAFLRRMKARLGTPAALTAAAHKLARIVYLALKHGLPYVRKSQAEYEAQMKEKQLQALQRKARQLGLELIEKPSACSGTAETPVQG

SEQ ID NO: 278287 - protein, 418 aa, unidentified
MRSGYMVAGIDVHKKMLAVVIGRVGATGDGLSFEHRRFTTTASRLQELKLWLSECNTDEVVMESTAQYWRPVWLTLEGTFKLHLAQARSNAGPAGRKNDFRDAERAVRRLLSGDLRLSYVPDAEQRLWRLLSRTKRQLGCDRVRLHSQIESLLEEAQIKLSSVITDLLGVSGRRILRALVNGERDPEQLAALGHERLHASKQQLQDALTGSMHRLQAIVLGQYLDRVETIERQIAELDAELMAVLEPHQDVIRRLCAVPGIGISAAQQLIAEIGPTAAVFPSGAQLSSWVGVCPGREESAGVSASDRSPKGNRVLRGLLTQVAHAAIAAKGSYFQERYRRMVSRLGPGKAIWAIAHRILRLVWKILHQGVEYVEHGARSGDPRATLIRGQRMLAALRRMGYNLQVLASPNTQNPAPTV

SEQ ID NO: 278288 - protein, 481 aa, unidentified
MSAGKKNANDGAPDGAVAAHGGDGAEVAEDRVQVVEYAAAIDVAKGSGMVCTRVPGSRPDRRRQKVWRAEATCGEVTALMDHLRCEGIQRLVLESTSDYWRIWYYLAEAAGLEVWLVNARDVRHLPGRGKSDRLDCVWHCKLNERGMLRRSLVPPQETRDLRALTRTRARLAQDQARHQARVEKILEDALLKISVVISDLFGASGRRFLDALVAGERSPKALAALGDTRLKATRRELEAALTGRFRDIHAFEISTHLRLIDAINEEIALLDEKIAQQLALVPRTAPACVACGLAGGGHVPGCPDEGAAVLGLAGRLDEITGVGECNARVIIAELGTDPSQFPTPGHAAAWARLTPRSRQSGETARPGRTGKGNRYLRGALGQAAMAAASTDTRLGAMYRRIARKRGKQKAIVAVSRVICEIAWILICDPGARYEELGPDYYSPRSPARQTRDKIREIERLNPGKKVILAPADPGAGAGQAA

SEQ ID NO: 278289 - protein, 349 aa, unidentified
MTMTIVEAARGVTGGVDTHRDVHVAAALDPLGGLLGSESFSTDVAGYKALLGWLKSFGDVTKIGVEGTGSYGSGLARYLHRMGVEVIEVDRPDRQQRRRTGKSDPLDAVEAARAALSGRATGRPKSRDGAVEAIRVLVVAKRSARQARVKALIQMRHLGFTAPEQLRCRLKGLSVPALVAEGTKLRATRSLDPVTAATKASLSSLAHRVTALDEELAALDERIEALLVATVPELLGLFGVGPDTAAALVMTAGDNPERLRSEAAWAHLCGVSPIPTGSGKKSGKVRAHEGGARLANSALWRIVMVRIAHDPETQVYFERRVKEGRTKHEVIRILKRYVAREVYRYLPRG

SEQ ID NO: 278290 - protein, 343 aa, unidentified
MTFKQIGIDIGKNSFHVVGLGADGDIVLRKQFTRSRLLAFFGDRRSECLRVAFEACSGAHWLAHQLIAMGHDVKLLTPESVRPFAKAQKNDWNDALAIAEAAQRPGRHAVGIKSDEQLDMQALHRVRQRLVTARTSIINQLRGLLRERGLVIPSGRARFERYIQTELMEVGKVDLSAVSRALFETLIAEYTMIDARLSKIDDELEAFAKSNSVCRALLPIPGIGVIVATALYSAVANISDFRTGRDLAAFLGLVPRQRSTGGKTILLGISKRGNTHVRTLMIHGMRSAFYHRRKRESRMAEFMERLCARGMHTNKIVVASANKVARIVWAVLSRNEPFQPVAA

SEQ ID NO: 278291 - protein, 415 aa, unidentified
MLILGCDIGSETHYVRAIDIRGRELSKSAFGFSNTAEGFESMLDWSTKLAAANDKKQIVLGLEPTGHYWFCLTTWLVAKGISVVQVNPYAVKQTKEVEDNSQLKDDKKDPKLIANLVKDGNFGMPYLPEKLYADIRRLSMFRDQLNEDRIRNLNRLHREMKIYFPEYKDAFGKIDGAFSLELLKAAPFPDELAALGTEGMKQIWHEAKLRGRGYANASSILEYARKSVGIKDGADAGRQAVKWFVSRIIELDGQLSDIENKLNERCMEIPHAKNILAISGIGENILSGILAEMGDISRFDDVKEIQKLSGLGLVACSSGKHTGETKISHRGRKRLRYWLFQAAKSAVAHSGEFKELHVYYTTRKQNPLKKMQSLIVIACKILRVIFTILTKGTTYDPKKLLGDIIRPNQAIPQAA

SEQ ID NO: 278292 - protein, 467 aa, unidentified
MKNYDYNLFVGIDVSKGKADAAVLAVPELRSVKPRFLRKKLSFKFIKSDVVEFLNTVRKYSSDQHCLHTYFALEVTGIYSTNVYSFIKQNCNSDEEIHQLNTDFVNKWRESHNISKSDPLDAQTISTIIGTDDDVRYVSDSVFENKNGYQDLKALVHRHYQIKKLYSQETNRLIALCDCYFPELQYVFEPKSAAFLAVLSQYPTSHDIINASKNEVFSLVYEASKHRCNMDKIDKLFNYAQDTLVPHVSDHIRCVIFNTVESIFNIRAQLKLIEKDIRKLASTFNVYSLLMTITGCGPLTAAVIIAETGDIFRFKNADHYVSYSGSSPRNKRSGKSVEIMGKISKKGSRYLRHALYMIAEFARRHNPVLKHLFERVKNGNKKRHKLAVIAVANRIARYIYSIMKNESSFVIMHENIMRLPEETRNTFFNSISLDFPKNTRKQIYQYSDVNGEIHRFVYKNETTESIA

SEQ ID NO: 278293 - protein, 366 aa, unidentified
MQESIAWVGLDAHAKFSLLAWLDDQGNRGAHWHFATTESQLLRHLQLIRAPIKHLALEECGLGRWLAQVARPHVTDVIVCDPRENHRISRHHHKCDEEDAYGLAHLHRLGALKKVWQPVDDERAVFKCAVQAYLDAVERQTALKLQLKAHYRQWGVIPTGSVVYGCKGRDSYLAQVKETGVRAQLQLLYEMLDAALEVERKTRRLMIQQGQPFPEIGRLQTVPGVGRIGAHLFVAYIQEPARFATAQQLYRYCRLGIRDRSSDGKPLGYQRLDRTGHGVLKALSYRAWLVAMKRGSGPVYERYRQSLSRTGNELHARLNTQRTVLFILWLLWRQGWEFDAKRFLGNEPQPTAKTSCGLARRGIAGV

SEQ ID NO: 278294 - protein, 368 aa, unidentified
MSTRIIPYERSTLMNSEKYIGLDVHQATTSIAVMDSTGKVVMESILETKAATILEFFAGLRGTLSVTLEEGTWAAWLYDVLKPHVAKVVVCNPRKNALLKDGNKSDRIDARKLADLLYLNKLSPVYHGETGVRMLRELARSYLTIVKDTTRVMSRLKAVYRSWAIPCAGRDVYYRRHRDEWLGKIKEAGVRRRAERLYEQLDMLQHLRQQARRELLAESRRHSITARLRQIPSLGPIRSALAVALIQTPNQFRTKRQLWAYSGLALETRTSGDHCFVQGQLRRSKKQISIRGLNKDHNHDLKGLFKGAATTASVRPGPFQDFYQRSLAKGIQPTMARLTLARKIAAITLTLWKKGENFDAEKLKSQAA

SEQ ID NO: 278295 - protein, 342 aa, unidentified
MKITTVGIDLAKNVIQVHGVDEGGKATLRRQLKRHQVLPFFANLPPCLIGMEACGSAHYWARKLQALGHTVRLMAPQFVKPYVKTNKNDTADAEAICEAVSRPNMRFVPTKNGEQQAVLALHRARQGFVKARTAQANQIRGLLAEYGIVIPQGIGHIAKRLPDILEDGENDLPGAFRQLLQRLGEHLKELDRQVGELEVQIQAWHRESAASKKLAQIPGIGPITASALVASIGDAKNFEDGRQLAAWLGLVPRQNSSGGKQTLLGISKRGDIYLRTLLIHGARAVIRVAERKANHADSWLAHLMVRRNKNVATVALANKNARIVWALLAHNREYEPDYHSAA

SEQ ID NO: 278296 - protein, 693 aa, unidentified
MQLDYKDIIIKHYALSMSGSEIARQIGASKSGVNDFLRAFKKCEDLQYPLPTGITNYGIAIKVYGSAPGSGGRNENIELPDYEEAAKLMATRKNMTLMFLWNRYKKKCEEEDARFYQYSQYCELYNRWCEENYETAHFNAVIAQKMEVDFAGQTFSMTDPLTGEILTIVVFVAILPYSQYIYAEGMLSTKEPQWIDVNNHALDYFGGVPALVVCDNCKQAVIVNQDWIEPELNKDYADWADHYGTVILPAKVRKPKFKSSVENAVGILEKGFFHKLEERQYFSLEQTICNDLHFVTSWIYLYNVIVKQQKQGLPHTKGGHQMNYNTVYVGMDVHKESFSLCAYTIEAEKASHYQRTEADYKKILNYLEFLRTIYGDDANFICGYEAGCLGYTLYHQLTANNVKCIILAPTTMLEQRSKKRIKTDKRDAEIIAKCLAQHNYSPVHIPTAKDEETKEFLRMRDDHKLALKKVKQQILAFCLRHNYRYDGNSHWTAAHLKWLKALTPEALYKEILDEYLLTYQTLSDKLERLDKRIEELATQDEYKEAVKKLCCFIGVKTHTALSVLVEVGDFKRFASAQHFASYLGLVPGEDSSGDDQNRLGITKAGNRHVRLLLTEASQCYARGQVGFKSRELKARQSGNTPAVIAYADKANERLRRRYYKMVLNKCKKHNVAKTAIARELACFMWGMMTDNIA

SEQ ID NO: 278297 - protein, 436 aa, unidentified
MDENYANRLSWFRQFKEHINGSTRTLIVGVDIGKDNHHAFLGTAAGRTIHRRLIFKNSSEGFANLLFYIQRYLSDEQLAEVVFGVEPTSVYHKPLAEYLITSGYSVVYVTNSAIKKNRAILDGRWDKNDTKDAANVADLVSRGRCHFYDLPDMQMRDIRNLLSLRKRLKKQQHRLIARIRNNLVAQYFPELDSAWYGCQQENLAIVRFCLSPQQIAELSFDDFCRMVTRRRRGLRQYKRLRHIHEVAASSIGCQPGSSVGFEAQLLVENLQRVRQQIGEVEQHLYEVCENYKEYGLLQTIPGFGPFVSAAVLGAIGFAQRFENAKQLLRLAGLDLNASRSGKRSQSAVPVISKVGKADLRYALYQAAKVATGLTAEFKAYFKRLLKGREKEKGIKTKMRVKVSAKMLVIAWTLMKTGQPYKAGLLLIDEPVQLRGR

SEQ ID NO: 278298 - protein, 446 aa, unidentified
MAARKRKSQELTVKHSNAAGIDIGSASHYVAVRPDRGEDAVREFGCFTEDLEAMAHWLLECGVDVVAMESTGVYWIAPYEVLESHGLKVYLVNARHVKNVSGRKSDVLDCQWLQQLMTFGLLSGAFRPEGDVCALRAISRQRDALLREQARQVQRMQKALTQMNVQLTNVITDIVGKTGQDIIRAIVGGERDPEKLAKLRNYRIHASEAEIAKSLKGNWREEHVFCLGQALALFDTYQKLIAETDAKLEELIKPMRHHQRTLPPNKKKGRGKNAPSFDALNMLYQWVGVDLTRIGGIDVTTALKIAVEIGTDLSKFKSSKHFASWLGLCPGTKITGGKKLSGASKRLPNRVAQALRLAAQGLHHSQCALGAYYRRMAARCGAGKAITATAHKLARLIYAMMTKGEEYVQRSQQHYEESMRKRTLTYLKRKAKALGYRIEAIDAEAV

SEQ ID NO: 278299 - protein, 405 aa, unidentified
MGQVFVGHDWAEIHHDIYIEDADGARLGKGRVPDGIEGVARFHEMLADTGAEPGDVVVATETDRGLFVGAMVAAGYQVLAVNPLSVARYRQRHSTSGAKSDPGDAYLLAEIARLDRHNHRPVAGDSELVEAIKVLARSHQSLIWTRQRQTNQLRSTLREFYPSALAAFDSLASGDALAVLGIAPTPALGRGLSRSKIAAALRRGGRSRRVEERAVEIQQALRTPHLEAPAVVADAMGATVTALVAVIAELQAQTARLEAVLADRFDQHPDAKIIRSLPGLGMTLGARVLAEFGDDPNRYGTAKSRKNYAGTSPITRASGKHRVVLARYARNKHVANACYLWAFTSITHSPGARAFYDQHRARSDTHNQTLRALANRWVGILHGCLTNGTPYNEHTAWAHRTDLAA

SEQ ID NO: 278300 - protein, 379 aa, unidentified
MKKDNTTVTDLFVGMDTHKDSIQIVTAEAGALGEVRVYGQIAGDLAALDKVVRKLNTPKHRLRFVYEAGPCGYVIYRHLTRQGYDCAVVSPSMIPKRSGDRVKTDRRDAAGLARLHRAGELTAIYVPQEEDEAMRDLCRAREDAKHAQTRARQQLLSFLLRYDIRYPGGRRWTGEHRKWLSELKMPNPAHYVTLHEYINTIEEATSRVERLTDQIRTLVKEWRFAPVVMGLQAMRGISLIVAVTLVTEIGDFSRFSNPRQLMTYLGLVPSEHSTGAKRRLGGITKAGNTHARRALVEAAWAYRSPARLTRIIRDRQRNLPIEVCAIAWKAQLRLCARYRRLLMRGKQKPVVIIAIAREIAAFVWSIARQLSVTPIVTGK

SEQ ID NO: 278301 - protein, 405 aa, unidentified
MLFVGVDWAERHHDVCVMGPEGLVYAKRRVPDSVAGIGELHALVAEHADEDDESVIVGIEIDRGLLVGSLVEAGYEVFAINPLAVARYRDRHATSGAKSDAGDAKVLADLVRTDRHNHRPVAGDSDLVEGVKLLARAHQSAIWNRQRQVNALRSSLREYYLAALVAFGTDLGNSDALAILALAPTPELGRGLSRSKIAAALRRGGRQRNVEARAEEIQAALRGEQLEAPALIAQAHGTIVRSAVKVIDTYNGEIVELETALSEHFEQHPDAKVVRSLPGLGTVLGARVLGEFGDDRTRFSGTKSRKNYAGTSPVTKASGQSRIVLARFARNRRLADACEQWAFCALNASPGARRYYDQLRTRGKTHRQALRQVANRLVGILHICLERQHFYDEAVAWPDQSELAA

SEQ ID NO: 278302 - protein, 441 aa, unidentified
MEVTHTHCAGLDVHKKIVVACSLTQIAPGKLERNIRSFGTTTVELLALSDWLSSQKITHLAMESTGEYWKPIYNILESNLEVMVVNAQHLKNVPGRKTDVKDAEWIAELLRHGLLRGSFIPPLAQRDLRDLRSQRINLVRERARVVNRLQKVLEWANLKLGNVVTDITGVSARRMLQGIVEGQTNVRELAALAKGSLVRKQEQLQQALQGQIRDHHRFLIQQHLTHLEFLQGQIAQFNQQIEQSIEVEKNQNQSSLAEQPIKSGSVAADDASPSSPLSWSKAIALVDTIPGVARNTAELLMAEIGTDMSRFPSASHLAKWARLCPGNHESAGKRLSGKTGRSNPWLRTTLVQAANAAVRCRNSYLHAVYRRLAGRRGRKKALIAVAHRILIALYHMLTKHEPYQDLGVDYLSTQSQQQRSIQRLRSQARQLGYQVELTPLS

SEQ ID NO: 278303 - protein, 418 aa, unidentified
MHMIDQLNIVCGADIHQRFLVATILCRDGRTWSNRFLMNLNGLLDFKSWLISHECQKVAVESTGRFWIPVHMILEGSIDVIVANAYKIKHIPKKKTDLKDSEWLAELCLNDMIEPSRIFPKEDRELRNLTRAREAYVRDLSKEKNRIHNVLESCSIKLASVISDIFGKSGMYILNGLLSGTSIEVVLKGIPDKRVREKKSEELRDALMGKLEVSDIFLIRQSLQIMNQLEMCIEELDREIRSRIASRPVDIKILRSIPGIGIVSAYTILAEIGNYMDFKKPEQLAMWAGLVPSVYQSADKLITGSITKQGSKHLRWILVQVAHAIAHAKGGKLKKFFLKIKAKKGYLVAIVALARKILCLIHHLLVNQEIYEEEGCKSKRDAPIPKNKNPTILTIEDMIQCIAQAGYEVKKINSGVDG

SEQ ID NO: 278304 - protein, 355 aa, unidentified
MDNKKYIGMDVHQASISIAVGDAAGKVLMECTLETKAASVLEFIQGLRGSLWVTFEEGTSAAWLYDLLKPHVTKVVVCDPRRNALLKAGNKNDRVDARKLSDLLRAGLLTPVYHGESGVRTMRELSRSYLAASKDLTRVMNRLKAIYRSWAIPCAGQQVYSPRHRAAWLEKLREAGVRRRAEQTYQQLDFLMLIRKETRKELLAESRKHPARELLEQIPRLGPIRVALLIALLQTPHRFRTKRQLWNYCGLGLRTRSSGEYRYKEGQLQHVRKPPALRGLNVNHNHDLKHLFKSAATQAGTKDDPLREFYQNLLAGGMEPPMARLTLARKIAAIALKIWKKGERFDPAKLNQQAA

SEQ ID NO: 278305 - protein, 413 aa, unidentified
MTGPLTNLDGMSDHRRCVGGCGPGPRSPMFVGYRVGSGPARSIRQWWEAPVFTERTSIGLDVHARSVVAAAIDGVTGEVSQTRLTPSFEHIQEWIKQLPGPVAVAYEAGPTGFGLYRALIGAGIRCEVVAPSKLHKPAGDRVKTDARDALHLARLLRLDEVTSVFIPSVNQEACRDLVRAREDCRSDLMRARHRLSKLLLRHGIVYHGGGAWTDAHDRWLRAQAAPQLSTLATRMAFDSDYEHVLMLQARRRSLDSAIEDIAADSEFTPVVRRVSCLRGVGTLTAFALAVEIGDWNRFTGNTIGSFVGLVPSESSSGSTRAQGPITKTGNTHVRRLLVEAAWHHRSKYQVRAVMRARWELAPAAARARGHEGNHRLHNRWLGFLARRKRSTVANVAIARELAGWCWSLAVMDD

SEQ ID NO: 278306 - protein, 366 aa, unidentified
MLHKLNSAATLIQRTTTEAPRDHMYYIGLDVHKRTISYCVKDAAGHVHQEGKIGSTRCELDAWIKTLPQPRMMAMEATIFTGWIYDHLLPHAEKIKVAHPLMLRAIAAAKKKNDKIDAAKIADCLRCDFLPECHMASTEIRDRRRTLRYRSLLVKQMVQMKNRVSGLLLETGVSYNKSRLHKVGYFADLMSANEEVNESIRPLLKLSREHIVRAQRLDYALVSSLERDPLLSERLTRLRTVPGVGPITALTWALEIGDFTRFRSIKQAISYCGLCGDERSSADKVMRMPLSKQRNKHIQRVLIEAAKLAPRECHELAMVRERELQKGNPNRATLAVARKMVSYMLAVERRKQNFVPAEKFNCTAAA

SEQ ID NO: 278307 - protein, 351 aa, unidentified
MIHVGLDMHKKFSEVAIMKSDGKLLDRRRLIHSDKRGIHTYFSQLPTPVTVTMESTRNWYWLYELLEEYADVKLANPRKVRLIAEAKVKTDKIDARTLAHLERTGFLPESYIPPREIRDKRELLRYRASLVSIRTGVKNRAHALMDKLGVIHPFSDLFRKASREFLATLELRPIYRRALDGYLQLIEWLEELEREVTSEITKMIKNNADSKRLMTIPGVGVITANLLLCEIGDIDRFPSAKKLCSYGSLTPGTKQSANHIWNGPVGRKGNLYIKCAMIEAAQHATHMDPAMGAFYEKLRVSKGNAKARVAVARKLLTAVYYILKRKKEYQPNSLCTIHLGKPVALPGHRRW

SEQ ID NO: 278308 - protein, 445 aa, unidentified
MSNGSGLSRGDRNRNARLARLRELVPLGNAIVGIDLADDKQAAVVTDHDSRVIARRRVSARAWELGGLLDWAVVAAAGAGFASVTVACEPTGHRWRVLDQLAVERGLALVCVQPLLVYRAREGEDLTWDKSDPKDAVIIARLAAGLRCYEPERADAVWARLRHLGARRSALIADATAEVNQVRDLLECAWPAVLAAAGVPFRSATWRAALAVTLDRCAGDLARVRRLGPARFESAVRRELPRWGAQRPCLRIIRAVFAALADPAGVRVHRPGALERARLVLGDWRETRARLADVEARMVAVLDDLGLTGLVTTIAGLTPAGAAAILAETGDPARFTSPRALVKHAGLCPRDNASGGYQGKTSISGRGRPALRVAAWRAVWAALPNNPVMAARFAYLTNRDHNRLARQQARTACAAALLRWIHVVITRRIAWDPAIAGRTPPCRAA

SEQ ID NO: 278309 - protein, 359 aa, unidentified
MEYGAIDLHKKESQVRIVTEGGEVVDRRIATTRDRFTVVFEGRRPMRILLEASTESEWVAQHLETLGHEVIVADPTFAPMYSERSRRVKTDRRDVAALADACHRGCYRAAHRRSASQRTVQAQLNVRRALTDSRTRAIALTRAITRGAGLRIRSGSTASFLVRVAALDLPSSIAETLAPLQRVIGVLNEELVAADDRVATIAVQNPVVARLTTVPGIGPVTATAYVAALDDAARFGRAAQVASYLGLVPREYSSGEQQRRGRMLRSAHPYVQSLLVQAAWSVWRSQDPRTAGLRRWAQGIAHRRGRSIAVVALARRLARILFAMWRDGVPYDAVRTEPTRAHGGAATTKTAAAPSPGPS

SEQ ID NO: 278310 - protein, 354 aa, unidentified
MNTTQVFEKRKIAVAIGIDLAKDHCDVVAYNADNKICFTKSNWAYPQLMEWLANCNPAVVLMESCKGSTVRARKIADLGHDSRLVKGADVKALRNVCQKNDLRDADYIARLFYVPGTKYVFVKNQRQQSLQFLQNEYKSLQELRIQVGNQIHAGLEEFGCPGQKSKKFIQSRMMAHLEKNAELIPDGVMASFLRRRDIWLNLFEQEEEAQKRIEEIAKTDDDAKRIKTVPGVGAQTAVGMLVHIGGDIGRFKNSGQFAASIGLVPKQNSTGGNTTLNGITKCGPKKLRANLVQCGQVILMHADKLKGNFGDWVRKLRDSGKKHGVIVCAIAAKIAKIIYRLMKDKVDYTPVPSR

SEQ ID NO: 278311 - protein, 372 aa, unidentified
MTSEHAAFIGLDTSKLKISVAIAEGERNGEVRFLGDISSEPTSVAALVKKLAKRGVKLHFCYEAGPTGYGLYRQIVELGHECSVVAPSLVPKRAGDRVKTNRRDAISLARLHRAGELTPVWVPDEAHEAIRDLVRARDAAFEAQKQARQQLNSFLLRHGRYYTGRKAWTRAHGRWLASQAFDHPAHQILLAEYCQAVEDAGVRLDRLNKLIGETSASWSMAPVVAAYQAMRGVAFMTAVTLVVEIGDVRRFDSPRQLMAYLGLVPTESSTGERVRRGGITKAGNARARRALIEGAWTYRYPARISPTINARLAGLPKSVCAIAWKGQVRLCTRYRRLIGAGKAKTVAVTAIAREMAAFIWAIGQEVAPLGKP

SEQ ID NO: 278312 - protein, 423 aa, unidentified
MEVIHERVAGLDVHKDSVVACVRIMSGGKAKRECRTFGTTTAELEALRDWITSWECTLVAMEATGVYWLPIWKILLGGAFEMNIANARHIKAVPGRKTDMNDAMWIADLAAYGLIRASFVPDEEFHELRTLTRTRKQLVRDQTSHVQRIQKTLTEANIRLDSVISDIMGVNGRRMIEAIIEGVRDPGKLAALGDRRLKATRKELHDALHGRLTEHHRFLLKLHLDQHDALEKTIRVIDAEVERRIARLDKQAKPAETPLSRLIELLVSIPGVSYLSAITIISEIGSNMSRFPTAGHLIAWAGLCPGQNESAGKRKRSRLRKGAPWLKTMLVQCAWAAKRQKNSYYRAQFYRLQARRGPQKAICAVAASILTAIYHILKDGVPHQDLGIDYFDKRKPEAKVKRLVAQIAKLGFEATLQPIAKAA

SEQ ID NO: 278313 - protein, 343 aa, unidentified
MEHYAGIDVSLERSSVCVVDATGRIIREAKVASEPEALVDFFRRLGLPLTRVGLEAGPLSQWLHAGLAEAGLEAVLLETRHVKAALSAMVVETDRKDARGIAQLLRMGWYRPVHRKSPPAQEVRALLVGRKLLQAKLRDVELSIRGILRGFGLKVGEVSKGRFAARIKELIAGHEMLEAVVGAMLQARDSLQAEFMRLHRRMLAIVRGDAVCRRLMTAPGVGALVAVTFKTAVDDPGRFRTAKAVGAHFGLTPKRYQSGETDVTGGISKAGDAMVRTALYEAANVMLTRSGRFSALKRWGLEVAKRRGARRAKVALARKLATVLHRLWVDGSEFRFGREAAAA

SEQ ID NO: 278314 - protein, 420 aa, unidentified
METIETAYKVAGIDVHKSMLAVVIADVAREGEFQFERRKFGATESELRQLAMWLAERRVREAVMESTAQYWKPVWQQLEGQCELYLAQAHSNRAPRGRKRDFADAERLLRRHVAGELILSFVPGPEQRLWRTMTRSKLQLTRDRVRIHNQLESLLEDARIKLSSCVSDLLGLSSRRMLKALAEGETSAARLAAMADPKLRATPERLQDALHAAATLSVLHRQILGLFLARLELIEDQMEILDKSIGEALHGYHDAVLRLAEVPGYGIDSAQQVIAEIGPAAATFPSAAQLSSWVGTCPGREESAEVSRNNRSPKGNRMMRRVLNQVANAAVKTKGSVFQAVYRRLLTRLGHNKAIWAIAHRLCRLTWKILHQGVRYIEQGNRPNPKAVKTRMNKLIRELRSLGYQVQVAPLATPKNVAIE

SEQ ID NO: 278315 - protein, 357 aa, unidentified
MVVIGVDPHKRQHTAAVVEQPTQRQLGKLTIEATLADYRRLLAWARQWPERTWAVENARGLGRHLAQWLLVRGERVQDVPATATTRVRELSRGGRRKNDVIDAAAAASVAALHGDATSVIAEEDTTAVLALLDERRVNLAAQRTRLVNQLHALLRDLLPGGAPTKLTADQAAALLRPIRPTGTVERTRKDLAREMITELRGVDARLKHSEQRIREVVASSGSRLCEVDGVGPVLAARVLGRTGTASRFPSGSHYASYTGTAPIEVASAEHARHRLSRSGDRQLNSALHLVAVTQVRMSNAEGHAYFGRKIDEGKTRSEALRCLKRRIAAHLWGIMLADERRARAAAAPPPDVGMSCA

SEQ ID NO: 278316 - protein, 324 aa, unidentified
MFYLGIDVAKAKIDCCLILENSANKKKTKTFSNTPKGFEQLQIWLNQHAATSTQTIILMEATSIYHELLAKYLFDEGYQVSITNPARARYFAQCMSKLNKTDKVDSEVLARFAMTANIHFWQPLPKHIQLLNALLDRRAVLCEDLQREKNRLEKAESTFTMEPVLQSLHKSIEQLNKHIQSIDQQIDDHIDQNPDLKNDKELLSSIPAIADRTSLLMLSFLRSHTFERASQAAAFVGLVPTQKQSGSSIHGRSHLSKAGSSKIRAGLYMAAIVATRHNPHIKGMNERLLANGKTKMMAIGAAMRKLVHLCYGVLKHQQPYQADY

SEQ ID NO: 278317 - protein, 345 aa, unidentified
MQDRMGRYIGVDLHKRSFAVCYRSKAGEIEEKEYSMTEAGIEEFKKRIKKTDEVGVEATRNTGYFIGEIENSVGSIKVINPTQFKIIANSVKKTDKISAKTIAKYLSKGLIPEVRMRSKEQMETLGLIGTRDKLVKLRTSLKNKIHNILNANGIITKKEMFSSDKGLDKILEIDLDEGYLFELRLIVEQLHHLNETIKTIDKELAKRGKKMKGFKNITSMTGISNTSGTILLSVIGEKNDFERDKKLSAFLWLVPMVYASGDTVRYGMITKMGNKIGRTTVVQSTLVAIKYNEYLRNFYLRLKAKKGSGKAIIATARKYLTIIYKTLRYNLVFEDINHFKLAESS

SEQ ID NO: 278318 - protein, 354 aa, unidentified
MKRTTKYVAFDVHQATTVASVREESGRVIARSVLPTDSGALTEFVRGMRGARHVTFEEGTQAQWLYELLAPLVDRVVVCDRRGALRQGNKGDQVDADQLSELLRRGALRAVYHGSADRATLKELTRTYRNLVEDATRVMLRLKALFRARGIPTAGTAVYDARHRAHWLARLLEAGARFRAEALYAELDVLRKLRPKAKAAMVMEAQRDPAWPVLRTIPFLGSVRVALLLATMQTPWRFRTKRHLWAYAGLAVVTRSSADYTIVAGQAVRRRRSPMTRGLNRNHNRVLKDVFKGAATAATARPGPLQAFYRSVVARGTREELARLTLTRKLAALTLRLWKKGERYDPTKLTTPAR

SEQ ID NO: 278319 - protein, 338 aa, unidentified
MNIVFLGIDLAKNVFQICGLNQAGKPVYTKRTGRKELLQMLANIPACLIGIEASTGAFYWQREFEKLGHNVKVISPQYVKPFVRGQKNDGNDAQAIAVALMQPTMHFVPPKSPEQQDIQALHRARQRIVNHRTATVCQIRGLLLDRGITIGAAVSRVRRAVPLILEDAENGLSVRMRSTIAELYDLFNDLERRIHFFDKEIETVFRQSEACQRIAKVKGIGPKTATAVVAAIGKGTEFKNGRHFAAWLGLVPRQHSSGDRQVLMNMTKKGDKHLRTLFIHGARAVVRVAANNNDSHMNQWVNQLKERRGFNKTTVAVANKNARIIWSMLRNETEYQVV

SEQ ID NO: 278320 - protein, 341 aa, unidentified
MQITTIGLDIAKNVFQIHGIDASEKVIVRKQLRRGQVTAFFEALAPCLVGMEACATSHHWARELTKLGHEVRLMPAKDVKAYVKRNKNDAADAEAICEAVRRPTMRFVRIKSAEQQGQLMLHRARDLLMRQRTQVINALRAHLAEFGITAAQGREGIKELLAMVAHEEGSRLPSDAHASLTVLATQLQAVQTMIGSLEKRIVAQHRSNEASKRLETIPGIGVIGATTIAAVVPDPRVFRSGRDFAAWIGIVPRQDSTGGKQKLGPISKQGDQYLRRILIVGAHAVLRRARQQPETYPWLTQLLARRPFKVVAVALANKMARIAWALLAKGGTYRAPQLVAA

SEQ ID NO: 278321 - protein, 475 aa, unidentified
MADLGGRARKGWEKMQDQGQVNTGSKNRRQVEGLPVIRPNVAGIDLGSERHWVCARTKDGGGREIADFGATTPELIRMGRWLKDRNVESVAMESTGIYWIAPHEVLEAEGFEILLVDTRQLARVPGRDKKTDRTDCEWIQRLHSCGLLKGSFRPREDVCMLRTLVRDKGNLVAESGDWVRRMQKSLDQMNVRVHRAVSDVDGVTGMAILRAIAKGERDPRQLAKLRDRRCRRTEEEIAEQLSGHWREDHLFSLRQSLQMYDATQQRIADYDREIQRKLAEMARDENRGQPAPPVKNPQKAKAIKKRGEEQMREALYRMSGVDLTSIDAIGVQTVQVVLSEYGPDLSRFPTEKEFVSHATLAPRRPMSGGKPLRKKRRHTASTRVAAALRMAALSLRNSATALGAYYRKIARRIGGDIAVFATARKLATLIYRLLRWGQPYVDEGADSFEMRYRENQIKSLQVKAKQLGYELAQKA

SEQ ID NO: 278322 - protein, 422 aa, unidentified
MLEETHDNQEIIGRVAALDIGKAELVCCIRVPSSSKSGKRLQEVATYQTMTRSLLALADRLGELGVTRVVMEATSDYWKAPFYLLEAEGFEVWLVNAKDVKHLPGRPKTDKLDAVWLCKVAERQMLRPSFVPPPEIRRLRDLTRYRVDLVVARTAEKQRVEKLLEDAQIKLSVVASDIFGVSGRDMMAALIAGQRDPKALAQLARRRMRAKLGLLEEAFVGHFTDHHAFLLAKMLGRVDQLSADIAELEAKIEAEIAPFAAAADQLDEITGVGHTAAQVIIAEIGTDMGRFPTPGHLASWAKFAPGVNQSAGKTKGKATTGHGNPYLARVLGEAAVVAGRTDTFLGERYRRIARRRGAKRAIVAVGRSILVIVWHLLADPTVRFHDLGAGFYHTRVNPERAKRNHVRQLEALGYKVTLQPAA

SEQ ID NO: 278323 - protein, 355 aa, unidentified
MNSVRYIGLDVHRDTISAAVLSESGRLVQQSVLMTRAAAILDFIGGVRGAVQVTFEEGTHSAWLYDLLSRRVDKLVVCNPRKNALLKSGNKGDAIDARKLAELLRAGLLSAVYHGESSALEVQHLARSYLMLTEDTTRVMGRLKAVFRSQAIGSTGKKLYGSKHRGEYLAALGACALRRRAECLYQQLDALQQLRRQARHDLLVECRKHAAAKWLQTVPFLGPLRAAVLIGRVQTPHRFRTKRQFWAYCGLALETRDSAEYRVVDGQVERRKRPALIRGLNWNHNHELKNVFKAAATSASIGQGVFREFYLGLLQKGMQPEMARLTLARKIAAIALKIWKKGESFDAEHLKSQAA

SEQ ID NO: 278324 - protein, 343 aa, unidentified
MKLHVVGIDLGKTVFHLVGLDSTGKVVIRKRCSRAQLLVFTSNLQVQLIGMEACSGAHFLGRALREQGHEVRLMPAQYVKPYVQTNKSDYLDAEAIAEAVQRPRMRFVPIKTEEQLDLQALHRVRERWVMRRTAVVNQIRSLLLERGLTLPKGRSHLDEQLPRILEDAELNLSDSFRVLLAQLKLELEQLAVRIEEMDRVIQKTARENEACQRLTEIPGVGPVTATALIAAVGNGSAFGKGRKLSAWMGIVPGEHSTGGKQKLLGISKRGNKYLRRLFVQGARSVLQQRHKQAPGLSEWLAQLLARMHQNVVVVALANKLVRMSWAVLCKNQRYRAPVFAMAT

SEQ ID NO: 278325 - protein, 444 aa, unidentified
MLSIIYKHVAGLDVHKKTVVATRMRVTEEDRAEWETTTFGTTTPDLLKLHDGLLAWSISHVAMESTGDFWKPVYNVLEDTFELWVVNAQHVHHVPGRKTDAKDSAWWAELMLHGLLKASFIPPRPQRALRETTRYRTTVIQERTRVVNRVQKLLEGANIKLSSVATDIMGVSARAMLAEIVAGQTDAALMADLARGRMRHKIPALPQALTGFVQPHHRFLLAQQLAHIDFLDEQIEALSAEIVRQLEEMSELPSSAGSDAGAEASEPSSESSEEEPLTWSEAVVLLDTIPGVGERAAEEILAEIGLDMSRFPSDKHLASWSGRAPGNNESGGQRFSGHRPRGHKPLSSILTEVAQAAARTKDTFLSARYHRLAARRGKKRAIGAISHSIIVSIWHILTYRQPYRELGSDYFDQRKKEIKVSYLVRRLEKLTGASVSIQLQPVAA

SEQ ID NO: 278326 - protein, 347 aa, unidentified
MRFYKQNHRSYCGIDLHARTMYVCIINKEGETLVHKNLPTEPGAFLKLIEPYREDIVVGVECVFLWYWLADLCAEEGIPFILGHALYMKSIHGSKAKNDKIDSDKIARLIRSGMFPIAYVYPRKMRGDRDLLRRRCYFVNRRGELLAHIQNTNSQYNLPAIGRRLDRKKNREGVGEHFPIPAVRKSVEADLKLLDYYDMVIKDLEKYIDRTVKVHDAHSYYLLRSVDGIGPILATTILYEIEDIKRFPRVQNFSSYARLVKCARGSGGKIYGYGGGKIGNVHLKWAFSEVAVLFLRSNPRGQQYLARLMKKHGKGKALSIIAARLGRAVYFMLQRGEPFNREKFYAS

SEQ ID NO: 278327 - protein, 366 aa, unidentified
MIVIGADTHKATHALVAVDAGTGRIRGDREIKAEEPGHLAAVRWARELDDDRAWAIEDCRHVSRRFEQALLAAGERVVRVPPHRMGASRKGEREPGKSDEIDALAVARAVVKDGVECFPVAYLNDQAMEIRLLFDHRADLVAERTRIVNRLRWHLLELSPELERSCKRGSLSKSRVLDRVERGLRKLPAGARVRVAREQVRELRRLSREIDALHCELGALVRAHRPQLLAELGCGALTAAILIGRTAGNERFRSEASFALQSGTAPIPCSSGQRIQHRLNRGGDRHLNHALHIIAITRAQRDPATKEYLDRKEAEGKTPKGALRALKRHLARHFHRLLAEPAADQQRAAVDPNSTGVAPSPMVCIS

SEQ ID NO: 278328 - protein, 342 aa, unidentified
MLETMIGVDLAKSVFQVHGASMTGVVRFRKRLTRSQFRRFLTTEPRAVFVMEACGSAHYWAREMVKIGHEVKLIAPQYVRPFVKRQKNDAADAEAIVVAAQRPEMTFVGTKDEDQQASAVLFRSRERLIQQRTVAVNALRSILYEFGHVVPSGIRNIRRIEEILAAENSDLPSLVRSECLDIIAQIREQTARIEAKTKTAKELASKDDVARRLQTIPGVGPLTALAVETFAPEMSAFKGGRNFAAWLGLVPRQFSSGGREKLGRISKAGQADIRRLLIVGAMSRLNWMGRKTVPEGSWLARMIAKKPRMLVAIALANKMARTVWAMLTKQEDYREPATGLAT

SEQ ID NO: 278329 - protein, 395 aa, unidentified
MSAEGEAIRSNDYRKDTTVKAPSTRPAAVLGLDVGKSSHWACLIDRDGEVLASAPVRNREAELDALFASAPAGTLVVVDQFRNIGSLAVRRARAAGLGVAHLPGLAASRAAGLFAGEAKTDERDAAVIARTALGVPDSLSGVPGRGEALEAARALSSQRDHVVACATRDKNRLRAVLLESCPALEAAVDLSDRRWLELLAGFGGAWGIARSGAEGPRAEAAGEAAAASTAPPPALIEAENRQVRFLAARISEALDEAGALEAETAALLEGDETYACLLTVPGIGPRTAAQLAVSVDIGRFPDHDHLASYCGIAPRVRSSGTSVRSVRASRRGDARLKSLLIFSCNSLVRSSGRYGEYYRACRARGMGHGRALKAVARKRLRAIYAVMRDRVPYRE

SEQ ID NO: 278330 - protein, 373 aa, unidentified
MPKYSTAFGMDVHLRSTTVCALDADTGEAVTRRFPGNPWGEIAGWMDGFPGPSLAAYESGYLGFAPQRELAGLGVECAVAAVSKIPRSAADSASKNDRNDAARMAKAILAHDISPVWVPSPEVEGIRDLAGAHDGATARLATAKQRLLAFLARRGFVYGGTTPAGNPRKYWTYDFLRWLDKVRPEDDGGVRALAALRNEVEAAAEARADLLSEYGAAVDASPIAAEAAALQSIKGCAFALAAAFSAEVGDFTRFRSGRQVTAYFGLAPSQRSSGDSVRLGGISGAGNALVRKLAVEGSWCYAAARHQPKLMPRDTGVPLEIRMHGRKGSERLLRRREEMLARGMPAAKANAATAAELVRWLWALGMMCREGAE

SEQ ID NO: 278331 - protein, 343 aa, unidentified
MEKIGIDVHKVASQVCIQMEDGTVLERRIATTREAFAKLLGGRARARILLEASTESEWVAQCLEALGHEVLVGDPNFAPMYATRSRKIKTDRRDARALCEACALGAYRAAHRSSDTARERRAQVAVRAALVSSRTTYISLARALVRQEGYRVGSGSARTFATRVQAQALPAFVQARLAPLLTAIAALTAQLAAIDQALAALVRADAVAPRLCTTPGIGPITALTYGAVVDEVARFGSAKEVRAYLGLVPREHSSGEHCHRGRITKAGHRRLRALLVEAAWSMLRSARAESAALRAWALRIAARRGKRIAAVALARKLAGILYAMWRDGSDFGHPVSRRPPVAA

SEQ ID NO: 278332 - protein, 366 aa, unidentified
MRKISTVALDVIENFKGHKLTIGLDLGDRFSHYCILNESGDVIGEHNLPTTPKGIDEVFRRIPRSRVALETGTHSPWVSRQLARLGHEVIVAHARNVRLIGDSSRKDDQVDARTLARLARIDPGLLGPVQHRSAKAQIHLTVLRARAGLVSARTALVNTARGLTKSYGERLQKCGTQKMNREMAQGLSQELRDALDPLLGEIESLNERIAEYDGRIEQIATEVYPQVARLKQVKGVGTLIALTYVLTLDDPHRFRRSRDAGCFVGLRPGRRNSGMSQPQLHISKEGDVYLRTMLVQGAHYILGPFGQDSDLRRWGLRLAERGGKNAKKRAVVAVARKLAVLLHKLWVSGEVYEPLRNSHKVVAAVA

SEQ ID NO: 278333 - protein, 413 aa, unidentified
MNPHQTLTHYAGFDWAKDHHDIIVMDLQGRIVADFRIDHTPAGWRIWKEKIANWPQLGVAIETNFGAAVEQLLESGVSLYPVNPMNAKRYRERQCSSGNKTDRHDAWALADALRMDGHGWRPLGAADPILAELRILCRDEVALIEERTALINQLQQALQEYYPTALEAFDDWINPGAWAFVEAFPDARALEKAGKRKWEKFLHSHRLYRTQTCEKRLAAFENAGEWKSNAPLVAAKSLLAVARCRQLRVLQGQLDVYRQRIEALFESHPDSNLFGSLPGAGPKLGPRLLSEIGSDRALYEDPQGLQCMAGTAPVSYQSGQVHKVHIRRGCNKNLRHSMYLFADKSRAQSAWASKYYDALRERGKSHAQALRCLGQRWLKIIWKMWQTHTPYDPEVHMKNQLAHGSWVLQLSPQ

SEQ ID NO: 278334 - protein, 408 aa, unidentified
MKTLHRRCAGLDVHSDSVVACARVTVRTKVTHEVRRFSTATRDLLEMADWLAAQGITHVAMEATGVYWKPIWHILEGRFELILANAAHIRNVPGRKSDVNDAVWISDLLAHGLIRASFVPPAQIQDVRDLTRTRTQLAREIAQHIQRIQKTLEDANIKLTSVISDIVGMSGRRILKAMIAGETNAAKLAELGSTRLKCPRAELTAALDGRVTAHHRFLIAHHLSLIEDMERHIAAFDARIEELLVPLRDALAQLITIPGVSRVSAQVILAEIGADMTPFSTSGHLLSWAGLVPRLDESAGKRRSTRIRKGAPWLKPVLVQCAWGAARTKGTYYQAQFLRLKARRGPKKAAIAVAASLLTAVYHMLKNGTFHQDLGADFLVKRDKARIATKLANRIKDLGYDVSFTPAA

SEQ ID NO: 278335 - protein, 344 aa, unidentified
MEYYVGLDVSLRSCALCIVDSKGTVLFERELPCEVSDITECLVEFPHPIERVGFEAGSMSQHLFFGLTAEGFDVVCMEARQVSAALSAMRNKTDKTDARGIAQILRTGWFSPVHMKSREAHGLRALLSTRKALLKKTIDLANEVRGLLKIFGVRLPKTVKHGSFDSVVRPMIEIDDVLAHALVPLLDARVVLYQHYLELDRRVKGAASHDDVCMKLMTIPGVGPIAALSFKSAVDDPTRFKSSRTVGAYFGLTPRRYQSGEHDNPGRISKAGDRDVRAVLYAAANALLMRTMASSQIKSWGMRLMRTKGCRRAVVAVARKLAILMHRMWIDGSEFRQDQVGGMA

SEQ ID NO: 278336 - protein, 376 aa, unidentified
MIYYIGIDISKYKHDFCIISNTGEIIVENSSFENNKKGFQELLEKLKPYNKTNVRIAFEATGHYSMNLELYLIDKEYSFMKINPLLIKEFLKTRSLRRTKTDKADAFNIAQYLMSISYKPNSSLLYHTYSLKSLCRTRVLLTNELDKSFPELKPFFNNMISTTLLFILDKYKNASHIALMKDYDSIRCISYGKFTYAKFTKLKELAKNTVGYHDNNTDLLISTYVSLYNYFNDKIIPIDKQISTIVKDLNPSILSIPGIGEITAASIIAEYGDISCFSSSAKMLAFAGLEPSINKSGTLESNGKMVKHGSGHLRYVLMNASLTLLKLNPTFYDYYYKKRSEGKCHRVALSHVCKKLVRLIYKLETKHVEYNPSLLK

SEQ ID NO: 278337 - protein, 345 aa, unidentified
MEHYVALDVSLREISVCVMDGRGAVLFEGKTAAEPASLAALIRTKAPHVVRVGLETGATSPWLFHALTAAGLPAVCMDARQAHAVLSMRPTKSDRSDARGLADMLRVGWFREVHAKSVTSHERRTLLGARHQLVTMRSELDAQIRGMLKTFGLVLGAGNKDTLIQRAEELAEGHPVMSGLVAKLAEVRRHVASQVAAIDRDIRRLVRTEPTLKRFLTVPGVGPITALAFLSAIDDPNRFKHARDVGPYLGLTPTRYQSGETDRQGRISKRGDTFTRTCLYEAAHVLLTKVQRFSPLKAWGMRLVKRIGGRKARIAVARKLAVVLHCIWTDGTEFWWTREEASMAA

SEQ ID NO: 278338 - protein, 441 aa, unidentified
MSHAILAVGVDPAKRLHRAVAVLLPDEVVFDAELPNALDAVADLDDRLCELARRHGAELVYGLEDHRHYGRLFCQVLTQRGRDVRVVNPLWANRQRAFYGQDKDDAIDGRSIAGVVLRRHHDLPLASDFGEVAQAVREAERSIQDLGRARTRLINRLHLQLNDTYTSVYETFFGKLRSPLALRFFRRFPLPQDLPPRHDEVALASTLLELAGGKVGPHKGEKRLVVMRGKAKTILETGALQRGLPRTPALELKAELIRQLCDEGLAIHDRVRRLERMLRKQLLPTTGQTITTVPGISTILGATIVGETGSVERFRSPAAFAVYNGTAPARHSTGGRERHRARRDCNHRLKRAFYLAARAAVLHDPLAKAYYERCKSRGLDYEEGLKRVARRMSDLVYALLKSGERYNRSAIERAIEKRREQMAHAAVDHAKKPCSLPTNSV

SEQ ID NO: 278339 - protein, 341 aa, unidentified
MHQITTIGLDTSKNVFHVVGINQAGKTVIRKQLRRQQVLQFFAQLPVSLIGIETCGGSHYWARELTKLGHQVRLVPARDVKALVRGQKNDYNDAFAIAEAVGRPQQRFTPIKQEGDHDAQILHRLRRGYVNERTAQSNRMRGLLMERGVFIAKGLAPLRRRIPELLEDADNSLSALVRDILYRALQHLYELDGEIEHCDQQLKELVRNDETCQRLMTVPGFGPMVASSWRARMGECRQFRRGRDAAAACGLVPQQHTTGGRPKLLGITKRGDKELRTLLVHGARSVVQHAHKKDDALSLWVCQLVARCGYNKATVALANKMARIAWAITVHKTDYVPRMAA

SEQ ID NO: 278340 - protein, 344 aa, unidentified
MDIVIVGIDLGKNSCSLAGLDASGRVVLRRRMRRSAVGSFVTSLRRCVVAMEACCGAHHLGRVFAAQGHEVRLMSPEYVRPYVKAQKNDDLDAEAIAEAASRPTMRFVEVKSQAQSDIQALHRARERLVSERTALINHLRALLLERGIVAPQGRRKLEEQLSTFADEDGIEALSPRIRLLIEDLRAEWRALDERIAVFDKEFVQMARNEEPVRRLVTIPGIGTINATALVAAVGNARAFRRGRDMAAWLGLTPRQMTTGGKPRLLGISKRGNRYLRKNVIHGARAVLPYLVEQKTPLSRWARELLARAHKNVVVVALANKLARIAWVVLARGGVYNTGYEAVAA

SEQ ID NO: 278341 - protein, 412 aa, unidentified
MVKKECFIYVGIDLHKETHTAVILNCWNEKLGEITFDNKPSEFSKLTRKVNKYCNDGMEVVYGLENAYGYGRALAVWLIEKGYQVKDVNPALSYAQRKSVAMYQKSDSYDAGAVALALIVHLNKLPDAVLDDAYWTLKQLVNRRDNIKTHQTRLKNQLHEQLCVSYPSYKKFFRDISRQTALHFWETYPSADYLKGKTPEDLAKELRAISHNNCSINKAKIILDSVRADGSIKRDYQEARDALTRSIVGDLKHYNNQLEDVEKAIENLYPVFGCTLMTMPGIDITTATNILAEIGDINRFSNADKLAKFAGVAPVKFSSAGKGEDRASKQGNRRLQSIFYFLAIQMIQVTKNGTPRNAVFREYFIRRTQNGKNKQQVLICIARRLVNIIYGMLKTKTEYREPMLDESFLKNQ

SEQ ID NO: 278342 - protein, 439 aa, unidentified
MMKSRSAEGGSYVSEEKLLELRVSVDVGYRRHSVAMGLSSGEILEEFEIEHRPEGFQEFFSRIEKHQKKKSCGVAVAMEGYNGYARPLDSLVRQRGYRLYNLNNLKFARFKEIFPGAAKSDRIDARKGLELFQLSDHLPLAKEVLQEVSGTPKENEVLKRLTRRRRRLVNERVRVVNNLQTDLQAVCPGLLEITGEASNQWFLNFLLSADTLPQLARLRRSTLLKIVSVGVKSASIIEGWQNRAHFSQEVEWVGEMIQEDAKRCLELDEKIKRLETKIAEVAKDSKIAKLLRSIPGYGATCTSELAGEIGTVERFGSEGSFSLYVGMSTLDNSSGKYQGSKAPKHVNTRAKAAMMIAVDRHRKYVPESQRYYEKKRGEGKKHNQAIRALGRHLSRIIYKMLKEERDYEIRSEKRNTKTKVSPRSFVKTQIRRPKILAKS

SEQ ID NO: 278343 - protein, 337 aa, unidentified
MATSKPMRMVGVDVSATWVEVSRGAADEAVATRQCANTAGGHRELARWLTQGGRRARVVLEATGLYSLDVALTLERTPGIEVMVLNPRVSKEFAGAWGQRARTDATAAEGLREFAARMPFTPWTPPSAAALALRALMRRVVALIEMRVQEQNRLHAMSVTGALPAVLRADIRQHIAALGRQIARLEREARALVEPAPALRAGYRHLRSVKGIGQRSALLILSEVAVLPGSLTVRQWVAQVGLDPQPIRSGTSVHPPVRISKRGNVYLRRALFMPALVAVRCNPAVQRFGLELAAKGKAPLQVLVAVMRKLLHAIYGMLKTDTDFDGEKFRRSASTAT

SEQ ID NO: 278344 - protein, 484 aa, unidentified
MAARKNTKKNTKKDAASGSLTASPRPGNDGAEVAEEHVEVVTYAAAIDVAKGSGMVCARVPGSRPDRRRQTVWQVDATYASVVALMDHLRCQGIQRLVLESTSDYWRIWYYLAEAAGLEVWLVNARDVKHLPGRGKSDREDCVWLCKLNERGMLRRSFVPPQATRDLRSLTRTRSRLAQDQVRHQNRAEKILEDALLKISVVISDLFGASGRRFLDALVAGERSPAALAALGDRRLRATPAELAAALTGRFREVHAFEIATHLRLIDTINDEIARLDARIEQQLTSIPGVAPACTGCGLIGGGHAPGCASDAAPVLGLVARLDEITGVGVRNAQVLIAELGTDMSVFPTPGHAAAWARLTSRTLQSGTTTKNGRTGKGNPYLRAALGQCVMATARTDTRLGEQYRRIARRRGKQKAIIAVSRVICEIACILIADPAARFAELGAGYYGSGNPQRQTRSRIRELERLNPGMKVTLTPIEPATAAA

SEQ ID NO: 278345 - protein, 412 aa, unidentified
MKDLLEISCGLDVHKEKIVACILTGPLGKPTRSEIREFSTLIPDMIALRNWIVSKNCHHVAMESTGIYWMPIYEILEDAFYGDITLLVVNARHMKNVPGKKTDMRDSEWISTLLRAGLLNGSFIPEKRIREFRDLNRYRKSVIRDITSQKNRIEKFLQSSGFRLSSFISDIFGASGRNIILHLIEHGQIDKTALDSCLKTKTRNRIDEILMSVNGTLSEHQKAFLRILMTHYDSLKKHLAEIETSLEEDMAPFTLQVEQLNSIYGISTTASCAIIAEIGIDMKPFKTAEHICSWAGLCPGNNESAGKRKSTSVTKGNPYIKSMLCEIAWVIAGKRNTYLSAWYWRIKQKKGAKKAIVALARKLLVIIYTMLKQGTVFDESCFETRRKHCEQKQLSRYIRELEKHGYHVEAQS

SEQ ID NO: 278346 - protein, 310 aa, unidentified
MEQRFVGIDVSKECLDVHIRPSGKAFTVARDGEGLAALVERLQAVKPALVVLEATGGFETTVAATLAGAGLPLVVVNPRQIRDFARSTGQLAKTDALDAAAIARFAEAVRPEPRLLPDDQARQLAELVARRRQLIEMMTAERNRRRQLSRPRLVKALERHLAALQKDLSEIEREIDTTVRGTPAWREREDLLRSVPGVGPTVARALIADLPELGSLGRKQIAALVGVAPLNRDSGKMRGRRTTWAGRAKVRATLYMAALVASRHNPILAAFYRRLLNAGKAKKLALIAVMRKLITILNAILRDRRPWQNA

SEQ ID NO: 278347 - protein, 328 aa, unidentified
MYTLGVDVAKNKLDVCLLNPENDQRRAKTVPNTPAGFTELRDWLIRQKVPDLGQVHLILEATGVYHEPVALWFFEAGASVSVVNPAQTKAFGQGLAVRTKTDARDSHVLARYGALVQPALWQPPTPEIRELHALIARLDAVEADLRREQNRQEKAEVVPRPTTVAESLQQHIDFLKAEATRLQTALQDHIDRHPSLRQDRDLLLSIPAVGEKTAQRLVAVLRSRPFQSADQATAFLGLVPIECQSGSSLHRRPRLSKAGAPRIRAALYMAAVVATRYNPHIRTLYERLLARGKAKIAALGAAMRKLVQLAFGVLRHQKPYQADWTPAH

SEQ ID NO: 278348 - protein, 592 aa, unidentified
MAAIAVTRSDLTAIELRAAAGREKDSAASRRMLALAMVFDGADRTSAAETCGMDRQTLRDWVHRYNATGLAGLRNRKSSGRPPKLTAAQKAVLVELVEKGPDPARHKVVRWRRCDLAGELERLFGVKLHERSVGDLLASLGYRRLSVRPQHPQADEAAQEAFKKTSPQRSQQNSPIIPKESRSKSGSRCYGDGLSRYFGSPNQSDGAATMQPINTVNPIILLAIELSASTWLVAARVPGAEKPHLHRIDGGDTGALLALISSLRARVARRLDASQIGVVCCFEAGRDGFWLHRLLTAHGVASHVLEPTSILVNRRARRAKTDRLDAEGMLRVLAAYLRGDHQACSMVRVPTLDEEDAKRTHRERENLVHERLRIENRIEALLFTQGIRKRPSLRSWERDLDVLRTGDGREIPRHLRAELDRLRRRLVITLELIREVEAERDQAAETKPQDQACRKIAALCRIRGIGANFAAVLTREVFYRSFDNRRQIASYVGITPMPYQSGGMDRDRRISRAGNPRARTTMIQLAWLWLRYQPGSELAEWFRERVGTLAGRTRRIAIVAMARKLLIALWRYVETGVVPVGAEIRAETTVAA

SEQ ID NO: 278349 - protein, 411 aa, unidentified
MDRIYDKCCGIDVHKKLIVACFKKGNRQEVREFGATTRELLILADWLKDSGCEMTAMESTASYWKPLYNILESSGLKAMVVNAHHMKAVPGRKTDVKDAEWIADLLQHGLLRPSYIPDKDQRELRELVRYRKSLVGERTSELNRLQKMLEGANIKLSGTVSDINGKSARSILEYLLTGESVDGAKYDEMYEKKIIAHNLKATKEQIVDDLNGIMSPLQRRMMKELLNHLDELNIHIKNLDDEIDHFMKPEEKKASAAIQDVTGIGNTSAQAIISVIGTDMERFPTDSHISSWAGLCPGDNESAKKRKSGKTRKGNALLRTTLITCAHAAVKNKKSYFYAQFMRISSHRGKKRAYVAVAHSMLIAIYHILKDGVVFKDLGAEYYNQFNKERKINAYLKKLKALGWEAPVVAA

SEQ ID NO: 278350 - protein, 370 aa, unidentified
MLDTTTFVGLDVHARSIKAVSLDVMTGEVRCATFGYDAGAVAEWVRSVDPRARCVYESGVTGFDLQKRLSGLGVDCVVGAVSKMIKPSADRRRKNDRNDAEFLARMLSVGNVVEVWVPDDECEAARDLTRALEDARDDLSRSKQRLSKFLLRHGLVFDERTPTGRRKGNWTRAHWSWIESIRFAERADNDVLAYYVDAVRRAAEEKARLEGLVEAEARKPRWRKRVDSLRCLKGVDTATAADLVFEAGEFSRFGNARSFAAWVGLTPSEHSSGESDRRGAITKAGNKHLRKALVEAAWHYLTCSARPKEPARGQAPDRGARRHAAKGVRRLVERRGTLLARGVHNNKANVATARELACWVWAVGLMAEEA

SEQ ID NO: 278351 - protein, 341 aa, unidentified
MEQASTIGLDIAKHVFQVHGADAAGHVLFRKRLTRARLLGFLAAQAPCVIAMEACAGAHYWARAIGKLGHHVRLIPPAYVKPFIKRQKNDAADAEAICEAAQRPSMRFVPVKTEEQQANGIVFRARDLLVGQRTQCVNALRGHLMEYGYVFPKGITHVESLVALIDDPSSALPDGVRVVLKLLVDTFTALEAQITALDVEIKQRSTSDPTARRLMTIPGVGPIASTAITALVPAAEGFRAGRDFAAWLGLTPLQKSTGGKQKLGAVSKRGERTIRRLLIIGASAVVQQASRRGASKGSWLAQMLARKPKMLVTVALANKMARIIWALLVKGGTYRAPAVAA

SEQ ID NO: 278352 - protein, 360 aa, unidentified
MAHFAGLDVSIEETAICVVDDEGAVLLQCAVSTEPEAIAKALAPFATTLKRVGHEAGALSPWLHPGLEALGVPAVCLETRHVRAALNAQRNKTDATDALGLAHIVRTGWFRRAHVKTEGAYRMRLLLIQRRNLKRKFLDLENTVRHSLKSFGVKLNKVGRGAFDRAVREACAEDPFTAELMDCMLAARAALWREYLKLHDLVVRIVSQDELCRRFMAIPGVGPITALTFRTAVDDPARFRRSRDVGAYFGLTSKRWQSGTSIDIQGRISKAGDPDVRRALYEAASAMLTRYKGKTALKTWGARIARRCHKKAVVAVARKLAVIMHAMWRDGTFYDDRPDADHVPPTAKTAKEVRLLGAYA

SEQ ID NO: 278353 - protein, 381 aa, unidentified
MLDQVHNRPISTVYAAIELSKKSWVVAIMHPAKGQPSIHRIKGGAFSDLMVKLRAATRNGERLLVCYEAGYDGFWLARSLQADGVECRVLDPASLQVNRRARRVKTDRIDVLMLVRALMAVDCGDRHVCAIVRVPSIEEEDARRSHRERQRLVRERTAHINRIKGLLFARGIRGVEPRLRRTRIDFSSLRTGEGSPLPDRLRAELEREYARLDLVETQLRMAETERDTADAQDPSVERKRDMLVQLRGVGPASAAILAREIFARQFANRRQLGSYLGLTPSPYDSGSTTRCQGISKAGNSFARRVMIEVAWLWRKYQPDSVLAKWYEERAAGQSPRIRRIMLIALARKLIVALWRYVEIGLVPEGAVSCASNGAALDSAAA

SEQ ID NO: 278354 - protein, 400 aa, unidentified
MNSNRRVAGLDVHKDSIYLCIMGHDENIILQKTYGVLTPELRQMREDMLFHGVTECAMESTAVYWIPVWNELYGSMELKLANPYFIKQLPGRKSDVKDAQWIAECVLKNLIRGSFVPEPIIQDMRKLNRRIMDLNEDMTYNCNKLDAALQRCGFRLSNYVSSTKSKSYQSVLRSIIEGRSSPDELVGLVHGRTLNKHGRSSIKASVTASFSRTDMTIFKQLKETIDLIERQIDECQKELTELCKEHFPKQYGRLQTIPGVKERAATAIIAETGVDMKMFATAACLVGWCGLKPRNDVSNGRFKSRKVTHGNRFLRQILIEIAWAASRSRNCFFSHFSYIQTTLKKKGKMKIQVAIARKILVAVWHMITKEEDFIDIYLKRLEELKSTKERIRQFESCMAK

SEQ ID NO: 278355 - protein, 366 aa, unidentified
MREQQNNKRDRTTIGLDLGDRWHRFCVLGESGQVVEEGSVANNRVALSELSSRYPGALVVMEAGCHSPWVSRHLEQAGCEVIVSNPRKTRAIYQHERKSDRRDALMLARIARMEPALLYPVQHGSEEAQQDLLRIKLRDSLVRARVGLINSLRFTLKSLGYTIANPSTERFHKVIQSALPESVVQMIAPSVQAIQELSLRIKLLDREIRTLAHTKYPETTWLEQIPGVGPITALYFVLKIGDPARFERVRDVGAFIGLCPRRDQSGENDPQLRISKRGDTYLRRLLVSSAQYILGPFAPPSALRQYGLALAAGATARAKKRAVVAVARKLAVLLLTLWKNKNPYQAFPQQREKMRTHDLERLRCIA

SEQ ID NO: 278356 - protein, 409 aa, unidentified
MDVIYPRCCGLDVHKREVVACLVSSEPDGTARQEVRALGTMTPDILALADWLAIHEVTHVAMESTGVSGKPIWNLLEESFALLLVNARHVKAVPGRKTDVRDCEWLAELLRHGLLTGSFVPDRPQRELRELTRYRTSLVRERTAAANRLQKTLEGANVKLASVATDILGTSGREMLAALVAGETEGTALAQLAQGRLREKIPQLERALVGSVGPHQRFLVAEQVAHIDYLDEALARVSAEIAARVRPEEDTIARLDTIPGVGRAVAEALVAEVGADMGRFPTAKHLASWAGLCPGNHESGGKRRGGATRKGSPWLRACLIQAAHAAARTKGTYLAAQYRRLAARRGRAKAAVAVAHSILIIVYHLLTDGTVYHDLGANYFDERDREAVEHRLVHRLQGLGYRVSLEPVA

SEQ ID NO: 278357 - protein, 409 aa, unidentified
MNPLYVGIDVSSKNNVAYLMNPDGSRHSSFSVQNNRGSANMLSERIVAALDSMQLSDAVIGMEATSIYGDSLVYALREDGRLGQFRRKIHVLNPKQVRNFKEAYPDLPKNDFVDAFVIADHLRFGRMAREVYMDDYRYKALQTLTRARFYAVQNLTREKQRFANYLFLKCSGLAQEKVLPHNTSATTIALMEQFDSVDELAYANLDELTEFIARSGRGRFADPAATAKAVKAAAKGSYRLPKTVNNSVNQVMAVSITGMRAIESQMKTLDKAIKQQFEMIPNTLTSVPGIGTVYSAGMIAEIGDIHRFRTQAAVAKFAGLVWTQHQSGDFEAQHTKLIKSGNRFLRYYLLEAANSVRRCDSEFRRYYDLKFKEVNRFQHKRALALTARKLVRLVFRLLKDNRLYIPAEE

SEQ ID NO: 278358 - protein, 349 aa, unidentified
MSLYFAGIDISKYKHDCCIISAVDQQVVSKFTFKNDKDGFSELLTVLHSLSSPEDIRIGFESTAHYALNLELFLEKAHHSFMEVNPVLISEYKKSTTLRRTKTDRVDCESIARWLMTVEYKPHSKGFYHAYSLKSLTRLRDKLIRQRSFYLVKITNVLDHTFPEFKPFFNKRFSKTALYLLENYGSAEKIARMNSASYEKLRSLSRGKFSPQQFLTLKSLAANTVGINNSIFDTELNSLLTLYKATAEQICILETQITELIEEVHPHYMSIPGIGPISAAVIYAEYGDISNFSTPSQMLAFAGLEPGVNDSGTESQGGIIVKRGSSHLRYELMNCALTLIRFVITIDAY

SEQ ID NO: 278359 - protein, 399 aa, unidentified
MSRRCIGLDVHRDFCEVAIWDQGEVRSAGRIDSRPKTLAEFAATLGPGDEVALEATSGARQVAEILRPCVARVVIANTHRLAAISEAKCKTDRNDARTLAQLLAAGMLEGSWLPDEQTRALRRRVRRRHNLVVARTRAKNEAMSVLHRNLSQRPPMSDPFGVKGRKWLGALELPDDEVETLSASLRLIDFHGAEIETIERELARFAASSAEARRLITVPGVAMVTAVTFLAHVGEIGRFAAPKQLVGYLGLDPRVRQSGNGTAFTGRISKEGSVLVRHVMVEASHSAIRTPGPLLAFYQRVRSRRGHAVAIVATARKMVVLFWHLLTHGEDYRHSIELVTNKKLRKVELLAGAPRRRGGGRCEGPNRDQRREIDRDRAQRAADDYRRVAERQTDWAPTR

SEQ ID NO: 278360 - protein, 458 aa, unidentified
MKRKSKRTKGMEEARPFEGMSKVNQHAAGVDIGATEIVACVSRGEEVQLVKAFGNYTVDLQSIAKWFQEHKIKTVAMESTGVYWIPLFEELERQGFECLLISSRSLRKVAGQKTDVEDAQWIQTLHSYGLLKGSFRPQGDLVALRTLLRHRNQLVEHRSPHIQHMQKALLQMNIQLSQAVTDVTGMTGQKIIRAIVAGIRDPEQLATLRDPGCKHSEEEIEKALTGTWREEHLYILKQSLELYDFYTEKVEACDEEISRRYGMTRPDWVSRELPAIPDKKRNSHSKNAPKAAKEIREHLYRINGVDLSLVDGMGVSLAQTVTMEVGSNVGEKFPTEKHFCAWLGLAPKHDITGGKVLSNRTLKTKNRAGQAFRLAANSVKKADCPFGMMYRRLRSRLGPAQATVATAHAIARVVYKMLKYKVEYDPLSVNEYQKKYEEQQVKYMRKRAAKFGYQLVPA

SEQ ID NO: 278361 - protein, 426 aa, unidentified
MKSTTQNAKIAAITEKTLIIGIDVGSETHFARAFNWRGYEFSRKPLEFSNTEEGFETFRTWIEELKTKHGMDEVIPGMEPTGHYWFNLGKFLQDNGMTPVHVNPHHVKKSKELDDNNPSKNDRKDPKVIAGLVKDGRYFRPYIPDGIYAEIRVLSGLQVLAQSEITRLKNRIARWFSIYFPNYKDVYGNVGAVSGLMVLKVAPLPEDIVKLGVNGVNRIWRDAKLRGVGLKRAKTLVTAAEHSIGSRDAQEAARVELKILLSDYEMQTAREAELMALIEEKITEVPYVDKLLEIRGVGLKTVIGFVAEVGDITRFDDPKQLQKLAGYAIVKNESGKHKGESHISYRGRKRLRYVLYEAAVSVVSHSPEFRSIHQYYTTREKNPLKKMQSMIAVACKLIRVFYLILQTGTTYDAEKLMSDIRRPVAA

SEQ ID NO: 278362 - protein, 415 aa, unidentified
MKKVYDNCCGIDVHKKLIVACFVHGRKQEVREFGATTRELLLLADWLLQGDCQMAAMESTGSYWKPLYNVLEASGMEAMVVNARHMKAVPGRKTDVQDAEWIADLLQHGLLQPSYIPDKAQRELRELVGYRKSLVRDKTAELNRLQKMLEGANIKLSGTVADINGKSARNILDIVQSGEEITVARLGEMREKKLVAANLKATDAQLADDLNGVMTPLQRKMMKVLRSHINELDQHITELDNEIDRNMKDDEKKACAAIQDITGIAEASARAIISVIGTDMSRFPTDSHISSWAGLCPGNNESAGKRRSGKTRKGNALLRSTLVVCAHSAVKNKSSFFYAQFQRISARRGSKRAYVAVAHSMLVAIYHVLKDGVVFKDLGAGYYNQFNRERKINTYLKKLKALGWVEPVAMEGQPA

SEQ ID NO: 278363 - protein, 342 aa, unidentified
MLYVGIDIAKNKHDVTALNVPGKTVLKPLTFSNNKAGFELLDLSIRQINQDCLIALEDTGHYAFNLLNFLHEQGYKVYTYNPLLIKEFAKSLSLRKTKTDKKDAHGIALKLLSDPNREQFQHDNRQVELKILARHIHRLKKNSLIGKYNTLVVLISSFLSWIKSLESIQNIPTNLLTRYPNPQKRLEARFDKLIEIKRLTASKIQDILSIAPRSIGTTSPAREFEIIEIIKHYKRLIDKAETCVNDLMAEFNSVITTVTGIGGRLGAVILAEIRNIHAFDNPAQLQAFAGLDSSIYQSGQIDLAGRMIKRGSPHLRWALIQAAKACARFSPAFKAYLKTKLE

SEQ ID NO: 278364 - protein, 347 aa, unidentified
MNFYNNTHPYYCGIDLHAKTLYVCIIDQDGNTCLHKEIAANPEKLQALLEPYIGHVVVGVECMHCWYWVSDFCEDLGVDFILGHALYMKAIHGGKAKNDRIDSFKIANLMRGGNFPLAYVYPKEMRATRDLLRRRMKIVRHGANLKAHVGNTTSQYNLPPNKVNLKNVSAREQLRSTFPDPVVQRNIDLDMAVLECYAKELSKIEWFLEQQAKQHNPVHLHILKSVSGIGRILALTIIYEVGDIDRFESVQKFASYARLVKCKAESAGKSYGTQGNKIGNAHLKWAFSEAAVLYLRGNKKAQNYLQKLQKRMTKAKAISVLAHKLGRCVYFMMKHEKVFDESQFLKG

SEQ ID NO: 278365 - protein, 406 aa, unidentified
MRGPVITVDVSKGSCHYQPFLENGKPLRKARVLHDTIEGFSDLKETIEKVKEKGVVETVPVVFEATGVYHRCLQKYLDDNSIPYFIISPLLSSAYRKTDLHGNKTDPLDCAHIAKAYYCEDDLMPFFKQEDRYIKLQKLNRYYETELIHLKKRKVCFRSFLDIIYPRLDKCFGSNGSLYDPIPMEVLKKYPHPDLLLKHKESTINKVIEKKVNHDQKFVEKIVHKIYECAQHCYSGAEVTDVEVMKLPEMIDELLDQMDTCNTILMELVDEARKIPYFECVRSIVGIGDNLAARIIAELGDMSRFTSRRAISAFAGLNPKIHQSGDVDGIHLKISKKGNRHLRCLLYLGASCNYRLKKHDPLYEFNQKKRQQAQSPLKAKAANIATAHKLLSVIYALSQSGQMYRF

SEQ ID NO: 278366 - protein, 458 aa, unidentified
MAQARKRKQKEKKAAEMPVLNANAAGIDIGATEIYVAVHPDCDPEPVRSFATFTEDLHRLADWLKTCGVSSVAMESTGVYWIPLFQILEKRGFEVCLVNARYYQNVPGRRTDVSDCQWLRHLHSVGLLRPSFRPADQVCVLRSLVRHRDNLIQDAASHVLRMQKALNQMNLQIHHVISDITGLTGLRIVDAVLAGERDPAKLATLRDGRIKASEETIIKSLVGDYRREHLFTLRQSLAAWRNYQQLMAECDREIEQHLGTFENMIDTQAKALAPPKVRRKKLFTNEPDFDLRGHLYRIFGVDLTAVPGISALTAHTLLAEVGPYLSRFRSGAAFASWLGLCPDNDISGGKKLSVKTRPVSNRAAWALRMAVHGLHKSQSWLGNFYRRMRAKLGAPQAITATAHKLARIVHTLLSTRQAYDESIFAKSEQVARIRMEAKLKAQAKALGFHLVPSETALP

SEQ ID NO: 278367 - protein, 414 aa, unidentified
MDVVYTHSAGLDVHKKTVVAAAVVPDPQGGWHKEKRTFGTMTAELLTLSDWLLGLGVTHVAMESSGEYWKPVFNILEDNCEVLLVNAQHVKAVPGRKTDLADAEWLAELLRHGLLRASFIPPKGQRELRELTRHRSTFVRERATLVNRVQKVLESANIKLASVATDVLGVSGRAMLEALIADHLSPAEMAELAQGRLREKREQLTLALEGRVQPHHRFLLTELLCQIDNLDEAIARFDEQIQAYCAPYEAAVALVDTIPGMGRTIAEIIVAEIGTDMSRFPTADHLASWAGVAPGNNESGGKRRSGKTRKGNRALRTALIQAAQAAARTKGTYLAAQYHRLAGRRGKKKAWMAVAHSILVIAYHLIQRQEEYRELGGDYFDRRQPEATAKRLVKRLEQLGYQVALQAPPTAAAA

SEQ ID NO: 278368 - protein, 353 aa, unidentified
MMVVGVDPHKQTHTAVAADELGRKKAQKTVRARRDGHRELIRWARELAPAGRLWAVEDVRHVAGGLIRELLAAGEQVVFVPPKLMAGERRGGRERGKSDPIDALAIARLALREEGRLPAARLDEQVLEIRRLTDYRDGLVAERTRVVNRLRWLVHDLDPALAPAPRSLGSGRARARLEAGLRALPASAGRAVALSQLARITALSAEITDLEKSLAALVTVLVPDLLATPGVAVITAAKIVGETGDIRRFRSPAAYARHNGTAPVPASSGSGADGPQRLNRGGNRQLNAALHRIAVVQARCHPGAAALLERRGQDKHETRKASLRVLKRHLSDVIYRALNADAWRLDQPAPHAA

SEQ ID NO: 278369 - protein, 350 aa, unidentified
MPSLSEIVDVVIGVDTHVETHTAAVVDARTGAVLDELTVPTTPEGYQELVDLADAHSALRVWAIEGTGGHGAGLARHLARGEEVVHELDRPERATRRRGAKSDPLDAVRAAREAISRPLLGTPRAGGDRQALSVLLAARRSAVEASTVAQRQLFSLVIAAPEHLRDRLRSRRMPEMVKTAARLRVQPGWDTETATTAATLRTLARRAQSLTAEAADLEKQILTIVRTWRPDLLAQPGVGPITAAVVLCAWSHPGRVHSEAAFAMLAGAAPIPANSGQVTTRYRLNRHGDRQLNRALTTITLSRQRYHDPTKAYTLRRTSDGKTPREIRRCLKRYIARDLFRLLEHGPSPA

SEQ ID NO: 278370 - protein, 454 aa, unidentified
MAPRHQKTKQKVPAQLPTFHPHAAGIDIGAREIWVAVPPGSDPKPVRSFDTFTDELLKLRDWLLACGVQTVAMESTGVYWIALFQILEAAGLEVCLVNARHCKNLPGRKTDIQDCQWLQYLHSVGLLRGSFRPPEHICALRTILRHRSRLVRCAADQVRLMHKALTQMNVQLQHVISDLVGVTGEAIVQALLAGERDPVQLAKLKDHRIKASHDTIARSLRGDWRPEHLFTLSQSYQTWQHYQKQITACDEQIELQLAHWDARVDVQAQPLPAPRTTHRTAQRNEPQFDARTECYRVLGVDLTQVPAFQTPTVLLLLAELGPDFAGKFPTAKHFSSWLGLCPDNRITGGKIMSSATRDVKSRVAEALRLAAQSLWHAQNYFGELYRRWKARLGGPKAITAMAHKLARILWHLLKFRQAFNPDVFRKEEEKMRRKKLARLQNTAAALGYRLIASQ

SEQ ID NO: 278371 - protein, 355 aa, unidentified
MIIVGCDYHPSFQQIAFVDTETGELNEQRLEHRESAESFYRELASRGEKVRVGMEASGHSRWFERLLAELGIELWLGDAAVIRAKRGRRKPKTDRQDAQHILHLLRKDDFPKIWVPSWENRDLRQLLWHRHRMVQARTRIMNQLQAVALNEGLRCKKRLWREKGRKQLEAIHLAPWASRRRENLLQLLDGLNPTIAELSAAIDREVDKSAEARRLMTHPGVGPLTSLAFVLIIGSAERFQCGKQVAAYVGLVPLEDSSGERRRLGHITKQGNSLLRFLLLESAQVAARSIPQWRNQYFHLAMRRGRKIAKVALARKLAIRLFWMMRQGWDYEQMKKFGSHAGQPGNRDGVQQSIE

SEQ ID NO: 278372 - protein, 334 aa, unidentified
MLNLNEATFIGVDSHTTEHTALAINRFEEEKGHIRFENSKNGIINFLSWINEINADSKNVVLGVEGGGWEKNILFRRLALKYDEVYEVNPLFTKQRRSFGTKRDKSDKLDAKLIAEVLTKKLNQLPKIHPESLDIDRLLLKKHVWYWEHLVKEGTRIKNQLKALERERSLAEEKEHIKGLDLIIRLKRRELKGIKKYKAILKAKLEDFVSKLGGNLTSMPGISTIQAAKIIGFTGPIARFKKADSFCKYAGVVPSERSSGKTIRRIKASTGNRHLNSTFYILALNQIRWDKKAKAYFDKKVSEGKTKKHAIRCLMKRLACITYGMMKSKEDYRN

SEQ ID NO: 278373 - protein, 319 aa, unidentified
MAQNDLVVAGIDVAKDKVDVCIRALSLRRTFAATAEGRRELASWLRRQKVGKAVMEASGGYERDWAKALRGAKIEVRIVDPKRVRSFAQSAGRLAKNDTIDAEMIAWFAETFDEARSQAYDATREQLHQMVNARQALKGMQAKLESQGEHALPAAVQRIHARISKTIAVELVKIEAAISAMIQATPRFAELAEIIESVPGIGRTTSAALIAAMPELGQANNKIVASLLGVAPYDDDSGRRRGERHIKGGRRRTRNVFYMACRGAATQHNPVLKAFYDRLVAKGKEKKVALIACMRKLISILNIMIERRQKWDASRYALS

SEQ ID NO: 278374 - protein, 450 aa, unidentified
MRSRRQLSTLEPINANAAGVDIGSQTHWVCVPGDRVTDNVRSFGCFTADLYALASWLEQCGIQTVAMESTGVYWIPLFQILETRGFEVKLVNAHHVKTLPGRKSDVLDCQWLQQLHSYGLLSASFRPEDQICVLRSYIRQRDNLVRSACVHIQRMQKALTEMNLQLHQVVSDMTGTTGLAIIRAIVAGEHDPQTLATLRHPRSRRSATEIAQALQGDYRQEHLFILQQELALYEAYQVQLSACDTQIEQCLSNFDVTSEIALPVAGSPRRRPQDNQPAFDLQTHLQRISGVDFTQIDGMGALTVQTILSEVGLDASRFPTVKHFTSWLGLCPGSCITGAKVKNSRTRRVVNRAANAFRMAAVAAGKTRSALGAFYRRLRARLGPPKAITATAHKLARIFYRLWSSGRSYVDPGINYYEQRYHEQIIKGLQKKAKAMGFALVATPSTQIVS

SEQ ID NO: 278375 - protein, 408 aa, unidentified
MDAILESCAGLDVHQETVVACILTGPLDLKPKKVVKTFSTTTTELLALAKWLEEFNCSHVAMESTGVYWKPVWNILESCSFKQLLANSQRIKNVPGRKTDVKDAEWIAQLLRSGLIEGSFVPLHDIRDLRDLTRYRKKLVQEVTQEKNRIHKILQDANIKITTYVSDIFGVSGRCILETLIQGETLTASKLRNMVFGPIKSKISDLMEALNGNVRPHHRDMIRYSWNHLLYLEETIERVERQIDECLKPFRNEVELLDTIPGVNQRAASIMIAEFGTDMSVFPNDSHLSSWSGISPGNNESAGKKKGSKTKRGNKALKGVLCECAWAASVTRNTRLSATYWRLVKRLGKNKAIVAVAHLILRIAYQILQTKTPYQELGTQFIENQEKKKEQRLIKALESKGYQIVKAS

SEQ ID NO: 278376 - protein, 331 aa, unidentified
MRNYSESLGLDISKSHFDAVLHKKNLHRQFENKPSGFKALDKWIKNHNCSWENILVCFENTGYYSLDISYYLQSKGIDYIQEHGLQIKRSIGFRRGKSDKADAYDIAFYCWQNRLNAKLSSPPSIMLSKLKQLNRSRDILVKQRVALRNQIQALSAVRDKAIYSEACKSLRKVIRSIDLQLKNLERTIKELIKSDPGIDKNYRLCTSVKGVGPVLAIEMILHTHNFTCFDSWRKFAAYSGTVPYPHQSGSSIKWKTKIHPFCDKRLKSLLTMGAISALKCDKGLKIYYSKRIEEGKPKMSVINIIRNKLIARVFAVVNRGTPYVIIDNYAA

SEQ ID NO: 278377 - protein, 406 aa, unidentified
MHPTPTPTLAGIDWASRSHAVCVVDTTGSTLERFEVDHSEAGLRTLVGRLRARGVTGVAIERPDGPVIEALLDAGLPVFVIASRQVKALRVRHGLAGNKDDRSDAYILADALRTDGHRLRPLHPDAPATVALRMTTRARKDLVQARVRLVQQLSAHLELVFPGAVSLFADLDSPIAQAFLRRFPSAERAAWLSPKRMTAWLAAQGYCGRRTGTELHARLEAAPRGRTGEAAEAMAAVTLALVRAIGAVRDEIDALETRLREQLLLHPDGAIFMSLPRSGRVRAAALLAEIGDCRERFPTPESLACLAGASPSTRQSGQHRAVTFRFACDKKLRDALIDFAEDSRHANAWAADLYARARRGGKTHPHAGRILARAWVYVIWRCWQDRVPYDPAHHRALQRIVLAKAA

SEQ ID NO: 278378 - protein, 423 aa, unidentified
MAYRIAGIDVHKKKLAVVVADVEVEDEYQFERRWYGSNPEQMQRLGEWLIQQQVEEVVMESTAQYWKPVWGALEQYWKPSCEKREGAGRMSGTLHLAQALSNRGRRGRKRDFRDAERLLKRLVSQELTLSFVPHAEQRLWRTVTRTKYQLRRNKVRLHNQLEALLEEAHIKLSSLVSDLLGASARRMLQALAEGETDPAALAALADQRLRATSAQLRDALGACTELNPIYRRLVKMALEELQRIEQQIGQLDQEMASLLRQHQDAVQRLAEVPGLGVDSAQQIIAEVGAKAATFASAKNLSSWVGACPGEEESAGVNSSPRSPKGNRHMRRLLNQAANAAVKRKGSIFEMVYRRLVPRLGHNKTIGAIAHRICQLIWMILHKGVRYEERGPAVCEQSKRVRTVRMIRTLRKLGYRVELQADPA

SEQ ID NO: 278379 - protein, 339 aa, unidentified
MQVYAGFDLHANNNYLGVVDEQGKKILKKKLPNEPGTILNALDPLRQELVGIVVESTFNWYWLVDLLMDEGYEVHLANPTAMQKYRGLKYSDDIHDAFWLAEMLRLGILPTGYIYPKDERPVRDLLRKRGHLVQIRTSLILSLQNIIARNCGTQMKSNDIKRLREDMIAPILEYNEDLAMAGDASKEMIDHLTRKIREIELYIEKKVKKKETYRYLRTLPGAGIVLGLTITLETGDIGRFPKVGDYSSYCRKVSSEWLSNGKKKGKGNKKNGNKYLSWAFSEVSECARRDNDMAQSYYNRKLNSTNRMVAHTALAHKLARAAYYIMRDQVPFDPEKLFA

SEQ ID NO: 278380 - protein, 408 aa, unidentified
MTAIDQFAAHVGLDWADKKHDVCVQFKNGERIFHVIKHTPEALDIWLNELHQKVKGRIAIALELKKGPVVYALQKYPFVTVFPVHALSLARYRETFWPSGAKDDPQDAELALELMLRYPQKVKAIEPDNADIRLLQQLVEQRRLLVEDKRRFVNRLINTLKQYYPQPLEWFSHRDSSLFCELIIRWPSLQQLKRARSDTIRHFMNAKGGSAVAYTEQRVASIASAIPLTTDKSVIEANALMATALASQIKLVGDLIRTYDERIESLFDTLPDADLFKSLPGMGPRMLAALGDNRNRFNSAEEIQNYAGIAPVTERSGQKSWGHWRWQCAKFVRQTFVEWTAKTVNSSYWARLYYQGQREKGKSHQSAIRALTFKWIRIIYRCWKTKIRYDEAKYLLALEARKSPLLAP

SEQ ID NO: 278381 - protein, 420 aa, unidentified
MNKHSKSCRRSEASSKRAKSRGPVQRDAKEVIAEVLRKLTGSAASDAGVVSGSGQKDRRGNTYGPNRDRLTVGVDLGDRWSQYCILGVEGETLPEGQLRTTQEDVGEFFRELTTARVVMEVGTHSAWVREVITEWGHEALVANPRLMEGSKRRKRKSDRIDANKLARLGRVDPQSLYPIRHRSREVRQDLVVLRARDALVSARTELINTTRGLVKSMGTRLPRCSSPSFAEKVKDAIPLEVREALLPLVQLVETVSECIERYDQKIEDLGRKKYGHTTLLRQVKGVGPITSLAYVLTLEDPQRFASSREVGPYLGLVPKQEDSGESQPQLGISKAGDRMLRRLLVGSSQYMLGAFGPDSDLRRYGLRLCERGGKNAKKRAVVAVVRKLAVLLHHLWVTGDVYEPLHHSETGTGTAQAVAA

SEQ ID NO: 278382 - protein, 360 aa, unidentified
MKNTTIAIDLAKSVFEIGISHRPGHIASHHRLSRAELGPFVAAQPRATVIMEACSSSHHWARKFQSLGHDVKLLPPLCVRPYVQRSKTDRADVKGMLEAWRNSAIQPVPVKSESQQQLTSLHRIRSAWKATRTMRINSIRGLLREFGIIFPAGASTICGYVQTLIENAETAVPMLLRDLLHQLVLEIRELEVRIKTIEKHLEALADQTPVVERLRSIPGVGLLTATALIGFVGDVQRFPSARHFACYLGLTPREHSSGMKRRVGRISKQGDVYLRMLLIHGARSVLWAAQSKSDPDRFRSWALELQRRRGHNKAAVAVANKMARILWSVWKSGKPFESRPQLAVGPDPGVRMPLRGDFAR

SEQ ID NO: 278383 - protein, 335 aa, unidentified
MKKNVFIGIDVSKHTLDVAIITRDSEALSNPIWMQFNNSVAGLNEMKKWLLKMNVLLNHQTIIVIENTGIYHRLLWKYFSDLKVDLCIENAAQVKWSLGIARGKNDKVDSRRLALYAARHVDRLKPTPHLHNSVMELKDLLTLRTKLIVQLRSISTAFNELKNVTDPAIIKSIQKQLRPAQEGLTESVKKIEAQIKTMLSKDKQLSRIYSLLITIPGIGHVTAVMLMCCTNMFTLCNSGKQLACYCGVAPFDHQSGISIKGKQKVHKMANKELKRLLHLCALTVIRHKQEFKLYYERKKQEGKHVMSILNAIRNKIILRVFAVVKNDRPYVNNYS

SEQ ID NO: 278384 - protein, 348 aa, unidentified
MEQIIRIGMDTSKHIFQLHGVNAAEEPVLRKKLRRKDMVAFFERLAPTVVAIEACGASHHWARLLGSLGHEVKLIAPQLVKPYVKRGKNDAADAEALCEAMSRPTMRFVPAKSSDQQAALMLAGLRDRLIRNRTQLANSIRGYAAEFGLTAATGFAHLLPLLDRIQADESLPCLAREMFAAQAMEYAQLQERLEEAEARLMAWHKADARSQRLARIPGIGPIAASMLIMKSPAPSAFRSGRQFAAWIGLTPRDHSTAGKVRLGVITRAGDKGLRAVLVTGATAVIRFVQIGKGKSAFTPWLLSLLKRKPPKLVAVALANKIARIAWKMMITGEAYTARTPAPALACAA

SEQ ID NO: 278385 - protein, 363 aa, unidentified
MKENHQVVVAREPVLGGVDTHKDVHVAAILGRTGALLGTAEFPATLGGHATMLVWMRSFGDLLAIGVEGTGNYGAGLTRFLLAEGVRVVEVVRPDRRARRLNGKSDTLDAENAARAVLSGERTSTPKHRDGAVEALRTLRVARTSAVKARRAALQLLRNTIVSAPDRLRESIHGLTRTVLVRTCAAWRPNRDAAHEPTTATRIALRSLARRILGLEEEIADLDELTAALVARINPRLTEASCVGVEIAAQLLITAGENPERMRSESAFAMLCGVAPLPASSGKTRRYRLNRGGDRAANCALHMAAISRLRVDPRTRTYAARRTAEGLSKKEILRCLKRYLAREIYKLLRPTPLEPDTVAEIAA

SEQ ID NO: 278386 - protein, 379 aa, unidentified
MISFPRRERAQTAAAVVGVDAGKFSHTLVVRPKGQADCKPFSFPTTRQGFEAAVAFLSQQAPSATPSTILVGIEFAGNYGFTFAHFLAQLGVPVVSVLPAHTKRWKDVAHNQPLKTDAKDAGTITDLLAQGHFVRFPFLAPAYADLRYLVAARERLSLLRRGAMTQLRSLLQVVFPEFEAIFPLLTKKTPFAILRAFPTPEDLLKAPKAKVLRVLHSASRGHLGAETYERLIVAAKATLGLPGAQGRLRQEIGLVLERLALFETQIKSLETAMVDALQGVPETPYLLSIPKVAPVTAAVFLGSIGDPRAYESSGQILRVAGLSLIERSSGILRGTKRISKRGRPLLRQAAYMFAVRVSPRTACSGPSTRRCASAMAARR

SEQ ID NO: 278387 - protein, 377 aa, unidentified
MKSTRFVGLDVHAATIAAAVAEANGEVRVLGVIPNQPEAVRRLVKRLGPADQLRACYEAGPCGYTLYWQLAELGVACQVVAPTLVPVKAGDRVKTDRRDAARLARSLRSGDLTPVWVPDAAHEALRDLVRAREAAKKDQLRARHRLQKFLLRHGHRPPAGTKAWTERYRRWLAGLRFELPAQEATRLDYLTEVDHARDRIARLERALDEAIETVPAPMRAVIQALQALRGIAKVAAVTVVAEVGQLSRFARARQLMGYSGAVGSEHSSGPRIRHGGITKTGNAHLRRIVVEAAWTYRHRPAVGAALRQRQARQSEAVKAIAWKAQHRLHSRYRHLLGRGKSKQQVVTAIARELLGFIWAIGVAVEREHCGAVTDQVA

SEQ ID NO: 278388 - protein, 347 aa, unidentified
MHKINVIGVDLAKNVIQVSVVSGSNRELSNKSLTRKKFAEFLARQKPCLVAFEACATAHYWARFSRRHGHAVKIIPAKVVVPFRQGHKTDPNDALAVAEAARRPNVKLAPMKSIEQQGLQSVQRSRELLVQNRTALSNHVRGLLMEFGLVIPKGWAALHRRIPDILEDGENELPDMYRPTLHLMWQRLRDLREDIDQLTKEIDTLVKQNAACRELLAMEGVGPISAVLLFATLGTGEAFVNGRQFSAYLGLTPKQFSSGGKVNLVGISRHVANKRLRAVLIQGARAYVTHMKEPKSSKDRWLQALIERAGAGKASVALANKNVRTAWAMLTTGESYQRHYQAVQQAA

SEQ ID NO: 278389 - protein, 373 aa, unidentified
MRTISDTCRSKDVAEVVLGVDTHLDFHVAVALDQLGRPLGRLKVPTTTGGYHRLVSWARGFGPVRCAGVEGTGSYGAGLARYLKDAGILVMEVERPKRRHLRRNGKSDPKDAEAAARAVLAGETAGLPKSGDGRVEMIRTLRGTRRSAVKARVQAANLLQAMLVTAPEKLRQRLRGLPTRELVDVAARLRPDGDPGDVQGATKFALRSVARRHVALSEEIATLDAQLERLVAEVAPALISLPGIGTNHAATLLVLAGDNPERLKSAPSFASLCGVSPIEASSGKVVRHRLNRGGNRDANRALHMICVVRMGSDRRTKAYVARRLAEGKSKWEIMRCLKRYIAREVYRVLLSSVALGTSPIDGTTNRIVEADIT

SEQ ID NO: 278390 - protein, 429 aa, unidentified
MTTTSTLYVGIDISLDTNQVCVMNFDQHKFFNRSFENSSTGSDALIHDLSSIMNSHDFSHIIITMEATSVYFFHIANKLSNAEELKLFTTQVFCLNAKIAANYKKSFLGMPKNDPLDAYSLCDFARVGRTKSLHEWRGANLVALQRLTRYRYHLASELTREKNYVLNNIFLKFSQLRKKQGKNDDTNPFSDLFGATASSILTDFATLDEIVDMPMDELVEYLDTKGKHRFTDPHEVAVLLKKCANGSYRLDRMAYDAINIAIASSLRMIKTFQREIKDIDQQISDFVKGLHSNDLTILTSIPGIGPVFAAGIIAEIGSIECFSNQNKLAKFIGLTWNEHSSGSFVSEDNELFRTGNSYLRYYITEAANKFKNHDSYYHEFYTRKYNEAKTHKHKRALVLTSRKFVKLIYAMLHRQQLYSETGEVLLITE

SEQ ID NO: 278391 - protein, 402 aa, unidentified
MTYDYVIGMDVGKYFHHACVLDIDGAQVLSKRINQNEKSLRTLFSTFSANDHKVLVVVDQPNNIGRLTVAVAQDIGIDVRYLPGLAMRQLSRIHAGNAKTDIRDAYIIAHAAQNLPESLRSVDRVEEAFLQLKVLNGIDEDLARSYTRLINQIRSALVGCYPQFEQALRGQIIHRKWVLHLLARYGGPTKIKRLGKAKAAAFARRYKARNPEPVIDAIFAAISEQTVAIAGAKYAEMGVAMSAKDALLKLEHRKQIEQEVIELINDIPHTQILLSMPGIGPKTAAQILMTAGDMSGFPTAGHLASYAGLSPRTNQSGTSIMSNSLNRAGNKKLKNALWQSSFASIRFHERSRQFYERKRREGKRHNAAVVALARRRLNVLYAMMSNHEYYRDPDQSQEVKAA

SEQ ID NO: 278392 - protein, 399 aa, unidentified
MLAVGIDISKSKSVAAILNQDGSMHTSPFEFHHTQPELDAFIKYILNSNQSATILMENTGHYHYPVLKAFREAGLPVCMVNAYQIKKFGDMDLRKAKTDKKDAVRIARYALEKSYSLVPYTSMEQKYEDLRFLARQYNQRMLTLKTNKVFLLNLLDETMPGITNILPLTTRTPETSLSVLFINRFKSYDRIKKMGKSRFLDAFEKIARKSRNRQTKTYGLAIYEAALRNITTRGENEYTLAAQDQCLELVCESQKAADSIILKMKTLAETLPEYAVLRSMAGVGDRLGPLILAEIGDIRRFHSGKALNAYAGNDAPPYQSGTFESHNRHISKRGNAALRKYCFEVMQALKLTRPQNDPVYLFLLKKEQEGKPYNVAKMAGVNKFLRIYYARAMETLKQQ

SEQ ID NO: 278393 - protein, 339 aa, unidentified
MERQYVGIDLHRRSSTIFRMNEHGEVLGSERILSQPAELAQAMAEAGEAPEVVLESTYGWYWAADVLQALGCNVHLAHALGNNWGNRRVKNDERDAKDLAAMLRLGRLAEGWIAPPKTRELRELVRYRASLVGSRTSAKAQIHGVMAKNGVLPVVQEMWGPAGSAQLDSLELPFAYSLRIESLRDLLELYEREIDMLDRHIHRQLKGDPGYRAITKLPGVGKVTAAIFLAEIGDVSRFSNPKKLCSWAGLTPKHRESDEIVHRGAITKQGSPLVRWAAIEAVGNYRRRGGERLRADYQRIAEHRGKYKARVAVARKLLTLVYYGLRDGEVRCLEAHQAA

SEQ ID NO: 278394 - protein, 473 aa, unidentified
MIKSVGIDLASAGEHKVRCLDERAQMCDGFSFETTPEGLVKLEERIFSGSSNPVIIFEPTGLAWLLVALYLKGRHPDSRLVRVQAQKVVALRKYLHRSSKSDKIDSLTLAKMPFIDPEKLEEIYFPPAKIYAIQRLARQRRRLESEIAGRKVRIGSIVDGYFPGVRKAFSDSWSAHARAFLHSHLNPLAVVRTGEKALHAFLTKKRRHCKVDASVESHAVYLAIREAAILYKSSSSVGTIDNDFFSALQDEISRELRLMEIEEAESAAIAKRLQKLYLELHPSDNLRTIPGVGDHTSPIFLATVGDPARFRSQSSFANYCGIVPGANQSSGSEAKGLKMTKAGPAIMRWALFQAGQIGRSHDPQLACVYYREMVHNGKNHMQAMGAVMSHMSARVLAVLREDKPYELRDKDGRSVNREEARKIILSKYQVPEEIRRERRHRKTSGDSKSGNKRRETLAPRVHEAAVAPQPVVI

SEQ ID NO: 278395 - protein, 384 aa, unidentified
MRENILYVGMDTDKNHIDVAVAEPLPGGEIRYWGKIANAPAALDRVIKRLGKDGRRLKVCYEAGPCGYGIYRRLNGKPDVSCQVVAPSLTPRRPGVRVKTNRRDCLTLAKLLRAEELTAIWVPDAVHEAMRDLIRARGAAAQDLARCRQRIGSFLLRQEIRYVGKPWTKKHRAWLGRLEFAAPAHRLLFGELLEALDQAVARRDRLNDHIAELVPSWSLAWLVEALQALRGYQLVNAVSLVAEIGDPRRFTNPRQLMGHIGIVPSEHSTGDKVRRGPLTKTGNRRARKVLIEAAWTYARAAKRPAARALGQPPAVRAIAEKARHRLSGRYRRLTARGKLATVAIAAVARESLGFIWAIAQTAGPTNSIDPGRPAVAAGRGSSSR

SEQ ID NO: 278396 - protein, 341 aa, unidentified
MGQVNTIGLDIAKRVFQAHGADASGRVVFRKRLVRAKVLEFFAAQPPCTVAMEACAGAHHWARELGKLGHTVRLIPPAYVKPYVKRQKNDRADAEAICEAAQRPSMRFVPVKSEEQQANGVVFRARDLLVRQRTQCINALRGHLSEYGYVFPQGITHADAVIAHVEDPDSSVPESARAVLKVLIGTFQALEAQIQALDAEITQRAKADPVARRLMTIPGIGPIAATAITALVPAPEGFRAGRDFAAWLGLTPLQKSTGGKQRLGAISKMGERTIRRLLILGASAVVRWAGQRGTPAGSWLARMLARKPKMLVTVALANKTARIVWALLVKGGVYRAPAPAA

SEQ ID NO: 278397 - protein, 421 aa, unidentified
MPNIEIGVDSMVKENFIYVGIDLHKETHTAVMIDCYNQKLGEITFPNRPADFPKLVTKVKKCNTDGKEVVYGLENAYGYGRALAVWLIDKGYLVKDVNTAISHRQAKHRGAMYRKSDSDDAEAIALATLNMLDKLPDACPNDAYWSLGQLVHRRDNIMKQRTRLVNQLHEQLCIAYPSYKQFFNDISRPTALYFWEHYPSRKYLKGKSVEDLRAELVPVSHNKCSTRTCEKILDAIAGDKVKNNAYQDARDMVTLSIVSDLQHYDKQLAEVDKMLEQMYKMLGCTLTTIPGVNVITAVKILAEIGDIKRFSNANKLAQFAGIAPLHLSSSGKGKDVATKQGNRRLQATIYFLAIQMVQVSSKGTPRNSVVRAYYEKRKAEGKTSQQALICISRRLISVIYGMLKNGTEYRMPVVENAGEKL

SEQ ID NO: 278398 - protein, 353 aa, unidentified
MLTIGVDAHKRVHAAVAVDDGGREIGQWRGPNSVDGWQALAAWAKELGVPSRWGIEGARGYGRGLAQALVADGAEVYDINPRWTAAGRWRARRTDKNDRRDAQAIALLVWREASDLSRVAADDETAVLDLLVTERTDLVAGSTRLRNQLHHLLLQCDPEYATRVPSLRTQAGLRALESYAGVGADPLQRQRAGAVRRMAQRLRLLTEQARALAAQIRTLAAPRFAPLATICGIDLLTAGALAGILGPGRRFATDAQLAAYAGVAPREASSAGRVRHRLDRGGNRRLNAIRYRVAVTQARCSPQAQASMARRMGEGKTKAEARRALKRFIIRAIWRQWQRCSAGLPTDTAGCVA

SEQ ID NO: 278399 - protein, 343 aa, unidentified
MQAVTTIGLDIAKSVFQVHGIDATGNVVIRRQLKRRHVLAFFQKLSPCLVGIEACASSHHWSRELKALGHIVRLMPPAYVKPYVKRQKNDAADAEAICEAVTRKNMRFVETKTPEQQSCLMLHRSRHLFIRQQTAVINAIRAHLAEFGVVAPVGRKGVADLLDIVADPSDRRLPEVARACLAALGVQLRLPKAQILEFDRRIMAWHRSNETSKRLDEIPGVGPALATALVASVADPKAFGSARNFSAWIGLVPKQHSSGGKDRLGSISKQGDRYLRSLFTAGALAVIRYAKIRGTKHRPWLTALLARRPAKVAAIALANKIARMAWAMMAKGERYREPAALAA

SEQ ID NO: 278400 - protein, 413 aa, unidentified
MDVVYPCCCGLDVHKASITACVLWAEGGGRARKEKRRFGTFTADLLELTDWLRTCGVTHVAMEATGVYWKPVWNILDGSVAEVLLVNAQHIKAVPGRKTDQKDSEWIADLLQHGLLRGSFVPPQPTRELRDLTRYRVSLAQECNRIANRIQKVLEDANLKLASVASDALGASGRAMLRAIIGGEDNAATLAEMAKGLLRHKIPALREALTGRVTAHHRFMLRELLDDLDHAEAKMMTVEQEIDRRLRPFQDDVARLCTIPGVDRVTAWGLLSEIGFNMDQFPSAAHLASWAGMCPGNAESAGKRLSGKTRKGSAFLRRHLCQAGWAVSTKKHSYLSALFRRVARHRGTKRATMAVGHAILVIAFHLLKRKTTYMDLGPDYFDRRNADAVRRSLVKRLQNLGHSVTLAPAPVFS

SEQ ID NO: 278401 - protein, 322 aa, unidentified
MSGAVVGIDIAKKKFDVALFLKGKFKHKACMNNRQGFEDLSRWLKKQGVEHVRVCMEATGTYGDELATYLYDAGHLVSIVNPARIKGFAQSELLRTKNDRVDAGLIARFCVAMNPGTWTPPPPEIRRLQSLVRRADALIDMRTQEQNRLGTTHETVEPSIKEHIGYLDQEIEKLKRQIAEVIDNDPNLRGKRDLLDSIPGIGETTIAVILSALHVFEEVECVQKTVAFIGLAPKETLSGSSIKGKPRICKVGHARLRKALFMPALVAMRYNPVMIDFYRRLKEKGKNGKVIVCAIMRKLVHLIYGILKSGKPFDQNYKPNFA

SEQ ID NO: 278402 - protein, 352 aa, unidentified
MTVTIVETRAHTRAITGGVDTHAEVHVAAALDPVGGLLGVREFPATPAGYAQLLSWLSGFGAVCLVGVEGTGSYGAGLARHITAAGVRVVEVDRADRQDRRRQGKSDPLDAVSAARAAQSGRAAGVPKGRDGAVEAIRALMVAKRSARAGRTQAINQARALILTGPDDLRVRFCQHTPAGLVAQLAALRPRPGAPVGYPTRIALRELGRRAQFLSCQLERLDALMVPLVTARAPGLLALYGVGADTAAMLLIAAGDHPERLRSEAAWAHLCATAPIPASSGKVTRHRLNPGGDRQANHALWRIVITRMSSHPPTRAYVDRRTKEGLSKKEIIRCLKRYAAREVYPHLRAPAG

SEQ ID NO: 278403 - protein, 410 aa, unidentified
MEVLYPHCAGLDVHKDTVVACVRHMVSGQVSSAVKTFKTTTSELMALSDWLSSEVSTHVAMEATGVYWKPVWNILAGGEFTLVLANASHVKNVPGRKTDVNDATWLADLMAHGLIKASFVPPEPTQQMRDLLRTRKQFVRERSSHQQRIQKTLEEANIKLDSIISDVLGVSGRRMIEALIAGQTEPQALAALADGRIRASAAELEAALRGRVTSHHRFMLQLHLDHMDAVDAALARIDKEVDSQVEPFRVATEILSAIPGLSGLSAQVIVSEIGIDMSRFETAGHLVSWAGLCPKNDESAGKRRSNRMRKGAPWLKTTLIQCAWAAARKKGCYLQAQYLRLRARRGAKKAIGAVAASILTTVYHMLKNGTLYREPGASHFDQRAKNIQIKRLLHRLQNLGYEVAITPTPA

SEQ ID NO: 278404 - protein, 341 aa, unidentified
MRLAGWAERTHDVALVDDSGQLLAKRHITDDAAGYKILLDLLVEYGDSEENPIPVAIETSRGLLVAVLRTGKRQVFAINPMAAARYRDRHSVSRKKSDPGDALVLANILRTDMHAHRPLPNDSDLGRAIAVLARAQQDSLWNRQQLSNQLRSLLREYYPAALAAFEPWRNGLCRPEARELLKTAPTPARAARLTRTQLEAALKRAGRKRGITAEAERLRDIFRDDYARQPQLVEDALGKQMLALLIQLEAACTAADDLTKAVEEAFPQHPDAEIILSFPGLGVQLGARVLAEIGDDRSRFADARGLKAYAGASPITRASGKKSSITRRWVKNDRLNAAGYL

SEQ ID NO: 278405 - protein, 342 aa, unidentified
MQVTTIGLDIAKNVFQVHGIDAAEKVVVRKQLRRSQVLEFFKALPPCLIGMEACATAHYWARELTKLGHKVRLMPARDVKAYVKRNKNDAADAEAICEAVRRPTMRFVQVKSAEQQSQLMLHRTRDLLMRQRTQVINALRAHMAELGMTAAQGNAGLRELLAIIAGAADERLPAEAHASLIVLAAELQAMRTLIASIEKRIIAQHRLDEASKRLRSIPGIGLLGATAIAATITDPKAFRSGRDMAAWIGLVPRQDSTGGKQKLGPISKQGDRYLRRILVVGAHAVLKLARQKPEKYPWLTQLLARKPFKVVAVALANKMARIAWALLVKGGPYRARALVAAA

SEQ ID NO: 278406 - protein, 468 aa, unidentified
MPTARPHPHPHGRRAAPPPPDLHRINANAAGIDIGAASHHVAVPPGRDPDGCDVRAFGAFTADLYVLAEWLTRCGIQTVAMESTGVYWIPLFELLSARSFEVRLVDPRQLKRVPGRKTDVLDCQWIQQLHTFGLLAAAFRPDDQICVLRSYLRQRAMLVTYAAQHIQHMQKALELMNLKLAHVVSDIAGRTGLAIIRAILDGQRDPRALATLRDPHCKADAATIARALEGSWRAEHLFELRQAVELLEFYQKQIAACDREIEAQLTRFADKPGAPPVADAARRRKARRTALRFDARQHLHRLTGVDLTRIDGIDAPTALTVVGEIGLDMTRWPTEKHFASWLGLAPGSHLSGGKQRSSRTKPSSSRAAAALRLAASSLYHSHSALGAFHRRLKARLGAPKAITATAHKLACLIYRMLRFGTDYVDRGQDYYERRYQGRVVSNLMRRAQELGYTLTRNHSPATPSPAAP

SEQ ID NO: 278407 - protein, 378 aa, unidentified
MELTPMHKRVIALDVHQSKITACALIEQEDGSVEADKREFGAFRRDRRALAQWALEVGPEVVVMESTGVYWKSPFAALEAVGIIAWVVNARHVKAVPGRKTDMADAQWLATLARAGLLRASFIPVADFRQLRLVARQRQKLVGMCSAEKNRLHKVLVDAGIRINVVVSDVHGSSARAMIKALIAGNPLHEVLDCKGRLRASREELFEALSTDQLSAAHRFVAEEIMAHIEQLELRIQRMDAYLLEGLQAWQPQLNLLQTIPGMDVQGAAMLLVEIGADMGAFGSAERLASWVGMCPGNNESAGKRKSGRIRKGNAWVRRLLCEFAQAAARTRCALKARVRCTVHPQGPQEIHRRAGPQDAANHLRHAGQRSPLPGQER

SEQ ID NO: 278408 - protein, 344 aa, unidentified
MKYYAGLDVSLQETAICVVDEDGIIVIEGKATSEPDDLVRWLAATGLTIARVGLEAGPLSPWLHAGMREAGLPAICIETRRMKGATAAMAVKTDRNDARAIAHAMRVGWFTAVHVKTVESQELRLLLNNRRTLLEKRVAIDNEIRGTLKAFGLKLGAVTVAAFEARVLELLAKRSRLLAMVRPMLTARAALRQQGEVLHRMVLKAVRASAVCRRLLSVPGVGPIVALTYATGVDDPSRFIHSRDLGPHFGLTPRKYASGEIDRSGSITKAGDGAVREVLVQAALTLLTRVHRWSALKAWGVAVAKRRGLRRAIIAVARKLAIIMHRMWADTTTFNWTRETVTLA

SEQ ID NO: 278409 - protein, 329 aa, unidentified
MQETLIVGVDVSKSTLDICFKPSGVTVCISNDALGFKRWYNQLKSLGCSHQAVMVIMEHTGHYSFRFEKFLRSKAVAYCKVPALQIKRSMGVTRGKTDKLDATRIADYGWLRREILLADTEVQEDIRQLGMLISLRQKLVKDRSGYMSRLKTMKATGVCSPSNCLVKMQQQLIRTLTNQITAIEAEIKVVINSNTQLAITSQLLRSIKGVGLIVAAYMISCTGNFTRFKSFRKFNCYAGLAPFKHESGSSIRGRSRVSHLANKKAKVLLNLAASCSIRCDQEMKKYYQKRVAEGKRKMSCLNIIRSKIVARMFAVIKRQSPYQEYSIAA

SEQ ID NO: 278410 - protein, 342 aa, unidentified
MQHIGIDLGGKESQVCVRTPEGEIVQEGKVVTRDLGRLLKRQPQSRVVLETCSEAFSVADAALELEHEVRVVPATLVRSLGVGARGIKTDLRDARTLSEVSCRIDLPSVHVPTELARQRRTMCGMREELVRSRTALVNCVRGWTRTQLLKIRGGHPETFPQRMRAAALARADGLPEYAERVLVVIDSLNEQIALADQELKQLALRDPLCERLMSVPGVGPVTSLRFAAAIDDVSRFPSAHSVQAFLGLTPGEHSSSERKHRTGITKAGPAPVRRVLVQAAWNLRRYRPADPTTQWAAEIEKRRGKHIATVAVARKLAGVLYALWRDGTRYEANHARSRSASA

SEQ ID NO: 278411 - protein, 367 aa, unidentified
MKNHSSIDQSLSSSDLSACTTVAVDLAKQVFQVAGEDVLGQVHYEQRIKSREAFYEFLRQLPPHVVVLMETGPGAQAWARQLQNQGNLARILPAGLVATHRSGPKNDRNDALAILRAGRDEKICAVPVKSVAALAMQALHRARQGYVRRRTAVSNQMRGLLLEHGVALAQGDVAISQKIPRILEDATQPVPGLLRELIDELLAEWRHLGERISVLTGRLEVAANADMTAKRLMTVRGIGPVTATALVAKETKPERFPNARKFAAYFGMVPDQHSSGNTVRLGDMTKRGDVYLRSLMIQGAHAVLQQLRPDSQQPDDRRLLRWMSRLGRKEAAIRLANRNLRIVWVLLQNDQTYRRHAGDGQQATMSH

SEQ ID NO: 278412 - protein, 402 aa, unidentified
MNAVGIDVSKGKSMVVIMRPFGEVVASPFEVTHTDSELSKLANSLKSLNGETKVVMECTGAYHQPIAYALHEAGLFVSTVHAQLIHDYGNNTIRRVKTDKADAVKIANYALSNWLELPRYIPEDDIRLMLKAYSRQYTKYNKLKTILKNNFIALTDHTFPGVNELFTSPPRKSDGHEKWMDFAFKFWHCQCVCGLSPKAFAARYQKWCKKSGYRFNKDKADDIYASACGHVCVVPMNDSTKQLITLAINQINAVAESLAVVSREMKRLAEQLPEYPVVSAFYGLGDILGPQIIAEVGDIYRFRNKGSLVCFAGLEAPPYQSGTFFSADRTISKKGSPHLRKALFQVMDCYIKTSPINEPVYKFLDRKRAEGKHYYSYMTAGSAKFLRIYYARVKEFLDKLDD

SEQ ID NO: 278413 - protein, 355 aa, unidentified
MASITLLGIDLAKDVFQLHGLDELGRPQLKRTLRRRALVQFVAKLPACTIAMEACSSSHHFSRKFQQFGHEVKIISPQFVKPFVQGNKNDAADAEAICEAASRRNMRFVATKSVVQQDIQCLHRVRKRLVHNRTALTNEIRSIVGEFGIVFAKKRSALVEGIKGLLNGSCPREELSSEGLTLLQDLYSELLELDQRIENCELKLKKISSQPQCQRLFKVGGLGLLSVTALAVALADPGQFKNGRNFAAWLGLAPRHQGTGGKNRILGISKRGDMDLRTLLIHGARAKLRGINAKCRAERKLDPLEDWAYRLCQRQGYNKATVALANKNARIAWSISAHKTEFESHQAVASLKKGA

SEQ ID NO: 278414 - protein, 359 aa, unidentified
MQRNKISFTGQKIYIGIDVHAKTWEVCVLTDSGYKERHPQQASAKTLFDFLKKHFPDGEYHAVYESGFSGFSTYYALKEYGINCVVTHAADVPTTQYEEVMKTDKVDAAKLARSLRSGDIRPIYIREKENIDDRSVIRIRKTIQKQLSGYKARVKHLLHCNGVEIPERFARPGTHWSRAFIKWLKEDVVLLSSSRLSLDLLVKQVETIRQTLLDATKSIRRLAQTDRYRNNYELLMSIPGIGVSVAMCILTEIYDVKRFRNENQFASYLGLIPTCHNSGEKTASGAKTFRGNKHLGPMIIEAAWIAIYRDYGLGMAYARYKQSMKPQEAIVKIARKMSNIIFSVLKNSRKYEPYRWDKE

SEQ ID NO: 278415 - protein, 314 aa, unidentified
MALQCTFVGIDVSKEWLDLWLAPQKRFERAGNDGAGWAAVIGVLRSLGPEAGIVVAFEATGGYEHGLRRALLEAGFDVRRLNPLRVRLYAKSLGRNAKNDRIDARVIARYAEAADTTPDFLDPARERLAELVSHRRRLVDERVAVGNQTGTLHCVLLQAQNRKRLALIERQIDETDALIREAIGQVPSLVAKVGLLKTLKGVKDVTAIALVALLPELGRISRRAIAALVGLAPFDHDSGKFSGTRSIAGGRAAVRTALYMAARAAARSKSPLADFYKRLIAAGKPPKVATVALMRKMLVTLNAMIRDNQAWKQA

SEQ ID NO: 278416 - protein, 350 aa, unidentified
MMIIGVDYHPSFQQIAFFVEETGECGERQLNHSDGEAERFYRDLRQRGIRVRVGLEATGYSRWFERLLAELGFEVWIGDPAEIKTRRVKKQKTDRKDAQLLLRLMREDNFPQIWVASPENRDLRQLLWHRHRLVQMRTRIMNQLQALAMNEGYRWKKKLFSEQGRAQLEKLSLAPWASRRQELLELLDRMNPTIEELTAAVEREARKRPDVMRLMTHPGVGPLTALAYGLIIGTPTRFQRGKQISNYVGMIPSEDSSAGKQRLGHISKQGNSLLRFLLVEAAQAAARIHPDWRRRYIHLAMRRHKSIAKVAMGRRLAVRLYWMCRNGCEYSQSLEFGSYAGQLGIGHGVK

SEQ ID NO: 278417 - protein, 345 aa, unidentified
MSQSNQYVGLDVSLKETSICVIDDADKIVWRGRADSTPEAITSAVKQHAPHAVRIGLESGQLSNWLFHELRQAGVPVICVDARHAKAALSLKVNKTDANDAFGLAQIMRVGWYREVTVKGLDCQAVRALLVARAQIVSQITTLKNCVRGILKTFGRVLPKGLRSQFAERVRAAIDGHPVLGAIIEPTLRVLEAMRVQLRVYDRAVIYRARSDDTARQLMSTPGVGTVVALAYITGVEDPARFKRSSSVAAYFGMTPRRYQSGEVDHAGRISKCGDGMVRGLLFEAAKVLLSRSARPSALKTWGEALGKRIGAKKATMAVARKLAVILHGMWTTGTTFKWNAEAAA

SEQ ID NO: 278418 - protein, 365 aa, unidentified
MDKEYYTTIGMDVSDRTTKVCVMAKQGINPKIVMETTIPTSKDGLAKFLATQDKSSPVVFETGMHCRWMNEVAEGIGFKVYIANPCRLRMITESKAKNDVNDARMLARIALSDPGLLHPVRLRGKEHQKMLNLHEMRNLLVKQRTGIIVQLRAVAKSMGFRIERSSTAHFHAIDTRAWPKEFRDIVWPMLKNLEQLAVTIKTYEKQIRELAQTPTFKAQVERLMEIRYVGLYVATGFVAVTGGDMDKFEKSRDVGPWLGLVPKQDQSGDIDRQCHITKTGSPFMRRLLVESAQMIVRDSATDTDLKVKGMRFCRRGAKIAKRKAIAAVARSLAVLMVAMLKHPNTPYAPLSERCKMELLSMKASA

SEQ ID NO: 278419 - protein, 327 aa, unidentified
MNQSASNLSILGIDVSKGKFDVALLREGKYKHKRFLNNLEGFKKLREWLAEYKVERLHACMESTSTYGEALAEYLHDRGFMMSIVNPARIKGFAQSELIRSKTDKVDASLIARFCAAMKPSLWTPESKEIRELRSLVRRVDALVEMRQQEINRLDVSDAVIKKTIENHIDYLTKQTDSIKEQINKHIDRHPQLRDKQKLLQSIPGVGEATIHLVLANFANTEKFSNAKRLSAFLGIAPREYQSGHSVRGRRRMSKVGRSSLRKAFFMPALVALRYNPIIVEMKRRLTEAGKPKMLIVGAAMRKLIHIIYGVLKHGKPFDSNFALKNT

SEQ ID NO: 278420 - protein, 425 aa, unidentified
MGTSKVPTFTQGGDLMIYVGIDWADDHHDVAITDDSAQTLSTFQISHDSSGFALLQAKLASFHQPPDQILVALETNRGLLIHELLRSGYSVYAINPKAVNRYKDRYVLSQAKSDSLDALALAHLLRTDRQRFKVLKPFPEDYRLLDRLCQDLRKLVDEKSRISNQITSVLKEFYPQALELFSVDSNIGIAFLRAFPDPQALSTCKKKSFEAFSKKHHYSRPQKVEELWKLVQSPALQSDPVVLKAGRFRLLALLDQLGPLREHLIRYEKEVKAILDKLPEAKSVSSLPGVGDRLAPELTAALGPKASDSKTRFQSAEEIMRLSGCVPVTRQSGKWKAVSLRYACVKSLRRTFRDWAFASLSQSIWARAYYDFYKAMNMPHSTILRNLGKKWARILFAVWVKGIPYDEALYIQSLKNHNVRWALAL

SEQ ID NO: 278421 - protein, 383 aa, unidentified
MHSENIAAYVGLDVHKETLAVAIAAPERLGEVRYYGTINNEAQAVRRLFQKLQGLYGNILSCYEAGPCGFGLYHQLTAMNIKCQVIAPSRIPKSPTDRIKNDHRDAISLARLLRAGELTPVWIPDLTHEAMRDLIRARAAAKRDSRVARQRILSMLLRTDKHYAGKHWTGKHRTWLANQSFSQPSQQIAFQHYCQSLEQIEDRILQLDQEISRLLPEWSLCNLVCQLQALKGVGQLIAITLVAELGDFSRFSNPKQLMAFLGLVPGEYSSGNSIRPRGITKVGNSELRRLLYEAAWSYRTPAKVGAWLIYYRPDSVTQYSKDIAWKAQQRLCSRYRSLTAKGKKSQVAITAVARGVTGFMWDILRSWDIALAAQSSFSQQKQN

SEQ ID NO: 278422 - protein, 341 aa, unidentified
MKMYYVGLDVHKKTVSYCSKSVDGTVIGEGVVAANRAALDHWAKGLKAQWTGGMEATLFTGWIYDFLSPYASVLRVAHPLRLRAITAAKKKNDRIDAATLADLLRCNLFPDCYMAPSNLRELRRVLRYRNLLVREATRMKNKVSGLLMEVGATYDKKRLHGAKYFSELLGNLADVPPSVVELLKMTRVNLHVFQAAQKRLLNALVIHPHLKERVERLQTIGGVGEVMALTWALEIGEPERFPSIADAVSYCGLCSALDESAGKTKRGPLSKQRNAHLQPMLVEAAKLAPRWNAQLAAVHRRELERGANPNWATLAVARKLVAYLLAVDKSGEAFKVQEETA

SEQ ID NO: 278423 - protein, 412 aa, unidentified
MKLFVGIDVSSQDLKVCIMDAGGDTLQAFTVLNNYHGACHLRDQILAHADRIKPSEIHIGLESTSVYSWHPAMFLHGDKLLSERHTKVFTINPKLISKFKEAYVDLDKNDRIDAWIIADRLRFGRLPMTVVAQEQYIALQRLTRMRFHLVHNLTREKQYFLQHLFYKCSAFSAEVESSAFGHAITELLLEKYSLDEVSSMDVADLADYLKDKGRNRFPDPEGVARCIQKAARASYRLSKVVEDSIDIILGTSIEAIRSTQKQIKELDKAIERIIAGLPGENVLKTIPGIGPIYSAGIIAEIGDIHRFDDQAALAKYAGLTWRKNQSGKFEAEETSRIKSGNRFLRYYLVEAANLVKNRDAEFGEYYRKKYNEVTKHQHKRALVLTARKLVRLVDVLLRNDQVYTPRRKVTNA

SEQ ID NO: 278424 - protein, 314 aa, unidentified
MKAQPVFAGIDISKDRLDAFVRSEGASFSQAYTDKGIALLVERLHEVHPEVVLVEATGGYETRIVAALAHARLPVVLINPRQVRDFAKATGRLAKTDRSDAQVLAHFAEAVHPEVRLLGDRDQRELAALMSRHGQLVEMIVAEKNRTHTTTEIVRGRIEAHLGWLRTELESVDRELDDFIRQSPALQRKVEIVTSVPGVGPVLSKALISYLPELGAINRKEIAALVGVAPFNSDSGPHIGKRVVWGGRKQIRSILYMGALVGTRHNSAIRAFYQRLLAAGKEQKVALTACMRKLLTILNAMVRSDAVWCENYRG

SEQ ID NO: 278425 - protein, 342 aa, unidentified
MNLPIRVGMDTSKSVFQLHGVDENEVVVVRRQFRRAEMIRYFERLPPVLVAIESCGSSHHWARLLQSFGHVVKLIPPQYVKAYVKRGKNDAADAEALCEAVTRPSMRFVPVKSKERQAACMLMTVRERLVSVKSQLSNAFRSYAAEFGIVGPAGRQNVTALIKRVLEDNSLPEMAQDLFRLQADEYAAVEARLAKIEAKLMKWHREDEVSRRIATSPGVGPIGSSMLSMKAPPPETFRSGRDFAAWLGLTPKDHSTGGRQRHGGITKAGDSVLRSTLIVGATALLRHIRKGRHKPTPWLASLLERKPPKLVAVALANKFARIAWRLMISGGVYNRPVAAMPI

SEQ ID NO: 278426 - protein, 414 aa, unidentified
MSDPFRFFVGIDLGSASHQVCVVDASGQTLGERGVAHSGADMAALFQWLATLTQGADPQSIAAASEMPHGAMVEAFLERGYAVFAINPKQLDRFRDRFSVAGAKDDRRDAFVAAHALRTDRYAFRPLALGDPRLLRLRELGRAEESLQQDLRRAANQLWQLLQRYFPGLLTLVPAADEAWLWDLLENAPLPEKAARLRPSTLQRILKKHRIRRVSAQQLAELLAQPALPLAPGANAAIAEQVLLLPRLRLLRKQHTQLGRNIETLLEQLAGDESFKQHRDVQILRSVPGVGRIFTATVLAEAAEPLAQRDYRGFRTVSGVAPVTQQSGKTKLVSIRRACHPRLRHAVYHSAARYAQDDPRGQQHYARLRARGCSHARAVRGVADRFLALIFALLTHNQLYDPCRRALLDPAPTC

SEQ ID NO: 278427 - protein, 369 aa, unidentified
MKKDTIFVGLDVHKNSIAIALAEEGREGEVRRYGTIPGDLDSLDKVVRKLVSKGSILHFVYEAGPCGYEIYRHLTVQGFDCMVVAPSMIPKKSGNRIKTDRRDAAELSRLYRAGELTPVYVPRLEDEAMRDLTRSREDAKSAERKARQRLSALLLRHGFRYTGRTNWSLAHFRWISDIKMPHPAQQFALQEYVNAIVECQERVKRLTAQIRTLLPQWRLFPVIKAFQALRGVSVIVAATTVAELGDLTRFESPRQLMAYLGLVPSEHSSGEKTRRGGITKTGNGHVRRVLIEAAWAYRFPARISRVLRDRQQGLPQKVCNISWDAQSRLCNRYRKLLARGKTKQVIVTAIARELAAFMWAMAREVPAEM

SEQ ID NO: 278428 - protein, 345 aa, unidentified
MEHYVGLDVSLKLTAICIVDRTGKIEREGVVSSDPEAIAIFIKSHAPHVARVGLETGATATWLWTELNKLGLPVICIDARHAKAALKMQINKSDRNDAVGIARIMQCGWYKEVHVKDLDSHAVKALLVSRALLVKIKRDLENQIRGLLKNLGLVIGRAKMNVFAVRAAELTEHRPELAAAVVPLLSARAAIEQQIADLDRKVMRLARNNAQARRFMTAPGVGPITALCFLATIDDPTRFKRSRSVGAYLGLTTRRYASGEIDWTGRISKCGDKMLRSYLYEAANVMLTRVARWSALKAWGIRVAKRTGLRKAKVAVARKLAVVLHRMWIDGTEFKWSKEAANQPA

SEQ ID NO: 278429 - protein, 371 aa, unidentified
MVADKKRSKMKGCKMNSIVAGIDLGDRESLTTVLSPIGDVTDRFTFPMNEEGYAYFAGRVPKEARVAFESTIIAYPIMRALKIHGYTDVTVAHPKELAWIVRSKKKNDRADSLKIAKLHMAGMLPESHLLDRDAQNVRDLLVQRAKLGVEIGRLKNSVIGYLKREGLYDSLPRTGDSFSVKRRQAIHSLRFNDDRDLVLGTMMDRLEFLEEQCTPLEDRVKENARLSEDVRLLMTIRGVDFYLASLISSFIGDANRFPSDDHLASFFGIVPTSRDSANVKRRGKMTKDGSSTARWALSIIVDTVMQHNEPIKDYYQSVKNRTGSGKLAHVSTMRKLTRMFYHMLKTREHWKWEDPLLTERKMSRLEMRGGV

SEQ ID NO: 278430 - protein, 342 aa, unidentified
MKVMIGIDPHKATHTAVAIDSNEMMLDELRVRACSSQVKRLTLWADPFPDRVWAIESARGLGYLLAQQLVAAGETVIDVPAALSTRTRLLGSGRAQKNDPNDARSVAITAMRVEGLQRVSADEHAQVLKLLAKRHRDLGQLKSKAACRLHALLMELLPGGMAKEMTVTRANELLNQVVDQDQITQHRVEVAREFVADVAHYEAQMKASMKRLRAAVAASGTTLTDIRGVGVVTAALIIGHTGDISRFASAGHFASYNATAPIEASSGEHRRHRLNPRGNRQLNYAIHIAAITQLRYPCAGRDYYDRRCAEGKNSKEAIRALKRHISNSVYRALVADARRIHA

SEQ ID NO: 278431 - protein, 356 aa, unidentified
MARTSVSSVQQFVKGFEAHPFFIGLDVHKRSYHVALRRMDGKTVTLVCPADPSGLVGVIQRLCIRVGSVVYEAGPTGFGLARTLRAAGIETLMAAPSRIPRAVTAGAKTDRLDCIRLADYGAKGLIRSIAIPSPEQEAKRTLQRRRHDLIDSRRRCKQRIKSLLLYLGLPEPKPSIRWRRGTAEALRALPMDPHARLTLESLLRELAFYDEELRKVDEQLHQMGRQQERLMSCLQSVPGVGDVVATTFMVELFDPERFQRAEEVASYLGLAPMVRHSGEKTPSGRLRPAGQTRLRSLLIEAAWTWRQHDAYARDLYNRFLSRMGIAQKAIVAVARRLAVILWRLYIEGRPYRPAVS

SEQ ID NO: 278432 - protein, 393 aa, unidentified
MRFAGIDIASETHVAAVVDETGEVSVKATPFAEDAAGYAKLLGLLGRPGEVLVAMEATGHYWKNLFAALAAHGYAVALINPLRAHRFAAEDLERTKTDAIDALGIARFAAQKRPAATRLPDCATEELRELVRLRDRLVQDFGDRLRQLHRLVDLGFPEFTRYVKSLDSELASSILHDYPTAQAFRGVSAKRLAHLRYDGRHKVGPELAGELIEAAQRSVGSHHSEPYRIQVRYTCEDLDTLRRRLRGLDRDIDGKLAEHEVGSLLTSIDGIGSQTAARLIATLGNPADFRNAAALASYVGVIPGIKQSGKNKNIRAALTPIGNARLRAALWMPTLAAVRRNPWLRAHYEALRARGKLPKVALVACMHKLLIAVYAVARDRRPFISKPSSAAPT

SEQ ID NO: 278433 - protein, 386 aa, unidentified
MSRPSNILLRAINYDHTLVLAIELSNKSWVLAAQVPGLPQTKAQRTIEPNKNALLAAIDGYRARAAAVGHSVDRVIVTYEAGWSGFWLARWLMPQGVEVHVVQPSSVPVDRRLRRAKSDGIDAELLLRTLLAWLRGEPRVCSMAPIPDEADEDARRSVRERTELLSERVGLTNRIGAILATLGVNDYNPLLQSRRRRLAELRTGLDQPIPPNALAKIERLLARLELVLAQIAELERERDKVPAADVSDRAGQMIQQLTSLRGIGVQSATVLVREGFVRHFSNGKALGSYAGLTSTPYSSGGIDREQGIGKAGNRRLRMVMVELAWLWQRYQPGAAQVAWFHNRVGSNGRRIRKVMVVALARKLLIALWRFVIDGVVPQGAVMKPSI

SEQ ID NO: 278434 - protein, 339 aa, unidentified
MKKRYMGVDLHRNCFTVHTRAEDGSGESREWSIGNLKAFAKTVKASDEVAVEATGNVRLFAQALKDRGCRVVVVNPHQFQVISRSVKKTDEHDAKVLAEFLSKGMLPEVRMKDEVHARVASLAQTRDKLVKLRTTLKNKVNNLLAARGILLRKESLASEKGLAEVLTSPVSELERVELEVLVGEIRHLNESIKKLEGLLRDQGPKLPGWENITSIKGIGDTGASILLSTIGNIEDFADEGKLAAYFGIVPRVSNSNETERSGRITKRGCKLGRTALVQCALIAARYSPYLQKYYRRIAAARGTGKAIIALARKFLGIIYKTLKNNWIFEDFPQFVLVKS

SEQ ID NO: 278435 - protein, 339 aa, unidentified
MRLYAAFDLHSNNSYVGIVDENGKRTFKRRLRNDPAMIRETLQPFKDDIVGITVESTYNWYWLVDVLMDEGFQVHLANPCKIQQYSGLKHSDDEDDAFWLAEMLRLKILPEGYIYPKEQRPLRDLLRKRGHLVRLRTSLIVSLQNILARNVGAKMKTSSLKALKEDRVTPLLAGNDDISLAGKVSKDAIDALTKQIRAIEVAVEKKIKIRKPYDLLLSMPGVGRVLALTIMMETGPIKRFAHVGNYVSYCRKVPAGRFSNDKKKGNGNRKNGNKYLSWAYAEAAELARRFDSEARAYYDRKQRRTNAPIAHSALAHKLSRAAYHIMRDKVPFMPEKTFA

SEQ ID NO: 278436 - protein, 347 aa, unidentified
MKVTTIAIDLAKNVFQVLGMTADAKKVYNKRLNRNQLKELLCNTPACTVVMEACYSSHYWGRVGLQFGHNVKLIPAQHVTPFVRGNKNDSNDALAIFEASSRPNIRFVPIKSEAQQEVLMMHRIRDRLIKQRIACTNQIRGLLVDFGFVFPQGFTAFEQNIWDIINDSEQRPLLRYLLNQVYDEYLQITKQLKDLNKLIKQKVEQTETGQILLSIPGIGHVIASAFEACIDKGQAFNTPKELAVWLGLTPRQYASGNKSQIYGITKRGDSYLRKQLIHGARTVVSHAHKKDDALNQWITQLKARIGFNKTAVATAHKLARLMWILLKKQTRYQAQIGQTAEIILCVR

SEQ ID NO: 278437 - protein, 315 aa, unidentified
MTTIGFDVGKLELVGVRIGKDAKVRERYYIANQPKAIDNLLSILGNKYKHIRIGSEATAEYHRLLALSCIDKNIPFCLINPIVTKQFTRATVRKKKTDVSDALVIAKLIRQGEGRLVSKDDFMASKAILRTANKLSSMHQALSLIKRRFEDNYHNETTTIKIVDHCLSVVEDSIGQIRKQAQAEDEELLKLLCSLPGVGKITANALIAEIGNIERFKNSKSLIAYAGLDPRVRQSGKLLHHNTRLTKRGSPYLRKVLFTAASIGLRHDKELGDYYTKKRNEGRSYKEAVIATARKLTNRAYAVWRERRVYVKTQT

SEQ ID NO: 278438 - protein, 369 aa, unidentified
MEQVTTIGLDLAKRVFQVHGVDAAGAVMVRRALRRRQVLAFFAKLPSCLVGIEACATAHYWAREIARLGHDVRLIPPAYAKAYVRRNKNDPADAAAICEAVSRPSMRFVTVKTEVQQAAAGIHKVREMLIKQRTMLINTLRGLMAEFGIVVAEGPRHISELVAILADPADQRIPAPLHDGLMAIVETLRGLERRIERVEKQIVGWGRGSATCRHLITIPGYGPILSTAMAAMVVNPAAFTSGRHLSASLGLVPRQDGTGGKVKLGPISKRGNGYLRRLLVNGAMSVLCSKRAKEDPWLVKLLETKERKVAACALANKMARIGWAVMMRQEDFRRRRHDQPCPDLGEPGTVLAALKTAARAPAAVACGQS

SEQ ID NO: 278439 - protein, 371 aa, unidentified
MHDTIFVGMDVHKAAISIAVADGARGGEVRHLGNFLNRADHVGKLVERLSKTGGQRLRFCYEAGPCGYVLHRQITALGHECVVVAPSLIPMKAGDRIKTDRRDAVMLAKLHRAGELTAVWVPDAAHEAMRDLIRARATAVRVLGKARQHLQGFLLRHGRVYAGKKGWTLPYRRWLTTVRFDHPAQQVVLQDYIHSVHDAEERIARLTKQIEDLVPTWSMAPVVEAFQAMRGVAFVAAVTVVAEVGDFTRFDNPRQVMAYLGLTPSEHSSGTAIRRGGITKAGNALARRVLIEGAWAYRMQARVSRKLHDRLEGLPQIVRDIAWKAQVRLCSRYRRLVATGKPKVVVTTAIAREMAGFLWAIARQTQIGSPA

SEQ ID NO: 278440 - protein, 425 aa, unidentified
MEVIHRRCSGLDVHKQTVVACVRLVLDDKITREVRTFETTTSGLLLLLAWLTELGCTHVAMEATGVYWKPVWNILSDGDFELVLANAAHIKNVPGRKTDVSDAAWIADLLAHGLIRSSFVPEQEFQELRELLRTRKQLGRQQSSHIRRLQKTLECANVKLDSVITDLVGKSGRAMLQALIAGETDPVKLAALADRRIKASAQELREALRGRVTDHHRFLLHLHLQHIDFADSAIQDIDRNVTALIARMDQEVEAGQTRATFQSLILLLMTIPGIDVLSARIILSEIGRDMSRFPTAGHLLSWAGLCPRNDESAGKRRSTRLRKGDPWLKTLLVQCAWAARRKKGSYFNAQFLRLRGRRGPKKAACAVAASLLTTIYHMLKDGTQFQDLGADHFDRRSKDVRAKRLVAQLANLGFNAKLTPLAQAA

SEQ ID NO: 278441 - protein, 329 aa, unidentified
MLKEDFCGVDVGSVELTVSLHRGGEVVRRSFANTVAGHRALRRLVSRRGHRVRVCLESTGVYGLDLALELAQCEGVEVMVANPRAVRRFAQALMKRGKSDRIDAEVLEQFAARMPFEPWKAPSTSALQLRSVCRRIRVLTCSSTAEKNRLHAARASQTTSTVILEDLEEQILQLGQSVRRLTKEALRIIASQPQLQQNLQLLRTAKGIAQTSAIQILGELSVLSKDLDARQWVAHAGLDPRHETSGTSVAKKPRITKAGNKYLRCALFMPALTARQHDPNLKAFGDHLAAKGKIPIQVVVAVMRKLLVAIHAMLEKQQPFDGKQLFALT

SEQ ID NO: 278442 - protein, 432 aa, unidentified
MKITTQTRRVNPQRELLACFDVSKATLNLFCHYEQDQTSFRLEDQLPNATGPIEQTLGHLQRLAKREGFDALRVLCESTGGYERALLQTAHRLGCRTALVNPEHVCRLKKVESNDTGKTDTKDPRVIDLVARLGKTQQHRRLPEIYQVLRRLTSFYDQEEKTLAAIRTRIEGLIVELFPDYDKSASFTFDTTGRALFQAYGFNPYRIHRAGYKRFQSTIKRRVRFVRFRTLEHLFACAEASVCHGLPAALVETLEARLRVLFSDLLRHEARCAAYKEQIEALGEELKEQGALPRLDEAISGLTLFNLARLLGQTGPLADFPSKRALLRYAGVNLRERTSGQYRGQTRLSKKGRPLLRKVLGQTVFPVLRQDRLYGAYYHKKRQHGMEAQQAIVAVMRKFLGVFWSLARSGAAFDLERFHRSESQYRRYRQAA

SEQ ID NO: 278443 - protein, 333 aa, unidentified
MAKKQVIIAIGIDVSKETLAVCERYENEKRFYDLQNNGREIEKWTKKLKRTGYQGKIVMESTGRHHLPLAVALKNKGLDVRVINPLLSKKYASSSVHKVKTDRRDSEMLSQVALCEERLPETFHSEKREILLKKKISLVAMMDKELQKMKASVKEFNATAQELGFELTVCDQEIMEAIKALEKKKEGLEKEIELIMEEDRNEEVERYSTIPGVSLYGATVFTLFFSSEYNLSPKQWISFSGLDVTIRESGKWKGKGKLTKRGNCYLRKRLYQAAWGAIMHDDSFKSYYNLLRKEGKKYVEALTVIARKLVTIMFNLNLGKQTFDPSKLSFRTE

SEQ ID NO: 278444 - protein, 337 aa, unidentified
MENARSQVGKTNTQVQEARMTQFTFFVGVDIASVSFMARVGTTPWKIVEKPMKFENDEDGFVSFLGWLKEHNLPSEKTVVCMEATGVYGEGLSYFLSANGYTVAVEPPLNIQRKFPVNASKTDELDCQYIAEYACRYADKLSFWKPRAEILEKVKVLLTTRQHFTVQLTGHKNALHALKRKVVSSDLAQQVHQDLVDQLTKHIKTIDKEIHRLIDSDPTLGQTLLLLMTVPGIGLQLAAHLIILMQTTLDPRVLSAFTGISPIQHESGTSVFSTPTSRHYGPPILRKLLYLAVCRRGQCFCETKSQNGYGKTLEFVNEASIGVFYLKILLKFEKQAR

SEQ ID NO: 278445 - protein, 352 aa, unidentified
MENDSTVYVGMDVHKESITVAYALGTGEVELLGKTGTTKTDIDRLCKRLQSKARHVQVVYEAGPCGYGLYRQLVQKEFDCIVCAPSLIPQKPGERVKTDRRDAVKLVRSLRAGDLSAVYVPTVEDEAFRDLARAWMTAKDDLKQARQRLKSFLLAHDVRYTGHADWGPAHRRWVSQYAFGSEWQQFAFEELRRTIEDRLAQCQRVEAALREAVTNWRFYPAVLGLQTMRGVQFTTAVGMLAELGDLSRFEHPRQLMAWLGVTPSEHSSGDKRRQGSITKTGNSYARKLLVEAAWSYRHPARVSADIQRRHEGIPKAIIDRAWDAQIRLCRRYRRLAARGKHANTTVVAVARE

SEQ ID NO: 278446 - protein, 418 aa, unidentified
MGGIREVAKVACGLDVHRSEVVACLITSGTRKRPKVETRRFRTVLAELFQLRAWLVEAGCEVVGMEATGPYWKPIYAALEGHVQLVVGNPLQMKGLKGRKTDQKDAEWIADLTRLGMIKPSFVPPPEFRALRDLTRERRNVIHARTILRNQILKLLEGTGIKLASFISNVFGVTGMGLLRSLSEGQDVRAQLPLLVKGTLRRKLTDLNLALEQPLPEHLREVLAIQLMRHDDLDRVVSHIEAMIETRMEPYHAERNLLLQVYGLGITAVNIILAEIGVDMDVFPTPAHLAAWAGVCPGNRETGGKRISGTTRKGNTYLTTILVECALATVRAKGSYFRSKYHHLCARIGHKRALMAIAHKLIRLIHRLLSRKEPYKDLGETFLDKREKTVKADKLTRRLQALGYRVTLEPLPDAGLIA

SEQ ID NO: 278447 - protein, 453 aa, unidentified
MPGSKKTRGRSSGRLSTINPDAAGIDVGSTFHVVAVPGDRDDNPVRTFRTFSGDLHRLADWLEETGIKTVAMESTGVYWIPVFEILEARGFEVLLVNARDVKNVPGRKTDVNDAQWLQQLHQHGLLRGSFRPRDGVVRLRAYLRHRERMVDYAAAHIQHMQKALMQMNVQLHHVVSDITGVTGMRIIRAIVSGIQAPETLAEFRDVRCAASEETIREALTGNYRPEHVFALRQALELYDFHQLKIAECDTEIEAVLHTLNEERTTPEQPLPSVRHAKGRNEPGFDARPALYTLLGGDLTQIHGFGPYTVLRLVAECGDDMRKWPTAKHFTSWLCLAPRNKISGGRLLSSKTRRSSNRAAALLRIVAVNVGKTQTALGAFYRRLAARTGKAKAVTATARKLAILFYKALRFGMTYVDAGASYYEERYRQRVIQNLHRRARDLGFTLVTDSAANG

SEQ ID NO: 278448 - protein, 459 aa, unidentified
MQKKSQIRSIGIDLGKTTFHLVALGIRSQILVRKKFSRAQLLAYTANLPSTLMGMEAGVGSHFLGRALREQGHQVRLIPAQFVRPFVKSNKNDYRDAEAIAEAVERENMRFVPIKTEDQLDLQALHRVRDRLVARRTSVINQMRAFLLERGISFRKGPASLRRQMPEILENADEKLSARMRCLLDFLWQEWKGLQEQIESLNTDLEQIASSDASCVRLQQIPGVGPLVSTAVVSAIGNGAALKKGREFAAWLGLVPRQWSTGGKPKLLGISKRGNPYLRKMFIHGARAAVLRVKREGSSLGKWMSGLETRAARNVVIVATANKLARISWAVLASGNDYHPSYKASCRFQLDEVVFGDSLLRSLQKNRRRKHSQTTCLKTCGVTRSLTTAAISKDRHVRIIIMRPETILHLRPDTFSQTVSRWYRFFLQFGGGPYMLRQSSLEPTGNSIPFIDGIRGRAF

SEQ ID NO: 278449 - protein, 339 aa, unidentified
MGEYIGLDVSLKETAISIRRDGKRVWRGNCPSDPGLLAEVIRRRAPSVERVVFETGPLSVWFYHSLSAEGLPAICIDARHAKAALDMAANKTDANDADGLAHLAEVGFFREVRVKGYDSMLTRTLVAARNRLVRITTELSNQIRGLMKTFGLIVPPSKGGKFEAHVRRLLVGQDALARIVLPVLQAWRSVRVDAAELGRQLIAGARQSQACRQLMSIPGVGAITASAFTTAIEDPANFRKSRSVGAWLGLTTRRYQSGEVDYDGHISRRGDAHLRGLLYEAATVILTRTHAGSGLRAWGLKLRERVGFKRAAVAVARKLAVIMHAMLKSGQDFDRAVGA

SEQ ID NO: 278450 - protein, 347 aa, unidentified
MNFYTQQHKHYCGIDLHAKAMYVCILDQTGTILVHKNLPTTPEAFLRVIAPYREDMVVGVECIFTWYWLADLCQKEGIAFVLGHALYMKAIHGGKAKNDKIDAHKIAVLLRGGMIPQAYVYPAAMRATRDLLRRRCHLVRKRAELLAHIQNTNSQYNLPEIGKKLAYKANCEGVEEHFPDPSVRKTIEVDIALIDHYDKLLGEVELYITRTAKAQDGHTFSRLQSVPGIGKILALVLLYEIQDIARFPRVQDFVSYCRLVKCAKESNGKRLGTSGKKIGNVHLRWAFAEAAVLFLRHNQPGKEYFTKLEHKHGKAKALTVLGHKLGRAVYYMLTREQPFDLQRFVSA

SEQ ID NO: 278451 - protein, 385 aa, unidentified
MAPPRMPEAVIGLDVGKSSHWACVATRDGEILLSAPVANREGDLDSLFGRFPDALVVVDQSRNIGALALARAKAAGMSAAYLPGLAAHGAARLFAGDAKTDERDAMVIAKTALGIPDALLPVGDPAPTVAAARALAAQRNFLTCENTRSKNRLRSILLESCPAFEALVDLSDGPQLRLMASLGGAWSVADAGPRRAAALTRGAARGKIEALVRSTASSTRPDAAAIAAEDRAVRLLARRISENSAEIDVITAEISALLEGDDTYRCLLTVPGIGPKTASELAISIDIEDFPSHDRLASYCGLAPRNRQSGTSISSVTASRQGNKRLKNLLIFSCNCLTRTEGRWGDYYARCRERGMPHGKALKALARKRLKVIYAVMRDRVPYAA

SEQ ID NO: 278452 - protein, 350 aa, unidentified
MIIIGVDFHPEFQQIASVDTDTGEFQEKRLAHREDAENFYRGLAAMGRAVRIGMEASGQAHWFERLLANLQFELWVGDAAKIHTKRVRKQKTDRQDAQLILTLMLKDDFPKIWVPSWENRDLRQLLWHRHRMVQARTRIKNQLQAVALKEGLRCKKRLWREHGRQELESFQLAPWASRRRRDLLELLDRLNPTITELSQAIEREVENHPEVRRLMTHPGVGPSTALAFVLIIGETERFHCGKQVASYLGLVPLEDSSGSRRRLGHITKQGSSMLRFLLVEAAQVTARSLPEWRSQYFHLMMRRGRKIAKVALARKLAVRLYWMWRKQWDYEQLTKFGSHAGQPGHRHGVQ

SEQ ID NO: 278453 - protein, 409 aa, unidentified
MGMLGVALDPATVVVAVDPGKVMNRVWVSNGAGLLEEPVSLPVARSGIAALERMLAAHAGDPVIAIEATGSLHRAWAAELDRLHPGAIRLFAPSETKAARTQLGSGRFKTDDRDCAALTYLVRQGAGRRQVEEASVEELRAAVRHRRGLVDDRKKAQQRLHDQLNALCPGLSAPAGHGRALSIERPTGQAVLACAVDFAGGPPTRRSLAARSPGRLTKTTAEYWIQRWRDCLPPPPDAKHRAQRLGRDLQRYRMLQTDIADVEQEIAVLLAGTDGQVLTSLPGVAAIRAAAFAAHSLPITRFPDAEHLYSATGLAPAMYESASLRRRGRISRQGLAEHRDALMGIAWGLSMYSPSFAERNAELRARGMAPIEARVALARNACRLIYRMLLTQQRFDEAAYRRGRLSRGR

SEQ ID NO: 278454 - protein, 369 aa, unidentified
MAEAREAFIGIDAAKLRNAVAIADAGRDGEVRFLGEVDASPEGMRRLAAKLAAKYDRLNFCYEAGPTGYGLHRLLTDLGHHCVVVAPSLIPRKPSDRVKTNRRDAITLARLLRAGELTPVWVPDPAHEAIRGLIRARAAAAKEVGIKKRQVGAFLLRHSRLFSRKKAWGARYRRWLQEQGFEHPADQIVLQELVDGVRVAEERLVRLGRAIEEFLPTWSLAPLVEALQALRGVDLVTAATFVVEVGDLRRFKSPRQLMGYLGLVPGERSTGETVRRGSITKMGNARVRHLLVESAWTYRHPPRVGAKKLPKLERVSPTIREIAWKAQSRLTARYRAFVARGKKTTVTCTAIARELAAFMWAVAREVRPA

SEQ ID NO: 278455 - protein, 441 aa, unidentified
MAMRKREEEVVFPNAAGIDVGASSHWVAVPRHATTEPVREFGAMTDDLHALADWLLACGVDTVALESTGVYWIPVYEVLERRGLTVWLVDARQMKYVPGRKSDVQDCQWLQKLMSLGLLRAAWRPGDDVCVVRAVVRQREVLLTEQASWVQRMQKALVQMNVQLTEVLSDVMGVTGQAIIRDIVAGQRDPAVLARHRHARVKASSAEVQRALTGNWREEHVFVLAQALAIYDSLAQRVAECDAKLEALLVPLGHHDVELGGPAKRTGKNTPGFDLRTALARWAGVDLTRINGLAVTSVLTVLSEIGPDLSRFANVKHFCSWLGLCPGSKISGGKVLSARTRRSTNRVRQALKLAAMSLSRNNSALGAFYRRMCARMDKPRANTAVAHKLARMVYFMLTRGETFVDKGQQDYEAHQRQRSIAALRRRATDLGFAITPVEAAA

SEQ ID NO: 278456 - protein, 340 aa, unidentified
MEKRYIGIDLHRNRFTCCIRLANERSYVTEWALEDLGRFMKKLRASDEVAVEITGNTRMFHDAVAPHVTRVVVVDSNQFRVISRSVKKTDANDAQLLALYLSKDLLPEVRMKNKLQAHVASLTQTRDTLVKQRSALKNKVNNILSARGLNLPKEALGSEKRLAEVLTLPFDELVLIELRVIVDQIRSLKKSIAELDKTIAEASSKLEGHTNLMSIKGIGAITSAILLSVIGDVNDFPDEGRLASYFGIVPRVSNSNETERSGRIHKRGTKLGRTALVQSALIAANYSPYLKQFYEQVKARRGAGKAIIALARKFLGIIYRTLKNRWVFEDFPNFVLAEES

SEQ ID NO: 278457 - protein, 419 aa, unidentified
MEEITEEPAELVERVAALDIGKASLVCCVRVPHESRPGARRQEVRTCDTVTPALLELRDWLICQGVSRVVMEATSAYWKPPFYLLEDDIECWVVNARDVKNVPGRPKTDKLDAVWLCKLAERGMLRPSFIPSRAGRQLRDLTRYRRTLTQERTREKQRAEKLLEAQVKLSSVISDIFGAPGRDMLAALIAGQRDPHVLADLARKRMRAKISVLRQALTGHFTGHHAFLLGLMLGRVDALTAQIDQLTTRIEKAIAPFARQVAQLDEIPGIGVTTAQEILAETGTDMSRFPTPGHLVSWAKFAPKARQSAGRSKAAATGKGNPWLGGTIGEAAISAARTSTFLAARYKRVVKRRGKKRALVAVGNSILAIVWHLLSDPDAHFTDLGPDWHDRLAPQRRKRQLITELERLSGQKVTLTDAA

SEQ ID NO: 278458 - protein, 333 aa, unidentified
MNIVGIDISKARFDAALLVGERVRHAAFSNTEAGFGQLLAWLARQSPDPAAPIHACMEATGNWGLDLAAFLHGQSVRISVVNPARIKAYGNSELARNKTDRLDAALIARFCRAQVPPAWVPPAPDLRQLRELVRRCDALKAARVQELNRQKSGFASAAVAASISAHVAWLDAQIEAIMDAVRGLVAADPVLSKNLALVRTITGFGEVSATILLAELPNVEPRGSPDIADFTPKALAAFAGLSPSEHSSGSSVRRPGKISRVGNERLRSTLYMCALSAARTNKALLGFVQRLKHAGKPPKVILVAVARKLLIYAHAVVRTQTPFTSSPNAPCPA

SEQ ID NO: 278459 - protein, 442 aa, unidentified
MAKVYNLNAAGIDISVKEYVVAVPEDREENNVRTFGTFTRNIHLLAQWLKKCKIDTIAMESTGIYWYHLYTVLLDYGFEVFLVNAQHVKNVPGRKSDVNDAQWLQELHTDGLLRACFQPDNLTRSLRNYVRLRKTIIEQMTAEIQRMQKALEQMNIKLNNVIRDITGKTGFAIINAILSGERNINKLANLRDRRIKASKETIMKSLEGNWREEQIFNLQIAYDHYMYLQDQLCKCDVQSQKVLEVMTHDKNNHHDKIELKAKNKTKKNEIRFNVRNYLFDAFGVDVTQIYGIQEITALTILSETGIDLKNKFPTEKGFLKWLNVVPDNNITGGKIISSKVKKRKNKAGQAFRNAAASQWKAQNPIGDYLRTKKSKSAGQQAVVATARKLASIYYKIVTEKVEFDKDVLLKNSEAFLKKKLQNINRIKQKLEDSIHTSENLVI

SEQ ID NO: 278460 - protein, 424 aa, unidentified
MNLTQNDRLKQVTSDTLIVGVDVGSQTHFCRAFDWRGFELSRRVFKFSNTGMGFLTFLRWTEEIMNKTEMKKVIVGCEPTGCYWLTFQKFLQDHDVQLVTVNPFTVNRSMELDDNSPEKSDLKDPKTIALLVKDGRFSTSYLPSGVYAAIREASVCRDQIMKQNVRLSNQIQGWLQKFFPEYFECYADWDSTSGLMLLREAPLPQDILKIGAGGINQIWRDAKVRAAGIKRAQTLVEAAQNSVGLEAGEAARLEIWVLVNDYILKAEQLKRLDEYLEEKVKEVPNVEKLLAIKGVGMSTVIGFIAEVGDIGRFTDPKQIQKLAGLEIVKKSSGKKKGQPRISKRGRRKLRRTMYESAKALMLWNPAFQDVFLYYRNRTKNPLGGMQAKIAVACKAIRVFYVVLQTGCDFDEEKFRKDIIRPEAA

SEQ ID NO: 278461 - protein, 334 aa, unidentified
MRHIGIDFHKATSYITTMNAKGKVVESYEIRNNPETIRELAGSLSSDDQVALEATGHWMYLYEQLESSGAEVVLSHPQATKAIASARLKNDKVDSRMLAHLLRTNLLPRAYIPPREVRDLRELLRLRSSLQRMRSTIKIRLRSILLKTGHDYEGYDILGKSGLAFCRGLEVRECYRVGLEHWCSEGEHLALQLKELDKLLESLSKSNPEAELLMTMPGIGLYSALLILSEIGEISRFKYSDQLVSWAGLAPRVDRSSTKVYRGPITKRGSKYLRWILTEDSHHAVKLSRRFGQKYEKVKSRRGPQKARIAVAAMMLRSIHWMLTHKQPFKDVEG

SEQ ID NO: 278462 - protein, 461 aa, unidentified
MAATRARTKRRQLEQLACVHPNAAGLDIGSETIVAAVPPDRNEQAVRAFATFTPDLHALVAWLLACGITTVAMESTGVYWIAIYELLEQAGITCYLVNAQHVKTVPGRKSDWNDAQWLQKLHMLGLLQASFRPDAEIRSLRVLARHRAELIRHRAPHILHMQQALKLMNIQLSEVLSDITGLTGQAIVRAIVAGERDPATLAQLRNPGCKHTEAEITKALTGTWQDAQIFILQQNLQLYDFYTAQLAACDSEMERYYQAMESRHEKDAPLPDLPKAKPGSRSKNEPNFNVRAQLARIVGVDLVGVMGLSASSAQTIITEIGTDMTRFPTVKHFCAWLGLAPRNDISGGKVLRSRTLKVRSRANQAFRQAAESVARSQSSFGRYFRAMRARLGPEQAIVATAHKIARVVYHLLTTKEPYREECAEEADQKRQERELKQLARRAQKLGYTLNPLAAPPPASSP

SEQ ID NO: 278463 - protein, 329 aa, unidentified
MNFKNVIGIDISKNTIDVCNHLDQKNAQFSNSKKGLQNFYLWVKSSKNEIEDVLFVYEHTGMYSHLITEFLTDKECHYHIAPALDIKRSMGITRGKDDVIDSKRIALYGYRLKDEITPTKSYSKSITQLKSLMSLKAKLIKQRAAYKGTLSEQKNIYKTKDFKIIFEVQEKMIRYITKQIKTLEYQILEVIKSQEALKQSLKLILSIKGVGMQMATTMIIATENFTKFKNWRKFASYCGVAPFPYQSGTSVKGRNKVSQLANKKIKVLIHMCSMVAIQHNPEMKKYYERRIEIGKNKMSTINIIRNKLIARIFAVIDRQTPYVDTMKFA

SEQ ID NO: 278464 - protein, 504 aa, unidentified
MRRQLRRGPGPSSTLITPDHAGNVVGVDPHKRTLTATVVDPRGGIVASEHFRVSGDGHRALEAWARQFGSIVRVGVEGASAWGRHTAIFLIGRGYDVRDVCPNRTAHHDRARQRGKSDTLDSERIARETLAHPLLPKAFKRAGQDAGPDQQTELLAVWWTARCSLLKRRQHLLTESEALLRELPLELTERLPAAKRVRPRLAALPAVTRRRRLDPPTAARVRILAGYREEIANLDAQDRQITRQLDELVAQTGTTLGELCGLSTVSVAELLVEVGDPRRFTEGGFGRFNGTAPLAASTAEGPGEPIRHRYNPGGNRRVNAILYRMTITQLRCEPRAQRIYANARAEGHTKREARRIVKRHLSDVVYRRMVRDLAAHPAQPLLAAKPRAAAARHHLTRRSLDIGASKRFQPLRRKAAARRLTAPMRSARAAPAGWCRRAHAGGGDGTDRWSELPSRRARSSSRRTRPLGPQRSRSRRNAPTGSRTNSPARRSARAGASARSRPGS

SEQ ID NO: 278465 - protein, 313 aa, unidentified
MSFIGIDVAKATLDYACRPMGDADSVPNDDRGIRTLVERLHTHEPTLIVLEATGGYEAAVVAALATAGLPVVVANPRQVRDFAKATGQLAKTDAIDAQVLALFAERVRPAPRPLPDDAAQALDALLTRRRQLVEMLVAERNRLLVARPAVRRDLQQHIRYLERRLREADDDLHTAVKTSPLWRVKDDLLQSVPGVGRVVSLTLLAELPELGRLSHKAIAALVGVAPLNRDSGTLRGKRLVYGGRAPVRAVLYMAALVASKCNPVIRAFYLRLRAAGKPTKVALTACMRKLLIILNAIARSGTPWHPERTLART

SEQ ID NO: 278466 - protein, 328 aa, unidentified
MCTLGIDVSKNKIDLCLLTAGPGGKKKHKVLTNEPAVAHKVIDWLNAQRCVPESVTVVLEATGIYHENLAYGLHEAGVSVCMANPCRVREFAHGMDILNKNDAVDAFVLACYGELKPPAVWVPPSPEVRKLRALLRQRDALREDVQRTVNRLEKANSTSTPQEVIRSLERTKSWLNEELARIEKLITDHTDNDPGLKADLDLLKSIKGVKDQVGREMLALLKDGTFKSASQVAAYLGLTPVEKTSGSSVRGRPHMSKTGPSGVRAKLYVAALTASRWNKQAKAIYERLVAKGKAKKAALGAVMRKLVHLCFGVLKTRLPWDENYVATA

SEQ ID NO: 278467 - protein, 346 aa, unidentified
MEISTIGLDLAKNVFQVHGISATGEVVVRKTLRRSQMLPFFEKLPPCLVGAEACGTSHHWARELAKLGHEVRLMPAMYVKAYVKRGKNDAADAEAICEAVTRQTMRFVPIKSREQQAALSLHRVRSLLIKQRTQLVNMMRSVLAEMGIAIPIGIVKALQMAREIIDGESGLDLPTEAVNVVAMLAAQLLQLHAQLRKLDLRLAALQRSDDRARRLATIPGIGPIGATALAASVTDPSQFSSGRQFAAWLGLTPRQSSSGGKERLGRITKMGDRYLRQLLVVGATALVRYAKEKPGTVDPRFVALLARKPARVASVAIANKMARIAWAVMARGGTFERGHAPMLAAA

SEQ ID NO: 278468 - protein, 280 aa, unidentified
MKTKVSVLGIDIGKNICSLVGLDAAGTVVMRRRATRETLIGLAEKLPACVVAMEACCGAHHLGRVFAAHGHEVRLMSPEYVRPYVKAQKNDDRDAEGIAEAATRPTMRFVELKTQDQLDIQTLHRSRDRLVGERTALINQIRAILLERGIVVPKGKRHLAQYLAVLLDEGSGHTLSERMRRLVDDARTQWRELDKRIAAFDAEFAAFAKENEDARRLATIPGVGALIASALLAAIGKAETFDHGRDLAAWLGLVPRQATTGGKPKLLGISKRATHICAGN

SEQ ID NO: 278469 - protein, 399 aa, unidentified
MFFLTVRERRAGVAKVVIGVDPHKRLNAVVVLNHRGKVLARRQFANTSDGFRELARFSRRWRPRTWAIEGCNGVGKHVAQRLVAAGEHVRDVSTRRAALVRVFAGGNGRKNDDVDAHSIALVGLHAPDLPEVHADDRRVALRLVSNRRKELIGLRTQCVNRLHRDLVVLLPGGAPRALTAEKAKALLAAVRPRDEMGRLRRRLAADQLADLVTLDRKLAAIEAQLKTLVKTTPTSLPELYGVGPVITGIILGEVGDVARFKTRHHFASYNGTAPDDKGSAGHPAYCVNIKGNRKLNHAIHMVAITQIRNSRSPGRAYYDRKLTETKTKKEALRALKRRISDIIYRQLLVDAERQAKAGPGGQTGTTLQSSVTGPTPTAGSSDKPQPGPEPEPRPLAPIG

SEQ ID NO: 278470 - protein, 367 aa, unidentified
MKKNNTTPRSWKRTARKAGPLTIGMDLGDKSSRYCVLEENGEVRAEGSVATTKKAMLQKFAGLKRCRIGIEVGTHSPWVNRLLKHLGYEVIVANARQVKLISQSSRKNDRMDARTLARLVRVDPQLLSPIQHRSEQAQQHLAMIRVRAALVEARTKLVNAARGFSKAQGERLPARDAAAMGVEEMTGLPAGLQAVLRPLLEQAESLTEQIQKADVELEQIARTEYPETALLRQVQGVGLLIALTFVLTLDDPQRFPKSRDAGCYVGLRPRQRESGASQPQLRITKEGDRYLRTLLVQGAHHILGWRGPDTDLRRWGLKLAARGGKNAKKRAIVAVARKLAVLLHRLWATGEVYQPLRKSAAAATQAA

SEQ ID NO: 278471 - protein, 345 aa, unidentified
MDKIIRIGMDTSKHVFQLHGVNAGEEPVLRKRMRRKEMIDFFTTCPPTSVAIEACGGSHHWARLLASFGHEVKMIAPQLAKPYVKRNKNDAADAEGLCEAMARPTMRFVPVKTGDDQAALMLISVRTRLIANRTQLANAIRGYANEFGISAAKGLAHIPMLLERIKAEKTVPELAQELFISQAEEYAELEKKIADVEVKVKAWQRNDERSIRLNTIPGIGPIGSALLIMKTPAPELFKSGRQFAAWIGLTPKDHSTGGRVRLGGITRAGDEALRAILVNGATAVIHHARRSGKASRWLVELLKRKPPKLAAVALANKMARIAWKLMVSGETYSSQSGSALNGCAT

SEQ ID NO: 278472 - protein, 339 aa, unidentified
MTVVTVGIDLAKNVFAVHGVNAAGKAILVKPLVRRAKLLELIATFPACLIEMEACSGAHYWAREFQKMGHTARIMAPQLVSPYRMGGRHGKNDAADAAAICEAVARPNNMRFVPVKSIEQLGQLFVHRAHQGYVSERTTLINRIRGLLSELGIVLPQAFKAFLSGVAQVLEDFPGYCNQVIGDLLNELFHIEEKIKNSEKLIQQLARDNSAAQLLMQFRGVGPMTATAIVASIGNGHDFRNGRQFSAWLGLTPRQQSSGGKARLGRITKAGDSYLRTLLVLGAKSVLLGAAKNDDPVSKWALQLKERRGYGRALVAIAAKNARMCWAMLHLKDEFRFPV

SEQ ID NO: 278473 - protein, 350 aa, unidentified
MRYAQINSKYVCGIDLHARQMYACVMNEKGEILFHRNMRTDFDQFKKKMQPFLPYLSVGVESTFMYYWLADACKDEGIPFYLGHAYYMKTIHGGKTKTDRLDCRKIADLMRTNYYPLAYAYPKEMRGTRDLLRRRHRHSRLRAECYRHIQSLFHQQGLSVNPKDIKNVKTRRDLVKSNLDQDIYPNAQTDLDMIDFLDPVIKHLEQQIRAQAKYHDRASLNILLSVPGIGDIFSLIILYEVYNISRFESHQLFCSYARLVKCERSSAGKHTKGGNQKIGNPYLKWAIADIIIHASHKSQLIGDYYQKLQSRFGKRKAKSVIRHKFGIAIYYMLKNKQVFDEKRFVQTSMK

SEQ ID NO: 278474 - protein, 318 aa, unidentified
MNTKLKQSINVGVDTGKTQLDIHIRPLDIFFSVENTDKGIKKALGIINKYSPERIVIEATGRLEMPFVLACTEANLPIVRANPVHIKRFAGAIGRRAKNDRLDAELIAHYGEAIKPQLTIIKAENIILMSDLVIRRNQLLSMQTMEKNRIQVLPKSLHSTIKPMLTAMKNQITKIESKLVKLIEDSPEYQSKNTILQSVPGIGNIAAASIISNVPELGYITNKQAASLIGVAPITRESGRYKGKRVIQGGRAQVRTVLYMAMMSAMQCNPVFKATYTRLVAAGKPKKVAIIACVRKMVVILNTMLRDGVVWDENIAKN

SEQ ID NO: 278475 - protein, 365 aa, unidentified
MAMTNIKEKNKKRETISFKGQQINVGLDVHKKNWSVSIYLGQQFIRTYHQESNGSILLKYLQTNYPEGIYRACYEAGFCGFSLHRELTSLGIECHVINPSDVPQTSKGMLSKTDASDSRRLGEAFSKNMLRSIYVPVSSDEADRNLIRYRKRVQEDVRAKKQMIKSILNVLGIKIPVEHDKSYWTNNFMTWLKELTVNDVSNKNTITFLVEDVVLLRKRLFATNKQIRIMSQTERYSKVYSLLITTPGVGLITAMTLLTEIGDIKRFDNFSKFNSFIGFCPSEFSSGEHIHKGKITIRCHKTLRSLILEAAWIAMRCDPALTLKYHELLKTKTAKRAIIIIARKLLSRLYTIWKTNTPYEKGIVK

SEQ ID NO: 278476 - protein, 360 aa, unidentified
MEHTTIAVDLAKSVFQVAVSHKAGRVDVERRLSRERFLEYLAKQPPATVLLEACGSAHYWARRLQPFGHTVRLLPAHDVHRYVRRNKTDRTDTKGLLEAGRNDEIHAVPVKTVDQQAIASLHRLRSTWLATRTARLNTVRGLLREFGLVMPVGAQHVVPQVRALLAESSDVPDLMRPSLASACDEIEGIEQHMRAVERQLTTLARERDDVKLLQTVPGVGLLTATALVALVGDARRFPTSREFASFLGLTPREDSSALRRRLGAISKQGDGYLRMLLIHGARSVLLRAKSAGVPSPFQAWARATQQRRGHNVAAVAVANKLARIVWAVWTHQRPYDAAYRPTVTRPTSTTSSPQEDCTEL

SEQ ID NO: 278477 - protein, 366 aa, unidentified
MKKIITVARNRSEIFKQQQLTIGVDLGDRISYYCILDETGNVILEQSVPTTPKGMQQVFSKISHCRIALETGTHSPWVSRLLTQLGHDAIVAHARNVRLITESSRKDDRLDARTLAKLARIDPELLGPVRHRSAKAQIHLTAIRARATLVSARTALVNAARGLTKSYGERLPKCGTEQMNREIAKGLSPELRDVLEPLLREIESLKERIAEYDRRIEQIAKEGYPEVALLKQVKGVGTLIALTYVLTLDDPHRFHRSRDAGCFLGLRPGRRNSGRSEPQMHISKEGDAYLRTLMVQGAHYILGPFGQDSDLRRWGLKLAERGGKNAKKRAVIAVARKLAVLLHKLWVSGEVYEPLRNNHKVVSAVA

SEQ ID NO: 278478 - protein, 318 aa, unidentified
MRNAAGLDISKDTIDAAVVIDDSVQTKKYSNDETGIQQLETWLQTFEDLPVCMEATGNYYEAVADYLAERHTVYVVNPLKISKYAESRFARTKTDKQDAKLIAEYCQTAKEKDLVHRPRPTDDQYRLSRLIAAYAQINQECTAMKNRCEAAKDSEVRAIFKNIIKHLQKQLKTLKTQIQKQTQKPQYQTRIKRLETIPAIGRLTAAVLLQYLTSADFKTPNKFAAFAGLNPQQKQSGTSVKGKEKITRYGNRKLRTALFMPAMVAYRMKAFPAFIARLEAKNKPKKVIITALMRKLAVIAYHVHKKGEDYDPTRYAAA

SEQ ID NO: 278479 - protein, 356 aa, unidentified
MQNKIIKNLDFSGHKVFIGLDVHSTSWDVNILVDEIEHRKFTQPPSPDILCNYLKTHFPGADYFSAYECGFSGYHHHRRLLELGINNIVINPADLPVTDKEKVNKKDPVDSRRISRSLQNKQLKGIHVFDPEHEQFRSLNRMRWIAAKEHRRVKNRIRAFLQYYGITPPAELNPEYWTLVFVNWLNRLKLSDQAGTLSLEYLMNAYQDSKNLLLKTSRHLRQQVKEKYSDIYRRLMTIPGIGPINAICLIAEIGDMSRFKSCKHLASFVGLVPRSHQSGPKDPNCSLTYRSNKYLRATLIEAAWMAMRFDPSLLKYYKGRIPKYKAQVAIIKVAHKVLNRIRYVWLNEKDYQKGVI

SEQ ID NO: 278480 - protein, 449 aa, unidentified
MREPQEIQDEEYEQVVERVAAVDVAKASGMVCTRVPDPSRPGKRVTKVWEVEATTGAITELADHLMRHGIQKVTVESTSDYWRPYFYLLEAAGLAVQLVNAREVKNVPGRPKTDRLDAVWLAKLTERGMLRPSFVPPAEIRQLRDYTRLRVDLTHERTRYWQRLEKLLEDALIKVSSVASTLDTASTRDMLEALIAGEREPGVLAGLARGKMKAKHAALVEALTGRFDDHHAELARMLLDQIDTLTAQIGTLTARIEQLLAAIPAAQGVNADGTTGPGAGSGPDVAVLPAAARLDEITGIGPGAAQVVLAEIGLDMGVFPTPGHLVSWARLCPRTIQSGAKMRSGKTGKGNPYLKGVLGEAAAAAAKTDTFLGERYRRIVKRRGKLKALVAIARSILVIVWHLLADPAARYHDLGAGYWAGRIDKGKKARNHIRQLEALGFTVTLTPAA

SEQ ID NO: 278481 - protein, 343 aa, unidentified
MYFIGVDHHKQASVMTVLDEDGRELKNGRVLNVREKVERFLEGCHPFTAVLEAGRSSYVMADLLRELGGEVKIANALQVKAIAHARIKTDKRDSRTLAHLLRADLIPEIYQRGVWNRRAQRVMRMRAYWVAKQTEVKNKIRALLAQQREEIRLEVEKRESGLFSGKGVEFLTKLPLVDPDKMVLDDLVEGYREAQAHIKRSDGLVRVLYGEIEEAARIDTVPGFAATLSVLVAVEIADIKRFARAADLHSYAGVIPSTYASGERTYHGRITKQGSAWLRWAALEAVYPAIKKDLGLRVLYNRLTKRKGPNVAKIAVARRLLTIIYRVLTEKREYIPDMKTSAA

SEQ ID NO: 278482 - protein, 348 aa, unidentified
MRIIGCDLHARQQTLAMLDTTTGEVVNLALLHEGNSVREFYSKLPRPVLVGIEATGAMQWFLKLMEELGIECRVGHPAQIRAAEPRKQKHDRRDADLILKLLAEDRFPAIWLPSKEMLDLRALLLHRHQWVRLRVRIQNALQAIALANGLRRGPSLWSHDGQAKIAFLPLMPHSADRRNALQTMYQNIESEIEKLNQQVTEQAENRCGARRLMTHPGVGPVTALATEVFLGDPQRFADGKALASYVGIIPREYSSGGQQRLGGVTKQGSPLLRFLWGEAGAHAVRRDPDLKRFYRRKLVQKGLGKARVAVARKLGIRLWIMLRDEIDYQEFCRRGQRQQSGAACGGDA

SEQ ID NO: 278483 - protein, 397 aa, unidentified
MYIVGIDIAKRKHEAAVIDGEGAVIIKPFSFTNNCSGYNRLLAMLAKAKLPLDEVSFAMEATGHYWLALFTRLQKEGFRVQVINPVQTNSIRSFYIRQAKTDPRDALLIAEVIRFGHFSESTLHPENIYELRELCRGRHAIVSMQADIKRKVVALLDQVFPEYETAFTNLFGDTSMAILQACPTPKELSEMPLEDLCHLIEVSSRKRFRTEKAQELQALARNSFGFAMAGDVFSTMIRLYAKHLDFLKQQVREMDRKIAEIMETLDTPITTITGIGPTLGAYILSEIGDISRFSSAAKLAAYAGIDPTMRQSGEYNGVRNRMSKRGSPYLRHAIWLAASSAVLHDPALKLYFQKKRDEGKPYMASVGHACRKMVSIIYAVMRDNKAYTPYIPNEISA

SEQ ID NO: 278484 - protein, 349 aa, unidentified
MNEPYAGRQIVGFDLHRRRSVLVRMTEAGERLETVRISNDPEYLREVMTRAGEAPEVVLEACYGWYWAADTLAELGATVHLAHPLGVKMFSYRRLKNDERDAADLADLLRMGRLPEAWIAPPATRELRGWVRHRAKLVGLRSNLKCQVHGILANAGITVPMSDLFGASGQRLLATADLATESRSRIDSLQRMITALDFEVELFAKLVAGRLRTHPGYQAIQLIPGVGPILAAVFVAEIGDITRFRRPEQLASWAGLTPKHHESDTTVHRGRITKQGSRLVRWAAIEAVQRLPGHTRIGQVRDRVAARRGRNIGVVAAARELIELVFYGLRDHRVHALAVHSPARTPLPA

SEQ ID NO: 278485 - protein, 335 aa, unidentified
MSKKLTAIVSANYFLGCDVSKQKLDVALINVESQELWNDTIPNEATAIASFLLMLNGAYPDETIILVVESTGTYHLPFVETSNALAIPCLIYNPIITKSGIKSSIRGKKTDRTDAILIARMGLRGEGRLYAPEPYLTTKHYARSCQKLSVLGSSFNQYKSHISGLLDGEMTDDVKEVLKSVQSAIKEARTQIYKGLAISAKGDTFRRLQTIPGIGPYIAASLIGEIQTMERFNTAHALTAYAGLDPRIRQSGHTLNNTGRLTKRGSSYLRRSLFIAANIARQHDSGFKTLYDKKRAEGKSYTVAVCVVARKLLSVVRAVWLSGKDYDVRQWPNVN

SEQ ID NO: 278486 - protein, 457 aa, unidentified
MTPHTDYFPDPRPPALPSPQAPALAGPLQVFNPHAAGIDIGEAEHWVAVPPDRVPQPVRRFGTCTADLEALADWLLDCGITTVAMESTGVYWIPLFELLEARGLQVLLIDPRQAKRAPGRPKTDPLDCQWLQRLHAYGLLAGAFRPEDQVRVLRSSLRHRHMLITSAAQHIQHMHKALQQMNLKLTQVVSEITGVTGMAIIKAIVAGERAPMTLAKLRHPKCHHDADEIAKALQGTWRAEHLFALRQAVELSTFSHQQLAVCDQQIAAHLETFADKSAGQPLPPKARKRNKRKANEPTFEARPALYRMAGVDLTALEGIAEGTALVILSEIGTDMHRWPSVKHFCSWLGLCPQHKISGGKVLSRRVRPGAHRVAVALRLAARSLHHSQSALGAFFRRMTARLGTPKAITATAHKLARLVYHLLKHGSAYVQQGLENYEAQYHERKVTTMAKQAKTLG

SEQ ID NO: 278487 - protein, 309 aa, unidentified
MKEQIVYVGVDVAKAFLDVAWEQQSWRVTNDAAGRSALVKRLSQSAGSIQVICEASGGYERALLQALQRGGIKVSLVQASRVRQYARASGVLAKTDSIDAQVLCRFGQAIRPQATAEPKPHQEKLRELESQRRHLSRLLVAEQNRSAQLTDKTLRRLSKGLLTRIQKQIAQIDLLLQQLIAQSPELCAKARKLTALAGVGPRTAALLLAQMPELGQLNRREAAALAGLAPFNRDSGTARGKRAIFGGRRAVRCGLYMAALVATRHNPILAAFYRRLRLAGKPPKLALTATMRKLLIALNSSLKTDPITA

SEQ ID NO: 278488 - protein, 455 aa, unidentified
MPKQKRTRNARTLPVARVLEPNAAGIDIAATEVYVAVPTGRDPQPVRRFSTFTDDLHRLADWLQACRVQSVAMESTGVFWIPLFQILEDHGFRVCLVNARHVKNVPGRKTDVSDCQWLQYLHSVGLLRASHRPTQTICAVRSIWRHRESLVQMAAVHIQHMQKALDQMNLQLHHVISDITGTTGLAIISAVLDGERNPENLATLRDPRIVASRETIARALVGDYRVEHLFTLRQSLQAYRQYQQWIAACDSEIERQLQVLPSNLPDDPKALSKPRDHHKPRRNEPRFDLRSQLYRIFGVDLTAVPGVSSLTAHTLLTEVGPDLRRFPNAAAFASWLGLCPDNRISGGRVLSVVTRKVKNRLTIALRMAAQSLHRSQSYLGQYFRRMRIRLGTPPAITAAAHKLARVLYHLITTRQPYEESTFAAMEERARQRQLLRLTKQAARFGFQLVPGRSVP

SEQ ID NO: 278489 - protein, 354 aa, unidentified
MSQKLNAAIAVIGIDIGKNSFHIVGHDHRGAIVLRQKWSRGQVETRLANLPPCLIGMEACVGAHHLSRKLQMLGHDARLMPAKYVRPYSKGQKNDFRDAEAIAEAVQRPTMKFVATKTADQLDLQALHRVRDRLVGQRTGVINQIRAFLLERGIAVRQGLRSLRSELPGILATRTDVLSPRMLRLIEDLAGDWRRLDERIEGLSSEIETLARQDPACARLMTVPGIGPIISSAMVAAIGTGDVFSKGRDFGAWLGLVPKQISTGDRTILGKISRRGNRYLRALFVQAAWVVLVRVKCWERYGLKSWIEAAKKRLHHNVLAIALANKLARIAWAVLNKGRAFECVKTEETASRPA

SEQ ID NO: 278490 - protein, 363 aa, unidentified
MVSPILAQRTTLSEDFVLLGAIMDTVSLIGIDLGKHCFHLHAQDGSGRMVLRKKLTRNQMFTLLSNFPSCTVVMEACAGAHWIARRLQTLGHEAKLISPHFVKPFRQGNKNDFADAQAICEAASRPSMRFVSPRNEAQQVVSALHRVREALVRNRTGTINQIHAFLLEFGISLPRGMAVMRRLPAVLEAQALPPRLVAVLERLQAHFKYLDEQIGQLEHELLTQLHEDERSERLLEIPGIGPITASVLMSELGDARQYGSARQFAASIGLVPRQYSTGGKPTLLGISKRGDKGLRRLLVQCARVIMLRIERRTDSLGVWVRSLLARRHSNVVACALANKLARIAWAILAKGTHYRSAPAALPA

SEQ ID NO: 278491 - protein, 340 aa, unidentified
MTDVSRIGLDLAKNVFQVHGVDAREEVTVRRPLRRGQMLGWFGKLPPCLIGIEACGTAHYWARELTRLGHTVRLIPPGYVKAYVRRNKNDAADAAAICEAVGRPSMRFVAPKTEQQQAASGIHRVRALLMKQRTAAMNALRGLMAEFGIIANKGMSGINELLAIVADPEDSRIADPLRAGLVAIAATLRALDTQLGTVDKAMAAWGRADKTCRHLNTIPGYGPVLSTAMAARVTNPQGFDSGRHFAASLGIVPRQDGTGGKVKLGPISKRGDGYLRRLLVNGAMSVLRSKQAKHDPWLVTLLASKPLKVVAVALANKMARIGWCVMMRQEDFRVAPVTAA

SEQ ID NO: 278492 - protein, 478 aa, unidentified
MTPVYMGIDASKGYADFALVNDQQIPLAKGFQLDDTADGHQQLITYLQQFVSTHPDVTVFAALESTGGYENNWYRCLASLFGHLPVRVARVNPARVTFNNKANAKRNRTDQISAHDIAEYLATHADKVIYNEPAELAQLRRMWSHIQLLTKQQTQLLNHLQSVLYSSMPELLTFCRNHMPHWLVQVLATYPTYYQIRQALLTEFPFVSERKAHTVLARIERGIGDDDIVSGSIISSVATQILHLDQEIKRAKQQLEKSCQHHDELVTLLRSFKGIGTYTAVGLLVYIGDISRFSSAKKLAAYFGVHPIFKISGDGTCGFRMSKQGAGAVRSLLYMVVFSATRSNPIIRELYARCRKKGMKGSAAFGVCMHKVLRIVYGMLTHKTPFDPELHRRHQERTRQHPAPTPRISNVQRREYDQLAPISRRQHKKRKEQTLSQDEKLVKCGITQSAPSLFGVDNTMITNPTSRINKNTKIKNST

SEQ ID NO: 278493 - protein, 412 aa, unidentified
MKVVHEICCGVDVHAKMLVACLILADGKKEIHSFSTMTADLLRLRDWLVATGCTHVAIESTGVYWKPVFNILEDAVTVILINPDHARALRGRKTDVKDAEWLGDLLRHGLLKASFIPPLEIRELRELTRYRQSLVHEQSAVANRIQKVIESANIKLGQVASDALGASGRAILWELTRGETDPVKLASLAKGKLKEKRSELERSLQGRLTPNQRFVLRESLLHWEELERAEGRVTKEIDQYLKDRPKLSQARDNLDSIPGLATRAAENIVAEIGVEMEGNFPSDAHLASWAGMCPGNKSTGGKRLSGRTRKGNTYLRSALVQAAWGATMKKNCYLSSQYARLAKRLGRKKALVAVGHSLLIIIYHVLQSGQSYTELGGDYFDRNHVEQQRDYFIRRLQMLGLKVSVEESPVAA

SEQ ID NO: 278494 - protein, 346 aa, unidentified
MKKIFIGIDFSKEKFDATVIKAEGVEECAQRQHEVFDNKVSGFRRLLRWVKSVADEPDTGLWLFCGENTGGYSRALCNFLYGSGYDMWLENALSIKRSSALQRVKSDKADSGIIAEYAMRNYDQMRLYKPLGRNLERLREVFLYRHNLVKLKVCITLRKGEKQLTQQKSDISRFMAMSSKHLISEFNKKIAECDKRIQQIIDEDEELQRNFEIITSVPGVGAQNAVCLMVYTDNFSRFDYDSRKIACYYGVAPFGRQSGTSVNTPAHVSPFANKLIKALLTQAALASVNFCPQMAIYYHRLLEAGKKKPVAVNNVKNKLLHVITAMVRKGEKYNPDYDYHAAINAA

SEQ ID NO: 278495 - protein, 415 aa, unidentified
MHPFEQLTHFAGFDWAKEHHDAVIVDRQGATVASMTFAHTTEGWAQWRETIKAYPTLGVAIETNQGAAVEQLLQSQVTVYPMQPKAAERYRDRHVPSGSKTDRTDAWCFADALRVDGQHWRALAPEDPLTEELRLLCRDEVELITQRTALVNQLQAALYEYYPAALEAFDDWTAPFSWEFIAAFPTPQQLVAAGRRRWEKFLHTHKLWRPDTAPKRLEIFGRADRFCGSAAVTRAKSRLALSTARMLRTLQGQLEEYRRAIEQLFARHPDHDLFGSLPGAGDKLAPRLLSELGSDRQEYPDAQALQCVAGTAPVSFESGKIRRAQIRWHCNRHLRHAVHLWSDCSRKYCAWAGAYYRAQREKGKSHACALRCLGQRWLKILWKMWQSHRPYDETLHARNQQRHGSWVLQLRPSKA

SEQ ID NO: 278496 - protein, 421 aa, unidentified
MPNIEIGVDSMVKENFIYVGIDLHKETHTAVMIDCYNQKLGEITFPNRPAAFLKLVTKVKKCNTDGKEVVYGLENAYGYGRALAVWLIDKGYLVKDVNTAISHRQAKHRGAMYRKSDSDDAKAIALATLNMLDKLPDACPNDAYWSLGQLVHRRDNIMKQRTRLVNQLHEQLCIAYPSYKQFFNDISRPTALYFWEHYPSRKYLKGKSVEDLRAELVPVSHNKCSTKTCEKILDAVASDKVKNIDYQDARDMVTLSIVSDLQHYDSQLAEVDKMLEQMYKMLGCTLTTIPGVNVITAVKILAEIGDIKRFSNANKLAQFAGIAPLHLSSSGKGKDVATKQGNRRLQATIYFLAIQMVQVSSKGTPRNSVVRAYYEKRKAEGKTSQQALICISRRLISIIYGMLKHGTEYRMPVVESAGENR

SEQ ID NO: 278497 - protein, 321 aa, unidentified
MQSSDFIGIDVAKATLEIATADATQPTQTLVNDRTAISRWLATLPATAQLALESTGRYHELAVELAGGRGLRVYLVNPRALHHYAKAVHRGAKTDRLDARLIARYLAHEHAQLRPYTPPSAAVQEVLRLQRRRTQLMVTLTSLRQSLADLDACPRQQHDAVRALQQLVAALDARSAELLAADHARTDLAQRLATIPGFGPLNSRHCATLLPHLAAPRLSALISYVGLDPRPRDSGTFQGQRKLSKHGPAETRRLLYLAAMAAARHDDAWKTLKDQLIARGRSATEAFCILARRLLRIAYALYHDGGVYDPAKLTPEAGHAT

SEQ ID NO: 278498 - protein, 356 aa, unidentified
MYGLKHQKEKRSMDHFAGLDVSVKETSVCIVDDTGRIVREVKVASEPEDLLRVLANPIYQFKRIGLEAGPLSQWLFSALAEAGLPVICVETRHMRAVLKAQINKTDRNDARGMAQMMRAGLYRPVHVKTLRSQKLRMLLTHRKLLQSKAIAIDNDLRGTLRNFGLKVGVVRTVKFETRIRELVANFPDIAAMVEPLLIVRRTLREQFCVLHRRLLAIVRDDEVCRRLMTTPGVGPVVSLTYRATVDVPARFRKSKSVGAVFGLTCAKYQSGEVEWSGRISRCGDEMMRVMLYEAAQAMLRSNKWSWLKAWAMQIARRRGKKKAIVALARRLAVIMHRIWVDGTEFRWAREQAAAAV

SEQ ID NO: 278499 - protein, 391 aa, unidentified
MRAPKQRKANDLSRSLSTLDTHRTLIAVVEMSQSSWLVAGMVPGIERQPLKKLCVDESALLKLLHRWRDEATKAGRKIERIAVAFEAGRDGFWLARWLRARDIEAHVIHASSVAVPREHRRAKTDRLDTELLKRAFLGWLRGERDHCKMVAVPTIADEDAKRPNRERQSLVGEESRIVNRMKATLVRLGIRGFNPKLKRAVDRIEGLRTPEGEPVPPNTLAELRRDMERRRFVRDQIQQIERARLERLEHAPSDGPHAMVRLLARVIGVGIETADMLVQEVISRNLRDRRAVARYAGLTGSPDESGNRRREKGLARSGNARVRTGMIQLAWRFLMFQKDSALAQWYRARTQTAPGTRKTMIVALARKLLIALWRFVTTGEAPEGVVLHPAA

SEQ ID NO: 278500 - protein, 446 aa, unidentified
MSEIEQHESVEVFVGVDVGKGTHHAVALDRKGKRLLDSALPNDESKLRALIGRLKEHGQILLVVDQPATVGALPVAVARAEGAWVAYLPGLAMRRIADLHAGEAKTDARDAYIIAEAARSMPHTLRSMKLADNEVAELTMLCGFDEDLAGQINATSNRIRGLLTQIHPALERVVGPHLDHPAMLDLLERYPSPAQLGSLTQKQLTNRLVKLAPRMGKTWAADILQALSEQTVVVLGTQAASIVLPRLARQLTALRAQREEVAKEVERLVLAHPLHPVLTSMPGVGVRTAARLLIDVVSRAFASAGHLAAYAGLAPVTRRSGSSIRGELPSRRGNKQLKRAMFLSAFAALRDPISRAYYTRKISQGKRHNQALIALARRRCDVLFAMLRDGTFYSPPQPRKLIDNHIGAPPPSVDAAPIIGRSRFALLATRTLPKVALWPLALARPN

SEQ ID NO: 278501 - protein, 321 aa, unidentified
MERQETYVGIDVAKAGMDIAVFPSDERWSTLNDDAGIRRLVSRLKTLEPALVLLEASGGLELPIVAALAVEELPVVVVNPRQVRDFARATGKLAKTDTLDAVVLAHFGEAVRPPVRPLRDSETQLLSSLVARRHQLVTMLVSEKNRLSTASTDAVRPSIETHIDWLERELDDLGGNLQQIIRRSPVWREKDDLLRTVPGVGEQVSLTLLSHLPELGTLGHRQIAALVGVAPFNRDSGTLRGKRTVWGGRARVRASLYMGALTASRCNPVIRDFYQRLLAAGKPKKVALTACMRKLLVTLNSILKHRSPWYDVTLKKTHNTS

SEQ ID NO: 278502 - protein, 470 aa, unidentified
MSKKVSRRPASQVEVRSTAALPILRPHAAGADIGAHEIYVCVPGPDNTQLVRIFGVYTAELHSLADWLVENHIETIAFESTGVYWIPLFEVLESRGLECCLISGNDVRHIPGRHKSDVLDCQWIQTLHARGLLKASFRPEADLIALRTLLRHRAQLIEHRSPHILHMQKALTQMNIRLDRVVSDVTGQTGLAILRAIVAGERDPHKLAALRNYRCKKDEDEIAKALTGTWREEHLFVLKQSLEMYDFYTRQLEACDAEIERQYSVTRPNSPDPNPDDQAPLPPNKRNSHSKNLPKDTPIHVRQHLRRLTDVDITAVDGLSLDGAEKIIAEIGTDMTRFPTEKHFCSWLRLSPNNRITGGKVIASSTGKSHNRARQAFLQAAASLARSQSALGAYYRRMRARIGPAQAQVATAHKLARIVYHMLKYKVEYQTLSARQYEQAYRQREIHFLQRKAAQLGLSLTPQPLAEAVS

SEQ ID NO: 278503 - protein, 350 aa, unidentified
MDATTIGVDLAKTVFELALANAAWRVTGRKRLTRPQFERFLSTATSVHLVMEACGTAHHWARVARAHGHRVTLLPAQYVRPYVRRNKTDRTDAEALLEAVRSGQITPVTVKSVAQQELLALHRVRAEWMATRTARLNAMRGLLQEHGLTIARGARTAVTTIPRLLEDAEAPIPDRLRAVLSQLFEEVRAVEANLAALEQDLTTIARANPVATRLMTVPGIGLITATALVATVGHIHGFRTGRRFASWLGLTPSERSSAHRRRLGAISKMGDVYLRCLLTHGARSVLLGAHRTRKRETPPARLQQWALGVQARRGHNKATVAVANKLARIVWAVWTRNVDYEARPALPATA

SEQ ID NO: 278504 - protein, 472 aa, unidentified
MDKCMGLDAHAASCTLAVVSGSGRRLRELVLDTDAGALGKAVRAIRGRRHLCLEEGTHSGWLYEILEPCVDELVVTRGRGTRGVKDDRHDAFALAEALRVGQLDEVIYKLGRRLRLLRELARTHRMISGDLVRVRNRVKATFRARGVATAGRGVYRRSERKAWLAKLDPASRAAAALLLEQLDALVDLDAESTRQLVGESHRHPISRVLETAPGIGPIRAAELMAVVFSPHRFRTAKQFLSYSGLGIVTRSSADWVREGGQWIRAKVPRTVGLNRRHNQHAEDGVQGGGDDGDFVAQLPTASRSLRSYARGRDQAESGQADDRASDRNDRVGDVQERGGVRSAAVELRRDDLIARCRRAEVPWRSPHGRRRSSRVRGRAPIDCLALHHSKRSPADRLGSLGEPNEAMAENAQIEGWFPLRREEQDRCWLRLDFVPGSSAKGGTDRTWRMRSGSLLQAGRSRASVRVDGEVYP

SEQ ID NO: 278505 - protein, 345 aa, unidentified
MDHFSGLDVSVKETSVCIVDNTGRIVREVKVPSEPEALLAVLTNPAYHFKRIGLEAGPLSQWLYSALAEAGLPVICVETRHMRAVLKAQINKTDRNDARGMAQMMRVGLYRPVHVKTLRSQKLRMLLTHRKLLQSKAIAIDNDLRATLRNFGLKVGMVGTVKFEARIKELVENLPDLTVLVEPLLVVRRVLREQTGVLHRRLLAVVRDDDVCRRLMTVPGVGPVVALTYRATVDVPARFRNSKAVGAVFGLTPAKYQSGESDRTGRISRCGDEMMRMMLYEAAHTMLVCSAKWSWLKAWAMKIARHRGMKKAIVALARRLAVIMHRIWVDGTEFRWTREQAPAAA

SEQ ID NO: 278506 - protein, 370 aa, unidentified
MGKRSGRSSELQALELAPGEFVAVGLDVHKSSIHAAVRVNGVETDTWVMPSALKAVVERFALLRGRAHRIVYEAGPTGFALARALQRAQLCAEVVAPGKVPRPANRGSKSDRLDCRKLALYAEKGLLSAVAIPTVEEETARQVTRLREQIVKKIRRVKQQIKGLLLQHGIAEPPGLKTWSLAGVAALRTCRMPEALRFAMDMLLEELQSLTKARRRTEGRMREMSHQRRYMASERVLQSHPGVGAITSMTFLTEIYRPERFANKRELASYCGLAPRVCQSGETRHEGTLIKGGRCGLRRLLVEAAWVWITKDPDAMACYRRLVRNTGKSQKAIVAMARRLAIRLWCMARRGEMYCAGKDHRTLCMEADQM

SEQ ID NO: 278507 - protein, 347 aa, unidentified
MEYVGIDRHKKESQICLLTEAGEVIERRIRTEPQRFAEVLGGRPRARILVEASTESEWVARCLEALGHEVVVVDPNFAPMYATRTRKVKTDRRDARALQEACRLGAYRPAHRLSDAQRHVRGRLAVRDALVRTRTGYIALTRALLRRHGWRVPTESAETFSRRVVALPLPGRLLSEVAPLLAVMRPVNQQLAYSDGAIEAVTRPDARVQRLRTVPSVGPVTAAAFVATIDDARRFRRAHEVEAYLGLVPRELSSGESPRRGRITQAGNTRMRWLLVQAAVSILRLRDPRTAPLRRWATGIAARRGKQIAVVALARRLAGLLSAMLRDGTTYTPRVLPRPAAAAAAPV

SEQ ID NO: 278508 - protein, 321 aa, unidentified
MDNNVYGIDIAKKSFEVVSVNDRGESRVRSYSNTASGHSKFIDTLPPGSLCVMEASGSYYLSLAFSLHQHGINLSVVNPLVIRRYSQMQLRRTKTDQQDARLIAHYGRAHRSLLKLWQPPAAVFLRLQQLLTSINLFQKQLQMLRNQLEAMNQVPIVDPLVRSEQMYLIEQLQTSIKRLEQQMLSLSKAHCSQSYQSLVSIPGIGPKTACLLICITHDFSRFESAKQLVAYLGLCPRIFKSGSSVKGKESIVKMGQALARKYLYMGAFSAMKVNPLCQSMVESMKQKGKHHKVIRVAVAHKLLRQAFAVAKNQTLFNPDFI

SEQ ID NO: 278509 - protein, 340 aa, unidentified
MTIATIGIDLAKNVFAVHGVDHNGKTVLVKSRVTRAALPELIAGLPPSVIGMEACSGAHYWARLFRQYGHEPRLMAAKFVSPYRMAGKSGKNDAADAQAICEAVRRPHMRFVPVKDESQQAMQCLHRTRQGFIEEKTAIYNRLRGLISEFGVIAPQSTDALRRIVSEQKSYLPLQVQQCVDDLLEHIDRIEDKVSEYDRTLSCMAKTDHRSQRLMELKGIGPTTACALVASIGNAHDFKNGRQLAAWLGLTPSQYSSGGKSKLGRITKAGDSYLRTLLVQGARSVLIGAEKRSDSFSRWVCSLVERRGYWSSVVAIAAKNARLCWASLHYGDDFKLYSAS

SEQ ID NO: 278510 - protein, 379 aa, unidentified
MQQDSEIYVGLDTSKLKISVALATAGRDGEVRFFGDIDSTPEAVARLVAKLEKRHGRLAFCYEAGPTGYGLHRQITTLGHECTVVAPSLIPRRPGDRVKTNRRDAVTLAKLHRAGELTAVWIPDPGHEAIRELVRAREAAMAELRRARQQLQSFLLRQGRIYTGRAAWTKAHARWLSELAFTQPALYLVLQEHRQAIADAEKRLERLTRQVSEAAQTWSMAPVVAAYQALRGVAFLTAVTFVAEIGDVRRFDSPRQLMAYLGLVPSESSTGEQVHRGRITKAGNSRARRVLIEGAWTYRHPARMSRLLQERQADLPPAVREIAWKAQVRLCGRYRKLMARGKRQTVVTTAIAREMAAFLWAIGHEVEPTAAAPSDGQGH

SEQ ID NO: 278511 - protein, 343 aa, unidentified
MQTVTTIGFDIAKSVFQVHGVDAVGQVVVRRQLKRRQVIALFQKLRPCLVGIEACASSHYWSRELQALGHSVRLMPPAYVRPYVKRQKNDMADAEAICEAVTRANMRFVPTKTPEQQSGLMLHRTRHLFMRQQTSVINAIGAHLAEFGIVAPVGRRGVEELLRVVADANDKRVPEVVRTCLAALGSQLLSLKQQILDFDRMIMAWHRSNQTSKRLNCIPGVGPLLATALVASVADPKTFRSGRNFSAWIGLVPKQRSSGGREKLGSISKQGDRYLRSLFVTGALAVIRYAKIHGAKHRPWLTALLARRPTKVAAIALANKLARMAWAMMATGARYNYPASLRV

SEQ ID NO: 278512 - protein, 327 aa, unidentified
MEREYIGIDLHKAFFQVCAVTPTGERRWEQRWPTTEAGIAELLKACGMCSHVAVEASSPTWAFVDRIVDHVGAVHVVDSRKTRLKAGYAAKTDRLDARRLADALRRDSVVGIYYPPPAIRDLRELGRYRCHLSRLQASLKQRIQALLLRQGVRVPVKGLFTQQGTAWLETVTLPGWAGAELTGLRQIVSDVRAQLAPVVLQLRTIAARDPIARALDARPGFGAVSSVTVRAEIGTISRFPDGPHLASYAGLVPRVERSASRHWTGRITKAGSPWLRWTLIESAIHQFRRQDDFGRWARQLALRKGMLKARVAVARALCDELFVAWPR

SEQ ID NO: 278513 - protein, 343 aa, unidentified
MQIHSVGIDLGKTTFHLVALGDHGKVLLKKKFTQRQLITFTANLQTSLVGMEACSGAHFLGRALRAQGHEVKLIPAQFVKPFVKSNKNDFIDAEAIAEAVTRENMRFVPIKTDDQLDLQALHRVRERLMARRTSVINQIRAFLLERGIVFAKGPIRLREAIPDVLENANENLTPRMRNLVAMLWSEWKDLELQIVEMNDEVERIASSDDACRRLRQIPGIGPLVATAIVASIGNGAAFHKGREFAAWMGLLPKQHSTGGKARLSGISKRGNRYLRKILVHGARAVVLRSKRDRIAMGAWITSLEMRAPRNVLIVAVANKLARIAWAVLSTGQDYRTVPDTVTA

SEQ ID NO: 278514 - protein, 403 aa, unidentified
MNSVGIDISKGRSTIAVMRPFGEVVISPFEVRHTDSELSELARQLKSLNGETRVVMEATGNYHAPVAKLLHDAGLYVSVINAKLVHGYGNNDLRRVKTDKKDAVKLANYGLDRWLTLPRYVPEEDTRLLLKNCYRQYRQYSKVQTILKNNLISLLDTVFPNANRLFSSPIRVDGSEKWVDFVAEFWHCRCVSEKSQKAFTNKYQRWCRKHGYNFSEAKAHTIHAEACGHIDVIPKSETTKLLVEQAVAQLRATSAALAALKHEMQALASMLPEYPVVMDMFGVGPTLGPQLIAEIGDVRRFYSKKALVAYAGLDAPPNDSGDVTGRHKSMSKVGASSLRRTLFLVMSVYLQTAPLDEPVYQFMDRKRAEGKPYRIYMMASANKFLRIYYATVKAYLESLEHTA

SEQ ID NO: 278515 - protein, 356 aa, unidentified
MSHDVKYIGMDVHKEAIVIAVLNESGKVVMESVIETKASSILQFLHGLRGELHVTWEEGTWAAWLYDLLQPQVQHIVVCNPRRNALLKEGSKSDKVDARKLADLLRTGMLRPVYHGENGLRTLRELGRSYQTIGKDLIRVMNRRKALYRGWGIPCAGTQVYAARCREEWLSKIPQAGVRRRAELLYQQLDGLQALRRNVRPEFLAESRKHKAAKLLRQIPCIGPIRAARLIALMQTPHRFRSKRQLWTYSGLGIETHDSAQFRFVGGQLQRSKKPQQIRGLNRNHNHEMKEIFKSAATRGSCGRGPFHDFYTGLLAKGMKPEMARLTLARKIAAITLTLWKKEERFDVEQLKTQAA

SEQ ID NO: 278516 - protein, 342 aa, unidentified
MAEATIIGIDLAKRTFQAHGAAADGSVTFRKKLSRDRLLLFLASQRRCIVAMEACATAHGWGREIEKLGHTVRLIPPIYVKPFVKRHKNDAADAEAIAEAASRPTMRFVAVKTEAQQARAMLFRTRDLLVRQRTQMINALRGHLAEHGVVAAQGPAHLKRLADAVADDGSGLPTMVRELGQLFLEQIALLDEKTAALDKRLRIAARDAETTKRLQTMPGVGPITAVAVETFAPALETFRRGRDFAAWLGLVPLQRSTGGKQRLGQISKMGQRDIRRLLITGAMAVVRAAVRSRPPEASWLARMLARKPRMLVAIALANKMARGIWAMLTKQEDFRDPVATTV

SEQ ID NO: 278517 - protein, 324 aa, unidentified
MNYAALDLHERTVQCVLKDQDGRIVKESKTVKDEGRILAFLDGTDASVVMESGRNHQHIYDVLKERGYDVTVAHPLMVKAIAYAKVKTDRVDARVLADLLRADMIPESYVPGRDIREIRDLVRRRHYMVKLRTMQKNKVHAELATRWLKYEGDPFTEDGKIYLRSLAIDAVIDYLETIEFLNRKIHQLDEKVRRVVESDKSAKLLMTVPGISYYSALLISSEIADIDRFPDHEHLCSYAKLSPGVRQSGETRHTSKSMGNSMMNWIMIQCTRVHVRKYDSAITRFYQQVSKRRGEKVAIVAAARKLMRAIYIMLKEEQAFRLDG

SEQ ID NO: 278518 - protein, 338 aa, unidentified
MHYVGIDVALKESAVCVMDSGGRVVCEAKLPSDPGTIADFLAARGLEFERIGLEAGCTAAWLFAGLQARGLPAVCLEPRHAAAALRAGFRNKNGRNDARGIADLVRVKSPEAQRHGMILTARGALHQQLVVLENTIRGLLRQGGIRLAAGRTDFERRVREAIGDDAAVRAAVLPLLEARGVAQRQRCALDREIVRIARADGVCRLLATVPGVGAHVALAFRIAVDEPGRFRRSRTVAAHLGLTPPQYSSGETERRGRISRMGDREMRRLLYIAASRLLGRNTGLWCPLKVWAIRLLKAKGLKKARVALARKLAVVLHRVWVTGQPFRWRAAEAPAAAA

SEQ ID NO: 278519 - protein, 366 aa, unidentified
MEKIYIGVDFHARQQTICYLKTETGELVIAELKHQDKEQVRAFYQQFQGPVIVGLEASGYSPWFEALLEQLGGEVWLGHATEIRRRARWRQKNDRRDAELIWDLMVHDEFPRLHRPAVQSREVLRMLRYRQKLIKLRTMTKNSLQAIALQAGLAKGKQLFTRAGQEEFQVVAMSPVLHWQREHWLALLQPFNQQLLETMVWFKAQSKDDVGIQRLRTHPGIGLLTSLCLLHTLQPVSRFRNARKVAAYAGFDPVERSSAERQRFLGISKAGSRLLRYLLVEAVHTAVRYDEDLKRFYQRLAARRGRPKAKVAAARKLLIRAYIMMRDEIDYAEFRRRAVAARLARTGQGPINVPEVLIGQPASPGA

SEQ ID NO: 278520 - protein, 342 aa, unidentified
MSINTLGIDLGKTVCHMVALDEGGQILFRRKLRRDQVLRMTANLPACRIGLEACCGAHHLGHRLNAQGHDVRLMPPEYVRPYVKSNKNDDRDAEAIAEAVGRPTMRFVPLKQEAQLDLQAIHRARERLVRDRTALINQVRGFLFERGITVPQGRLSLGRRLPEILRDDTLGISPRIRLLLSDIRAEWQELDRRIDAFDRELAECARRNDKACRLIEIPGIGVTIATALVAAIDNGAAFSRARDLSAWLGLVPKQHTTGGRPRLGGISKRGNVYLRRLLIHGARSVLPHLAEQSSPVGCWLRGLLSRAHRNVAIVALANKMARIAWVVLRTGTHYEAQALPTA

SEQ ID NO: 278521 - protein, 321 aa, unidentified
MSDTTGPGGATHVGIDVSKERLDVCFIPEGEHFVVANNEAGIQSLLDRLLEARPTLVVLEASGRYERPAAAAIASVEIAVAVVNPRQARDFAKATGRLAKTDKIDAEVLARLAAAVGPRPSVLPDEEAQALQAILTRRRQLLEMLVSENNRLKMAPKAVARRIRAHIKWLEKELQRTDKDLDEAVEENAAWKENEALLRSVPGVGPVLARTLLAELPELGTLDHRRLSALVGVAPFNRDSGTFKGKREVWGGRAPVKAALYMGALVAVRHNPILKEFYEKLLSAGKPKKVALVACMRKLLSILNAVMRDRAPWRPTHVFSP

SEQ ID NO: 278522 - protein, 334 aa, unidentified
MKQKYFIGIDISKQKLDLAVILSDFTIVEERIIPNQQVKIKSYLRGMMKRYHLEAGDLLICVEHTGIYNCPVQKACIELRVDLWQEHALKIKKASADLRGKSDRQDAIRIAEYAVRYQDRINIFNPPTESIEELGNLSKTRETILSQKVGMKNQLNEAKSHDIALFKVLSKMYNPIIKAVDTQLKKISQRVRELLDENHDLKKNVELIKTIPGVGEQTAINMLISTQNFTLFKSAKHLACYAGVVPFLNESGTIVKRARVSKLANQKLKMLLHLAAMAAIRTKSDLKTYYVRKVAEGKNKMSVLNAVRNKLVHRIWAVLQRQTPFVIENNFLMN

SEQ ID NO: 278523 - protein, 348 aa, unidentified
MMIIGCDYHPSWQQICWLDTATGETEEKKLEHASGEAEKFYRQLPGPALIGMESTGNCQWFVEMATTLGHEVWIGDAAKIRASEVRQQKHDRRDAALILKLMLEKRFPRIWAPSGEEKDLRQLLIHRYKLVRIRAQVKNELQHLAMNQGVTKKKKLWSKAGEQVLRALPLKPWASRRREDLFQVREMLDEQIAPLDQAVAEVAEKNQKARLLMTQPGVGPITSMAFVLTMGDVSRFQRGKQVASYLGLIPREYSSGGHQRLGSISKQGNRFLRMLLVEAAQVAVRYDPGFRNEYLHRCHTKAKGVAKVAAARKLAIRLNWMLRTNRGYPEVVRVESRSRVPVVVRHDG

SEQ ID NO: 278524 - protein, 402 aa, unidentified
MIGVGIDVSKLKSTICITNEYGEVLKAPYEISHTETDLKELTRQIKGYGGKNDVGGVMEATGSYSRPVLYYLLDEGIFVSEINPLAMKKYRADINFRGVKNDSIDAMAIAQYSIEKWNKLKEYRRADNEYAAMKALSRQYLSYMKPHVALTQNLDHLIDQVMPGIKKEFDGYDPVTGKDRLADFLEEFRHYDYITSLGPKKFEERFDKWAKKKGYRPRSDKSDKIYSLAKEGIPTLAYDPTSRLLVEQAVAALKGLNQVLYQILTQIRELAEKRPEYEAVRAMSGVGDVLAPLLVAEVGDPRRYHSGDALIACIGIDVPPYDSGQFKASERKITRKGSKQLRKLGYLLVKNLRKIKPTKDTAVYDYYLKKKSEGKKDKQAIVAAMNKFFRIYYARSMEAYRS

SEQ ID NO: 278525 - protein, 452 aa, unidentified
MNNGSGVSRGDRNRNARLSRLREAVPVTNAIVGIDLADRTQMLVVTDHDSKVLARRTFRCKAWDLGAALDWASERAARAGFGGTTVACEPTGHRWMVLAQLAAGRGMSFVCVQPALSSWVRKTEDLTTDKTDDKDAVLIARLTAQLRCYLPEPVDEASAEWARLRHLGARREELLEEHVACVQTVRDLLECVWPAALEAAKWPFRSSTWVAAMAVVIGRDGGDLARTRRLGPARFERAVRAEVARRGGVRPCLRIVRRLFAALDDGAGVLAHRPAVFERIEWTLADWDQARTKLEETEARMTGVLDELGLTRLVTSIDGLSPVGAAAILAQTGDLHRFTSARAVVKHAGLAPRERMSGTFIGRARVTGAGRPGLRVAAWRAVWGCLQTNRVYAASYRHLTGREHHRLTPTQAQTAVAGAILRQLYAVVVHQQARDPAIAVHGTKALEEVTAA

SEQ ID NO: 278526 - protein, 371 aa, unidentified
MDESSKTIYVGLDVHKDAIAVAYAPEDRGAEVVSLGSVGPRQCDIDALIRKLQSKGATLVFVYEAGPCGYWLYRYLTRKGLSCHVVAPSLIPRKPGDRVKTDRRDAITLARLMRSGDLSSIYVPGIEDEALRDLSRGREAAMEDLKRSKRRLKSFLLRQDIRYEGRASWNAAHLRWLSEVVCPTPPQQIVFQEYVRAVTEQSERLQRLERELHEAVKGWRLYPVVEAIQALRGVELTGAVILMTELGDLTRFDTPRQLMSYLGLTPSEYSSGARRRQGGITKAGNTHARRALVEGAWAYRYPAKVSRHLQLRLEKLPPEVQAIGWKAQVRLCKRYRQLTARGKHVNQVVVAIAREMAAFAWAIARLVPRAA

SEQ ID NO: 278527 - protein, 410 aa, unidentified
MEVLYPHCAGLDVHKNTVVACVRHMVNGTVKREVRSFKTTTTELLALSDWLAAEKCTHIAMEATGVYWKPVWHILSDGDFSLVLANAAHVKNVPGRKTDVNDATWLADLLAHGLIRGSFVPDQQTQEMRDLLRTRKQLTRERSRHVQRLQKTLEDANIKLDSEISDIMGLSGRKMIEALIAGESDPERLAQLAHRRIKATPEALREALRGRVTRHHRFLLRLHLQQIDAIDTVISDIDREVDALVEPFRTTILLLTTIPGVDELSACVILAEIGRDMSRFPTAGHLISWAGLCPRNDESAGKRRSTRMRKGAAWLKTTLVQCAAAAARRKASYLQAQFHRLRARRGAKKAIGALAASILTIVYHMLIGGELYHDLGPDHFDRRAKPTHIKRLVTRLQNLGYAVQITPLAA

SEQ ID NO: 278528 - protein, 342 aa, unidentified
MDHFAGLDVSVKDTSVCIVDDSGKIVREVKVESEPEALLAVLRSPTYRFKRIGLEAGPLSQWLFSALAEAELPMVCVETRHMQALLKAQINKTDRNDARGIAQMMRVGIYRPVHVKTLRSQKLRMLLTHRKLLQSKAIAIENDLRGTLRNFGLKVGMVGKVKFEARIKELVESLPDLAELVEPLLIVLRALRQQIVVLHRRLLAIVRDDEVCRRLMTTPGVGPVVALTYRATVDVPARFRKSKAVGAVFGLTCSKYQSGEIDRSGRISRCGDEMMRVMLYEAAQSMLRSKKWSWLKAWAMQIARRRGMKKAIVALARRLAVIMHRIWVDGTEFRWTRETAVA

SEQ ID NO: 278529 - protein, 411 aa, unidentified
MDVFCGIDWAEDHHDIALVDRDGQLLARRRISDDPAGLAALLGLLAGHGDSADDPVPVAIETPRGLLVACLRATGRKVYPVNPKATARYRDRHSVAGRKSDHGDAVVLANVLRTDLHAHRPLPADSELAQAIAVLARAQQDAVWDRVTAHNKLRSHLREYFPGFLAAFADARNGITRPEARVILAAAPAPAAASKLTPAQLRALLKKAGRSRGIDAEAQRLREAFRKEQMRQLPLVEQAMGRQALALLRQLDAACASADDLEAAATESFNQHPDAGIITSFPGLGPLAGARVLAETGDDRSRFQDAKGLKAYAGAAPITRASGKSRSVTRRKVKNNRLASAGYTWAFSALTASPGARAHYDRRRDDGDRHAAAQRNLFGRLLGCLHHCLTTGQYYDETTAFPAQAAPPAAA

SEQ ID NO: 278530 - protein, 537 aa, unidentified
MRKKHRNTRRATRQLAGQKPRGCFQHRVQQVAPERFAIIPVDCGKPEARTRVADFYGNVLLEPFSIDVSRPGLQTAVSRIAQSLQQHKIQDWVCVIETTGRYHRPIQKTFELQQWDTRQVHPFTTSLIRRSTDLGTKTDDIDLAAIHRAAVDGLAMRPELLDASSQQWRLLTRHRRDLVEKAATLKIQLKETIDAYLPGYTRLWNGVSFWESPIPLTIATTFDSPQALRDASVEQFRQATRNGASVIHKDTIDRVRAWTHHAAPPDDASQMHFRRAVSLSKDLHSKWQEIAFFELDLADFLCHSPCLLLLAFPGVHLITASDYGAELGPITNYASSKCIAGRAGLYPARWQSCHTDHPDGPLVARRNRQLRAALMRLARNLDRSNDYFAGLGRAYARRHDDHDPKVVIARAFSRLSYYIIAGEQLFPHPAIQSSDQILQKVLDFYLQRHAASNQVTEALNRAVARLCGPLLRAQHDALDAQHRELKQKRRRTRGVSRLAEILPGVLLRIQQRLQEEANPKRTEPCNEATDEDVTHGS

SEQ ID NO: 278531 - protein, 338 aa, unidentified
MEHFVGIDLHKYVSQLAVLRESRSPSQLRFANDVVTVERVLKKLPKGSKIALEAMGSWWWMVELAQKTGHEVFLSHPKQTKAIASARLKSDKVDALMLAKLLKADLLPTVWIPPENQRHVRELLTHRARLVRQRTAVINELRAVYAKRNIDPQAKLQRAQPQVSGAEDLSGYAPRIVGEDVELLGFVNRQIGGLDKELMKIALEDGSAKRLMTIPGVGAVSAVAMSCWIGEIARFSNAKKLASYFGLAPRVRQSAETERHGHITKEGNRMVRALVIQAALVHTRRGKGPSRKHYLGVLKRRGKPIARVAAANKLLGVIFHMLKEPIDYQEFLRRSDAQ

SEQ ID NO: 278532 - protein, 533 aa, unidentified
MVTKRNSRKSRTIGIEVLGKPKGVIQPRVQAVGPEHFGVVAVDCAKARSKWMLCDFYGKVLIPPTVVEHHRAALELAALQLREALQKHDLRDHIVAVEMTGTYHRPIQRAFRKAGSETRLVHPFASRHYRLPAHADSKTDDHDLEGIFRAAINGFGLAEPEWDDTYRQLQLLARHRRDLVEKRAKLQSQIRQALERCLPGYAALFPEDDLWTRPVAMTVARRAGSAEAIRRAGLPGVMRWLDDEKLRVQDRTVQRLVAWAGTAAEPDPLAPCLTRVWQTLYEDWQAKTRQIQRLEQDLCGFLVKTPYVLLLSHPGINVASASELAGEMGPIEHYAHAKAISGRAGLFPSRYQSDEVDRADGPLARFRNARLRAAWMRVADNLIKCNAHYRGKFQLWKQRGVAPRDIRCRVANRATRTVFQMVGGRRLYEHPSQVDRHYVLDKLLAFHREHDTPPHETLRDLQQAADQLPQSQRAAEGEPLQKTCQRARRSRRPGPQAIGEILVAVLAKLGFGRVQSDVEAPSPNANVSDTSNR

SEQ ID NO: 278533 - protein, 352 aa, unidentified
MQHFIGCDVHTRNQVVAWIDEETGEIKTRRLEHAGEEVQKFYAQFPRGTVVGIEATFPAYWFERLLGELGHELWVGDSARIRASDVRYQKADPRDAEGILDLLRTGRFPRIGVPSLQERDLRQLLVHRMKQVRARTQVKNQLHALAISQGVCRGRKLWSAKGRKELESLALLPWAARRRQELLETLDRLHAQIRELDRAVEEAGREREEVALLRTHPGVGMVVALAFVLTVGAIERFPNARKLISYLGLNPREHSSGGHQRLGSISKQGNTMMRWLLVEAAQTAARLDPQLRRTYQRLKERKVSAVAKVAVARRLAVRLFWMLRTRHNYTQLVHMSGSPSSAVVPAKTGPKV

SEQ ID NO: 278534 - protein, 309 aa, unidentified
MICGVDISRDWLEAELRSKQAHGCFANDAPGIALLAEFCRQHQVQLVAMEATGGYERQAFALLSAEAIAVAIVNPRQVRAFARAMGYLEKTDRIDPGVIAHYAEVKQCVALKPASLEQQRLRALVTRLRQLTELRASQRNQRLLVEDSWTQNNIAELLKFLNQQIRQLEVAIVELIAADPLWRQLDQSFRTIKGVADRTVARLMAEMPEMGLLSNKKIGKLAGLAPLAADSGQTRGKRTIQGGRRCVREILYVVASVVARYEPDFVAFRQRLLAKGKAKKVVRIALAHKLLTRLNAKARLVRQQFPVPA

SEQ ID NO: 278535 - protein, 397 aa, unidentified
MIAVGIDISKAKSTVAVIDSDGTVLASPFTMAHTQPEMEAFVSYLKGLGEPTTILMEYTGHYHYPVLKKLQDEGFPVCIVNPYQMKKYGDVEIHKAKTDKKDALRIAAYALEKSYKLVPYSSMEQKYEDLKFLSRQYSQRITYVAKLKVQLIALLDQTMPGITRILPLNSRNPEKCALLLFIKRFKSFDEIQRIGKARFLASYDVLAKKASERSASSKGLSIYELAVDSITTRGEDPYIWLSQNQCVDLLSATQNAADEIISQMRNIAETIPEYKVLRAMHGVGDRLGPIILAEIGDVHRFHSGKALNSYAGNDAPPYQSGQFESRNHHISKRGSSTLRKACYEVMQALKLTKPQDDPVYLFMLKKEQEGKPFNVAKMAGVNKFLRIYYARAMELYK

SEQ ID NO: 278536 - protein, 315 aa, unidentified
MAMPVPVSKPIVGIDVAKNELVIYHAELDLLETIPNNKAAIKTWLKALPGAIAIAIEATNTYHLEFADLAYEAGCVIYMVGGYELSHYRKGVKVRAKTDALDAQLLARYLRKEADELHPWTPPSPLYRQLLSLFRRRAALVQARVSLTQSWANEPQLKASFAEQMKSMQRLEGLIEKMIGDRLKEAGLLAQLKRCMKVEGIGFLTGARLITTFQRGDFRNADAFIAFLGMDLRVSKSGQKDNRRSLSKRGDSEARRLLHNAAMAASRTAAWKEFYQAQRARGYSTTQVLVMLARKLARVVFALLKGQNEYQPKVG

SEQ ID NO: 278537 - protein, 410 aa, unidentified
MERVIERCCGLDVHKKTVAACIRVPGSHGERVQEVRTFGTTAAELLVLRDWLEAHGVTHVAMESTGVYWKPIFYVLEEAFICVLANAAQIAQVPGRKTDVKDCAWIAQLLEHGLIRGSFVPPAPIRDLRDLTRYRKGLIQERTRQANRLHKVLEDAGIKLASVASDVLGVSGRAMLQALVTGTRDPEVLADLARGNLRKKLPALRQALAGRFRPHHGFLVAQILAHLDYLDEAIDAVSQQLDVVMAPFADEVARLDTIHGVNKRTAEVIIAEIGVDMRVFPTAGHLASWAGLCPGNNESAGKHRSGKTRKGDPWLRAALVEAALAASTRSNRSAFGARYRRIMPHRGHKKAVVAVARAILETTYHLLARQTTYQEAGRDYYERRHAEHVRRRAIQALERQGYRVTLEPAA

SEQ ID NO: 278538 - protein, 414 aa, unidentified
MESVYRSIAGIDVHKKMLAVVIRRQCGERVEYEKRRFGTTRAEIQHLEAWLTARSVSEVVMESTAQYWRPVWYGLEPHFRLHLTHPLKTQAPRGRKSDFRDAQRLADRWSSGDLEDSFIPGAEQRSWRWLTRTRVQLKKKVGVIRSQVEGLLEQGGIKLSAVVSDLFGVSGWAMLEHIALGVTDVEVLAREARGVLRRKEAPLKEALVGRLEPVYQLLLRQHMEQVRLLWRQIEEINQALAEAMQEHLAALHRLSKIPGVDLYAAQELLAEIGPKAAAFASAEQFASWAGVCPGSKESAGVNYSHRSAKGNRYLRRLLCQIAWAAIHTKQTFFAGLFARLKPRVDGKGAAWAVAHRIAKVIWLLLHQEVEYQEKGTAPPNERTLLRKLKRIIKEFGHLGLDVRALLDQQLPAPA

SEQ ID NO: 278539 - protein, 343 aa, unidentified
MLHIGLDLSRRRIEVCVVDGDGGVVDEFGAAPDADGLRVLASRFDGEVRAVIESMTGARFVHDTLEELGWAVEVADAQKVKALAPLTAKTDRIDARVLADLSFRDLIPAIWLPPPGVRGMRELGRFRLHLVKHRTALKNRIHSTLITHGRSVPVSDLFGVTGRQLLEDLELSRAWAESTRMTLEVIDHLDTQIGGLNAQLLQAGVERPDVELLQTAPGIGPVLGFTIASEIGDISRFASPSKLVGYTGLCPRVIQSGETDRRGPLTKHGPRWLRWALIEATIHAARHRVYRDRHQHTIRRLGKQRGPKVARVDTARRLTKAIWWMLTRNEGFAPGGSGPPLAA

SEQ ID NO: 278540 - protein, 325 aa, unidentified
MKNFIIGIDISSKTLDICVKEQQELTHFEIENSQKAIRKFFNKYKNEQVLVSMENTGRYNWNLYEILVKFNFKIYVLNPLHLSKSLGLVRGKDDKTDAYRICLFTEKNKEDLSIWKPTSKVVKKLRILITERNSRVKMKRRLLKQQHDYKLMKDVGLDKELTKLSKQFIAQIEKQKKMIEQKIEAIINEDSELKQQAKLIRSVPGVGKVLSWIMIAKTEGFTKITDPRKMACYSGVVPFEHQSGTSVYRKPRVSMFADKSTKAILHLGAMSAIRLNNDLSVYYKRKVNEGKNKMLVLNNVRNKIIHRIFAVIKNQELYKNPLVLS

SEQ ID NO: 278541 - protein, 313 aa, unidentified
MAEINAAIDVGKDQLQIALGSDGELFSEPNQPRGIKRLVQRLKEAGCVRVLVEGGSYQSVLVAGLRTAELPVVIVNPRRVREFAKSMGQLAKTDRIDARVLALYGERIAPSIRELPAEQNQELRALWVRREQLIEMLVMEENRLEHVPPKAKVVAHNLRAHIDYLRKQIKQADDDLDRTVRNSPLWDKYELLTSVPGVGPVLSIALLSDLPELGRLNRAEVAALAGVAPFNYDSGSLRGQRRIAGGRARLRRVLYVATVAGVRWNPVLKSYYQRLRAAGKPAKVALVASMRKLLTILNRMLATKTPWRPPCPV

SEQ ID NO: 278542 - protein, 342 aa, unidentified
MYYIGLDVHKKTISYCVKDASGQVHQEGKVGATRRELDSWIKTLPQPRTMAMEATIFTGWIYDHLLPHAQQVKVAHPLMLRAIAAAKKKNDRIDAGKIADCLRCDFLPECHMASTQIRDRRRTLRYRHLLVRQMVQMKNRISGLLMETGVSYNKQRLHKVGYFRELLSTNEDVHESIRPLLKLSRDTVVRLQKTEYALVSSLQRDPLLADRVKRLRTVPGVGPITALAWALEIGEVARFRSIRQAISYCGLCGEEKSSADKVMRTPLSKQRNKHIQRVLVEAAKLAPRQDHDLALVYETEKQKGNANRATLAVARKMVAYLLAVDREERDFVPAENYQRAAA

SEQ ID NO: 278543 - protein, 413 aa, unidentified
MEMEVIVERCAFLDVHRDTVMACARTPDGAGGRCEDVIEFGTTTSQLLALADWLAERRVALVGMEATGVYWKPVHWVLEASVPEVWVINARHMRNVPGRKTDVADAIWGASLLEHGLVRPSFIPPEPFRALRDLTRYRKSVIEERARESQRLHKILEDAGVKLSSVASSVLTKSGRAMIDALIAGQRDPEVLAEMAKGRMRSKIPQLQDAMAGRFNEHHALLCKAMLARIDQADTTVETLTVRIDELLDPYEAAVTLLVTIPGVARRTAQVILAEIGADMSRFPTAGHLASWAGMCPGNNESAGKHRSGRTRHGSKWLRKALIESGQAAGRSKDTYLAAQYAQIRGRRGPQRAAVAVGHSILVIAWHLLTTGEAYNDLGGDHFDRRRNSPARQRRLVAQLEAMGHRVTLEPAA

SEQ ID NO: 278544 - protein, 345 aa, unidentified
MEITTLGLDLAKNVFQVHGISSTSEVVVRRALRRAQVIPFFSKLPHCLVGMEACGRSHHWARELTALGHEVRLMPPAYVKPYVKRGKTDAGDAEAICEAVQRPTMRFVPIKSVEQQAALALHRTRDLLVRQRTQLVNMIRGVLGEFGIDLPKGITYALAFVRRVVAGEAPDIPQLAAKVIGALGEQALEGQARIRQLERELLAWHRSSELSQRIATVPGVGLLGATALAATVTDPSQFRSGRQFAAWLGLTPLQNCSGGKERLGRISKMGDKYLRRLLINGMTSIVARNAYRPGVAEARVTALLARKPLRVATVAMANHAARAIWAIMTRGEIYRAPAPPQAVAA

SEQ ID NO: 278545 - protein, 355 aa, unidentified
MPSKTDTAVAHTIGIDTGKNTLHMIGLDEKGAIVLREKVSRTRIAARFVNVPPCLIGIEAGMASHHIARELAALGHKVKQVPPAYSKPFRQVHKNDFRDAHAVAEAVERPSTRCVPIKTDGQLDLQALHRVRSRLVGNRTAVINQIRGFLLEHGIPVRQGHRFLRQQLPQILATRADVLSPRMIRIIGDLVEDWRYLDERIETVTDEIEALARADEGCQQLITVPGVGPIISSAMVAAIGNGAAFCKGRDFAAWLGLVPKQMSTGDRTILGRITKRGNRYLRTLFIQGARAVLLHPTSWARHSFGPWLTTAARRLHRNVLTVALANKLARIAWTVLAQGRRYEARVEPRIEPAAA

SEQ ID NO: 278546 - protein, 402 aa, unidentified
MFYIIYKDMKKVCGLDVHKDTIFLCILAENSQTFLKEYSTLTPDIESMRDLIKEQHVSEVAMESTGIYWIPIWRILQGHVEMKLVNPYFIKQLPGRKTDVKDSLWIATVLQKGLIRGSYIPGQHIQELRQYERRYVRICEHVTRIEQALDRQLHRCNIRITNFTSKVGSASVLGVVRGLIKGESAPDELIKHIHGRITNKHKEKIAASLQGFVSDSDRFILRQNYEELELLTRQQQECVTEMERLCDTLYKEELKLLCSIPGIQKLSAMTIIAELGVDLKTFITAASLVGWVGLRPRNDESAKKIKSRKITNGNKYLRRILVQCAWAITRSKGCWLSGKFNELAKRRSQKKALIAIARKLLVIIWHVLSKHEVYKEYKPRLSKEQKLKRIARLEKQIIELQA

SEQ ID NO: 278547 - protein, 362 aa, unidentified
MEQVQDILVVADYHAENIEFRWFNESTGEERTGKYATTRAGILRQVDQAAREVAPGGRVVWIMESTTGWARVKDLIGPRARFVLANVLQMPLPPKARRRKTDKIDTGRLLREYLHGDLPQSFQPAAWWRQVRRVVDCRQDLVKRQTALKNWIGSLIHHETWEDRKNLWSARGRRRLERLGLSVSDRALVALKLEQLDQLAAQQEQIERRMQAIYEDWPEAQWVDEVRGIGLVTAVSVLAHVGPIERFATAGDLISYAGLAPGVRQSDATCHHGRIGGGGTDTHLRYLVIEATTWLRQIPRYRPTYERVLKKRGKKIARIVVARLFLRSLHKMLKDRLRFNPARSGGTKTATATTTATTGCSG

SEQ ID NO: 278548 - protein, 367 aa, unidentified
MKKVSTVRTEQSRNNCQQELTVGLDLGDRNSWYCVVDETGQIQLEQRVRTSEQALQGVFGAMPRSRIALEIGTHSPWISRLLSQLGHQVIVANARKVRLIGESRKKDDRLDAQTLARLARIDPQLLCPVKHRSAQAQADLTVIRARAGLVRARTGLVNTARGLAKSYGERLRSCNARNLDPEKAEGLSPELQAALQPLLTALESLSEQIAEYNERIEKLAEQRYPQVALLKQIKGVGTLIALTFLLTLEDPHRFRKSRDVGCYLGLQPGRRNSGQSEPQLHISKEGDPYLRTLLVQGAQHILGPFGPDCDLRRWGLKLAERGGRNGKKRAIVATARKLAVLLHHLWVSGEVYEPLHNSQRVALPAAA

SEQ ID NO: 278549 - protein, 459 aa, unidentified
MPKKSSNKAKSQRSRERALLQKVHLNAAGIDIGADVHWVAVPEDRDASPVRSFGVFTRDLILLCEWLKRCQVETIVMESTGVYWIPLYQMLERKGFEVRLVNAHHVKNVPGPKTDVKDCQWLQQLHTFGMLGGSFRPQAQMCVVRSYLRLRDTLSKDCNSLVQRMQKALTEMNVQLHRVISDITGVTGMSILRAILAGERDCLKLAQLRHPQIKSSALDIAKALEGDYCQEHLFALQTALELYDSYLLKIMACDRHVQEALSTFEPKTSAPAPELSRMRSAEKRQEALRRHHLEQMTGADLTKLPGLDLLAVERILSEIGLDISRWPSEKHFCAWLNVAPNNRISGGRILSSKPRKNANRAAAALRLAAQSAMQSKSAIGAFIRRIKSRLGAPTAINAGAHKLARLVYRMLKFGQAYVETGQEAYEKFFKERTLRNLQRKARQLGFQVTPITTPTVPVS

SEQ ID NO: 278550 - protein, 312 aa, unidentified
MSFIGVDVAKATLEFASRPDGTAGVVPNDEAGIQLLVARWQAGPVTLVVCEATGGYEAALVGALAAAGLPIVVANPRQVRDFAKATGQLAKTDAIDAQVLALFAERVRPEPRPLPDAAAQALDALLTRRRQLVEMLVAERNRLLVAAPAVRRDLQHHIRFLERRLREADDDLHTAVKASPVWRVKDDLLQSVPGVGRVVSLTLLAELPELGRLSHKAIAALVGVAPLNRDSGTLRGKRLVYGGRAPVRAVLYMAALVASRRNPVIRAFYQRLRAAGKPAKVALTACMRKLLTILNAMARSGTPWQPRALART

SEQ ID NO: 278551 - protein, 349 aa, unidentified
MGMVGGLDLHRRQITFDVVERESGEEWRGRVWQPDRDRFRRWLRDDVTRRANGGTVALAVEGCTGWRYVVEEIAAAGFDAHLAEPADTQAARGRKRRAKTDRSDARLLRDLLVAGELPASWIPPEQVLEWRERVRLYVSLVNQRTVWCQRIHAELYHHGVAVPEGAIRTVKTRAILADVSLQLSLAARERIAAGYRMIDATDLEAQPLKRELQRFGARQPACRALVDAQYGIGGLIAVAVWTELGDCRRFSRSEQVVRHTGLDVTVDSSDRRRAGGFLSRQGPETLRWALYEAAKNSSHHRSPDHQYYAQVKERHDGKIAAISVARQFARRCYHVLRNLDPDVVYAMPN

SEQ ID NO: 278552 - protein, 354 aa, unidentified
MSSTKYIGMDVHTESISTAVRNSVGKLVMECVIETKASTILQFIDGLRGDLRVTFEEGTWATWLYDLMKPHVTEVVVCNTRKNTSNNGSKSDRIDARKLSEQLYMNNIKSVYHGEHGLRMLKELARSYLTITKDLTRVMNRLKALYRSWGIPCASKEVYAPRHRAEWLAKISEAGVRRRAEHYYQQLDVLRPLHQEARRDLLLEAKKHKPWKLLRLIPGIGPIRAAIVIAVMQTPHRFRTKRHLWTYSGLALETHDSAQYRVAEGQLQRSKKPATVRGLNKDYNHDLKDIFKGAAMRASTAAGPMHDFYEALLAKGRKPTMARLTLARKIAAITLIVWKKEVRFDANYLKPQAA

SEQ ID NO: 278553 - protein, 422 aa, unidentified
MITPRIDSFTAIVGLDWGDSKHDVCIQASTGEGREFEVIAHRPAVVDQWIKSLHDRFGGPIAVALELSKGPIISILQKYDFIVIFPINPSTLARYRSAFKPSRAKDDPTDAEMALDLLLRHPDRFKPLHPQSTDMRTLAKLVEQRRQLVADKIRLTNRLRSSLKEYYPQVLEWFDHIDTPLFCSFFTRWPTLVQARRARPNTLQRFFREHNMRFEKVLASRIEAIKNATPLTLDNAIIMPHRMIAQVLVEQLQLMLSAIKEFDAEIDSIAKVQPDYALFRALPGAGPSLAPRLLVAFGEQRDRFKSAEDVQKYAGIAPVTERSGKKHWVHWRWQCSKFLRQTFVEWAAQTINKSYWAGEYYRQQREKGCTHQAAVRALAYKWIRIIYRCWKTRVPYDEAKHLKALERRGSPLLARQAMLKTA

SEQ ID NO: 278554 - protein, 331 aa, unidentified
MQSKEFFIGIDVSKLTLDVSVHGTKNHIRIVNSSEGFKQLQSWLKSLTISVSDCWFVFEYTGGYEYRLVQFLQSKGILFTRVPGLEIKKSMGMQRGKNDKIDSKRIAEYGYEKRDKLKEHKACSTAITRLKLLLTQRSGFVDDKKAHEHRMKELEAMMDLKAGDPILKHYKQAVDFAVRMIAKTENEIMKIFSKNEAMNKNFNLNTSIPGIGKVNGWMTIAYTENFERFPNGRAYGAYIGVVPYEHSSGTSIKGKSRVSHMANKTLKADLSMAAKASVQHDPEMKTYYERRTVLGKRHMGIMNEVKFKLVLRMFAVVNKGEVYVKNLKSAA

SEQ ID NO: 278555 - protein, 375 aa, unidentified
MSKANTLFIGLDVHKETTDVAWVSDKSAETVHYHGTIPTNLRSFDKLIKNQTAKTSKICVIYEAGPCGFWLYRHLLRRGIECWVVAPALIPKAPGDRVKTDKRDAMTLARLARSGDLHSIYVPDERDEAIRDLIRCREDAMLDFRQARQRLKSFLLRHGHPCTGRQNWTEAYRRHLADINFPQSATKITFQHYIHIVTERYERLQRLELELQSLAESWRWYPLVQRLTVLRGVRFLSAMTLLAELGDLRRFASPRSLMNFVGLTPSEHSSGQRERRGGITKCGNSHARRILIESAWAYRFPARVSRELESRQQEHSIKLQTRSWEIQQRLCRRFHALKARGKEYNKVVTAVARELTGYIWDLAQGFDADMPQQAY

SEQ ID NO: 278556 - protein, 346 aa, unidentified
MLFDIKRVGFDLAKTVFHVTAVNEAGAVVERKRFRRAGLHSYLTLLPPGCLVAMEACGSAHHWARLALHLGHKVLMMSPHKVAPYTNANKNDVNDADGTAEASSRPGMRFVGVKSVEQQHLQQVHRARQLAVKERTAHCNQLHGFLLEYGIESPKGVAVLRRRLAGIVEDAENELPFNGRVLLRDLGEELRRLDERVKQFDAQIVAISQAEPACQRLQAIPGIGPLTATALVAAVGDAAEFRNGRELSAWLGLVPRQYSTGGRPRLLGISKRGDRYIRYLLIHGARAALRTAGRHDNRRSRWALEVESRRGRNIATVALANKNARAAWAILAKAVTFDSNHLGKAA

SEQ ID NO: 278557 - protein, 381 aa, unidentified
MDHHAIAGTPSTKAVLYGALELSKNTWLLALQLPDRAQPSLYPIRGGDTEGLMAKLTAAGDRWAKMSGKAPSIVLCYEAGYDAFWLARFLKARGIECLVVDAASMQVNRRARRAKTDRIDVGMLLRAQIKWGQGDHHVWSVVRVPGVDEEDLRRSHRERDRLVLERTAHINRIKGLLFGQGIRDIKVKSKYKTLQIDKLVTGDGRPLPPRLASEITREIARLALIQEQLATLDRERDQAPTPCKATEKKRVQLMSLTGIGPAIAAVMTREVFYRQFDNRRQVASFLGLATSPHDSGDVERSQGISRAGRGQVRGTIVQAAWLWLKHQPKSAITRWFVQRTAGQSGRIRRIMIVAVARKLAIALWRFLEQGLVPQGATLASR

SEQ ID NO: 278558 - protein, 338 aa, unidentified
MASLTLFVGLDYHQSSVQVCAMDASGKVLVNRRCPNCRQTIVAVVHRFGNRVQAAIEACSGAAELADELVQHEGWSVDLAHPGYVARLKRSPDKTDFGDAQLLADLERVGYLPRVWLAPEPLRELRRLVRYRQQLAQQRRNVKLRIRALLRDLRLVVPAGRSPWTRSWFAWLQTTDVFAEQTRWIMDRHLAELKRLNSEVRDVEARLAIVVKDDAMVQTLMQTPGIGLITAVTLRAEIGRFDRFRSGKQLARFCGLSPRNASSGQRQADAGLIKAGNPQLRAVLMEAAHRLMRYEDRWVRLGHSLKSQGKANSLVVVAVANRWIRWLYHQMPSLDLAA

SEQ ID NO: 278559 - protein, 412 aa, unidentified
MLLFIGDDWAEAHHDVEIVDETGRRLARRRVPEGVEGLSALHALVADHLDEDAEPSDVLIGIETDRGPWVQALIASGYTVYAVNPLQVARYRERHGVSGAKSDPGDAHTLAELVRLDRAHHRPVAGDSEVAEHVKVLTRTHQSMIWSRQRQTNTLRSMLREFYPGALAAFAEDLAGRDALAVLAIAPFPEAGRRLSLAKIIATLRRAGRQRNLETTAERIQAALRAPQLAAHPGVVSAYTASVKALVAVITELVVQTEVLRGEVEAGFGQHPDAEIYLSQPGLGPVLGARVLAEFGDDPTRYADPKARKNYSGMAPITRASGTKRVVLARYTRNRRLADALYQQAFSALSTSPGARACHDRQRDRGATHHQALRALANRLVGILHGCLRHHTHYDETTAWPTYEHIPVPAAA

SEQ ID NO: 278560 - protein, 472 aa, unidentified
MGKGSGNGTTRGDRKRNARRERLRMLLPRDGAVIGIDLAEDKQALAVIDQDVRVLARKTVKVKAFRLGEALDWAAAQARVKGFERVAVACEPTGPRWMQVQRLCAERGLPLVCIQPLVSHIAREQQDYTTHKTDESDCVLIARLAAELHCYIPEELDETWAHLRHLGRRRAQLITAATASVQRIGDFLSVAWPTVTETCAQPVESKTWLAAMQLVTSRCGGQPARLAAMGEEAFTAAVRAAVRDWGGQKAWGPISRRIFAALTDTEGVVAWSRRGLLRRVADELGDLQRIRAQLRATEADMISVLAELGLSRLADIPGLTAVGAAAILAETGDPRRYDGSSSLVKHAGMSPSDNASGAFAGQAHISRRGRPGLRLTVWRAVWPMLQFNPVMAAKYQAMTRAADAAAADAGPQHGTAAQTAARARRAKARVACAASLLRWIYCMVVHGTSWDPEVASGAASCHDAPQHQAEAA

SEQ ID NO: 278561 - protein, 319 aa, unidentified
MQSKLTIGMDIGKAQVVVACHESAFAVLKMANAVPVLRRWLATLPAGSRLGLEATGGYHEPVAELAHSLGFTVYILNPKDVHHYARALGARGKTDRLDAQVIAAYVAEHNARLHAFVPLSADEKLLRELARRRATLVNAKSMLQQSLRVLPGFEREGRELLRAMGSFADRLERKLAEIAARSSERAALVKRLQTIDGVGTLTSIRCATLFTRVPLHRSDAAVAFFGLDPRPHDSGQHRGRRRLSKRGPSEDRRLLYNAAMSAIRTPTWRPLYQHLRNRGLASTEAIIIIARRMVRIAFAMYQNHSDFNPRLVPRPSCPA

SEQ ID NO: 278562 - protein, 373 aa, unidentified
MNNHTTVYIGMDVHKESFTLCCFALGETEPGYVQTIPSVHILVVKYVNRMRKLYGEGTEFICGYEAGCLGYTLYHQLKDCGLECVILAPTTMMEQKGKKRVKTDKRDAKKIAKCLAYHTYSPVHIPTEEDDQVKEFIRMRDDIKANLKRTKQQIISFCLRHGLVYTQTRTTWTQAHLKWLRAQKLAGLYQETLDEYILHLTQLMEKVERLDKRIEDLSNRETYKEAVDHMTCFIGIKRPTALAVITEVGDFKRFATACQFSSYLGLTPGEDSSGDGQKRLSITKAGNTHVRRLLVEAAQSYGRGKAGYKSKALKDRQEGNPPRVIAYADRANERLRRKYYSMLFRGKRANVAKTALARELACFIWGMMNEKLA

SEQ ID NO: 278563 - protein, 332 aa, unidentified
MLTESGYKERHPQQASAKTLFDFLKKHFPDGEYHAVYESGFSGFSTYYALTEYGINCVVTHAADVPTTQYEEVMKTDKVDAAKLARSLRAGDIRPIYIREKENIDDRSVIRIRKTIQKQLSGYKARVKHLLHCNGVEIPEQFARPGTHWSRAFIKWLKEDVVLLSSSRLSLDLLVKQVETIRQTLLDATKSIRRLAQTNRYRNNYELLMSIPGIGVSVAMCILTEIYDVKRFRNENQFASYLGLIPTCHNSGEKTASGEKTFRGNKHLGPMIIEAAWIAIYRDYGLGMAYARYKQSMKPQEAIVKIARKMSNIIFSVLKNSRKYEPYRWDKE

SEQ ID NO: 278564 - protein, 357 aa, unidentified
MKITKKKVIGKAYVGIDVHKTSWKVCVLSSGGFKKEFSCNPQVEALVASLENMLPDFEFQCAYEAGFSGFWLADGLNETEGFNCIVVNPADIPTSDKERAQKEDKRDARKIASQLKAESLEGIYIPSAEDIAFRELQRLKSTITKDLVRAKARIKSFLFRSGINITSQEFPDSKQHWSARFIKRLNELPIENSALRFTLTQLVQTLINLREQQKTVLLELRTQIRNSKKEKMHEALCKITGIGEITSATIISEVIDINRFSSYEKYHSFIGLVPSTNSSADIEVVRGITNRANKRLRKVFVESAWIAIRKDAELHHLYHSLKMRMKPNKAIIRVAKKLANRVRFTLLELENEMLITT

SEQ ID NO: 278565 - protein, 421 aa, unidentified
MDIMHERVAGLDVHKVMIVACVRLMAGGTVHRECRTFDTTTAGLLTLLSWLTESSCTHVAMEATGIYWKPVWNILSDGPFELIVANAAHIKNVPGRKTDVNDAMWIADLVACGLVKASFVPDEPIQDLRTLLRARKQLTREQASHIQRIQKTLEAANIKLDSVISDIMGVSGRRMIEAMMAGIRNPTRLAELADSRIKASPKALYDALHGRLTDHHCFMLKLHLTQYDSLAAAIAQIDQEVDALVTRMEAAAGQATFRALILLLCTIPGIGPLAAVTILAEIDCDMSRFPTAGHLLSWAGLCPGHNESAGKRKSSRLRKGDPWLKTIMVQCAWAASRKKDSYYKAQFHRLRAKRGPKKAICAVAASMLTAIYHMLRDGTEHKDLGLNHFDRRSNEVKAKRLVAQLAKLGYHTSLQPLAEAA

SEQ ID NO: 278566 - protein, 361 aa, unidentified
MSESMALVGLDVHQAQTVAAVLDPGTGELRVERLRGEPASVVPVFLEELDRPVSAVYEAGPTGFALARIAERRGLDVRVVAPGSIPRAPGDRVKTDRRDAKRLVRLFAAGELGFAFVPSETDERFRDLVRCIEDARKDLMRSRHRLSKFLLRRGHRFPCKAWTQPHEKWLGKLSFEDTVSEATFVDYLCAVQGLVQRRRVLIEALQAAVPESSHSKMVARLRCFRGIDTLTAAGLCAEVGDFTRFAKPALLSGFLGVVPSEYTSDDKRVQGQITKAGPPHARRLLVEAAHHYRHRPAVGLGLQARQAGQDPRVVQIAWRCQRRLHERWMHLAGKRGKRTGTVAIACARELAAFCWEAATLD

SEQ ID NO: 278567 - protein, 391 aa, unidentified
MSMYFIGIDISKYKHDCCIISAADQKVVSKVTIKNNKAGFDELLTIINSLSNPEDIRIGFESTAHYALNLELFLENSLLTFMEVNPVLISVYKKSKTLRRTKTDSVDCESIARWLMTVEYKPHSKGFYHAYSLKSLTRLRDKLIRQRSFYLVKITNVLDHTFPEFKPFFNERFSKTALYLLENYGSAEKMARMNSASYEKLRSLSRGKFSPQQFLKLKALAANTVGVNNSIFDVELNSLLSLYKSLAKEIDTIEKEINKLIEEVHPHYMSIPGIGSLSAAVIYSEYGDISNFSNPGQMLAFAGIEPGVNDSGTESHGGRMVKRGSSQLRYTLINCCLPLIRFDMTFATYYAKKRAEGKPHRVAITHVAKKLIRVIYALERQNTDFCVQKLR

SEQ ID NO: 278568 - protein, 516 aa, unidentified
MSHGTTKLQHAQASVVPDRTPAKAGTGRTHQRLGKPQLSPGQQASVDQIRGARRFADQVRAEAEACARVASLPIQHAHAAGIDAGDTTHWVCVESTADGSDTVREFPAHTPGLRQIVAWLRQCGVTTVALEASGVYGHVLFLTLLEAGLTVVMTSPAFTRQIKGRPKTDRRDCQWIQRLHKHGLLPSVFQPDEATQTLRDYVRQRANLVRLSGQHIQRLQKALQLMNLKLTTVLQDVTGMTGLKIIRAILAGERDPQVLAKLRDRRCQHSVAEIATALDGRYRPEHVTELRCCFRLWEKYQEVIAELDQVIAAQLRTMARATELPPLPSKPRVRGRRPHDPGFDARTALYYATGVDLTAIEGIDEMHALTLVSELGCDYTKWPTVKHFTSWLGLCPNWKKTGGEVKSSRTRRGKNRAAHALRLAAWSLMRSKSYLGAYLRRQRSRLGAPKAITATAHKLARILYNLMRYGVAYAKQTEAAYAEQVRERLEKQLRRRAKELGFELKPITPPTPTAEQ

SEQ ID NO: 278569 - protein, 402 aa, unidentified
MNAVGIDVSKGKSMIAVIRPFGEVVVSPFEVPHTDSELSKLAKLLKSLNGETRVVMEYTGNYHAPIARVLSDAGIYVSAVNAMLIHDYGNNSLRRAKTDKKDALKLASYALEHWLLLPRYFPEEDTRLMLKNCYRQYEQYSKLRTMLKNNLISLLDQVFPGANRLFSSPRRADGSEKWIDFIAAFWHRECVCSHTENGFTKRYHKWCRKHGYNFSEGKAQDVYYAALGCVSVMPNTDTTRLLVEQAISQLRATASALAAIQQQMDALAASLPEYEVVMQMYGVGPALGPQLMAEIGDVRRFHSKKALVAFAGIDAPPYQSGQLNVQNRSISKRGSSSLRRTLFIVMSVILQNSPADEPVYQFMDKKRAEGKPYRVYMMASSNKFLRIYYAQVKEHLDLLGAA

SEQ ID NO: 278570 - protein, 375 aa, unidentified
MKDSQKFIGLDVSKDIISVGIAEEGRGEPRFHGNIQNTPESIRKLFKKLGDPEKLLVCYEAGSCGYCIYRQLLSMDIECIVVAPTLIPKRAGDRVKTDRRDALRLAQLLRAGELTSVWVPDENHEALRDLIRARFDTREDLQRVRQRLVHFLLRHEIRPPQGVKNWTVKYRTWLNSLTFEKQSLRIVFQEYFHSIYEVEERMKRIETQIHEEAIGSEHAPVIQALQTLRGIAEITAVTLVAEVGQFSRFSNPAQLMSYAGLVPKEYSSGSNRWQGSITKVGNSHIRRSLVEVSWSYRHRPSLKGELKKRQIGQPLEAQRIAWKAQHRLNLKYSRITARGKTGKFAVVAVARELIGFIWAIGCSIEGTQLSQSKVA

SEQ ID NO: 278571 - protein, 395 aa, unidentified
MLFIGMDVAKDYSIAQGLDREGRRLFNVEFSMDGEGFSRLLSMVNTHCEDVSKVTVGMESTGCYHINLFAFFSSKGIATVVINPLLITHFARLSLRKTQTDQKDALTIAQFLLAHREGLSQIVYSQKGQDLKDLARERESLAVMIAGLKNDTRRVLHLTFPELEHHCKLFTETMLPFLIKFPSARVIRTTQPKEISKTLIHIKGKRKRVFISAEEIIQLAKNSVASDSAANELILSEKIETLLYLEEKKKKITEALIKACQSMRVDELEIITSIDGISDITGSTFLAELGDIRTFKSHKHVIAFAGIDPSIHQSGQYEGIGRISKRGNRHLRRVIFLMTLCVVRSRNVFREYFLRRKGEGIPAKKAILATAHKLLRVLFAMLSRKSYFQKEVVEA

SEQ ID NO: 278572 - protein, 397 aa, unidentified
MIAVGIDISKAKSTVAVIDSDGTVLASPFTMAHTQPEMEAFVSYLKGLGEPTTILMEYTGHYHYPVLKKLQDEGFPVCIVNPYQMKKYGDVEIHKAKTDKKDALRIAAYALEKSYKLVPYSSMEQKYEDLKFLSRQYNQRISYVAKLKVQLIALLDQTMPGITRILPLNSRNPEKCALLLFIKRFKSFDEIQRIGKARFLASYDVLAKKASERSASSKGLSIYELAVDSITTRGEDPYIWLSQNQCVDLLSATQNAADEIISQMRNIAETIPEYKVLRAMRGVGDRLGPIILAEIGDIRRFHSGKALNSYAGNDAPPYQSGQFESRNRHISKRGSSALRKACYEVMQALKLTKPQDDPVYLFMLKKEQEGKPFNVAKMAGVNKFLRIYYARAMELYK

SEQ ID NO: 278573 - protein, 345 aa, unidentified
MRPMYYIGLDVHKQKISYCVKDSSGCIHSDGWIPATRHDLDCWMKNLPRPWSAAMEATMFTSWIYDHLKPHATALKVAHPLMLRAIAAAKKKNDRIDANKICDCLRCDFLPECYMAPTAIRERRRTLRYRNLLVRQLVQMKIKISTLLMEAGVSYNKQKLHKAGYFRELLASNPDINESLRSLLRQCREMVVRLSKMEAALIQSLQQDRLLVERVERLMSIPAIGPITALTWALEIGEVRRFSSIKKAISYCGLCGAEKSSGDTVRRTPLSKQRNKHLQTTLIEAANMAPRYSPTLALLYDREKQKGNANRATLAVARKLVAYLMAVDRGQTHFFVIDQETRTAA

SEQ ID NO: 278574 - protein, 457 aa, unidentified
MSRKSKRTKGIEEARPFAGLSRVNEDAAGVDIGAIEIVACVAGDENTQIVKAFGNYTVDLQALGQWLKEHKIKTVAMESTGVYWIPLFEVLESMGFECLLISSRSLRRVSGRKSDIIDAQWIQTLHSYGMLESSFRPQADLVALRTLLRHRAQMLEHRAPHILHMQKSMLQMNVQLSQALSDITGETGIAIMRAIVAGERDPEKLAAYRDRNCKKSAEEIGQALTGTWREEHIFVLKQSLEVYDFYTRQVEACDAEIDRLYALTRPDWDGGELKPPSEKKRNSHSKNAPKNQKEIRQHLKRISGVDLSAVDGIGVGVAQTVIVECGTDLSQFPKEGNFCSWLGLAPKHEISGGKVLKNKTLKTKNRAGQAFRMAAQSVKSSECVFGMMFRRFRARMDNRQATVATAHAIARVVYRMLKYKVEYEAIDVTEYEKQYAEQQIKYVKKKAAKLGFQLVPA

SEQ ID NO: 278575 - protein, 371 aa, unidentified
MKASITYAAMDTHKKDHKVALMNPQTGELQQFTVRNTAKDITQMVRKIKKQAPGDIHICYEAGVCGFVLKRRLDALGFRCSVIAPSLVPTKPGERIKTDRRDARKLLSHFMAGQLTEVYAPDEQQEAARELARCRQAAQENLKRIRQQLVKFLTRHGYIYRDGRHWTQRHMQWLNSIEFDIADLRDVFDSYYTEQQHCMQRLRSLDRQIEQLAERPQYKEMVGLLRCFKGIDTLTAITIIAEIFEFGRFASPRTLMSYLGLTPSESSSGEKRRQGAITKTGNKRIRRLLTESAWHYRHRCGLSKSLKQRRQGQPQWVVDIADRAMVRLRKRYWRLLERGKIKNKAVVAREMVGFIWAVLQEYEHRKKKQTA

SEQ ID NO: 278576 - protein, 344 aa, unidentified
MNEVITIGVDLAKNVFQVHGVDAEGSVIVRRQLRRARVLPFFKKQQPCLVGMEACATSHHWARQLIELGHEVKLMPPHYVKPYVKRGKNDAADAAAICEAVTRPTMRFVSVKSMEQQGVLMLHRTRELLVRQRTMLVNAIRAHMAEFGIVARVGIPQVKVLLDVIADPDDARLPPVARICLEGLAEQFMSLHEEIYDAEQRIYAWHRSNEVSQRLETIPGIGPITASALAASITDPEVFKSGRELAAWIGLVPRQNATGGKQRLGKISKQGDQYLRWLLVAGAMSVVLHAKRRDTTNLPWLADIIARKPTKVAAVALANKIARIVWALLRHGGTYQKPVTVPAA

SEQ ID NO: 278577 - protein, 417 aa, unidentified
MNNPLLVGVDVHRKENVVAMMNCDGEEAAERLSVDNNRPGTEQLIEQLTELMETGEYDALQVGAEATGYYWLHFFRMLQEDEFLNQWPLELYPFNPRVIAHYKKTFVDLDKTDGIDAFAIADRLHLKRDLPTPFACDEPYLALRLLTRYRYHLVHNLAREKSYCLAILYLKASEYTHPDRKPFSDVFGAASRAVLLEFTSIEEIAALPFEQLQEWIDVKGKRHFADPSDNTRKLRQVAQDSYTLPPTLLPSVNLILATSFQQITQLQRAIKRVDTAIAEQLQAIPQTLASIPGFGPVFTAGIIAEIGHISRFDYNQAKVAKFAGFKWRQHQSADFRAEDTRLTRTGNRYLRYYFCEAANMIRVLDPDYKTFYQRKFREVRKHQHKRAIVLTARKLIRLVVRLLTTNQTYRPRRLATA

SEQ ID NO: 278578 - protein, 343 aa, unidentified
MLSNNIIAIDLAKNVLQVCHISVHGEMLSNKPLSRQKTKEFLAKAKSSIVAMEGCCGCHYWGQLAEQFGHEVKIINPKKVKGYLEGHKTDHNDALAIANAAIQIGIKYSRPKSLEQQSMHSLETSRRFLSRSVVSLALHIRGTILGYGIANSRGEKGLKASVQTVLDGETSIPTNVESVLSMLWEQYKELKAKLIAFEKEKNALTRQIEPCQRLMEIEGVGETTAAMLYTTLGDGKQFKNGRQASAFVGLTPKQHSSGGKVFMIGIDKCGGVKELRSLLYLGAMSYVGRLPEKPKTQKDAWLRSIIDRIGFKKACIALANKVVRTAWAMLRYENEYKPVLLTD

SEQ ID NO: 278579 - protein, 309 aa, unidentified
MKEQKVYIGVDVAKAYLDVAWAEASWRVANDVAGRSALVARLTQISGSVQVICEASGGYERALIQALQRGGIEVSRVQATRVRQYARARGILAKTDSIDAQLLWSFGQAIRPQATTPTQPQQDKLRELETQRRHLSRLLVAEQNRRAQLTDNALLRLSQRLIRQIKEQIAQIDLLIGQLIDHSEELSSKAQKLTAITGVGPRTAALLLAQMPELGELNRREAAALAGLAPFNRDSGTARGKRTIFGGRRAVRSGLYMAALVASRHNPILANFYQRLRSAGKPPKLALTATMRKLLIVLNSALKTDPLLA

SEQ ID NO: 278580 - protein, 365 aa, unidentified
MTEVTRGAAARVGVDLSKRVFQVHAADRSGRKLLAKPMAPERFFAWCAELPAGCLVAMEACGGAHHAARRLRLLGLDARLIAGHFVTPYRMAGKSGKNDANDAAAICEAAGRPHMRFVPVKTAEQQGQLSVHRLREGYKAERTALINRIRGVLAEFGLVFPQSPEALRRVLAEVLEDASNELTGIARLVLQRAHLNWIDLDLQMKWCDERIEAHARSDERASKAAALQGIGPIGASALVASVGDFKQFDNARQFGAWLGLVPSQNSTGGKAKLGRITKRGDDYLRTLLIQGAKSAVMTASKRSDRISQWLVQLKERVGWQKAVVALANKNARIVWALLAKGRGFDPNYVSVKPGQTVSIPVVMPA

SEQ ID NO: 278581 - protein, 323 aa, unidentified
MSTKATKKRRSFIGIDVSKKLLEVGVHQSDYHFRCPNDPKNFPALITELISLRPARILLEATGGLERPLLQALHGVGLPVVVVNPRQVRDFAKALGLLAKTDRLDARVLAHFAAAIRPAIRPVKAQQETELDALMGRRTQLSDMLVQEKNRRGSAATKDTRDDIEAHIDWLEERIQELDEKLKEQLKCSAVWQQKDKILQSVKGIGFVTSMSLLADCPELGQLNRHQIAKLVGVAPLNRDSGQQRGARHIWGGRAQIRCKLYMATLAAIRSNPVLKAFYQRLIDRNKLKKVAIVACMRKLLTIVNVMVRENKLWNVKAQPVST

SEQ ID NO: 278582 - protein, 416 aa, unidentified
MSFALPDALFFTGIDWAAETHAVCVTDAGGKIAAEFTIEHSADGIALLVRRLARYGEAGVMPVAIERPDGRLVDLLLEAGHPVVPVSPNAIKTWRDGEVLSGAKSDAGDAAVIAEYLRLRAHRLKTAAPYSDETLALRTAVRTRGDLVEMRVAATNQLSALLDAHWPGAKAIFADVESPISLEFLTRYPTPAAAAHLGEKRMAAFLAKHGYSGRRPAAELLARLRAAPAGTGREALSEALRDVVLAAVGVITALNAAVKSLDRSVAAHLGEHPDGKIFTSLPRSGQVNAAQVLAEWGDCRPAYAGPDSVAALAGVTPVTSQSGKHRDVHFRWACNKRFRAAITTFADNSRHASPWAAKVYTDARARGKDHPHAIRILARAWIRVIWPCWLNGVPYDPAQHGAAAALAEQPVKQIAA

SEQ ID NO: 278583 - protein, 302 aa, unidentified
MMIIGCDFHPSWQQVSWLETETGETGERKLVQASGDAEQFYRQLPVPSLIGVEATGNCHWRVDLLAEIGHELWVGDAAQIRASCVRQQKTDQRDAEHILKLLVEGRFPRIWMPSSEVRDLRQLLLHRHKLVTIRTRVKNELQHLCLNQGVQRKHKLWSKAGQQVLRELPLKPWAARRREDLLGLLALLDQQMEPLDRAVKEEAQRDKMALLLQTQPGVGAVTALAYVLTMGDVSRFARGKQVASYLGLIPREHSSGGRQKLGAITKQGNRMLRTLLVEAAQMAVRCDPGLRREYLHRCHQKP

SEQ ID NO: 278584 - protein, 340 aa, unidentified
MGLYTGFDLHANNSYVGIINADGKREAKKRLPNEIGFILQFLEPYKAQIVGIVVESTYNWYWLVDGLMEAGYLVHLANTTAIQKYSGMKHSDDKDDAFWLAEMLRLNILPTGHIYPKDERPIRDLLRKRGHLVRLRTSLILSLQNIIDRNCGARITVNDIKRLKQNKVAPYMEGNQDLAFAGQVSKDAIDFLTAKIRALESFIEDRAKLKGSYDHLLTIPGVGKILGLTIMLETGAIDRFEKVGNYASYSRKVSAQWTSNDKRKGKGNKKNGNKYLAWAFSEAAEFARRYDQQARAYYNRKLQKTNFMVAHNALAHKLARAAYHVMKEQTPFMPEKIFAS

SEQ ID NO: 278585 - protein, 422 aa, unidentified
MMEETEDREEIIERVAALDIGKAEVVACVRVPSPTTPGRRAQEISTHSTMTRSLLGLSDRLRALGVTRIVMEATSDYWKPVFYLLEAQGFEPWLVNAKDVKHLPGRPKTDKLDAVWLCKVAERQMLRPSFVPPVPIRRLRDLTRYRLDLVNTRTAEKNRVEKLLEDAQIKLSAVVSDIFGVSGREMLAALIVGERDPKVLAQLARARMRAKNSVLEEAFVGHFTDHHAFLLRTMLARIDETSADIAAVEAKIEELVAPFARAVVRLDEVPGVGPTAAHVMIAEIGLDMSRFPTPAHLCSWARLAPGVKESAGKKKGRGSTGHGNPYLARVLGEAAVAAAKTDTFLGERFRRIARRRGRKKAIVAVGRSILVIVWHLLSDPEARFHDLGPEFYDNRIGPDRKKRNHVRQLEALGYKVTLEPAA

SEQ ID NO: 278586 - protein, 372 aa, unidentified
MDESSKILYVGLDVHKDSIAVAYGPDDRGAEVVSLGAIGTRQSDIDKLIRKLQSKGAGTLVFVYEAGPCGYGLYRYLTGKGFACHVVAPSLIPRKAGDRVKTDRRDAITLARLMRSGDLSSIYVPGVEDEALRDLSRGRDDAMQDLKRSKRRLKSFLLRQDIRYEGRATWNAAHLRWLSEVVCPTPPQQIVFQEYLRAVSEQQERRQRVERELHEAVKGWRLYPVVEAIQALRGVDLTGAVILMTELGDITRFDNPRQLMSYLGLTPSEYSSGERRRQGGITKAGNSHARRALVEGAWAYRYPAKVSRHLQLRLETLPAEVQAISWKAQVRLCKRYRQLTARGKHVNQVVVAIAREMAAFAWAIARLVPLAS

SEQ ID NO: 278587 - protein, 309 aa, unidentified
MKEPSVYVGVDVAKEWLDVAWGTERQRVTNWRRGWKQLGDWLGESEVPVHVICEASGGYERGLVKALQGYGIKVSIAQATRVRQFARAAGIAAKTDEIDAQVLCAYGYALRPCLSATLGPEQEKLRELERQRRHLTRLLVAEQTRGLQLCEAVTRTSNRSLIRQLTKQIDSIDLLIEKVIDQSEELTAKAKKLTAISGVGRRTAALLLAQMPELGLLNRGQAAALAGLAPLNRDSGKWRGKRTIFGGRRAVRSGLYMAALVATRHNPILAAFYQRLRAAGKPPKLALTATMRKLLLILNSSLKPQSMYA

SEQ ID NO: 278588 - protein, 318 aa, unidentified
MPQETRVVGVDVAKLKVDACIRSAGLRLSAPSGPEGEKALIAWLKANGVGRAVMEASGGYERDWARALRAAGFGVRIVDPKRVRHFAKAAGKLAKNDPIDAETIARFAESFNDVEPQPHDAAQLELDQLVQARTALKQEEDRIHNQGEHKPPAVVAKALAAIAKTMRAELRKLDAAIAAKIKANPVLARRREIIVSVKGFAAQTAAGLIAWCPELGRISNVAAAALVGVAPYDDDSGPRQGARHIKGGRTKLRNLLYMAVMGAATQHNPVLKAYYLRLRAKGKEAKVAIVACMRKLIVILNTMLARDQTWNPPAQAVS

SEQ ID NO: 278589 - protein, 414 aa, unidentified
MPIATCGVDWAQDHHDIAIVDTDGRLLAKRRIPESIAGFTELADMLAEAGDNPDDPIPIAIETPRGLLVAVLRASGRPVYPINPMSVARYRERTSMSGKKSDHGDAVTLANILRTDADQHRRLPADTELAQSITVLARAHQDATWRRTRASNELRSLLREYFPGFLHTFADRPGGISSPEARAVLAIAETPAKAARLTKPQIVAALRRSGRHRGLTALAATIQQRLRTPQLRHPSLVEDAFGVQAAAVLATLDAECASVDRLGEATAAAFTQHPDHQIITSFVGLADLTGARLLAEIGDDRTRFADARALKAFAGSAPVTKASGRSIRITHRHVKNNRLAAVGFVWAFVATGCQGPTRAHYLARRDHGDRHAAALRHLYNKMLGQLYHCLQTGQTYDPIKAYRTPPTPSEQAAA

SEQ ID NO: 278590 - protein, 361 aa, unidentified
MGDTMTWAGLDVHARSTYAAVVDSRSGELSRVRFGGGAEAVVAWLAGLPAPVRAVYEAGPTGYGLARLAGERGIRVDVIAPGKTPRAAAERIKTDRRDAELLVRQLMAGALRPIHVPSPAMEAARDLVRAREDVRCDLSRARHRVSKLLLRHGHVYPKDRSTWTLQHRRWLAQRRFDEPNTELAYIDALAAVDGLTSRRDALAERLSQVASDAELWPTVARLRAFRGIDTLTALALACEVGDWYRFTRPDQLAAWVGLVPSLTQSGESHTSGGITKTGSRHARRLLVEAAWHYQRPPRIGATLRNRQQGQPDHVLAIAWRAQHRLHRVHQRLRERGKHSNLATAAAARELICFCWAAATAP

SEQ ID NO: 278591 - protein, 347 aa, unidentified
MRFYTHEHQFYCGIDLHARVMYLCIIDQKGDILLHRNMKAQPNNFLKSIKPYRNDVVVCAECMFAWYWLSDLCCDEGIPFVLGHALYMKAIHGGKAKNDRIDSEKIARLLRSGLIPIAYVYPKGMRATRDLLRRRNYLMRRRADLLAHIQNTNSQYNMDRFGKSICHKLNRDGIEERFEDESVRESIRADLELIDFYDKIINRLELVALGHAKEHDPNSIYLLRTIKGIGKVLSLVILYEIHDISRFPRVQDFVSYARLVACPRESAGKRKGTSGRKIGNMHLKWAFSEAAVLFLRNNPLGMKYKNRLVSKHGKAKALSIIAHRLGRAAYFILKRREAFDINKFLAG

SEQ ID NO: 278592 - protein, 383 aa, unidentified
MSDHSEAFVAFDTSKLRNAVAIADGGRGDEVQFLGEIDNTPAAIAKLVRKLAGKYERLTFCYEAGPTGYGLYRQVKGLGHECIVAAPSLIPKKAGDRVKTNRRDAMSLAKLLRSGDLTAVWVPDCQHEAMRDLTRARETAMLDLRAKRQQISAFLLRQGLHYPEDKRTWSKSHLNWLASQKFDIAEHRIVFEELMEAMRQAQGRLDRLEAAIRAAVPDWSLGKLVIALMAMRGLDMISASTIVAEVGDLSRFRTPRELMAYVGIVPSENSTGDKVKRGPITKTGNRRVRRMLVECAWSYQFPPRLSKDKQVKVDAVPQAVREIAWKAQSRLNQRYRALLRRGKLKNVAITAVAREFVGFIWAVAQAVGAAPAANNRTAPAAAR

SEQ ID NO: 278593 - protein, 347 aa, unidentified
MTLYCGVDFHSRRQTICYCNTADGEVKVKDLHHYDDEVRSFYEQFKGEQVIVGYETSGYARWFEQMLFELGIEVWVGDATEISRLGKRRQKNDRRDAEHILDLMLKGEFPKLYRTEVKSQEILRLLRHRNKLVKHATMVKNSLRRILIETGLLFKEGLASRKAKQKFRDLKLPPLLANERDKWLELLIQLEEQIAGLEKQLKQEAESDERVQRLLTHPGVGLLTGLCIVHTLGEVSRFATTRKVAAYAGLEPMEHSSGEKRRYGVISKAGSQLLRFLLGEAAHMAARSDEELKQFFRRLKAKCGMAKAVVATARKLLIRCFIMLRDEIDYAEFRQRGVEARSARNYT

SEQ ID NO: 278594 - protein, 384 aa, unidentified
MKYIGVDVAKETHYGCVTSHNNKILTPPFAFENNITGYNLLLSKFKKFPKNDVVIGLESTGVYGENLMAFLSEQGYAVALINPIETAGARRKRIRNAKTDKIDSKAICKYLFQNEYRLLEPKELTTLELRGICRFRQFLKRQNARLKIQLVSYLDVVFPEYHTLFSSVHAKGSYAVLSEFSSPAVIAKTNVTRLENLLKSASRGHFGKEKAENLKSLAKTSIGSNNKDFQIRHTISQIRLLESQLDDTEKRLKELWSSIDTVIKSIPGIGTIDGAIIYSEIGDIARFSKPDQLIAFAGLDPATSQSGHFRAESTKMSKRGSPYLRYALVNAAWNVSLNNATFGEYYNLKLSEKGRHYKALGHVAGKLARVIFKMLKDNVNFDLP

SEQ ID NO: 278595 - protein, 370 aa, unidentified
MRKKILYVGLDVHKKTIDVAITNNRINGKVRSYGKIPGSLDALSKLIKKLQTEETTLQFVYEAGPCGYQIFRYLQSKGISCSVVAPSMIPRRSGDRIKTDRRDAINLVRLFRAGELTSIYVPSAEDEAIRDLIRCRDDVRRFEKKARQRLLAFLLRHGYHYAGKKHWTKGFYNWLGTIKFPHRAQQITLQEYIDATNECSERIKRVTQQLQAQVEEWDRWPIVKACQALRGVSFIVATTVVAELGDMKRFATPKQLMAYLGLIPSEHSSGATVRRGPITKTGNSHVRRVLIEAAWTYRMPARVSIVLLRRQQGLPQSVRDISWRAQTRLCARYRRLIARGKSRQTVITAIARELSAFMWAIDKQINVASA

SEQ ID NO: 278596 - protein, 454 aa, unidentified
MSQRKQRSKGIKASELPKELEHVNLNAAGIDVGSDRHLVAVPEGRDGVSVREFGAFTSDLQALADWLTKCGVTTVAMESTGVYWIPVFELLERRGFEVKLVDARRVKNVSGRKSDVLDCQWLQQLHTYGLLAAAFRPADEVCVLRGYMRQREMLVQTASMHIQHMQKALQQMNLLLHNVVSDITGVTGMKILKGIIAGQRDPKVLASYRDYRCRNSVQMIAKSLVGNYREEHLFALKQAVELHETYQAKIVECEAAIAHYLSTQLNRTDDEPPASERATRARNCVRGEVDMRGQLFKLTGVDLFSISGFGADTLLTLAGEVGFDMTAWKTEKHFTSWLSLCPGTNKSGGKVLTGKTKRSANRAKAAFRMAASTLGRSKTALGAFFRRIKARAGAPKAITATARKLAVIYYSMLKNGTSYVEVGQAAYEQKFQQRRLKGMQKQALAMGYQLVPIS

SEQ ID NO: 278597 - protein, 366 aa, unidentified
MDTIKFYIGLDVHKDSIAIAYAQALSRTEPRFLGTTPYSVISLTKALAKLGTPSELSLCYEAGPCGYGLVRALRERGYACDIIAPSRVARQPADRVKTDRRDALLLARLHRAGELTAIRVPDPGDEAIRDLIRTRADMVGELRRSRQRLRSFLLRQGHAYTGRRWGPAHELFLSKIKFEDPTHYTVFTEYRLAVRFATERVARIEEALRQQVSTWRWLPVIKALMTLRSIDLISAATLVAELGDLRRFSRASELMGYLGLVPSEYSSGNTQRRGGLTKTGNTHARRILIEAAWNYRHPARIGESLQPRLEGQPQTIIDISWKAQLRLCNRYRRLRAKGLHQNKVCAAIARELSGFIWDIGCRVSPA

SEQ ID NO: 278598 - protein, 337 aa, unidentified
MAKDTLYVGLDTDKKHIDIGLAEPLPKGEVRYWGKIANETTALERVRKRLQKDGRELVVCYEAGPCGYGLYRWLNGKPGVSCQVVAPSLTPRRPGVRVKTNRRDCLTLAKLLRAEELTAVWVPDAAHEAMRDLVRARGAAKEDLNRCRQRLGGFLLRQDIRYAGRPWTKKHRAWLGRLAFAEAAHRLLVGELLDALDQATARRDRLTDHIAELVPNWSLAWLVEALQVLRGYQLINAASVVAEVGDPRRFDSPRRLMGYLGMGVSEYSTGERVRRGGITKTGNRRARTALIEAAWTYARPAKRPKAVAARQPAALRTIADKARHNRLCRGAATCSGP

SEQ ID NO: 278599 - protein, 339 aa, unidentified
MREVSTIGVDLAKKVFQVHGVDAAGETVVRRVLRRARVLAYFAQLPPCLIGMEACATAYYWARELGKLGHRVKLIPPAYAKAYLRRNKNDAADAAAICEAVSRPSMRFVEIKSEAQQAAAGIHKVRDMLMKQRTMLINALRGLMAEFGIVVGAGTRHVGELTAILADPEEQRIPALLKDGLRRMAEMLRALERQLEGIDKQIVDWGRGNAACRHLITAPGYGPILSSAMAAIVVNPAAFRSGRDFSASLGLVPRQDGTGGKVKLGPISKRGNGYLRRLLVNGAMSVLISKRAKQDPWLVKLLANKERKVAAVALANKMARIGWALMTRQEDFRATPAAA

SEQ ID NO: 278600 - protein, 350 aa, unidentified
MMNIIAIDVASEVSSVCILSRSGKVQFEDRVPTKISALKRVLKEVARPRQVVFEEGTQASWLWSELQGVCDDVFVCDPRQNRNLSGQFKSDRNDARNLALQAKSDNLKRVWHGGQELQSLKESVRAYQCLTEANTRLKNQLKAVFRGCGVAVGQQAYATKSREKVIRELRFSAQRERVLRLGAVLDEVTVQRAEALKTMVKYARKNKMYKPLRQIDGIGPIFSAMFISEVGDPRRFRTRSQFWSYAGLAIMTDDTAEYEIKKNGRIVRKDRAAKTRGLVRAYNRTLKYVLKQAAMTLSRSKWRTQYTALLGRSKNANNAQLTLARKLACVMLHIAKTEEKYDVAKVFKAQ

SEQ ID NO: 278601 - protein, 347 aa, unidentified
MRIIGCDYHPSWQQISWVDTLTGETEEKKLDHASGEAEKFYRQLPGPAVIGMESTGNCQWFMEMATTAGHEVWIGDAAKIRASEVRQQKNDRRDAALILKLLMEGRFPRIWTPSGEEKDLRQLLIHRHKLVRIRVQVKNELQHLAMNQGVTRAGKLWSKAGEKVLSELPLKPWASRRRQDLFKIREMLNGQIDLLDQAVVQAAQKNEKARLLMTQPGVGPITSMAFVLTMGDVSRFPRGKQVASYLGLIPREYSSGGHQRFGPISKQGNGFLRMLLVEAAQVAVRCDPQMRQEYLHRCHKNKAKGVAKVAAARKLAIRLYWMLRTNRAYPEVVRVESSPRVPVVGAS

SEQ ID NO: 278602 - protein, 321 aa, unidentified
MESTILGIDIAKQKFDVALLTEEKVITGKFNNTPTGFGMLDRWLVKYGVEQVHACLEATSTYGEALAEHLHRAGHVVSVVNPARVKGFAQSELCRTKTDKADALLIARFCSVMKPEPWQPPAPEVKELQSLVRRLEALHGMLDQERNRLETADDIVKESIERVIKHLQQEIKATRKLIRNHINRHPDLRGKRDLLESIPGVGPGTSAMILAEFGDVSRFHDAGSMASFCGLTPRHRQSGSSVRGRSMLSKTGSSRIRKALFMPALAAIRYNPVIRAFRARLLANGKLKMIVVGAVMRKLVYIAYGVLKSGKPFDPAIGATA

SEQ ID NO: 278603 - protein, 447 aa, unidentified
MRIVYQRCCGMDVHKDSITACLLLIDEVGGVRTESRRFGTMTRHLKEIAAWLASEGVQAIAMEATGVYWKPIWNILEAEKKFELLLVNAQQVKQVPGRKTDQKDSEWIAELLQHGLLRASFVPPVEIRHLRDLTRMRARIRQTLASFANRIQKVLEDANIKLGSVASDVLGVSGRHMLKALMAGEQDPQRLANLAQGHLRKKIEPLQLALQGHFTDHHRLQLKLLLEFVEFGGQQLSHLDSEIQLLLNKVHAEPDLPGPAEGTVAEAEASPPQPTSPLQTAVELWDSIPGIDQLAATTLVAEIGANMDQFPSAHDLASWAGLCPGNNESAGKRRSGKTRKGSVWLRRALCQAAWSASRTKNTYLAAQYRHLIVRKGKKRTIVAVAHSMLIIAYYLLKRQCTYQDLGPDYFNLRNEDAITHRLVKKLTGLGYHVTLEPARAEAGSETA

SEQ ID NO: 278604 - protein, 345 aa, unidentified
MEITTVGLDIAKRVFQLHGVDAAGKAVLRRKLQRSEVLAFFKALPPCLVGIEACGTAHYWAREIRGLGHEVRLMPPSYVAPYVKRGKTDAADAAAICEAVTRPTMRFVPIKTAEQQAVLMLHRARDLLVRQRTMLVNALPGHMAELGVIAPQGIARVADLLAVLLGEDTTNVPALAREALRGLVAELEALDRRVKEIEVAIVTWHKDNEASRRLATIPGVGPITASAIVATITDPFQFHSARHLAAWIGLVPRQHSSGGKQRQAGISKQGDRYLRRLLVLGATAVIRHSRSKSTAEAGWLKSLLERRPTRLVSVAQANKTARIVWALLVHGEAYRRPAAVPGGAA

SEQ ID NO: 278605 - protein, 324 aa, unidentified
MHVIGIDVSKQKLHGAYLIAPAQEKVHRKSVPNTAAGHEQLRRWLERKTGAGPDQMHCLIEATGVYHEPVAEALYQAGARVSVLNPADVHHFARSRASLTKTDKHDARVIALFGQERRPAAWQPPPAGLKQLRSLLQRLHTLEDERQRERNRREKAANQQDRQVLESIDTIIAALDAEHQRLRQHIDAYIDANPRLREDRRLLESIPGIGEKLARRLLNLIHTHHFRNASQLAAYLGVIPQADQSGTRERPARLSKRGDARLRAMLYFPAISAIQHNPDVAEQARRLRRAGKSPMACIAAAMRKLLHIAFGVLKNQTPYTPQVP

SEQ ID NO: 278606 - protein, 348 aa, unidentified
MAMTVAIDLAKTVFELAAADETGRIVERRRVSRRQLEQYFANRSVGKVVMEACGTAHYWGRWFARRDIRVVLLPAHYVRAYVRRDKTDRADATALLEASRAPDIIPVTVKSVEQQALQGLHRIRSAWRATEIARSNQLRGLCREFGIVAPLGDRGVEQLGRAINAKGSEVPEFIRDMLYQLLEEIRELKGREIGVERQLGEIARQSEVCNRLYTIPGVAVLTATALAGGVGDIHTFRNARCFAAWLGLTPREHSSGTKRQLGSISKRGDGYLRMLLVFGARAVLWSANSAKRAGRPLDALRAWALRVEARTCHNKAAIALANKLARIVWATWHRGQDFQLRAELPATA

SEQ ID NO: 278607 - protein, 400 aa, unidentified
MVKENFIYVGIDLHKETHTAVMIDCYNQKLGEITFPNRPADFPKLVTKVKKCNTDAKEVVYGLENAYGYGRPLAVWLIDKGYFVKDVNTAISHRQAKHRGAMYRKSDSDDAEAIALATLNMLDKLPDACPNDAYWSLGQLVHRRDNIMKQRTRLVNQLHEQLCIAYPSYKSFFNDISRPTALYFWEHYPSRKYLRGKSVEDLRKELVPVSHNRCSTKNCEKILDAAASDKVKNNAYQDARDMVTLSIVSDLQHYDSQLAEVDKMLEQMYKMLGCTLTTIPGVNVITAVKILAEIGDINRFKSSSALVAFAGIDPTVRQSGEFSSTHNHMSKRGSPYLRHAIFLAATTCSFHNSPLNAYYKKKREQGKHHLTATGAVARKLTTVIYAVLRDGKPYEPKSFC

SEQ ID NO: 278608 - protein, 402 aa, unidentified
MPFFIGLDWASREHAVCVIDDTGRVGWEGRVEHSADGLAELRRRLARFGSPASLPVAIERPSGLVVDTLLDAGHPVVPIHPNALKASRPRYSAAGAKSDPGDAYILADLLRTDGHRFRPLQPLSDDTRALRALVRGRDDLVAQRVALANQLRALLERFWPGAAAIFADVDSPIALAFLSRYPTPQSAERLGDKRLSRFLTQHAYCGRRAVGELLARLRAAPPSRVSEAEAEASGEVVRSLVAVLTPLVSQIQQLSAAIAAALAQHPDGPLVQSLPRSGQVNAAQILAELGDDRTRFPTPEQLAAESGVAPVTRGSGKQRAVGFRWACNKRLRQALTTLADNSRHASPWAAAIYTNARARGCDHPHAIRILARAWVRVLWRCWQDRRSYDVTLHRAAQRLVAA

SEQ ID NO: 278609 - protein, 361 aa, unidentified
MAKAMTLVGLDVHARQTHAAVLHLDSGELAVSRLRMAPEEVVSFLAGLRALVLAVYEAGPTGFGLARAAAERGIDVRVVAPGSIPKGSGDRVKTDRRDAIRLVRLLAAGELRFAFVPTVQDEAFRDLIRCIEDLRGDLMRARHRLSKFLLRRGYRYLDGRAWTAQHARWLRSLSFEAVARATFADYCASVDLLAGRRATLVQTLEDTVPGCSHAPTIARLRCFRGIETLTAAGLCAETGPFQRFPRPTLLSGFLGIVPTERTSDLKRRQGSITKAGSPHARRLLVEAAQHYRKPPAITQTLARRQAGQDPRVIEIAWRAQRRLHQRWQHLHYQRRKPAGVVTIAVARELAAFLWEAATLNA

SEQ ID NO: 278610 - protein, 455 aa, unidentified
MAKRREKCDHRAAVLEPDAAGIDIGAEEIYVAVPPDRDEEPVRRFSSFTCDLHALAEWLERCHIRSVAMESTGVYWIPLFQILEARGLQVFLVNAHYLKSVPGRKSDVSDCQWIQYLHSVGLLKASFRPREDICAVRTLWRHRGSLLQMAAEHIMHIQKSLSQMNLQVHHVLSDITGASGQAILDAILGGERDPVKLAQLCNWRVKSPREKVARALEGDYRPEHLFTLKQSLAGYRYYQKLIAELDREIKCRMQALPSAADPPALIPRRTKHTAYQRQGNDPGFDLRSELYRIAGVDLTDIPGVSAVTAQVILTEIGPDVSRFRNASAFASWLGLCPEKRVSGGKVLSCKTRKVKNRAAIALRLGANSLCRAKGYFGEFFRRMRAKLGTAQAITATAHKIARILYHVLLTKQPYAETVFHQCDEQAKQRAEMRLRKLAAHLGFQTIPAHSISEAS

SEQ ID NO: 278611 - protein, 391 aa, unidentified
MFLLGIDIAKLNHVASCIDSSTNEVIFSNFKFKNDFKGFSALLNKIKSFDAKNLIIGLESTSHYGENLINFLFIHDFKVALINPLQTSHLRKANIRDAKNDNLDSLNIAKSLLFTKLNFVSKKNIECFSLKKLTRFRSNLIKQRSKAKIQLTSLLDLLFPELQYLFKSKIHSKAIYFLLKKYPSTEEIAALKDDEISNLLYASSKGHFKKEKSIELKSLAKTTVGIKDTSISLHLIQLIELIELYTKQIKDIEIKITDIVNNLDITLLSVPGISIIACAIILGETNNFENFSSSKKLLAFAGLDPKIRQSGNFNVSSCRMSKKGSPYLRYALIFTAWNIVRHSEKFNKYYSLKRSQGKTHYNALGHVAHKLVRILFTLIKKNISYQEEKLE

SEQ ID NO: 278612 - protein, 483 aa, unidentified
MKPKQVEGNKKASCRPTPNNWHKMNRKQRREMTRKIQSEDLSLEVVHPDAAGIDIGNESHYVAVPPTRDSQPVRRFGCTTSELKGIAVWLKQCAIRTIALQSTGVYWIAVYDILEEAGLEVYLVNARETKNLPGRKSDVQESQWLMKLHTYGLLRNSFRPSQEIRTMRTYWRQRNDLVRAAGRHIQRMQKALTQMNIQLANVLSDVSGMTGQAIVKAILAGERDPYQLAALRNWRVKASEEEIARSLEGNWQNDLLFVLQQEQEGYEFCQKQIAECDQRLQQFLQQLDDRSHGTILPEEKRKERLRKKKKGNAPQFDLRAELFRMTGTDLTQIDGIDVTTTMTILSEAGWDMSTWKTEHHFVSWLRLCPDNKISGDRIIGKGRLPTNNRVTNALRMAASTLRLSNTYLGAQFRRLRTKLGAPVAIKAMAAKLARLVYRMLRYGMQFIDRGAEFYDAQHRKLQINYLKRKAANLGFQIIEAPAA

SEQ ID NO: 278613 - protein, 313 aa, unidentified
MAQMTPSVGIDVSQDRLDVAVHPDGPQFSVSNDAAGWRELCRRLKPLGVRAIGIEPSGGYERDVIYALLKAGLPVRSVTAWKLRQFARAAGLLAKNDRLDARMIALFVATLPCREVRRDPAREHLGELVGTRRQLVDLQLEQQNQLRQTRDRGLREMRQRQIRQFDADIARLDRRIAEAVAAVPAFAERYTLLCSVPGVGPVLAATLLAWLPELGSISRHAVGALVGVVPYDFDSGTKKGLRRIFGGRANIRHVLFMAAQSGATHNPVLHAFKQRLLAKGKEAKVAIVAVMRKLLTILNAMVRDGQPWRAVAA

SEQ ID NO: 278614 - protein, 327 aa, unidentified
MTASVASHNQIFVGIDVGGLSFEAAWHRGGSTQYQNRPDAIAAFVARLSAEKQIIRIAVEPTGGHEKALVKALRGAGLPVEMVHTSRFAAYRKLIGAKAKSDTSDARLLAAYAAAPEEVRGRKAGHVVLPQDDVREQLAELAARRDQLKHMIHAETCRLSTVRSPSIRDEITAHLQALRQADRKTHDAMMQLVRQRDELRNAKRLLQTIKGIGDKTALTSIAAVPELGLISNKAAAALVGVAPFVRKSGTMTAPAHIHGGRALVRNAFYMAAVTASRHNPVLAPFYARLIAAGKPVKVALVAVMRRLVVYANAVLRSGQPWKGAEIG

SEQ ID NO: 278615 - protein, 409 aa, unidentified
MNTGTITAVGIDVSKHKSTVAARRPGGEVVLLPFDVEHTAEGLKKLITKLRQLDGEIRIIMEHTGMYWRPIAMTLKEAGFYVSVVNAILIHNFSDNSIRKVKTDRADAMKIANYGLTFWSDLQEYAGEDENRQLLKIQSRLYERTATTAGMLRNGLISLLDQTFPGANKLFRDDSRNSKGHVKWIDFVLRFWHKECVAALSLAAFTDTFQKWCKRTGYKFSASDAERIHAIARNAVATLPKNDSTKLLITQATNSLNAIYDSLQAIRTEMDRLASMLPEYELVMGMEGIGKVTGPQLMAEVGDVRRFSHKGALVAYAGVDASPYQSGSFDSKSRHVSKRGSPHLRRVLFVIMSMTLIRANTANPVFCFMDKKRAEGKHFYVYTVAGSAKFLRIYYAKVKEYLNALEETA

SEQ ID NO: 278616 - protein, 316 aa, unidentified
MGIDPIFIGIDVSKARLDVSVRPLDRRESVANDEVGIMALVKRLREMQPALIVLEATGGVERQVVRALASEELAVVVVNPRQVRDFAKATGQLAKTDSIDAEVLARFGEAVRPALRPLADAGSEELRARVARRRQITEMIVAERNRTSGASKGVRKRIDAHIRWLEAELKRADEDLDQSIRQSPIWREKEDLLKSVPGIGPVVSRTLLAELPELGRLNRKQIAALVGVAPLNWDSGTLRGRRAIWGGRATVRAALYMAALVASRRNSVIRDFYTRLRNAGKAPKVALVACMRKLLTILNAMIKHKTHWSVNTVQAT

SEQ ID NO: 278617 - protein, 384 aa, unidentified
MTEQSAAATAFDHNSTLVLALELSGKGWQVGAVLPGVARRPRRSMAPRDVAGLLAQIERWKAEAQRAGRTVLRTVLAYEAGRDGFWIARCLLAHGIEVQIMHPASIPVERRGRRAKTDRIDLDRLLRTLLAWLRGEPRVCSMVRIPSETEEDMRRPERERERLVSERIALENRIENLLCLHGIAAFKPRLKKAAERLDGLRSFAGAPLPPMLLEELHRLMTRHRMLSEQLREIEAAREQAALAAEPDCAVQQIQMLARLVGLGLATASGLTREVFCRSFADRRAIAGFVGLTGTPFNSGGSEREQGISKAGNPRVRRILLQLAWRWLRFQPDSALSCWFVERTGGAKGRIRKIMVVALARKLLVALWRYVETGEVPAGARLAAA

SEQ ID NO: 278618 - protein, 423 aa, unidentified
MIAEKSKQIQVGTLVVGVDIAKKIHWARVMYQGQTVGKAFPFENTKEGFEKFVEAINARKQELGAHSIVVGMEPTGHYFKPLAYYLQDSGICTLVLVNPFHVNRIKEFDDNSPSKNDRKDARLIAKLVSQGNYFEASLNYGVWAELRTTNVNRLQLTKKRWQLKNQLITVLDQYFPEFSEVFKDVLGKGARYTLTHYPFPQEIISVSEQSLCDGLKEATHNRVGQKRAQRLREAALMSVGMQEGKTGARLQISHLVEELELIQRQLKETENALAEQMEQTGLAEYLTSIPGVGMISAAAFIAEISNPDNYDNYKQIQKKAGLNLKENSSGQHKGKTTISKRGRPTLRQLMYQIAFVAVAKNQEMKAVYEYLITRPQNPLARKQALIAVAVKLMKIMLAVCKNRECYDSNKVGNNSLAAKKLAA

SEQ ID NO: 278619 - protein, 337 aa, unidentified
MGYYVGLDVSLKATRICVVDETGCAVWEGVADTHPEMIADRLARFSGELALVGLETGSITPWLYRSLKGLGLPVVCMDARRAADAVKARSVKTDKADARALAEMLQTGWYGEVHVKSEDSHRHRALLGARDQLVTNKRMLCGQIRGLLRPFGITVKARMGCKRFDETARACCAHDDLLYACVSALLEALGAIESQVAALDTKVREIVRTSKPCWHLMSVPGVGPVTALSFMATIEDPRRFGRSRDVGAYLGLTPRRYQSGERDISGGISRQGDAMTRHYLYEAANCLLTTVRASSPLKSWGLRLMKRAGAKKARTALARKMAVLLCRIWKEETHFAA

SEQ ID NO: 278620 - protein, 416 aa, unidentified
MNAVGIDVSSRKSTVAVLRPLGEVVCLPFDVSHDADGLASLAEKLKALDGETRVVMEHTGRYYEAVAKALHEAGFFVCAVNPLLIKEYGANSLRRVKTDKADAVKIARYALDNWADLRDFTPMDAIRYDLKTLNRQFQLASKQRTASANNLIALLEQSFPGIRKCFDSPVRSDGTQKWVDFAHSFWHVDCVRKQPFAAFCERYRKWCKRHAYFFKLSNAEEVYALAKRAVVLTPKSKVVKVLVQEAANQLISISRSVEVYRAEMDRLAAMLPEYPVVMAMYGVGKSYGPQLMAEIGDVRRFERKQALVAFAGIDPMPNQSGDKNVRSNKSSKRGSPYLRKTLFNVIRTYLQCAPQDEPVFQFLNRKRAEGKPFYVYMLAAANKFLRRYYAKLRDYFASLDTLQSVDPIPATLKASL

SEQ ID NO: 278621 - protein, 422 aa, unidentified
MREQEAVVYSVYVGIDWANSKHDVCVQQADPDTRKFEVITHSPEAIDAWVKNLHLRYGGTIAVALELSKGPIVSALQKYDFIDIFPINPSSLAKYREAFQPSKAKDDPTDAQLAVDMLLRHRSHFKLLRPQSAEMRALATLVEQRRHLVGERIRITNRLRSALKQYYPQVLEWFDHIDTPLFCEFVKRWPTLGQAKQARAATLRRFFHENHMYREGVLDNRLKAIRSAQPLTLDTAIIVPYRMQVLVLVEQLELMFKAIGQFDDEIERLASEHPDYGLFKSLPGAGPSLAPRLLVAFGEQRDRFKSAADIQKYSGVAPVTERSGQKHWVHWRLQCPRFLRQTFVEWAAQTINKSYWAGEYYRQQREKGSTYQAAVRALAFKWIRILYRCWQTGVAYDESRYLKALERRGSPLLKRQTMLKLA

SEQ ID NO: 278622 - protein, 351 aa, unidentified
MVMIGVDYHPSDQYIAFVDTETGACGERRLNHSDKEAEKFYRELAARGVSVRVGMEATGYSRWFERLLTELGIEIWIGDAAEIKTKRVRKQKTDRNDAQLLLKLLLENNFPKIWVPSPENRDLRQLLWHRHRLVQMRTRIMNQLQALAMNEGQRRKKKLWNEHGRAQLEKLPLATWASRRRQDLLELLDRMNPTIEELTRASEQEAKKRPEVRKLMTHPGVGPLTALAFVLIIGTPERFQCGKQIGSYVGLIPCEDSSAGHQRLGHITKQGSSLLRFLLGEAAQAAARWDVDWRRRYVHLAMRRQRNIAKVAMSRRLAVRLFWMWRNGWDYSEWVKFGSNAGQLGLGHGVN

SEQ ID NO: 278623 - protein, 437 aa, unidentified
MNHLRFQTNRQLLGGKIVIGIDPAKANHQAAVVDATGAQQGSSFTFPASAVGYGETLWRHLARIVTVHRPEDVVFAIETSCNLWETLAFYLDGRGYTVVLISPLSTHHARPVMNLEFSHTDPKDAFLVATIAQRGAFHRYESFSPHTNAMHQLAITYDKLRQDLAHNRARIRSLLDRLFPEFLRVLEPDTETAMHLLKSYLFPDEFLHLDLNAESLRIEQISRRQLGRSTLEALQQQARRTIGVSRQSHERLADRLTLDAYLALLQTLQAHIDHVLDELIARSRELPQFARITSLSGVGNRLGALFLAEVRNLSRYTHYKHLEKLAGLNLRLYQSGRYTGSRRLSRIGNPRLRWIIYKMTEETARRVPEVRIKYLRRQLKRRRHVKNVVAASPQLLQLIVSMERHQHAYQLRKDTLEELQKLENQYAQLIAVRKSAA

SEQ ID NO: 278624 - protein, 420 aa, unidentified
MPATFSIPRTNDLERAMTAVMIGVDPHKGSHTAVVIGPAEEPLGEIRVRASAGQAEKLAEWAAAWPERTWAVEGAAGLGRLLAQQLVAAGERVLDVQPKLASRVRLLQAGDTNKNDPNDALSVAIAALRSRTCRQVAAEDHPAVLKVWSKRHRDLARLRNQVACRLHAVLCDLVPGGTSKQISAAQAARILGQITPSGAAGLARAELAAEFLQDMRHLDAQLRGTRKKLAAAVKVSGTTLTEVSGVGPVIAGTIIGDIADVSRFPGRDHFAAYNGTAPVEVSSGNHKIHRLSLRGNRRVNHAIHMAAITQIRHKHSEGRTYYAKKLAEGKTHKEALRSLKRKISDAIFARLQADARQAAAARAKGPGGHPGNDSASSAAGSHPARQLFGQATPGPGTSLRPGTTTGTPPKPVSKKTRPTT

SEQ ID NO: 278625 - protein, 348 aa, unidentified
MDHYAGIDVSLEQSSVCVVDGSGKIVRESKVASEPEALIAWFASLGFDLARIGLEAGPLSQWLFAAMQEAGLAVELLETRHVRDAFKAMPVKSDRNDARGIAQLMRLGWFRPVHCKSMGAQEVRAVLTARKLMQAKLRDVENSLRGILRGFGLKVGKTTARSFAGRIRELVAGQATLEVMARSLLNAHGVLLREFNALEKRVRNTARDHSQAKLLMTTPAVGPIVALTYAAGIDDPARFKSSKQTGAHFGLTPKKHQSGQTDRSGRISKIGDASVREALYQAAHVMLTKPIKGCPQLKSWAMRIARRAGMRKAKVALARKLAVVLHRMLAANTPFNPTAGAAPITAAV

SEQ ID NO: 278626 - protein, 413 aa, unidentified
MDILYACCTGLDIHKKTVTACVRCVDVKGKVRQQTRTFGTMTSDLLALADWLTAEGVSHVAMESTGVYWKPIWNLLEGLFEMMLVNAQHIKQVPGRKTDVKDAAWIAQLLQHGLLRGSFVPETPQRELRELTRQRRQLIQTKASVANRIQKVLEDANIKLASVATNVLGASGRAMLEALIAGQTDAGALAELAQRKLRAKIPELRLALHGRVTEHHRFLLRLLLDEWKGLEELIERLSTRIAEVLPAPFVEAIQRLATIPGIDVVAAQNIIAEIGVRMEQFPSAGHLASWTGMSPGNRESAGKRQSGRTTKGNRWLRTTLVQVAWAATHTKGTYVSALYRRLAGRRGKKRALVAVAHSTLVSIYHVLAKQTVYSELGPSYLDQLQQKRLTQRLVRRLQQLGHEVTLKPKEVAA

SEQ ID NO: 278627 - protein, 284 aa, unidentified
MRFYTNQHKLYCGIDLHARSMYICILDQEGNTVLHKNFKTTPESFLRAIQPYREDIVVAVECLFVWYWLADLCNREAIPFVLGHALYMKAIHGGKSKNDKIDSRKIAVLLRGGTLPTAYVYPEAMRSTRDFLGRRNHLMRKRSELLAHIHNTNSQYNLPEFEKKISYKANRDGVSDHFPDPSVQKSIEVNLQLLELYDRLLTDLELYIVRQAKGHDIRSFFLLRSIPGMGKILSLIVLYEVHDINRFARVQDFVSYCRLVKCPRESPDLRQSRRLDVCWPLKGA

SEQ ID NO: 278628 - protein, 342 aa, unidentified
MSNLNNFQATIGIDIAKNVFQVYCVDNVTGEISNKQLTREEMHGYFANRQPCLIGMEACGGSQYWARQLTDQGHTVRLMDPKLVKPFVSHYKSDKADAEGIWVALTHGVRTVTVKGKTERDIQTLLRIRERLVCLQTGNMNHVRGLLLEYGVTIPKSVAKFELMVDKAINDLEGDSVALVIDSLRDIVAQIRDSRKRIATLTKEIKRLVEQTKYAKYFSSVPGVGVITTAHMCVLLSDPSSFKSARQFAAFLGLVPMHTGSGGKTITTHIPGRCNKAVRALMVECAQGVARGRNPEDWVRKILSEKPKKVALIAIANRIARQCWAVASKGQKWRRMPVAGQQ

SEQ ID NO: 278629 - protein, 350 aa, unidentified
MLIIGCDYHPGFQQIALVDTETGELEERHLAHRQEAEQFYQELKQRNVAVRVGMESSGHSRWFERLLRQLEFELWIGDAAEIRTKRVRKQKTDRQDAQLLLRLMMEDRFPRIWVPDAANRDMRQLLWHRHRLVQMRTRVMNQLHVVALNEGLRRKKALWRPAGRSELESLVLAPWASRRRQDLLDVLDQLTPKIQELTRALEEEVEKRPVTRRLMTHPGVGPLTALAYELVIGTPERFHCGKQIASYVGLVPEEKSSGDRRRLGHISKQGNVLLRFLLVEAAQVTVRSQAEWRSRFFHLAMRRGRKIAKVAMARKLAVHLYWMWRQGRDYGQLQKLGSHAGEPGNRDGVQ

SEQ ID NO: 278630 - protein, 400 aa, unidentified
MRPASSLAGEVPIVIAVGIDVAKRAHEACFMGQDGRQIGKAHRFHNTRRGVRALLDDLQQLPEPATIGLEATGHYWLALHDELVRAGHTVQVLNPLQTHAYRKTTIRKLKTDRKDAWLIADVVRIGRGRAAYVPDETILQLRELTRFRWALVDQIGDAKRRILTILDRVFPEYETLFSDVFIKSSRALLERATTAAEFADANLDELTALLKQKSRGRLGVEKAQAVQAAARDSLGMTRLGGVASFELRALLDQITFLEQQVAAVEQQIEARLAEIEQHVTDIKGISPVTAASLIAEIGDVHRFRRFESLVAYTGIDPSVFASGEFKATETHMSKRGSPHLRRALWLSAITASQSNPDLAEYLQRRLEEGKPWGTAMGAVARKLLSRIYVVLKHNRPYEVR

SEQ ID NO: 278631 - protein, 451 aa, unidentified
MSQGNNGLSRGDRNRNARLAALRAAVPRDHAVLGIDLAQSRQAAVLADHDSRVIARWRPRCSPWKLGELLERALRKALAAGFSGVTVACEPTGHRWMVIAQLAAERNIAMVCVQPLVVARAREAEDYTRGKSDDRDAVLIARLAGQLHCYLPEQADQGWARLRHLGARRARLTEDSTACRQQLRDLLEVAWPAVLATAADPLESATWLACVQVALARCDGDLAAVHALGQDAFTAAARAALGAFGAKRICPRIAAAVYAALAGPAGVAAQRHGALERGFQVLGDWQATRGELADVNARMLGCLGAMGLAEVAGSIPGVSALQVAAILAESGDPSRFRTSRAMVKHAGLAPCENSSGNHAGEACISRRGRPALRLAAWRAVWAALRHNPVYAARHAELTGRANDRLTDQQARAAIAAALIRQIHAIITRRVPWDADIAAGRRRPGQEVTAAA

SEQ ID NO: 278632 - protein, 309 aa, unidentified
MKEQLVYLGIDIAKYYLDAAIGNEKRRFPNEAIGHQQLISWINQIEGAVQVICEPSGGYERALVRALIGAQLKVSLVPANRVRQFARASGILAKTDRIDANVLCAFAQAMQPGTVSASQLEQEHLRELESQRRHLTHLLVMEQNRGARVSDGCVRKLNRDLIKQIKKQIEQLDLLIKNHIEESTELSAKAQKLTAISGVGARTAALLLAQMPELGQLNRRQVAALVGVAPFNRDSGKMRGKRTIYGGRRPVRHGLYMAALVAARHNPILRSFYLRLRATGKPAKVALTATMRKLVIVLNSALKPDPIYA

SEQ ID NO: 278633 - protein, 310 aa, unidentified
MEMKAVGIDVSKDRLDVHLWPDGIAFAVARDGKGLAELIERLLPLTPDLVIVEATGGFETVVAAALAGAGLPLVVANPAQIRHFAQAAGTRAKTDPIDAAMIARFGHDMKPDVRPLPDEATQLLADLVARRRQIIEMIVAERNRERRATVRRIKKSIARLVRALEKELAEIDAEIDAGVRGSPAWRDKEDLLASVPGVGPVVARTLIAELPELGTLDKKKIASLAGLAPYTRQSGQWKGKSMIGGGRKSVRCALFLAALVASRHNPVLKAFRDRLRAAGKPKMVALIAVARKLLTILNAILRDQKPWQPA

SEQ ID NO: 278634 - protein, 339 aa, unidentified
MNATTIGLDIAKNVFQVHGEDAAGSVVIQKRLGRKGMMTFFAKLPPCLVALEACGTAHYWGRTLRAFGHEVRLIPAAYVKPFVKRNKTDARDAAAICVAASRPDLRPVAIKSEEQQASRALERSRDLLIKQRTQLMNSLRAMLAEFGVVAAQGYRGFAELRSRLDSGEGLPETLVATLRVVLAPLDGLTPAIEALEDRIKAVVKADPDMRRLSRIPSVGFMTAHAVVAAVGDGRQFKSGRDFAAWNGMTPRENSSAGKRRTGGVSRQGDSRLRKLFALGAATLMRNARSRQDRATQWQRGILARRPMKVAVLAQAAKTARIVWAVLTSGEEYTPRSVAA

SEQ ID NO: 278635 - protein, 355 aa, unidentified
MWSLGIDQHERQITISLRDENGDVLLARQVSTQPEKIQAFFQQLTQDRLQKGEEFVAILEVCGFNDWLIRMLQDYRCYKIILIQPDERKKCKTDRRDAAALSELLWVNRARLLAGKPVRGVRQVDIASSTDQENRRLTTLRKEARQARTRVINKIKHIVRRHNLRWHLPTKTFPTQSAIAWLKALVLPAVDRLEMNYLLADLEHLEQRYLDLEKVIAERCVASEDAMIVSSMPGVGNFTATALACRVGRVERFPRSHSLPNYWGLTPRCRDSGEKTQRLGSITKNGSSMARWLLAQVAYQVLRKDRRLREWYKNIKRRRGSNIARVAVMRKLATIIWHMLKHRKTYAECRAFVTQ

SEQ ID NO: 278636 - protein, 359 aa, unidentified
MDGSKEHPHMTAGLDIGEKYSHLCLIDTGSGEVMEEGRLRTTPETFLRRFSSERPIRIAIEAGTHSPWASRVLEECGHEVLVANARKLRLIYSNKQKTDEIDAENLARLARLDPKLLYPLKHRGEESQAHMAVIRSRQALIGCRTQLVNHVRGTVKSFGGRLPKCPAVSFHNKAPEHIPDALWPALGPLLEQIGSLTQRIRDYDRKLETISKEHYPETELLRQVEGVGALTALTFVLTLEDPYRFEKSRSVGAYLGLVPARDQSGDTDPQKRISKEGDETLRKLLVGSAHYVLGPFGQDSDLRRHAEKMASRGGKNAKKRAVVAVARKLSVLLHRLWVTAEVYDPLYNAHRRTKQEEAA

SEQ ID NO: 278637 - protein, 424 aa, unidentified
MRFIGLDVHLDFCEIAICEEGRVRSAGRVASSPEGLQILANSLGPEDQVALEATGNALAIARLLEPHVARVVVAARSELRAITEAKVKTDRHDARTLARLLAAGLLRGCWLPDETTRALRRRLARRAQLVRQRTRAKNEVHAVLMRNLKGRPPVTDAFGKRGRAWLAELELPGDERQTVDGCLRQIDFLDTEIAALERAIAEHALASPEIKRLMTVPGVSLMTAATFIATVGEIRRFHDPRKLVSYLGLDPKVRPSGSSPARHGRISKQGASQVRQMLAEAAFVAVSTAGPMRAFYERVRVRRGSQIAIIAVARKLAVLFWHLLTREDDYAFGRPSLTRKKLRALELRAGAERHPGRRDLATKNAYSQRAHRERERELSEQAELAYRRFVADWQASGPAKVGAGATPGRASRGPSKGQAARQTQ

SEQ ID NO: 278638 - protein, 351 aa, unidentified
MIVIGADPHKRTHTLVAVDAATGEQRSCETVKATPAGSETALGWARGLGSERVWAVEDCRHVSGRLERALIAAGERVVRVAPKLMAGARRGSRERGKSDPIDALAVARAALREGVENLPVAVLEGESLDLRLLLDHRDDLVAQRSDEQRRLRWHLHALELGDDIPAGALDRSVWIDRVGRRLGRQPQSARVGIARELVRSIAAKTRRARELEREITGLVANQAPQLLQQPGCGPLTAAKLVGEIAGAGRFRTDAQLARTAGVAPLPASSGRTDRHRLDRGGNRQLNCAFHRWAVNAGIHDPETAAYLARKQAKGRTGWKHCAASNATSHAALGGSSTPQTQPRAALTRRPP

SEQ ID NO: 278639 - protein, 422 aa, unidentified
MEEITEEAAELVARVAALDIGKASLVACVRVPHETSAGRRRQEVRTFATTTRSLLELQDWLVCQGVSLCVMEATSTYWKPPFYLLEDVTQCWVVNARDVKNVPGRPKTDRLDAVWLAKLAERGMLRASFVPPPWQRQLRDLCRYRRTLIQERTREKQRVEKLLEDTQIKLSVVISDIFGKSGRDMLEALIAGQRDPHVLARMARGTMRKKISVLQEALTGHFRDHHGYLLRMMLDRVDGLTAQIEALTGRIEEVIAPFARQVAQLDEITGVGPTGAQELIAEIGVDMTRFPTAGHLVSWAKYAPKARQSAGRSKPGTTGKGNPWLGATLGEAAISAARTKTFLGSRYHRLARRRGKQRALVAVGNSILTIAWHLLSNPDAHFTDLGPDWHDRLAPQRRKRQLIAELERLSGKKVLLQQETAA

SEQ ID NO: 278640 - protein, 353 aa, unidentified
MNSLTDLREVVDVVIGVDTHVHTHSAAVIDTATGGVLDEITVDATAQGYGELVEFANNHATLRAWAIEGTGGHGAGLSRHLLESSEIVIELDRPKRAARRNGAKSDPLDAIRAAREAMARPRLGTPRSGGERQALSVLLAARRSAISASTEAQQQVFSLVIAAPEPIRARFRGQKLAAMLNTAANLRVHASWDTETTSTVVALRTLARRAHAMLKEARELQKQMVAIIRSWRPELLEEFGVGPIVAATVLCAWSHPGRIHSEAAFAMLAGVAPIPANSGQITTRFRLNRYGDRQLNNALHTVVQSRIQYQQATRDYVARRTAEGKTGREIKRCLARYVARDLYRLLESGPATA

SEQ ID NO: 278641 - protein, 359 aa, unidentified
MSEVTRGFIARVGVDLAKRVIQVHAVDATGQVVVAKALPRDGFMPWCAQLPPGTLIAMEACSGAHHWTCKLRALGLDARMMAAHFVTPYRMQGKGGKNDANDAAAVCEAASRPSMRFVPLKTPAQQAVLAIHRLREGYKEERTACINRIRGLLTEFGLVFAQRPEVLRRDLSDVLEDATNELPALLRMALRQAHLHWLELECHMAWCDERIEAHVRTDEQAKAAAQLCGVGPVTASALVAMVGDFKQFRSGNQFGAWLGLVPRQNSSGGKATLGQITKRGDDYLRTPLIQGAKAAMVHAKKRSDRISLWLVSLIDRIGRQKAVVAMANKNARILWAVLTKGTAYDPNHVSINPGLPTTV

SEQ ID NO: 278642 - protein, 426 aa, unidentified
MNKFFYRPTVGIDVSADFSVVAILAPDGEVYRKPFKIKHNRDGFDYLVDQIKKAEEEFSMKTGIFMESTGVYHLTLFHFLKDKFETFIFNPLITNSNKNSGIRKVKNDKRDAISIATIGKFQSVKCSSAFDVEIYTLKSLCRDYYKLTDTKSTYKKKLSTDLRVIFPGYNSVFSNITCKTSLAILKQYNSPQGILDADRKTLIEIISSNSRKGLLYSEKLYEKLISIAQEALYIGIKSSSLFVKITNTILLIETLETQLESLLKEIHLLIKSRRLPETFIKNIQLIYSIPGIGELTAITIMSEIGNINGFLKPKHLIAYFGIDPSVNESGKFKSNQNKMSKRGTRIGRRALYAVALASVRTNNNEVLLKYYKENLKGKKKKVALGAVMNKLIKYIFSVLKNQKPYEIRDPKIHEKMYLQNQCKTAA

SEQ ID NO: 278643 - protein, 359 aa, unidentified
MTRASHISFKDKHFYVGFDVHKKRWVVTIRHNGLRLKTFSMDPSPEGLKKYLEKNYPDGIYHLVYEIGFSGFWIYRRFKELGIDCIVINPADVPTAHKEMDRKSDPVDSNKLSRELEKGSLTSIYIPSEDEQHLRSLCRLYTTTVQSTTRVKNRIKGLLYFNGIELPIHSSNWSAKFISFLQTLPLDNGPAKKTLSILMEELLLHRMHMVFILRELREYVRNDRSGIIIRLLRTVPGVGFKSAVILYTEIMDMKRFSNIDKLRTYVGLVPSIHDSGETQSSSGLTPRKNSFIKYIIIESAWVAVRKDPALLVCYNKLVSRMGSQQAIIRIAVKLLSRIRYVWLNERAYIPGIIEGTNAA

SEQ ID NO: 278644 - protein, 351 aa, unidentified
MVSKSFPEGKRLHEQGEYTIMAMIGIDVSKKKLDILWLKDVVTGKAKTRVIDNTPAGHKALLAWAQQQTGEALETIHFILEATGIYHEALAYALYQAGTKVSVVNPAQVRDYAKSLGLRNKTDQKDCMVLARYGVTQTPRLWQPEPEAVRMLKALIGRINAVEKDIQREKNRLEKAQVAGVMEEVVTSIQTVLGQLEKEKARLEALIDDHMDQHPDLKRDRQLLESIPGVGPVISRYMIAVIRSRSFLSASQCAAYIGVVPVHHESGTSVRGRPRLSKAGDATLRAKLYMAAVVCIQYNPDIQRQYKRLLKNGKTKMSALCAAMRKLVYICFGVLKHQIRYQAQPCSESCA

SEQ ID NO: 278645 - protein, 331 aa, unidentified
MFPVGIDVSKNTLDLCMLYDGIKGRIKTRNIQNNRHSVENILRWLRLQHCGPEDVHVVMEATGVYHERLATELHDAGFYVSLANPHRSREFARGMGIMTKTDKVDAYMLACYAFLKNPHRWEPPAPEIRYLGALLRRRDVLLGDALREENRLEKYLSTDTPADIISSCMHMAQLLREEVSNIERQIKAHIKASPALRRDYKLLTSIKSVGPQLGMHMLVVLRSHDFSSAEQAAAFLGVVPIEKRSGTSVRSRPRMSKIGPPQLRAKLYMSALCGKIYNKRMRNIYDEMCLRGKPKMVAIGALMRKLVHWCYGVLKTGIVFNDEGLKQVLST

SEQ ID NO: 278646 - protein, 381 aa, unidentified
MKKDNKAQATTKKPRHRRRSKRNPTNFCLSAVPPSQTVGMDLGDKTSRYCVLDQAGAIQKEGSTPTTKKGMTQTFAQMARSRVSIEVGTHSAWVSRLLASFGHEVIVANARRVRAISDSNCKDDRMDAQLLARLARVDPALLYPIRHRGQQAQQHLAMIRARAALVDSRTALVNTARGLVKSFGERLGKCDTDQMGVEKLSHLPAEEQAALRPLLETVEALTEHIQEYDQQIAEIARKHYPETALLQQVSGVGQLIALTFILTLEDKDRFERSRDVGAYLGLRPKRKDSGESQPELSITKEGDVYLRRLLVQGAHCILSVRGPDTDLKRWGVKLAGRGGKKAKKKAVVAVARKLGILLHHLWATGEVYEPLRQSQAQAAVA

SEQ ID NO: 278647 - protein, 454 aa, unidentified
MPKKAKIETTATGKKFKVVNPNAAGIDIASSEMQVCVPENRDCDCNRTFGCFTQNLAQIADWLTCCHIETVAMESTGVYWLPLYFVLKERGFDVVLVNARDVKNYSGRKTDEADAEWLMMLHSYGLLKCSFQPENEARAIRNLTRHRSNLLQSSSREALHMQKAMEQMNLKLGNVISDLLGKSGLAIIKAIIDGNHNPQELAMLAEDNCKASKEEIAKSLEGSWSEDHLFELGQAYELYNFIQKQIQQCDKQIEMHLIRYRAELDPPSDGNMPRSKKKIGKKNAVDFDVEKYAFDIWKVNAMAIPGMSTISLLQLIGELGHNFADKFDTCHSFCSWLNLVPNNKVSGGKLLSSKIPKKTNACGQVFRLCANSLKRNKTTLGYYFRRIQSRCGYSQAIVATAHKIAKIFFTMVKTHTEYDESKTGINEKALLEHKILMTQRRLDKLNRQLEVSFS

SEQ ID NO: 278648 - protein, 334 aa, unidentified
MLYAAIDIHKRTFQAAVLDVDTGETVERRFGSTREELSDWAMPLQGKLAAVAIEATNGWRWVWRELSARGFDVRLVDPAQARALRGRIKRAKTDRLDARWLCVLLAKEMLPESWLPPAEIQTLRDQTRLRKALAEDRTRWAQRLHALLTHEGWPCQRGRLLTVEGRRWVASLALSPAVRSQVERLLRLIEAVETELRSLETELRRFARSDRRCLALQTIYGVGPILACHLLAELGEAARFRRARQAVRAAGLDPVVDESGETRRRGRLAKHGAPALRWALVEAAQHAQRTNSPDRGLYAQAATRVGSKRAVLTVARKIGRRAYHVLHELETHAA

SEQ ID NO: 278649 - protein, 455 aa, unidentified
MVRKARRASQSQKLPASLKHVHLNAAGIDVGAESHYVAVPVDRDSQPVRSFSAYTPDLNKLADWLKACGVDTVAMESTGVYWIPLYEVLERCGFKMYLVSPQHLRRVPGRKTDVLDCQWLQELHTFGLLSGAFRPEDIEVALRSYMRQRAMLVSYASQHIQHMQKALTQMNVLVHHAVEDITGVSGMRIIRAIIAGERNPVTLAAMREAGCKKDAATVARALEGNWREEHLFALRQAVELFDFYQARIDDCDQQMLAHLQTMEDRSDSGTGTPPEPEGKSPRKNELSFDGAAEAYRISGTDLAKIPGIGGHTALKILSEIGTDVAHWPTAKHFASWLTLAPKNRISGGKRLSQRKAPANANRVAQALRLAAFSLHKSHSYLGAFYRRMAARAGKTKAIQATAHKLAILVYNALKYGTDYVEKGARYYEESYRDRVLKNVSRRAKEMGYRLVKEDA

SEQ ID NO: 278650 - protein, 422 aa, unidentified
MTTATYCGIDWAEGHHDIALIDGDGKLVAKRRIAESIDGFAELTAMLAAAGDSAEQPIPVAIETPHGLLVAVLRATGRPIYPINPLAVARYRERTSVSGKKSDHVDAMALANILRTDAHLHRTLPEDSALARSITVLARGYQDAVWRRTKLVQELRARLREYYPGFLAASASGSRGGLSTTHLASSDARAVLAIAPSPAEGLTVSKARVETALRRGGRQRRVACLAANMVAALRVPQLRQDPVVEKAMRTEALALLGVLDAICASVERLTDALVDAFTQHPDYEVITSFPGLADISGAIALAEIGDDRDQFSDDRALQAFAGSAPVTRASGKSRTVTRRRTKNNRLAAVGYSWAFTAAAWPSPAREHYLRRREHGDGHPAALRHLFNRMLGQLHHCLTTRQIYDPAKAFPHATPAHAGSAAA

SEQ ID NO: 278651 - protein, 322 aa, unidentified
MQSVIGIDVSKEKLDVCALFDGKSRKKIVDNSVPGFKSLRNWISKNNIDDPHFCMESTGCYSEGVAEFFHELGFKVSVVNPLQIKAFRNTKLIRQKTDSVDAQIIAEFCLQNDPAPWKPRSPEKKELHNINVRISALKTEVNRASNALENKNLSKVILKSIHAEIKFLKKQIALLEDEAQKIINSDQNLKEKFDRITEIKGVGEKLALAIISDMPDVSNFQKSGQFSAFAGVSPSHFQSGSSVHGKSHISRLGSKSIRKVLYMSALVVKNHNPYFQKFVQKLQKKCKAPKVIIVSIMRKLMCILFGMLKNSSNFDPKLAFGD

SEQ ID NO: 278652 - protein, 411 aa, unidentified
MSYTIAGIDVHKKMLAVVVRDLNEPEEQFDRARFGTTASELQRLMVWLQEREVQEAVMESTAQYWKPVWYALEPHLKLHLAQAFSNRAPRGRKRDFPDAERLVRRLVAQELYLSFVPAPEQRGWRTMTRMKTQLARDRVRLHNQLEGLLEEMRIKLSSVITDLFGASGLRILGALAAGQTDPKQLAELGDDRLQCTQEKLIDAMTGKPEPMHQELLALYLERRQMIDQQMEKLNGMIAQAMKAHEDAVVRLAEATGFGVDSAQQVIAEVGPQASTFDSAAQLTSWAGTCPGKEESAEQNHSSHSAKGNKYLRRVLTEVAQAAVKTKGSHYQIVFRRLLPRLGYKQALWAVVHRLCRMVWKILHDGVRFLERSPQRDPKAAKQRAKTLARALRRLGYNVQITPTSPTPAEAN

SEQ ID NO: 278653 - protein, 341 aa, unidentified
MNIAVCGIDLAKNSFQIHGIDEEGQVSCKKKLKRSQVLKFFANKPVCLIGMEACGGAHYWARELSKLGHTVRLMSPQHVKPYIKGNKNDANDAAGICEAVTRPSMTFVGIKTQQQHDILLLHRVREQKVKNRTALSNQIRGLLAEYGYVLPKSLPKLRSQLLILLSEADDDKLSVLACRQFYLLYEHLLQLDDQIKALEKELHSIARQNEDCMRLASLPGVGLITATALVAHIGDISQFRSSRALAAYLGIVPRQHSTGGKEALLGISKRGNSYLRGLLVHGARSVLRHAKNKEDEHSQWFKQLAERRGYNKAIVGQANKTARRVWALLTNQTYYQVAEQA

SEQ ID NO: 278654 - protein, 337 aa, unidentified
MQKSCLGIDVSKLSFDVSLIVVFNGQKQPIVISKFNNDAVGLKSFKVWLDEHQVAFDANSLLVIENTGIYHRLIWNFCTTHLLPIFIGNAADLKWSFGIARGKNDKVDSMRLCDYAFKNYDDIKPTTSLNKVLITLKDLLSNRSKLLKQKNAIKQTLNELRVSNDKTIQSLMEKLNKAALDGLQKSIKQIEAQLLKIVKQDESILTHYNRMLSVPGIGKITATFIICCTNNFAIKVTGKQLSNYAGVVPFENTSGTSVKGKSRVHFMANKELKSLLTMGALSAIQAYPEFKDYYERKMKEGKKHLQVLNAIKNKMLLRVASVVNQQKDYVNTYKKAC

SEQ ID NO: 278655 - protein, 402 aa, unidentified
MRRCIGLDVHREFAQVAIWEDGLIWQAGRIQTTPEALRDFADSLCATDEVALEATGNTHAIARLLERHVGRVVVSNPQKTRAIAEAKVKTDKVDAAVLAGLLAADYLPSVWLPDDQTHALRRQVTRRAHIVRQRTRLKNQVQSILHRNLIPRCPAADLFGNKGRAWLADQDLPHDEHQAVGALLRQLDFHGQELRIVDAELGRVGLERAEVRRLMTIPGVDATVALAIVAAVGDFGRFSSPQRLVSYLGLNPRVRQSGGQPAQHGRITKQGRAHARGMLVEAAWAAAKTPGPLRAFYERVRARRGMQVAVVATARKLATLCWHLVVSDQDYAFQRPSLTDKKLRALELRAGLPPRRGRKGTAAAYSLKEVRRRERALTEQAEAAYRQLVAGWQPKRPATKPR

SEQ ID NO: 278656 - protein, 322 aa, unidentified
MHKNSEFIGMDVSKDTFDVWSPLFGHQSLDNNEKGFKEFHKLLGENAWCVMESTGSYHQQLAHYLYTKQIRVSVVNPLVVKRFIQMKLQHNKTDKSDAKMISLYGQEQPLDLWVPDPKYIEECKILNTSIALYFKQSTALKNKLHSLESKGSKGLVLQSLKRQIKQLQKEIAILENQVETLIKEHESVMLTNISSISGIGKKTAMMLISNTYAFKSFESYTQVSAYFGLSPIERTSGSSIRGRSRISKKGNPAVRNHLFMCSFTACQYNPQCKALYERIVAKGKSKKLALIAVCNKLLKQSFAIAKSGIPYDPNYRSRPVFQ

SEQ ID NO: 278657 - protein, 348 aa, unidentified
MAHFVGLDVSVQETSVCVVDDAGKLLCERKVPTEPDDIAVLLMSVGGDYVRVGIEAGPLSQWLVNGLTEAGLPVVCVETRQMKALLTAQQINKSDRNDARGIAQMMRVGLFKPVHVKTLVAQEQRMLLTSRKLIQRKLLDIECDMRGTLRNFGLKVGVVSAAGYEARIRDLVEGFPRLATIVEPLLAVRRVMRQQLATLHKMLLDTVRHDPVCRRFMTVPGVGPVVALTFRASVDQPHRFVHSRSVGAHAGLTPKRHQSGEIDYDGGVSKCGDAMLRTMLYEAAQSMLTHSKKWSWLKAWAMRVAQRRGMRRAVVALARRLAVILHRMWVDGTDFRWANGPASVAPAV

SEQ ID NO: 278658 - protein, 350 aa, unidentified
MKKLSKTQKQRVRETIGIDLGDKVSRYCVLDPAGEVVEEGNFRNQVSSIEAHFAGEPRRIALEAGAQSAWISRELKRLGHEVIVANPRQLKWITASDTKNDPVDARKLAMLARADVRLLHPIEHRSAAQQAELAVIRARDAILRARTLLVNAARSLAKGCGVRLPPSITKSFGERALAGLPPELLPALKDALEQIDALSLTIQKYDQRIAEVAGQHPEIEPLTSVTGVGTLTALTFVLTLGNAERFAHSRDVAGYLGLRPKQRQSGARDPQLGITKSGDAYLRKLLVQCAHHILGHYGKDSALRKWGLAKSEGGKKATLRAIVGVARKLAVLLHRLWVSGEKFKPFPKMV

SEQ ID NO: 278659 - protein, 379 aa, unidentified
MKKHSTLFIGLDTHKDSIAVAYATDSRTEPVTYLGAIGTQHYAIRKMVRQFESRHPGCQLQFVYEAGPCGYWLYRLLSSWDYPCFVVAPSLIPKKPGQQVKTDKRDCMQLAQLLRNGDLDPIYVPEPEDEAIRDLSRARETAMWDLKNAKSQLKAFLLRHDIRYTGSANWSAAHIRWLSELVMPTPAQNTVFREMLYTIVERHKRLERLDNELTYQVRRWRFYPLVKAVQALRGVQLLVATSVVAELGDLQRFDNPRKLMAYVGLTPSERSSGSRRRIGPLTCAGNKRARRMLIEAAHAYRYPAKTSKILQLRQEDLPKAIVEKAWDAQVRLCRRYRTLMQRGKHRNVVVAAIARELVGHIWAIAREVVIAKPDPRLML

SEQ ID NO: 278660 - protein, 359 aa, unidentified
MRIIGVDLHTRQQSVAMLETETGELVEKILEHEGEKVREFYSALPGPVLVGIEATGSMPWFLKLMEELKIECRVGHPAKIRAAEPRKQKHDRRDARLLLNLLAENRFPSIWMPSTEQRDLRTLLRHRHQFVRMRTRVQHTLQSMALANGLRRGVTLWSQAGQHALQALPLAPHASERRATLLSLYPALQKPIDDLDHQVSEQALLRPQARRLMTHPGVGPVTALATEVFLGDPLRFTDGKAVASYIGIIPREHSSGGRRQRLGALSKQGNALVRYLWGEAAMHAVRRDPELKRFYGRKLIQKGLGKARVAAARKLGIRLWIMLRDQIDYEEFCRRGRMRQKSGDARAGMPGPINGPAVQ

SEQ ID NO: 278661 - protein, 339 aa, unidentified
MKVSTLGIDLAKNVFQLHGVGCNGQTVLKKKLTRDKFLPFLMQLEPCLIGMEACASSHHFARVLRQYGHEVKLIPPQYVKPYVKTNKTDAADAEAICEAVARPNMRFVQIKTAEQQAILVLHTERNILIRERTACANSMRAILAEFGIIMPRTLSQLYKKIPEILEEYDNELSPFVRCSVARQLEHLQGVEDQITLIEQELSRWAKTQPACQRVMKVPGVGLMTATYLVASVGNGQQFHSAKQFAAWLGLVPRVFSSGGKQRLGRISKRGDRYFRYLLVHGARAVAAVIERHKDNMPWLYRLLNKKAYNVAVVAQANKTARILWSMLVHHTEYRTLSVV

SEQ ID NO: 278662 - protein, 345 aa, unidentified
MSLMFFLGVDVSKKTLSVVLTDHKDKTLWYNKSIPNDEVGFKKLVETVIKNTSKKAGKEEYSIAAGMESTGVYGERLAYYLNGNSHNGRIVTYVLNPAAVRAFGTSVMAPNKNDSADAQLIASYLSMAVTKEQISPWKAPSPEGRALRELSRRREELTELHASECNRLEKLECMQEPPEAIVRNVRELISYLEDSIHNLEKEIEEHIDDDPGMREDIELLRSIPGIGDVTSVTLQGESDGLINFASVKGLVSFVGIAPSEHTSGTSVFKKSKISRRGNSRIRHHLYMATLVAARVNPVIKEFYERLLNRGKCKKLALVACMRKMLHIIWGVMKNRKRFDPCYSLK

SEQ ID NO: 278663 - protein, 454 aa, unidentified
MKKKETKLHPDVVRMPLVHPHAAGIDVGDKLHSVAIPAGIFPQRVKTFGTMTCDLEGIADWLLQASITTVAIESTGVYWKPIFSLLNKKGLEVYLVNSRQTKSVSGRKTDEDDAMWIQKLHSCGLLKSSYLPDDEQEALRTLVRYRHTLVQDCSRFKNRMQKSLELMNIRFHTLFADIAGKTSSAFIEAILAGERDPAKFLPLVDGRIKASKQEILQSVVGTWRSEHLFTLAQSYEMSKIYNEKISTCDKAIEERLQCYQAFANEGVCDEQNKAIGKPPIKKKKQRGAPVFNVRSYLQKIYKVDVLAIYGLSEMGGLEILAETGVDLKKWPTPNHFKSWLNLCPNNKISGGKLISSKLLKKKPNAASQAFRIAANTLQRSNHWLGDYFRRMKARGGNKFAVVATANKIAAIFYKMVTQQQEFKPVDLEAYQQKYKQAKIAFYEKKLQQLKNVAA

SEQ ID NO: 278664 - protein, 387 aa, unidentified
MHSENIAAYVGLDVHKETLAVAIAAPERLGEVRYYGTINNEAQAVRRLFQKLQGLYGNILSCYEAGPCGFGLYHQLTAMNIKCQVIAPSRIPKSPTDRIKNDHRDAISLARLLWAGELTPVWLPDLTHEAMRDLIRARAAAKRDSRVARQRILSMLLRTDKRYAGKHWTGKHRTWLANQSLSQPSQQIAFQHYCQSLEQIEDRILQLDQEISRLLPEWSLCNLVCQLQALKGVGQLIAITLVAELGDFSRFSNPKQLMAFLGLVPGEYSSGNSIRPRGITKVGNSELRRLLYEAAWSYRTPAKVGAWLIYYRPDSVTQYSKDIAWKAQQRLCSRYRSLTAKGKKSQVAITAVARELTGFMWDIALAAQSSFSQQKQNVVVNKNWPPL

SEQ ID NO: 278665 - protein, 408 aa, unidentified
MEVLYPHCAGLDVHKETVVACVRHMSDGVVRREVRTFKTLTTDLLALSEWLASEGCTHVVMEATGVYWKPVWHILSDGDVALTLANAAHVKNVPGRKTDVNDATWLADLLAHGLIRASSDAATQEQRGLLRTRKQLVRERAGHVQRLQRTLEDANIKLDSAISDVTGVSGRAMIQALIDGQTDPARLAELAHRRIRTAPEILREALRGRVTRHHRFLLALHLKQIDALDEAIAGIDQEVDAHVEPFRAAIAQLKTIPGISDLSACVILAEIGHDMSRFPTQGHLISWAGLCPKNDESAGKRRSSRMRKGAPWLKTTLIQCAWAAARKKGSYLQAQFQRLRARRGAKKAIGAVAASMLTAAYHMLNDGTLYHDLGADHFDRRAKRVATKRLIARLESLGYDVQITPSTA

SEQ ID NO: 278666 - protein, 334 aa, unidentified
MENIALIGIDLGKNSFHIHCQDRRGKAVYRKKFTRPKLIEFLATCPATTIAMEACGGSHFMARKLEELGHSPKLISPQFVRPFVKSNKNDFVDAEAICEAASRPSMRFVQPRTESQQAMRALHRVRESLVQDKVKTTNQMHAFLLEFGISVPRGAAVISRLSTILEDNSLPLYLSQLLLKLQQHYHYLVEQIKDLESQLKRKLDEDEVGQRLLSIPCVGTLTASTISTEIGDGKQYASSRDFAAATGLVPRQYSTGGRTTLLGISKRGNKKIRTLLVQCARVFIQKLEHQSGKLADWVRDLLCRKSNFVVTCALANKLARIAWALTARQQTYVA

SEQ ID NO: 278667 - protein, 409 aa, unidentified
MLKIVYPNCCGIDVHKTFVVAVIAITNNQGITEYHRKHFSTFTNGLTQLRDWLEYYSCFDVCMESTGKYWIPVFNILEEQTNVCLAHPKYVKAIRGKKTDKKDAQWIADLFKHDLVASSFIPPLKIRQLRDLFRYRMKLTQLQVGEKNRYQNCLTWSNLQIASVVSDVFGKSAQAIIKSILDNPQDKPNIEQLVHKRMKNKVQDLEIAMEGALTPEQAEKIRVIKAHYDALAICKEDLEQMIRELGQDYQHQVKLIQTVPGFKEDLSALRIISEIGCDMTVFDSAAKLCSWAGLVPANNESAGKKFSTRISKGGKYLKPFLVQVANAVVKSDKHPELRNKYLKLKKRRGHRKAISAICRRLLFSVYQVLRKQEDYNPVLQGLTEIRNPDKTMSVQDAVRFAQQHGFNVA

SEQ ID NO: 278668 - protein, 356 aa, unidentified
MISRGALHIPRIIVGVDTHKDEHVAVVIDKLGARIGQRNLPTTYTGYAGLEHWARSLGEIEAFGVEGTGSYGAGLARFLRGQEHSVIEVNRPDRSTRRRLGKSDPTDAEMAARAVLAGVARDQPKSGVDEVEMIRMLKSTKDSAMKGRTQAINQMKALIVTAPVELRAVLSGLTASQLVARCTGWRNSQLETPTTAAKYALRSLARRYSQLTEEIGGLNKELARLIVAFAPMLMKSLGVGPDTAAALLVTAGSNPERLKSEAAFAALCGVSPIPASSGKTNRHRLNRGGDRQANAALYRVVLVRLRYDVRTRTYLQRRTEEGKTKTEVIRCLKRYVAREVFGILHDIGMRHTVQNA

SEQ ID NO: 278669 - protein, 341 aa, unidentified
MGVKKYWVGIDLHRNQFTYCVRYSDGKELVGKESITHLDRFARRLGKHASVAVEATGNTWMFCQVLKKYAGRLVVVNPNQFKVISHSVKKTDKNDAKVLAEFLEKDLLPEVRMKDELQAKIASLTQTREKLVQLRTVLKNKINNLFASHFILLKREEMSSEKGLQKVLSHHFDSVSDVELRVMVDQIRSLNKSIEELDKAIEDNGSKMDGFENLKSVKGIGAKGAATLLSVIGNVNDFRSSKQLAAYIGIVPRVSDSNETVHHGRITKLGSKIARTTLVQCALIAKRYNVYLFNFHEKVKARRGGAKANIALARKFLEIIYRILKNKWIFEDFTQFKLKTT

SEQ ID NO: 278670 - protein, 318 aa, unidentified
MLNESFVGIDVSKDWLDLGWEPAGQSERLVHDEVAMMGLCERLARERPCLVVLEATGGLETHLASALAAAGLPVAVVNPRQVRDYARACGRLAKTDRIDALVLAAFARAIRPQVRAPRDDETLELGALLARRRQLIDMRVQEKLRLERASPVQRDSIKEHIAWLTERIARLDTDLTHRLRSSSLWRDKEDLLKATPGVGTITRVTLIALLPELGKLNRREIAALVGLAPFNRDSGQHRGERVIWGGRAQVRRVLYMASVAAIRSNPVIRVFYQRLRAQGKPGKVALVACMRKLLTIMNAMLKHNTPWNPNSLDLEHSC

SEQ ID NO: 278671 - protein, 386 aa, unidentified
MDHPTTLSVPDPTGICGDCATLFVSLELSRSTWVATSLALGSRKMSKHTLVGGDARMLLDLLARLKSKAEQRMAAPIKIVAIQEVGLDGFWIHRLLEANGVESHVVDPASIAVPRRHRRAKTDAIDGETLLRTLMAWQRGEPRVCAMTVPPSPSEEDRRRVSRERAMLLRERIRHTNRIRGLLFGQGITNYNPLHKNRRKRLEELRTGDGHPVPAHLKAEILREIDRLELVLRQISEVEAERDKMLRPAQASSPAALLMRLKGIGAEFAGVLYLEGLFRHFENRRQLAAYAGLAPSPWKSGSVDHEQGISKAGNPRLRTTMIELAWMWVRYQLASALSCWFRQRVGSERGRIRRISIVALARKLLIALSRYINHGEIPAGAIVKPV

SEQ ID NO: 278672 - protein, 355 aa, unidentified
MNNAKYIGLDVHQATTVAAVLDAGGKLVLEAIVETKTSTILELIDAIRGELNLTLEEGTWAAWLHDLLEPHVHRVVVCDPRKNALLKQGNKSDKIDARKLAELLRAGLLSPVYHHKGASLSLREAARSYLTLTQDASRVMSRIKAVYRGLGIACAGEKVYAARHRSEWLAKLGEPARRRQTERLYEQLDQLLPLRQQARRDLLEESRKHAATRWLRQIPYIGPVRAALLIALMQTPHRFRTKRQLWAYCGLAVETRDSAEYCIRDGQLQRSRKWVRVRGLNPNRNAHLKQLFKSTAISASTKPGPLGDYYARLLDKGIKPAMARLTLARKIAAITLVVWKKGERFDPTKLNMQAA

SEQ ID NO: 278673 - protein, 405 aa, unidentified
MKLIRDKVAGLDIHRDTVVACCRVHHQGRRVAVTKRSFSTTTKGLTELVDWLSEASVTTIAMEATGVYWKPVYYSLEGHFDELWLCNAQHVKNVPGRKTDLNDAEWLADVASHGMVRASFVPPPEFRQLRELTRYRKTQVDMRSQQIQRLEKVLQDAGINFTSVASGVWSQSARDIIEAMIDGERHVAVLAQLAKSRMRAKIPQLEEALSGHFGDHHAAVSREIIDHIGYLDATIAALGAQIKSALRHYEAALNILCSITGISETTAQVMIAEMGIDMSRFPTPGHLCAWAGVAPASYESAGKRRAAGTRKGGTWFYDDRSLSRRTPPFASRAATSLPNTFGSRATVDRTKRWWRWRTRCWAWLGICSPTERSTRTRGLTTSPSDTIRPSRQSGSSVGSRRSATK

SEQ ID NO: 278674 - protein, 350 aa, unidentified
MIVGIDVHKHTHAVALIDDRGGQVAALSIANSPKGYRQLIDWLVDHDAASAVIGVESPGSYGRCLVVALCGAGFEVLQVPAWRTHRERHHRGPGKTDPGDALSIAHVVLRHRHELGPAQEPELVRALGMLELQRRRFVRDRTQAIQRLRSDWTQHDPVAEAAVLRCDRKRELRQLKRIRLGDSLHQRTAARCIRELAHDIDELNHKIAALDTEIADLLAEHDNPLEDLLGAGTNLAATIIAQAGDVRRFRNAGAFARFCGAAPIPCGSGQTSGRHRLHRGGNRQLNAALYRIAIVQQRHHPAAKAFLDRKIAEGKTAREARRALKRHLANVVYRRLIAWANTTPAFTNLT

SEQ ID NO: 278675 - protein, 380 aa, unidentified
MSTAATRSTQPARTLHLALDLGNRTWKLAFATSIAHAPRLRTIPARDLTQLDAEIAAAKTRFGLSPNAPVVSCYEAGRDGFWLHRALIARGIASHVVDSASITENRRARRAKSDRLDATALVRLLLRHQAGERGVWSVVHVPSVEDEDRRQLHRELFTLTRQRTRQVNRIKGLLALHGIVLAKPRGLPVRIPALRDWSGAPLPTALAARVAREWTRLRAIQQDVLALRAARRALLEAPDAASDPLLQKVRRLLALRGVGEVSAWLYTTEFFGWRAFQNRRQVAGLAGLTPTMRASGDLEREQGISKAGNALIRALAIELAWSWVRRQPASALTRWFRERFAGGGPRLRRIGIVAVARKLLIALWRYLETGVVPEGAMLKA

SEQ ID NO: 278676 - protein, 344 aa, unidentified
MNTIRVVGIDIAKSVFQVCVWMVDGSIAYNKKISRSKLLDCVRHFEPGTLIAMEACSTSHFWGRTFRTMGYNVRLIPAQHVKAFVRSQKNDANDALAICETALRPGIHFVPVKTAEQQDIKALRNTRQLMVEQRTALANQLRSLLAEYGLIIPVGIQCLQQHLPELMEDASNELTFTVRRLLSTLREDMQALNERVTGLDKEIAALSSQQAAYRQLLTIPGVGPLIAAAFISEVDAGQFSNGRELSAWCGLVPRQHSSGGKQRLSSVTKNGNRSLRTLIIHGARSVMRCMKKRDDSLGLWLQRLEARRGFLKTTVALANKLTRIIWRVLTDGVDLNMQKAVAMN

SEQ ID NO: 278677 - protein, 457 aa, unidentified
MNKKMEMEIVNPHCAGIDVGSKSHYVAIGQSLDDVREFGVYADDLTDICLHLKSYDITSVAMESTGSYWQNLYVELVRHGFEVVLCNGKFTKNAKGKKTDVKDSRWIQKLHTLGLLTGSFLPDFTTEQLRTYCRQRTNWIELSCEASQKMQKYLRLLNFRLDVVVNDICGLTGMTIIEDICKGNLDAQQLASHRHYNCRKSEEEIARALKGNNRADYLFGLKQEFESYRFYQKQIDACDKQIALFLKTQINSHPEKKKLKAEAKSHKRINKNTVKNLDINQAAFQYFNGVDLMRVEGLSHSTILTIMSEVGPDGFFNFKTAKQFTSWIRLAPNNKVSGGKILSNHIPRGSNRLKIALRQAANAIGNLKDTHLSNFFRRVAYRKGRQAAVSATARKLAVIIWNMVTRKMQYQPPTQYLFLDQKRKLKMVSRIKQNIVKFELKPEDVGFCNTLILSAGD

SEQ ID NO: 278678 - protein, 318 aa, unidentified
MNIIGLDISKDTIDATLHKTNGSIHYIKFKNNDDGLKQFRLWIKGNRIRKAYIGMEATGIYYEKAADMLSSYYTVYVINPLKIKDYGKSRFNRTKTDKADSNLIADYIKRHQDTLIPYQIPKNKALQKLINLKNQLQQHQKQIKNRLHSTEEDFIRNIHQDLIDTIQDKMEQVKIAISEQIKKQTDNNYYRNLQTIPSIGKDTASVLYAQLTEKHFKTANQFVSYAGLSPAIIQSGTSVRGRGRLSRYGNRRLKSTLYMPALCAYRFNAFPKLINNLKKAGKPKMVIIVAIMRKLAKLAYYIVKTGQPYDAERHRLNQ

SEQ ID NO: 278679 - protein, 373 aa, unidentified
MVIQNNQNGYRYLKNYIKHLDSLFILFESTGIYSRGMKRFCEIHKIDYLEMNPLEAKFKTSSLRSWKTDKSDAHKLALLAFRMKDSKVQRQSEEIYFELRERARFHLEMEINQNRLKVELVETLHQTFPGLEKLFTNRYSKIALNIAKAFPHPDFVSTLTHDELVEKVLHSTDKGISVNKAHKYVQKLIEIKNNSFPNVDKSSFLLQKVQYLCDKLLIGIEEMKEFDQEMIDLAKNTTEFENIISIPGIGELTGALLIGELGNIREFKTNKQLNAFVGIDIKRYQSGTSKSRDTINKRGNKKARRLLYLIIMNIIRGRNHYQSHIVDYYYKLREQPHGKTHKTAVIASINRLLKTIHYLIVNNKLYDYQKAPH

SEQ ID NO: 278680 - protein, 379 aa, unidentified
MKKHCNSAMESEVRAKRVKSRGPVRRETRDVMAELVGKLSKKMDAKALSARLGEEYRRNAVCPNLDRLTVGMDLGDQWSHYCILGLRGETLAEGQMRTRQQEMAEFYGGLAESRVVIEVGTHSAWVREGIAECGHEVLVANPRLMEGSKRRQRKNDRIDANKLARLGRVDPQSLHPIEHRSKEVRQDLLVLRARDALAAARTELINTTRGLVKSMGARLPKCSSPSFAAKVEEAVPSEVREALLPLVRLAAALSDNIQAYDQQIEKLASKKYGHTKLLRQVKGVGPITALAYVLTLEHPERFAKSRDVGPYLGVVPKQEDSGDSQPQLGISKAGDTMLRKLLVGSAHYILGPFGPDTDLRRYGQRLCERGGKTRRNGPR

SEQ ID NO: 278681 - protein, 325 aa, unidentified
MQAKKLCCGIDVSHTKLDVCYQNNLGELFHLQVGNNNAGYQKILDHTGTQYHFVMEATGVYYIRLAFFLHRRGCVVSVVNAIAIKRYIQMHLERNKTDKKDAGWICRYAIDQRPTYWQMPDSAYFESKQLYNTIRDYTEQIKRINNQLHSLRLLPVPSKDTIKSLEKIIVCMEKEIKQLEQKLQLLLVQWQPDQLKNVSSIKGIGKRAAAMLIVFTQGFKHTQNHRQLISFAGLAPTQYSSGSSIQGKPRIYKRGGKNLRDVLYMCSMNAMKTNTACKALYERLRANGKTGKQALIAVCNKLLKQVFAVVKNNSLYQPNYCSAKP

SEQ ID NO: 278682 - protein, 357 aa, unidentified
MKKSKRKKEQKVLDLDVLEQLNLNAAGIDVGASEMYVCVPVDRDEEIVKVFSTFTVDLHRLADWLESCEVDTVAMESTGIYWIPLYEILEDRGLEVNLVNARHLKNVAAQKTDVLDCQWIQQLHTYGLLRGSFRPEEEVCAIRSVVRHREMLVSYRSAHIQHMQKALHLMNVQLTNVLSDITGETGMKIIRDIVAGERDPHVLASYRHGRCAKSKEEIAKSLQGNYKREHLFALKQAVELYDFYDQQLRGCDEELEALYAIFDPPPTAVEPPKAKKRKHRKNQAHFDLATSLYNMTGVDLTQVEGIDALTAQVILSEIGPDVSKWPTVKHFASWLGLAPQNDVSGGRVLRRGTKKDQ

SEQ ID NO: 278683 - protein, 355 aa, unidentified
MDRTKYIGMDVHQASISIAVRDASGKLVMESLIETKAATILEFLQGLKGTLWVTFEEGTSAAWLYDLLKPHVVKVIVCDPRKNALLKTGNKNDRVDARKLSHLLHAGLLTPVYHGESGVRTLRELARSYLTLTKDLTRVMNRLKALYRSWAIPCVGEKVYSPRHRSAWLEQLSEAGVRRRAEQLYQQLDILLQIRRDARRELLRESRKHPAHELLRQIPQLGPIRVALLIALVQTPHRFRTKRQLWAYCGLALQTRSSGEYRFTAGQLQHSNRLPALRGLNTNHNHDLKNVFKSAAMHVSTSPDALGDFYRSLLAKGMKPAMARLTLARKMAAIVLTVWKKGARFDPGELKRQAA

SEQ ID NO: 278684 - protein, 316 aa, unidentified
MQSLDYQQFENDKEGCVSMLKWVGTKSNEPLERWLFCGEHTGLYSIILSEFLVSKGLFLWLENPLQIKQSSGIKREKNDRVDSREIALYAYRFQDKSIAYQLPDKALKSLELLLSYRERLLSNKHALLVSSSEIRGVLQRNTTARFIHEQSQKDIDRINKKIKEIERRMLEEISRDESLQENYDLVSSVKGVALINTVAILVATQNFTRFDNSRQFACYSGMAPFGKQSGTSVNSKPRVSSLANKKIKVLLTQAARCAINYDPNIRQYYERKRSEGKDSWLIINNIRNKMIHRIFAIVKNKQLYQVEYRNQLDKVA

SEQ ID NO: 278685 - protein, 344 aa, unidentified
MSIKVVGIDLAKNYFQVCVLNIDGTISSNRKVHRDRLLHTIRQLPGNTPLAMESYASSHYWGRVFLGLGFKVSLIPAQHVKPFVGRQKNDANDARAICEAYSRPDIHFVPVKSIEQQDLKALRSVRSRLVEQRTGLANQIRGLTAEYGIVFPTSIRALRNHLPLIIEDAENELSHVMRNLLQTLYCDFINISGKIDDVTQDIITLSQQSPRYKAIKNIPGCGPILTAAIVSEVGSGQQFQNGRQFSAWCGLVPKQNSTGGKNSLGALSKSGNRDLRTLLIHGARAVLRCRTSSMDPMGAWLRGLIERRGKAKAIVALANKLGRIVWRVLTTDCEYDVNRAFKPA

SEQ ID NO: 278686 - protein, 451 aa, unidentified
MSKQRNKVVSLPVIEPNAAGIDIGATEIFVAVPADRDPEPIRCFPTFTVDLERLADWLQQCRIRTVAMESTGVYWIPLFQILEKRKIDVRLVNAHHVKNVPGRKTDVSDCQWIQHLHSVGLLRGSFRPDDEICAIRSLWRHRDNLIQLATLHLQHMQKALDQMNLQIHHVISDLDGTTGLAIMDAILAGERDPLKLAQLRHPRIRASEETIMKSLVGDYREEHLFTLRQSLKAYRYYQELIQEVDAQVKQMMQRLPSKVAEGEEPPQGSKRRARKTPWRNEPSQLREDLYRAFGVDLTEIPGVNSLTAQMLLTEIGPNLDRFPTAAAFCSWLRLCPDPKISGGQVLSSRTRPTKNRAALALRVATQALHRSDCFLGDYFRRMKARMGTPKAMTATAHKLTRIIFHLITTQQPYDTTIFQKQEERRQHQKSARLHAQARELGFQLIPINVVP

SEQ ID NO: 278687 - protein, 339 aa, unidentified
MQVTTIGVDLAKNIFQVHGITESDEVAFNRPLRRAQVLPFFTRLDPCLVGMEACSTSHYWARELTRLGHEVRLVPPMYVKPYVKRGKSDAIDAEAICEAVTRPTMRFVENKSVEQQALLSLHRARSLIVRQRTQLINALRSMLAEFGVYIAKGLARIIGFSQGVLAGTKLELPEIAQDVVHNLCGQLDVLHGQVRWYETRLRLEAKCDPRVKLLQTIPGVGPVTASALAATIGSGHQFKNGREFAAWLGLTPTNRSSGGKERLGKITKMGDQYLRQLLVVGMTSLVRQTKSHPERANKWLAALLERKPARLATVAMANKTARIVWAVLTKNEPYMPRTA

SEQ ID NO: 278688 - protein, 395 aa, unidentified
MPVTNFENSIDFNGQKFYVGLDVHKKSWTVTVRSLGRQVAHFTQPPGAHTLAGTLKNKFPGGDFYSAYEAGFCGTTHHEMLCRLGIKNIIIHPADMPTTDKQKKNKTDTHDSRAIAEHLEKNTLRGIHVLTRQQQELRSLFRLRESKVRDVTRANNRLKGFLFYHGIQLPESVMKKERFSKKALEWLDNLEMISEAGTLAKQELINALRYQREQEYRITKLLRSQIQSSYDEPYKRLLTVPGIGPVIAMAMIAEIGEFSRFDDPDEYVSFLGLTPWNDSSGDTIRTKGIQPRCNTHLRPLIVEASWVAIRVEPKLFAYYSKHAVKNNKHAIIKVAKKLVLIAKAVVLNNQNYAKDHLHPKQEKKHMKRKGFSQALAEQHIKQTSDRSMLLELSDE

SEQ ID NO: 278689 - protein, 359 aa, unidentified
MHATTVAVDLAKNVFELAVADEHWRVVERHRLSRAQFERFFANRSVQLVVMEACGSAHFWARQIRALGIDVKLLPPRYVRPYVKRNKTDAADAAALLEALRCADIVPVRIKSIEQQALQALHRTRSLWMATRTARINALRGFCREFGITIASGARLGLEQIGRVAADPHSAIPPLLRETLSLLIEEIRLLEARIARLETQLSAAARDSAACTTLLSVPGVGLLTATAMLAATGGTVSHFRDARHFASWFGLTPKERSSGQSRHLGRLSKRGDRYLRMLLTHGARAVLRAATVSERAHRPLDPLRQWALALQARSNHNKATCALANKLARICFAALRDQQPFVSVHPHHKLARQAYPMPA

SEQ ID NO: 278690 - protein, 315 aa, unidentified
MSEIVVEKFVGIDVSKSTLDVCVEPIIEELHVDYDDKGIARIVKRLLELTPTLIVIEATGGLEVRISMELASKGLPVAVINPRQARDFAKATGQLAKTDRVDARVLAAFGRAIRPAVRLLRDEETLELDDLLTRRRQLIDMRVQETLRLGTASKLQKKSLTTHIAWLNKRIDDLDKDLTNRLRKSKVWCAKDDLLSGIPGVGAVTCMTMLGRCPELGTLNSREISKLVGVAPLANDSGKHHGKRFIWGGRADVRAVLYMAALSAMRCNKVIKDFAERLKQAGKPPKVIIVACMRKLLTIMNAMLKNNTPWDPKIA

SEQ ID NO: 278691 - protein, 412 aa, unidentified
MDVMYSCCCGLDVHKKTVAACLMTSTEGPEPLKEMRTFRTMTADLLALADWLQEKGCTHVAMESTGVYWRPVSNLLEGQFELLVVNAQHIKAVPGRKTDGKDAAWIAELLRHGLLRGSFIPSKPQRQLRELTRYRSTLVQEHARTLNRLQAVLEDANLKLVSVVTDISGVSARAMLAAILAGERDVEALADFARGRLRAKRDQLKEALEGRVTAHHSFLLTEHLSMLEYLDEAVARVSTEIDQRFTADQEAIALLDTIPGVGPRAAEMLIAAIGTARSRFPSAKHLASWAGMCPGNHESGGKRLHGKTRKGSRWLRQILVEIAHVASKTKTTYLAARYRRIAARRGKKRALMAVGHTVLTIVYTMLSRKQPYQDLGAAYFDQRERHRVERRLVQRLERLGYEVALQPRALAS

SEQ ID NO: 278692 - protein, 417 aa, unidentified
MERGKKSRYSERYIGLDVHKHYITVGGLNAEQEIVLRPRNVEMERFPQWAEQNLSETDEVVLEATTNTWDVYDTIAPLVKRVVVAHPAEVKQIANSRVKTDNQDVLRLIRLLMANIVPEVWVPPVDVRQLRAMISYRWRLVKMSTAIQNRMHSLLHRHNIQAPEGKIDTGENREWWQKLSLSPLEDLRLKQELKMLQMVRVNIVEVDAELGRMSTGERWGDQAVYVMQIPGVGIIVTMTILSAIGDIRRFESPKKLVGYAGLGAGVHDSGQTHRGKGITKMGRKELRWALVEAAWQGIRSNPQWRAEYDALCKRKHPNQAIVVIARKLLVTLWYLLTNQEAYDRSSEEDLAYKMLTWSWRIDQTALNGMTRQQFAKYGLLRLGKGEDLTRIVKGGLPRRIAPKEEVLALKPELNLKQ

SEQ ID NO: 278693 - protein, 427 aa, unidentified
MTRFATDEFAAFIGLDWADTKHDICLQVAGSDKREFKVLEHRPEVIDAWTTDLLQRFQGRPIAIALELNKGPIVEALRKYDGLVLFHINPMMLARYREAFTPSRAKDDPTDAELQLDLLLRHQDKLKPLAPQSPGMRALSQLVEHRRRLVADRVRITNRLTSALKTYFPQVLQWLPNKETQLFCDFLSQWPTLKAAQLARRSTLERFFRQHHVHGEQRINERLEAMKSATALTSDEGIIMPQALLVKALVAQLRATLEAIESFDHAIAERAQHHPDFAFFEALPGAGAALAPRLLVAFGEQRERYGSAAEVQTYAGIAPVMERSGKQSWVHWRCQCPKFMRQTFVEWAAESIQFSFWARAYYQQQRDKGASHQAAVRSLAFKWIRIVFRCWQTETPYNESTYLAALQRQGSPLIPNLEKSSKRGENM

SEQ ID NO: 278694 - protein, 347 aa, unidentified
MKVLLKQTVGIDVAQNELVVSLGRMDEHLSIEVYAYKVFANTKKGYSALVSWVNKQTSTSTEIRYVMEATGVYHESLAYYLYNVKKQVSIVLPNKISNYSRTLDIKTITDKSASQAIARFGLERQLEVWEPPLKIYNDLKQLCREREQFIQERTMLKNQLHADHTSETSNASSVKRTKKRISIIDLQEKEIREEIAVLIKGDHVLADKMTIVSSIPGIGSLTAVTIIAETNGFELIKNKRQLVSYAGLDVKEKTSGTSVKSKPRISKRGNRYLRKVMHFPALAAIRTDGRFREIFLRLVSKHGIKMKAVVAIQRKLLELTFILWKNNSYYDPQFVDYSIKLKRGRSI

SEQ ID NO: 278695 - protein, 314 aa, unidentified
MFIGIDVSKARLDVAIRPSAEKLSVSNDEAGIQALVTRLSEIKPALIVLEATGGLERSVSGTLGSAQLPVVVVNPRQVRDFAKALGQLAKTDRIDAEVLARFAEAIRPPLRPLPDKVSLELRSLIARRRQLIEMMVAEKNRLSTASKAVRKRIEAHIRWLETELDRADKDLDHSIRQSPIWCENEDLLRSVPSVGPVVSRTLLAELPELGRLNRKQIAALVGIAPLNCDSGTFRGRRGIWGGRATVRAVLYMAALVASRRNSVIRNFYKRLRDKGKAPKVALVACMHKLLTILNAMIKHKTRCSEIIPQTSLDF

SEQ ID NO: 278696 - protein, 480 aa, unidentified
MSLKRDASSEKNQTVRYTKRLEIVHPHCAGLDIHKEKIWVCTSPFHDGVAPEVSTFATDTGSLEKLAAYLRERKITTVALESTGVYWLPTFLMLRQKNLNPILVNPRDVKNIKGRPKSDRADCVWICRLHSYGFLRASFVPPDVVLDLRSFYYAHEKLTVDSASMLQRMNDELVKMNIRVDLILTDLSGASGIRLIEAILGGECSPERLYQLLDEQIMKKGKDVILPYLHGDYREGNLAILRTWYDLYLGIRKEISRINQKIYELLQSFPKKADAKDLPRVKKNYREDKLDFPYELRPIFFEIYGVDLTQLPGIGAGVLLALVCMVGTDLSPWPSAKHFVSWLGLAPINKESAGYRKSGSTQRINNLLGNAFKMAAMAAKRTTTDIGRTARHLAGRILPKKAKVATARKLAELVYNILQNGMELKVKTEEEYEQRRKQRDIQFFVKGLFKYIINGQLLPEVEKVYQEHCQGIKAASLTNA

SEQ ID NO: 278697 - protein, 360 aa, unidentified
MFCERTSVGLDVHARSVVAAAIDGRSGEVFRARLTPSHADVIEWVGKLPGPCAVVYEAGPTGFGLARALSAAGLRCQVAASSKLLRPAGDRVKTDARDALNLARLLRLDEVVPVRIPSAAEEAARDLVRTREAARADLMRARHRLSKLLLRHGIVYYDGKAWTERHDRWLHHQRFDAAPTQSAFEDVYEAVVLATARRARLDEKITALAADSEFSPLTRRLACLRGISTLTGFALAVEIGDWDRFTGASIGAYLGLVPSEYSSGTSRTQGAITKTGNSHVRRLLVEAAWHHRSTYRPGAVLRHRWDQAPAAARARAHAGNQRLHARWVGLNLRRKAAVIANVAVARELAGWCWSLAVLPD

SEQ ID NO: 278698 - protein, 389 aa, unidentified
MPTTETITAAKITTTESTAIFVSLELSRSTWLITALAAPLGAKMSRHQVRGGDMPELLKRFSDMQHAVRHRTGQIVPVIVIQEAGLDGFWIHRALVAAGIESHVVDPASIAVSRRHRRAKTDRIDGEALVRTLMAWRRGEPRVCAMVRVPTPEEEDRRRVCRELKSLVGERIRHVNRVKGILFAQGIGDYEPRNKDRRHRLEDLRTGDGRPLPHHLKALVLRELEIIELLNRQIETVKSERDALLAEMQPIGSTPGPVRMLLGLRGIGPGFAGALWSEGLFRTFRNRRQVAAYAGLAPTPWKSGTINHEQGVSKAGNPRLRAIAVETAWLWLRHQPGSALSRWFHNRVRQLGPRTKKVTIVALARKLLVALWKYVTSGIVIEGAAMKTV

SEQ ID NO: 278699 - protein, 405 aa, unidentified
MVRYIGMDVHREFAQLAVVEDGLVRDEGRIGVTPEALRRWAADLRLDDEVALEATGNSDAIANLLTPIVARVVVSNPSKTRAIAEAKVKTDKVDARILAQLLAADFLPPVWLPDDRTRALRRQVTRRAHLVRQRTRVKNQVHAILARNLAPTPPVSDLFGKRGRHWLSMQPLPADERSSVHALLRQLDFHGADLAVVDRQLAVEALTDATVARLITIPSVDAIAGISIVAAVGDFHRFDDPDRLVAYVGLNPKVRQSGNSAPVHGRISKAGRAQVRGVLVEAAWSASRAPGPLRAFFERIKARRGFQTAVVATARKLTVLAWHLVTKDQDYAFARPSLVSHKRRKLELAAGAPSRRGNHRIPGAAYNDKQRRSEEKQIAEQAERAYQVFVVHWQPCKPTRTRAPV

SEQ ID NO: 278700 - protein, 344 aa, unidentified
MGEVSTIGLDIAKSVFQVHGVDDAGAVVIRKRIGRSKMLEFFTDLPPCLVGIEACPSAHHWGRELFGLGHTVKLMPPSYVKAYLKRSKNDANDAAAICEAVTRPSMRFVPIKTKQQQAALMLHRTRQLLVRQRTMLSNALRGHLAELGIVSAKGRHGTAELLKIITDVEDDRIPPAARGILDVLARQYGAIGAEIGSIDKSILALHRSCEVSRRLAEIPGIGPIVATALVAEIGDWKAFRSGRNLAAWIGLVPKQHTTGGKDRLGSITKQGNRYLRWLLVIGATAVIRYAQKHGTKNRPWLGRLMERRPAKVAAVALANKIARMAWAIMVHGDRYNEPKLLMAA

SEQ ID NO: 278701 - protein, 416 aa, unidentified
MKLFVGIDVSSEKLDVCFLTDDNQLSILSEISVANDIEGASFIRETILEFNNSYHFDQIVIGMESTSMYSFHPSIFFHEDEKLKKLNTLVTIENPFRVKQFSRMFDENKTDRNDALRIADFLRIQRFTTSPIKEEKYMALQRLTRTRYQLIKQLIRTKQHFLENLTYKCNTLAREMRDESTSLFSATLISLMTEDFTLDELAELPLEAFCDLLQEKGKGRFKQPEKIAKAIQRAITMSYRLGALAQESINVVLSVLVREIRALEKNIKELDKAIEQVIVVIPEYQCLTSIPGVGKVYAAGLIAEIGQIERFEDQTKLAKYAGLSWKVNQSGNYQSQNTPLTKQGNRYFRYYLVEAANSVKNYLPEYKAFYQSKYKEVPKHQHKRALVLTARKFTRLVDTLLRKHQLYTPPRSVIEK

SEQ ID NO: 278702 - protein, 364 aa, unidentified
MRKQASTKKRGPRKVKQDWESLPTLNRNAAGIDVGNAEHHVAVPMGRDAEPVQRFGSFTADLHRMAQWLKACGVDTVVMQATGVYWVALYQILEDYGLQVNVVNAQHTKTLPGRKTDVLESQWLQKLHTFGLLNNSFRPTEEIRVLRSYMRQRERLVTAASTAIQQMQQALTEMNVQLANVISDISGKTGLAILRALGNGERDPQVLSQFRHPSIHASRQEIAQSLEGNWRDELLFALEQNLALYDIYQLKIAECDKRIARQLKTMEPKNPPAPQQDDASRPSRRKHAPEFDLSEQLGRIAGVDLTQIDGIQARTAQTVISEVGVDMSRWRTEKQFASWLGLCPDNRISGGKWRPGAYYEAKVH

SEQ ID NO: 278703 - protein, 329 aa, unidentified
MQQTLIVGVDVSKSTLDICFKPSGLPAQISNDITGFKQWHKQLKQLCSGGQAVMVVMEHTGHYSFRFEKFLRSRGIAYCKVPALQIRRSIGITRGKTDKVDAARIADYGWMRRDILLADAEVKEEIRELDLLISLRQKIVKDRSGYKSRIKAMKVTGVCDSNSLLIRAQQDIIKVLDKKIKDVEAQIKVLISSNARLSETVRLLRSIKGVGLIVAAYMISCTQNFTRFNNFRKFNCYAGLAPFKHESGSSIKGRSRVSHLANKKAKTLLNLAACCCIQHDPEMKQYYQKRVAEGKKKMSCLNIIRSKIVSRMFAVIKRQSPYQPLPIAA

SEQ ID NO: 278704 - protein, 419 aa, unidentified
MSKQNVEIAVFIGLDWADQKHAVTLQESGSDQRQRFTLDHTPEALQNWIQSLRDRFGGKPVAIAVEQKRGALIYALMHVEFLHLYPVNPVTVAKMREAFYPSGAKDDPRDADLLLDILISHRRHLRVWTPDDALTRSIQLLTEDRRRIVDERTALTNQLTAALKMYFPQSLDWFGDLHTARACAFLQRWPSLDQLKQASPSSIRKFYKAQGYRGDEKLEQLVGNIKKAQPLTRDSAVLLSCSMKVETLVQQIPLLTEAIERYDQKIAVLFNQHDDSTLFGSFPGAGAALAPRLLAAFGSNRDRFECASQVQELSGIAPVTERSGEGLWIHWRLACSTFLRQTFHEFAGCSILQSDWARACYDQLRDRGKSHHAALRALAFKWIRIMFRCWKNRTPYDEVLYCNSLKLRRSPLADELPAT

SEQ ID NO: 278705 - protein, 334 aa, unidentified
MLYAGLDIHKAVFQVVVLDPDSGELCESRFEPSRERLGDWAMEWQGKLAAVAIEATTGWRWVARELEAHGFEVHLVDPGRASALRGRRRQPKTDRLDARWLALLLARELLSECEAWLPPAEIQRLRDRTRLRKALAGERTGWAQRLHALLAHEGWPCSRGRLLTREGSRWVAALELDAHVRGQVDVIVAVMAALEEQLELVESELRRFARADPRCRALQTIFGVGPILACHLLAEIGDVRRFQRPRQLVRASGLDPSVIESADSKRRGRLAKQGSRHLRWALVEAANHSHRHSSPDHDLYTSTVRRCGRGRARLTVARKIARRSYHVLLAAEAA

SEQ ID NO: 278706 - protein, 427 aa, unidentified
MTQTIPASTFAATIGLDWADQKHDLWIQASTGGKPEHLILEQTPEAIHEWVAKMGARFPNQRLAIAVETSRGAIISALQAYAFIVLFPINPKMLCSYREAFCVSGAKDDRTDAMLLEEYVRFHFAKLRPLQPDTELTRKLGGLVENRRDLVDERTRLVNQLHSLLKTYYPLMEVLFDDLTTLLATQFLLKWPELASLKKAGAVALRKFFYGHNCRSAQTLEQGLHALEKAQPLTIDPALIQPAVLKVKALAGMLKVLHEAIAEIEDHTSQAMDAHPDAPLFRSFPGAGPVMAPRLLVAFGTNRDRFENAQETQQFYGIAPVKKQSGQSKVIHMRYRCPKFGRQTFHENAGHALRKEGWTKEFYDQQRERKKGHHAAVRSLSFKLIRIYFRCWKDSKPYDRARYEKALDTHGSPLSAALKNKVSKPTK

SEQ ID NO: 278707 - protein, 389 aa, unidentified
MNFPDRWGDWGLARMIRVAAPLGMIGRGPVCIGHKHRGEAAVGYFAGLDVSLEETAICIVDDEGRILREARVASERYALVAFFNALGMTMERVGLEACSLTAWLHQGLSEAGIPAVCIEARQARAAIGAMPNKTDRNDARGLAQIMRTGWYRAVHVKSPSCRSWRALLTARRMLLNKRRDIENGVRALLREAGLKVGAPSRKDFPARVRELASGDAVLTGLVESLLSVIKVTTDEVARLTKRVLDEVRVEPTCRHLMTVPGVGPLTALAFRATVDRPDRFRKSRDVGAHLGLTPRRYQSGETDVQGRISRCGDELARTALYEAAHSLLIRSRKWSALRAWGMQVAKRRGIARARVAVARKLAVILHRMWVDKSEFRWGKQAATAAKAAR

SEQ ID NO: 278708 - protein, 343 aa, unidentified
MQITTIGLDLAKSIFQVHGVDATGQIVVRKSLRRSQMLPFFAKLPACLVGMEACGTSHHWARELIKLGHEVRLMPPAYVKPYVKRGKTDAADAEAVCEAVTRPTMRFVPVKSPEQQAALSMHRTRDLLVKQRTQLINMIRGLLAEFGIDIPKGLERALLMARQIVDGKSPDVPIEAAKIVATLSQQALDTHVRLRQIDRDLAVWLRGNDVARRLMTIPGIGPVGATALAASVTDPHQFRSGRQFAAWLGLTPLQKSSGGKERLGRISKMGDKYLRKLLVVGMTSLVRRAKQNPAVDPRLADLLARKPTRVATVAMANKTARIIWAIMTRGETYHAGHRPALAA

SEQ ID NO: 278709 - protein, 318 aa, unidentified
MREAKLACEPEALITWFGKLEVGMARIGLEAGPLSQWLYARMREAGLSVELLETRHVRDAFRAMPVKTDRTDARGIAQLMRLGWFRSVHCKSLPAQELRAILTARKLVQTKRHDLEMSLRGILRGFGLKVGQTTPRSFEARVRELVDGHPTLTVVADAMLLARAVLVEQLGKLQKRLVSLARQDMRARLLMSTPGVGVLVALTYAAAIDDPARFRSSKAVGAHFGLAPRKYQSGETDVTGRISKIGDAGVRTALYEAANVILTRPVKGSSLKSWAMRVAKRAGMRKAKVALARKLAVVLHRMLANGSAFVAGKAAAKA

SEQ ID NO: 278710 - protein, 401 aa, unidentified
MKRLSGGIDVGSESHHIIILDEEDNVLYNQKVAHKLNEFTESIKLFKQIEKKEGGKISFALEGKNGYSNPLDQILLDKGFILYNVDNLKLKRFREAFAGEWRDDERDSLMLSKMLKLKDYINSKREKVFIKIEKPSLVTESLKLLSRHQQTLIDEKIRLVNRLGKKLLEVCPQILELGKLKNKKIIAILAKYPDFSKYKRITLKSLLKIKGIGKRQAPFLLKRLNNIEYMSGLTDIYKTIILSYAKRILELREEIEDIDKKLDETGGKNKEVNHLKTIPGVATKLASRFIGEIGDINRFPSEKQLAVYCGIACVDNNSGKITKARVVYKANKICKQTLITMAGCSIRFSLQCKDYYLKKRTEGKSHNHTLRCLARQLIKVIYRMLTEDREYIVRKELKKVA

SEQ ID NO: 278711 - protein, 429 aa, unidentified
MKHSHRNTNEALNQLTEKTLIIGIDVSKITHVARATDYRGIELSKTHPFNNNIKGFREFLRWIHTLTIVHDKPEIIIGMEPTGPYGHTLAQFLNDGGFRVVLVLGKQVNAAKELDDNTPSKNDNKDALIIAKLISEGRFRKLRQHNESISSLREAMSYSGQLTKDITRLKCRIDNWLCEFFPEFLMIFKDWTKKTAYATLKCFPMPEDIKSRNIFQIVASWRENGVLRGVGTKKASALKAYAANSTGRKDATEIARIHIRGMIDQYERLLQESDELWSAVEVLLKGIPLYKTIIEIPHIGKKAACNIAAELGNVNDFSHPRQLIRLAGLSITQISSGKKRGMSQIIKRGRPRLRHWLYLGVLNLLKAKEPSFWALHKYYTTRKDNPLKPMQSVIALCCKLLRVIYAMCVKGTGYNPALITSGIPSLDAA

SEQ ID NO: 278712 - protein, 318 aa, unidentified
MKIESVYLGIDVSKRSLHLATPEKFLREFDNTIAGARELIERIQSLNPVLVVFEASGGYERLAVELLQDAEIPVSVVQPGCVRNYAKSIKVLAKTDELDARVIARYAQAVKPAPTPKTPENVRKIRALRDRRDQIVEDRVREENRLEACADRQMAEHIQTQVALLRNLEQNLECQIKELLKTDLEFQQKANVMTEMIGVAEKTAATLLAHFPELGTLTRGEVAALAGVAPHAKESGGFKGKRRIYGGRAAIRKAMYMAARTAVRYCPVMKVFYARLRENGKAFKVAIIAYARKMLIRLNTLLSKIDTQPKLRNEAPTT

SEQ ID NO: 278713 - protein, 397 aa, unidentified
MIAVGIDVSKSKSTVAILNGHGSIRAKPFDVHHVADELQALVDYIKRTSEPPTILMEPTSHYHYPLLKAFTEAELPVCLINPYQMKKYGDTELRKAKTDKRDSLRIAQYALEKSYSLIPYTPQDQKYEDLRFLSRQYSQRISTLTVAKVQLLSLLDETMPGITTILPLKSRDPDNCVLLRFIKRFKSFDVIRKMGKTRFLDSYQVLVKKTKDRFAGSKGLAIYELVLNSVTTRGENPLSAMTQDQCVDLVSTSQKAADEINLQMRIIAKTMPEYKVLRSMAGVGDRLGPIILGEIGDIRRFHSGKALNAYAGNDAPPYQSGQFESRNRHISKRGNPALRKACFEVMQALKLTKPQDDPVYLFLLKKEQEGKPYNVAKMAAVNKFLRIYYARAMELYK

SEQ ID NO: 278714 - protein, 412 aa, unidentified
MEGETVIAGVDTHKDVHVLCLLDGLGRKIWSGSFGADPEGYDRLAEAIGDPGSCMVVGVEGTASYGAGLTRRLVELGYNVVEVLRPKRDKVRPGEGKSDPLDAERAARKAASGRGCSVPKSQDGWVEAVRQLYVARRLAVATSTSCVACAKSMLTTAPSALRERFRGRERPKDLMPLLARGRKAGDALEESVLASLRSVAAVWKEARSQVESLDERIRALLEANAPALLGVEGCGTTTAAALVVAAGDNPGRLKGEAAFSMMCGASPIPASSGKTDRHRLNRGGNRQANWALYEIAIKRMAYDERTRRYVARRTSEGKSRREAVRCLKRYIAREVYHVLMDPNPDGAAPEGPELAKMRKAMRVTQKKAAAELGLSAATLGHLERGKRRSTKLERRYYELLCELQGALPQTAS

SEQ ID NO: 278715 - protein, 335 aa, unidentified
MKVFYLGVDASKKKLDLCLRSNGKDILYDVIPNDLSSIKSWLTRTFEKFFLSEDSLVVCAEHTGQYTYPLVCATKSIGVYLCLEDAAKIKYCHGIPRGKNDKIDACRIAMYAERYNDCLQPYTASELIIQKLKNLSTERSMLVADRAKYQSQLKDQVDYMEHSIYIAKCNRVEGIINTFTDYIAQIDLEIKELINQAPVIAHQMDLLMSVDGVGERVALKMIMETDAFTSFTDPRKFCCHAGVVPFVYVSGSSQRSKNRVSNRADKSIKHLLHMAALSVSQVKNSPLKKYYDRKVEEGKNKMSVLNAVRAKLVTIMFAVIRADAFFSRNYQNSLA

SEQ ID NO: 278716 - protein, 350 aa, unidentified
MKKNSKTVKQHPAETIGVDLGDKMSSYAILNEEGEVVEEGSFRNNAESIAKHFRKQQRVRVAMEVGTQSAWISREFAKLGHEVIVANARELKWITSSDAKNDKNDARKLARLARADRNLLAPVEHRTAEQQAELAVIRARDALVKSRTLLVNAARSLAKGFGLRLPASITHTFGARALAGLAEHLHLALSGLLEQIDALGVKIRDYDQRLAEVAAKHPEVQQLASVGGVGTLTALTFVLTLGRRERFAHSRDVGSFLGLRPRQKQSGERDPQLGISKGGDKYLRKLLVQCAHHILGHFGKDSTLRQWGLSKSDGSPGKKRAVIAVARKLAVLLHRMWTTGEIFKPFPKLV

SEQ ID NO: 278717 - protein, 354 aa, unidentified
MGLDISAKTIYACISIIDAAQKVTVKSSCKIDNTLSGFKQLDQWANKHRKLKDIPLVVNMEATGVYYENCALYLFKQDYSVSVLLPNKAKKWLQSEGLKSKNDKIDAQGLSKMGAEKALELWQPAAEYYYQLRAMTRQQQSLQEFKTAVNNQLHAEEHGMYKNKMVIRQLKQQIKFIEKQIADLETAIEAHIAADEEVAAKVENICKIKGLGILTVAVIIAETNGFALFKNGPQLVSYAGYDVIENQSGDRKGKTKISKKGNSRIRRILHMPAFNMVRYNQTPFVDLYKRTFEKHGLKMKSYVAIQKKLLVLIYALWKNNTAYNIEHKNKYTRELEQELPLGLASIEARFENAV

SEQ ID NO: 278718 - protein, 388 aa, unidentified
MPRQLNDLSRSLVALEQDATLIAVIEMGQSSWLVAGIVPGIERQPLKKLAPDQHALLQLLHRWQKEANEAGQVIKRITVAYEAGRDGFWLARWLRAREIEAYVIHPSSVPVSREHRRAKTDRLDTELLKRAFLGWLRGEPKHCSMAAIPTIADEDARRPSRERENLVKEATRLVNRMKANLARLGIRGFRPHLARAARQLQTLQTPEGAALPSNTLAELRRDMDRLRFAKQQIKQIEAARIERLEREPAEQRHAMVRLLGRVVGVGVETADMLVHEVFARRLRDRRAVARYAGLTGAPDESGTKRRERGLAKAGNARVRRGMIQLAWRHLLHQRDSALAQWYRARTADARSRTRKIMIVALARKLLIALWRLLTTGEAPAGLLIRPAA

SEQ ID NO: 278719 - protein, 406 aa, unidentified
MFYLGIDVALNTHRLVMLDDNGERVSSGISFQNNTADFKQVLSKLKELSINPDNSIAGLEATGNNWENLYCFLTANNFKTILLNPHQTNKFREALRKKAKTDDIDAFVIAGLLRSNEFASSYVPEDKIQTLRELTKLRYEFIKDHKNYQRQVLALLNLIFPEYRKTALKNPFTIASTAIFKAFSTAKHLSLAKPKHIEKIVRSIKGNNFNIKEIENLISIAKTSVYSGRCQESRALTLNILLTQVENFGKSIQQLEEQVNQILSPESSDDVNSFPGSNLLTIPGVGPKTLAAILSCVGESGQAFSDGVKLIGHIGFFPQIYESGETRRANKLSNKGPAYLRHALYMASVACVKHNLQLRGLYHTKISQGKKPKQALICVAKKLAHLCLSMLHSGQEYIPARVFSYA

SEQ ID NO: 278720 - protein, 421 aa, unidentified
MSVPPDRDPEPVRHFGCYTSDLHRMAEWLKSCRIETVAMEATGVYWVPVFEILEEYGFEVYLVDARQTKNVSGRKTDVVDCQWIRQLHSYGLLTAAFRPEQEIAAMRAYWRHRQGLVESCSRQIHLMQKALEQMNVQLHKAVSDVAGMTGMSIIRRIVAGERDPVALAKLRQKGVKRSEAEIAEALNGNYRGEHVFALAQALESYDFFQGQMERCDRQIQQCMAGIASKTSPTESEQVLRRRWKNQPHFDLRAELHRICGVDLTRIESIDAVTAQTVISECGTDMARFPNDKHFASWLCVCPNNKKTGGRIRSTRTRGHRRNRAADALRRAAQSLHHSKSALGAEYRRKRARLGAPKAITAMAHKLARLIYRLLKYGEAYVSEGLEQYEARHRERALRGLRHQAQNLGYLLVVQATGEVVS

SEQ ID NO: 278721 - protein, 364 aa, unidentified
MSKLRYVGLDVHKDTIVIAVAEEGQSEAKVLGTFPHDVAKLIKRLIKLEPDVSRLRVCYEAGPTGLGLCRRLKKAEIDCTVVAPSLVPQQGSRVKTDRRLAHFLRSGDLTSVWVPDEQSEALRDLERSRDDAKNAERVARHQLDKFLLRNERVYHDGRSWTQKHSAWLKQQKFDDPCKQCVMDDYVKAVEDATERVKRLSKEIERFVEHTALAPLVQALKSFRGINTLSAVVIAAEIGDLRRFPTARQFMSFVGLVVSEHSSGQTIQRGPLTRAGNSHVRRILIETAQHDRHRPALGAALRERQAGVSKEVTDIAWEAQQRLSKRLTYLLEQNKPRNKAIAAVARELAGFVWAVGQVKQLVVKE

SEQ ID NO: 278722 - protein, 352 aa, unidentified
MHMIAFDSHKRYTVASVQSMKGQIIKEARIDHGRGNIVRFLAQWDKGSPVAVETIGNWYWIVEEIEHAQMRPRLVHARKAKLMLGMINKTDRLDARGLNRLQQTGTLPTVWIPPLEIRDKRELPRTRMVFAHQRTKLKNRIHSVIDKYGLQNKFTDISDIFGKRGRQLIQESLRLLPEQTRYAMEALLHHLDEVERQIGEIEKRMKEVFQPDEETRLLMTMPGIGFILAVVISLEVGDVRRFIGPERLASYSGTVPRVHASGEKVRYGRLRPDTNRYLKWAFCEAGSSIAMNRNKWPHRHVSNVYGRVRHRHGHAKAVGAVARHLAEATYWILTRKEAYRERGVSRVSLAEA

SEQ ID NO: 278723 - protein, 345 aa, unidentified
MDHYVGIDVSLERSSVCVVDTTGPIVREAKVASEPEALVAFVAGLGVAVARVGLEAGPLSQWVHDGLAAAGHEVVLLETRHVKAALSAMTVKTDRKDARGIAQLLRMGWYRPVHRKSVPAQEVRALLVGRKLLQGKLLDIEGAIRGILRGFGLKVGVTTKPRYPARVRELVAGHPVLEQIAEPMLRAREALRVELAVLHRHLLALVRNDATCRLLMTAPGVGAVVAATFTSAVDDPGRFAKSKSVGAHFGLTPRRYQSGETDVTGGISRVGDAMARTVLYEAAQSLLTRTVRFSALKRWAMEVAKRRGMQRAKVAVARKLATILHRMWVDGTEFHWGKEPASAAA

SEQ ID NO: 278724 - protein, 392 aa, unidentified
MIYVGIDIAKDKHDCFITNSDGEVLFKSFTIPNNRAGFETLFQRIASVSDDLTKVKVGLEATGHYSYNLLGFLLDKGLTTFVINPLHTNLYRKSLSLRKTKTDKVDSRTIATMMMSDMNLKSYSDTSYHNEELKSLTRYRFDKVKERAKLKSSVSRLVCILFPELEKLVPTLHMASVYALLFEFPGADAVANAHLTRLSNLLSESSKGRYGKETAVMFRDAARHSIGSHMPAKSLELKHTIKLIQELTIEIDEIEAAIKRIMDEEIQSPILTIPGISYRMGAMILAEIGDFSRFDSADQILAYAGMSPSTYQSGQLNNCYSHMEKRGSKYLRYALYNATKYVCHWDNSFGAYLEKKRSEGKHYNVALSHATKKLVRLIFAMEKSGRAYLPTT

SEQ ID NO: 278725 - protein, 428 aa, unidentified
MKKRNNQKIEAITPRTLIVGVDIAKETQWARFVDYRGIELGKALKFQNDKSGFENILASIEAICKNKRLDDVIVGMEPTGHYWKPLANYLIMRGITVVMVNPYHTKRAKELDDNSQTKSDKKDALTIAKLVRDGRYYEVYMPQDIFAELRVLTNARISLMKRHNALRNTITAVMDEYFPEIKNVFKNPLNGKASMQILKTCPFPALILELGAEGVLAEIKKAVRKTVGRKKAQQLVETAKNSIGVKYGSVSAKLKLELLIEELELLTKQLDHLENAMELALAQTKYGEIILGIPGIGVVSAASFLGEIGDPLRFDHPRQISKMAGYNLVEDSSGKSKSTTVISKRGRKNLRSVLYRMAMIMVAVNNEMKELYQYLKTRENNPLKKKQALVVISKKIITVIYNLVKKQKQYKAELVLGEHRKKQIKEAA

SEQ ID NO: 278726 - protein, 353 aa, unidentified
MSTKHQLIWVGIDADKGHHWAVAIDSDGERLLSRKVLNDEDAILALLADVLELAGEVRWAVDISSRPSALLLALLLAHGQPVVYIPGKTVNRMTGAYRGEGKTGAKDARVIADLARLRRDFRPIAPSVALTSELQLLVGYRRDLIADRVRLINRLREVLVGICPALERAFEYRKHPGLVLLTGYQTPAAIQRMGVKRLADWLARRNIRTAVVFAERAFQAAASQHTALPGEGLAAKLVKELTHRTLELDKRIKENEQAITALFRTDERAEIVESLPGMGPILGAEFLAIVGDMSTHKDAGHLAAHAGLAPVPRDSGRRTNNLHRPKHYNRRLRHIFYMSAHVSMTLPGPSQEY

SEQ ID NO: 278727 - protein, 390 aa, unidentified
MDVLYQSCAGIDIHQANIVVCILHGPLTSTRPKREMATFDTTTKGLRACHDFLSQFHVEAVGMESTGVYWRPVWHALCDDFELILAQPAHMKAIPGQKTDKKDAHWIAKLTRIGLLPRSFVPNETIQELRELTRQRKHYVESRNRETNRIHKILQSGGIKLTTYIEDIMGLSGRNLLQLLVDGTPITPRIVHQSVYTSLKKKVPQLLEALDGYFSDHHRFMLKQSLEIYDFYQKQIELLEERMNVYLSQYEKHVEILDSIPGIDVITASVIISEIGVDMSQFPTAGHLASWAGLCPGNNESAGKKRSTKIRHGNSYLKKYLCQAAFAVKKQKGSPLADRFYQIQSRRGSQKATIALAHQLLKIAYILLKEQITYPEFLAQKKTTRDELVA

SEQ ID NO: 278728 - protein, 473 aa, unidentified
MIKSVGIDLGGIGEHKVRCLDEKAQMCDGFGFETSRAGLAKLEERIFSDGSNPVVVFEPTGLAWLLVAVYLKSRHPDSRLVRVQAQKVVALRKYLNRSSKSDKIDSLTLAKMPFIDPEKLEEIYFPPAKIYAIQRLARQRKRLENDIAGRKKRIGSIVGGHFPGIRSAFSDPWSAHARAFLRSRLNPLTVVRYGEKALCAFLIKARRHCRIEASVESHGIYLACREAATLYKASSSVGTIDDDFFTALQDEVSRELRLMEIEEDESAAIAKRIEKLYLEIHPSDNLRTIPGVGNHTAPVFLATIGDPARFRSQSSFANYCGIVPGANQSSDSEAKGLRMTKAGPAIMRWALFQAGQIARSHDPQLACVYYREMVHNGKNHMQAMGAVMSHMSARVLAVLREDKPYEIRDIDGNIVSHEEAKRIILSKYQVPEEIRRERRRRKTPGSPSLQKKLREMLVPRVHEAAAAPQPALT

SEQ ID NO: 278729 - protein, 429 aa, unidentified
MNSTRNKKIEQVKETTMIVGIDIGSEKHYFRAFNWRGIELTRKPVAFSNSMEGFNSFYNAIVELIQKSELEEALVGIEPTGHYWFDLGQFMGEKNIKFVMVNPHHVHKSKELDDNSPSKNDRKDPRVIAGLVRDGRYFYSYMPTGVYAELRNASNRRFVLVEEQTRAKNRLQKWIAVYFPEYKGIYTRIDAKGGLLVLKQAPTPEEIVRLGVEGIIKIWKDAKLRGNGHKKAMLILNAAMKSIGLKAGLTEARMEIQDLIEDYELQTKRLERVNDLIKELCQQIRYADKLLEIKGIGITTIAGFIAEVGDITRFDSAKELQKLAGLELVADSSGKHNGKTKISKRGRKRLRYLLFEAAISVVGKNEEFKEIHRYYTTREKNPLKKMQSLIAVACKLIRVFHVILTKGISYDASKMLKDIQHPGEPLKAA

SEQ ID NO: 278730 - protein, 319 aa, unidentified
MSSEWVYVGLDVAKATLDVALRPSGECWQAANDDAGVADLVARLQALAPTLIVCEATGGFERPAVAACAAVGLPIVVANPRQVRDFARGTGQLAKTDTLDAGILALFAERVRPTPRPLPSDAAQLLDALLTRRRQLLEMLVAEKNRLGFAPRPLHRGIRRHIRWLERQLDDVTTEIAALIEASPVWQAKSNLLQSVPGIGPIVSAVLLGELPELGALSHKQIATLAGVAPLARDSGTLRGKRMVWGGRGGVRTALYLAALCGRRWNPQLRVFYERLRAAGKPKKVALIACARKLLTIVNAMVRDHARWASPTLRVQHSC

SEQ ID NO: 278731 - protein, 404 aa, unidentified
MDLAPIYRCAVGLDVHQAQITVCVLSEGADGEVVAEVREFGGFKRERRAMAAWVAGFQPDVVVMESTGIYWKSPYAALEQAGIRALVVNARHVKRVPGRKTDIADAQWLAILARAGLLTGGFVPPANFRELRLIARQLQRLTGIRAGEKNRLHKVLTDGGIRLSVVVSDLHGQSAWAMVKALAAGEAPQQVLRHASARLRATEQELLDALDGDLSDAHRFVLAELVDHVEDLDRRIACFRDRLLAGLAPQQRLLGALQTLPGFDELGAALLLVEIGDDMQAFGKPEKLAAWAGVCPGNHQSAGKRQSGKQRKGNPYVRRLLCEAAHAVSRTRCALAEKYKALLVRRGRKRAIFALAHKLLKLVFVLIDRGDYYRDATVDYEALSVARNAPRWIKMLRKHGYLAA

SEQ ID NO: 278732 - protein, 342 aa, unidentified
MTFVGCDLHTRMQQVAVLDTETGEISERQLPHDGMAVEEFYAALPRPVTIGIESTGYATWFHTLIQRLGHTLLVGDAAKIRAMVVRKTKTDRRDALHLLDLLRHDRFPTVWVPDPATRDLRALLAHRMRLVRIRTMVKNGLHAIALNYRLARGSKLLRQAGLVQLHALALPPHTAQRRDQSLELLAGLTTQIRTLDDAITTAALAHPDGPRLITHPGVGALTALATIVVLGPVARFHDSKHVVSYVGLAPALNASADKHHLGHITKQGSPLLRFALGQAAAHAARMDADLKRTYFTLVHRRGRPKAKVAVARKLLVRLFIMLRDQIDYDEFCRRGRPAPVSA

SEQ ID NO: 278733 - protein, 351 aa, unidentified
MITIGVDYHPSFQTIAFLMEETGEYGEQELNHSNGEAERFYRDLQQRRIHVRVGMEATGHARWFERLLAELGFELWIGDPAEIKAKRVRKKKTDREDARLMLKLLQENRFPRIWVPSPENRDLRQLLWHRHRLVQMRTRIMNQLQAVAMNEGYRWKKKLFGEKGRALLEKLSLALWASRRRKELLELLDQLDPKIAELTAAVEQEAKKRPEVVQLMTHPGVGPITGLAYVLVIGTPGRFPCGKQIGSYTGLIPCEDSSAGKQRLGHISKQGNTLLRFLLVEASQAAARCNPDWRRRYAHLMMRREKRIAKVAMARKLAVRLYWMWRNNWQYSQLVEFGSNAGKLGTVHGVK

SEQ ID NO: 278734 - protein, 355 aa, unidentified
MNLQNNTTISFKGQHFFLGLDVHKINWKVDIRLNKTGIKRFTMDPSPEQLAKFLKTNYPGGIYHSVYEAGFCGYWIHRRLVELGIDNIVVNAADIPTSHKEKDRRDDKIDSAKLARELENGSLKAIFIPTPQQQSLRSLARLRYQHRNHITRIKNRIKMFLHLHGLKIPGQFSKSYWSSAFIRWLQSIHFEFAPDHQYLQHYIQQLEYQRTLMKEVLMQMRAWYKQNNTLNCIRSVTGLGVVSSFTIYAELIDMHRFKDLDHLASYVGLVPSKDSSGDRTAVKGLTPRYSRYVRYLLIECAWRAIGSDPALTQAYAKFSSRMPKQKAIIKIAKKLLNRIRYVWLNEKKYVLAIVE

SEQ ID NO: 278735 - protein, 392 aa, unidentified
MVVSVGIDVSKDKHDCFILNSEGEILSDVFTIPNSLDGFTILLQRIRDCSSSQDNIKVGLEATGHYSYNILGFLLDNGLPTYVLNPLRTNLYRKSLSLRKTKTDRVDARTIAAMLLSDAGLKPYTDTVYHNEELKSLTRYRFDKVKERAKLKSSVSRLVCILFPELEKLTPTLHMPSVYALLDEFPGAKQIAEANLTHLKAILHNASKGRYNRDKAIDIRESARASIGAVMSAKSLELRHTIRLIRELDAEIEDIEAAIQSIMNEMHSPITTIPGIGTRMGAMILAEVGDFSRFDSPDKLLAYAGMSPSTYQSGQLKNCYPHMEKRGSRYLRYALYNATKYVCLWAPTFAAYLAKKRAEGKHYNIALSHAAKKLMRLIFAMEKSRQPYCSAT

SEQ ID NO: 278736 - protein, 347 aa, unidentified
MDQQYHYVGLDVSLETTSICVIDDAGAIIWRGKCRSDPDTITAIVRQHAPGAARVGLETGQLSNWLTLSLRRRGVPVVCMDARHAKAALSLQINKTDANDAFGLAQVVRTGWYREVAVKSMDAHTLRMLLVARSRLVSQRQATANTIRGLLKTFGLVVAKGSKGLFPVRVREQIAGNPALIAIIEPLLAVWYAIRDQVAMLDRQMLARARNDQVARRLMTIPGVGVVIALAYTAVIDDPARFRRSVSVGAYLGLTPRRYQSGEVDTTGHISKCGDSLLRGYLYEAAAVLLYRDGRASVLKSWGLGLAKRIGMRRAKVAVARKLAVIMHRIWSDQSEYRWTAVPSTTA

SEQ ID NO: 278737 - protein, 348 aa, unidentified
MTTVADQYDYVVGVDTHAGTHTYAVLAAGTGRTIDSVRFPASPAGLSRALAWIHRRADGRVLVAIEGTGSYGANLTRALQAVGIPVCDVRPPKRASRSGRGKSDEIDAVAAARTALATEVERLGSPRMDGVRSALRVLLVGRQAMDGRRTADRNALTAILRSFVLGLDVRRPLSDAQVNEIASWRRRAADDPATATIRGEARRLAVSVLALSEQLEDNHAALAAHVSELAPALQSIRGVGAVTGAILLAAYSHKGRVRSEAAFASLAGAAPLQASSGNTTRHRLNRHGDRQLNRALDVIARVRMSCDATTKDYIERRTAAGKSRREIRRSLKRYIARQLFRQLSAVLT

SEQ ID NO: 278738 - protein, 287 aa, unidentified
MAMRVSKSVIGVDVAKIELVTYQADSDLLALIPNEKPAIKRWLKTLPRPAALAVEATNIYHVDLVELAYQAGFDVYIIDGFQLSNYRKGVGGRSKTDASDARLLARFLKNEGECLRPWTPPPAVYGKLQSLLRRRASLIQAKTSLTQSWANDASLKASFAAFLKSIERLDLLVKKKLKDALREAGLLEQVARCQAVEGIGFLTATALVMAYSRGDFNSSDSYIAFLGMDLRVTDSGQKTGRRSLTKRGCSEIRRLLHNAAMSLAERVHGKSSTTIIAAAEKLPQRCL

SEQ ID NO: 278739 - protein, 315 aa, unidentified
MEHLPTAPSFVGIDVSKDRLDVHVRPSGQTLAVQRNDKGLEDLVSELRKLAPALIVLEATGGFEVTVAAALASANLPVAVVNPRQIRDFARAVGRLAKTDALDAQAIALFAERIRPEPRPLADADSQSLAELVARRRQVVEMIGMETNRLHQARNLRIQRMLRATLRTLTAQLAQLDREIDDLIKRSSLWRAADDLLTSVPGVGDVTAHTLIADLPELGQLDRRRIAALVGVAPVNRDSGQLRGKRTIAGGRVGVRNALYMATLSAVRWNPVISTHYHSLVDRGRPKKVALVASMRRLLGILNAIMRTKTPWQCA

SEQ ID NO: 278740 - protein, 405 aa, unidentified
MRYYIGVDWAEAEHMIWVENEQGVRALSRSVPHPAEGLAEWGRWLDEQRASGMEVWAAIERPDGRVVDFLLDHGVVVYPINPKALDRARDRFRMSPSKSDPFDAKVLASFLRTDRAHLHALQPSSEAAQELKLLTRDYARLVREQTRLVNQLTATLKEYYPRALEVCGDVTAKRTAAFLRAYPTPAVLAALPAEQWSQFARAHRWSAEQAAACWELLRNPQLPVPEHVVRAKSRLVHVLVTQLEAVVEAVTDYRQAVIDFFGRMPAAEWASSLPASHGTLVPTIWAELGDAVGRWASGEHLQGHSGVVPVTRRSGKSHGVYFRFACNLHLRRALHQFAFCSLKSSEWVRAYYDRYRQRGHRHHAALRALAAKWLKIIFVLWRRQVAYDENYHLASMARQHLRQAA

SEQ ID NO: 278741 - protein, 429 aa, unidentified
MNYTQNEKIEQVTDTTMVVGVDIGSQTHYARAFDNRGRELTKKVFSFQNDIEGFNSFNLWTEMLKKENGKTDVLIGCEPTGHYWFAFAKYVKDHRKTLVMVNPFSVKKIKELDDNSPKKTDSKDPKTIAKLVVDGRYSIPYMPEGIYAEIRDLVYSRDRIMKQHNISANRIQRWLAIHFPEYLGLYTKFDTTSGLAVLERAPMPKDIVALGVDGIRKIWHDKKIRGRGVTEDRAKTLVEAAHNSVGLDGGIGSKSELYMLLEEHRLWSSQLEAINKVLEEVILKVRNVEKLLAIKGVGSITIAGFIAEVGDVRRFDSPKQIQKYAGLELVENSSGKHKGRSRISKRGRRKLRKILYQVMIPLLARNEEFRKIYDYYVTRVKNPLKRRQAMVAVSCKLIRVFYAVLTKGVEYDRMKMMSDIHRESDVAAA

SEQ ID NO: 278742 - protein, 429 aa, unidentified
MRTESTPGARGPVFCGVDTHADSHWLCVLDWRGRRVLSRRFPADAAGYEALAGAIAAAGEPACVAMEGTSSYGAGLTRHLASLGMPVREALSPARTQRRRPGQGKCDESDAERAARAAMSGSKLGTPKSQDGWVDGVRCMLAARSGAVKARTSAINTARSLLTTAPEGLRSRFRGMGGPRLMEELPSVRSEGALGAALGALADLWAAARDAALDMERAIEASLEENCPALLAMYGCGPVSAAKLAVAAGDNPGRLRSEASFAAICGACPIPASSGKTVRHRLNRGGDRQANSALHEIARQRVMRDPETSEYAERARARGKSDREVMRCLKRYVAREAYRALMHPHEIRRPADASELVAARRAAKVSQVRAASILGTSEKYISMLERGQRELKPIRRAYEAWVEAGLPLNWDRQAFEAERKMDSKKHLAK

SEQ ID NO: 278743 - protein, 325 aa, unidentified
MMQPQSQVKPQTQVGLDVSSQTLDAHIRVDGKAFSVPNTDAGFDQLCNLLSAYDVTLVLMEATGGYEDSAACYLQLQGYDVVVINPRHARRFAQSMGRLAKTDRIDAAILAHMAFMIDSGPDRERYIRPATDEQRKQLSRMSSRRRQIVDLITIEKQRLTHADDYARDSINDIISLLNARLKRIESDILRYVKKNFSELADRLLSIPGVGSQAVTVLIADLAELGHVNRRRISALLGVAPFNHDSGKFKGQRRIRDGRQSVRNVLYMGVISATRFNPVIRAFYDSLLLRGKPRKVAIIACMHKLIRIINAMMRTGKPFDMSLHGV

SEQ ID NO: 278744 - protein, 326 aa, unidentified
MEHELHYIGIDTAKEKLDVDVLRPDGRHRTKKFANTTKGHDELVSWLKGHKIDHAHICIEATGTYMEPVAECLYDAGYIVSVINPALGKAFAQSEGLRNKTDTVDARMLAEFCRQKRPAAWEAPHPLERALRALVVRHQALTDMHTQELNRTETAREVQRPSIDAHLLWLEAELKRLEKQIKDLTDDDPDMKHRRKLLESIPGIGEKTSAVLLAYIGLKDRFAHARQFAAFAGLTPRRYESGSSVRGASRMSKAGHVSLRRALYMPARVATSKTEWGRAFRDRLAANGKKGKVILGAMMRKLAQVAYGVLKSGVPFDASRHNPVAA

SEQ ID NO: 278745 - protein, 422 aa, unidentified
MTKRRYRTTKVNQVNWPQIAGQAGEQKVVFAVDVAKEKFVGALMTPDRTVLKTIQWQHPEQTPELMHGLLWHLGAQRLEVAMEPSGTYGDPLRWLFVTHGVAVFRLSPKRVHDSAEVFDGVPSLHDAKAAYQIGRLHLEGVSQHWEERSEQRRELAAQIAVLKLYRERLQSSRNRLEAQLSRHWPELAEVLDLGSVTLMSLVAAYGSPAQVLAHSEAARQLMRRSSHGGLRREKIEAVLEAARQTLGMPCLEAERVLLQTLARDMLDNHRAVQRAEQALAAQVDADATLSQLASVVGKTTAAVLVSTQGRPQDYPDAGSYLKSLGLNLKERSSGKFQGQLKITKRGPGIARLYLYFAVLRWLYRDPIIQAWYQRKVARDGGCKGKAIVAIMRKLAKALWYVAQGVAFDSRKLFNRKALALTA

SEQ ID NO: 278746 - protein, 392 aa, unidentified
MQAAADRAEAPTAIQTDLRAIFVSLELSRSTWLITSLSPSGGEKMSKHSVPAGDIAGLLRRFAQLKEKARARTGRDFPIIVIQETGLDGFWIHRMLQSEGIESHVVDAASILTSRRGRRAKTDRIDGETLVRTLMAFKRGEPRVCSMARAPTPQEEDRRRVCRERRTLVGERVTHVNRIKGLLFAQGVFGYQPLRKGRREQLEELRTGDGRPLPVHLMAQIVRELDRLEVVLEQLKTVEAERNALLKPATGAAASPPAMLLELKGIGPETAAVLWSEGLFRQFDNRRQVAAYAGLAPTPWQSGSIDHEQGVSKAGNPRLRTTMVELAWLWLQNQPASALSLWFHERVRRLGGRMRKTTVVALARKLLIALWRYTTAGVVIEGAVMKAAPATI

SEQ ID NO: 278747 - protein, 337 aa, unidentified
MKIIYRRCAGLDVHEKSVFVCARIVNGKGVEVIEATFPTFTEDLEELKAWLIRYRIKCVAMESTGVYWRPVWNILEQPPGKLELLLLNPQHVKALHGHTTNRVDAARIAELLQYGLVRASFVPPPEVRELRDLLRRRVHVQQDRNRVSNRIHRLLETANVKLSSVLGKVTTKTFRSILEGLATAEYIHPEALAILAMHKRVRPKQEQIRKALRGCRLTEHFRFLLQELLEEQDRLTAKMAMLEQRIAARMEPYTELIARLSEIPGVDRITAWTMIAEIGTDMTRFPSAGHLASCCGLCPGNRASAGKRHSGHTGKGNRYIRRVLIQAAWAAARISRQ

SEQ ID NO: 278748 - protein, 411 aa, unidentified
MNNTLFVGIDISKRSNVATFMNCEGKVVGRLTFSNSGSGADRLVAKILSYYEKEDFEAIRIGLENTSVYSKNLVWFLYEHEALNEHKLSIIPLNAIMVANYKKSFLDMDKDDITDSFAIADFIRIRPGLLPFKLDDRQEALKIMTRSRYNYVQALSRMKSQFLTRLFLSFSEMEAGKPFYSIFSKTSLTLLEEAFTLDELAEKPIPELVEFLQEKGGGKFQNPEEIAKVLKKAASSSYRVPAMVRESLNRTMASDMEIMRILENEIHNCDKNIEKLMKSVPAILVSIPGIGPVLAAGIMSEIGDISRFQKQESLGKMAGFKWKRNQSGKKESEDKAAVLSGNKKLRYYLVEAANRVRIHDPVFEAYYRKKYAESKTHAHKRALILTARKLVRVIFYLLKENKLYKPDVGIS

SEQ ID NO: 278749 - protein, 345 aa, unidentified
MEQISRIGMDTSKHIFQLHGVNTAEQPVLRKKLRRKEMFAFFEKLAPTVIAIEACGASHHCARVLQSFGHSVKLIAPQLVKPYLKRGKNDAADAEALCEAMSRPTMRFVPVKTAEQQAALMLIGVRDRLIRNRTQLSNAIRGYAGEFGFTAAKGKAHLDPLLERIQADANLPALARELFAAQAAEYAQLQTQIDQIEAKLMAWHRPDECSQRLTKIPGVGPIGAVLLKMKTPEPELFRSGRQFAAWIGLTPKDHSTAGKVRLGVITRAGDEGLRSVLVVGATAVIQHAQRGGRPSPWLTELLKRKPPKLAAVALANKMARIAWKLMMTGEHYSAKAASVALAGAG

SEQ ID NO: 278750 - protein, 416 aa, unidentified
MELIVERAAALDVGKDEVVACIRVPDPAGGGRGRGRRRQEVRTDPTFTSSLETLADWLQAEDVTQVVMEATGQYWKPIWWVLEERGLELLLVNARHVKILPGRKTDVGDAAWLCELLECGLLRGSFVPPPQIRELRDLVRYRKRLIQAHSAECQRIQKTLEDAGIKLDSVAADVLGVSGRAMLGALVGGERDPQVLAELARGRLRAKLPQLRQALRGRFGEHHALLVGLALDHLEHLEAAIARLDARVDEVIAPFAVARDRLDTITGVGKRAAEVIIAEIGVDMSVFPTAGHLASWAGRCPGNNLTGGKRRSGKPTKGNHWLADVLTECAWAAARSRDTYLAAQFWRLARRIGKKKAAMAVGHSILVICWYLLTEDCDYHDLGGDFFIRRDSDRARQRAVAQLQALGYQVTLQPAA

SEQ ID NO: 278751 - protein, 343 aa, unidentified
MQTITTIGLDIAKSVFQVHGVDAAGQVVIRRQLKRRYVLAFFEKLSPCLVGIEACASSHHWSRELQALGHTVRLMPPAYVKPYVKRQKNDATDAEAISEAVTRANMRFVPTKTPEQQSCLMLHRTRHLFIRQQTAVINAIRAHLAEFGIVAPVGRKGVEELLHVVADPNDKRVPEVVRACLAALGNQLLSLKKQILESDRMIMVWHRSNEASKRLHYIPGVGPLLATALVASVADPRTFRSGRNFSAWIGLVPKQHSSGGKDRLGSISKQGDRYLRSLFVAGALSVIRYAKIHGTKHRPWLTALLARRPTKVAAIALANKLARMAWAMMARGERYRNPVALAA

SEQ ID NO: 278752 - protein, 386 aa, unidentified
MQKLNDLSRSLTPLKPDGTLIAVIEMSLSSWLVAGIVPGVERQPSKKLEVDENALLKLLNRWREEARKAGHRIERIAVAFEAGRDGFWLARWLRVRDIEAHVIHASSIAVSREHRRAKTDRLDTELLKRSFLGWLRGERDHCKMVAIPTIKDEDAKRPTRERESLVGEQSRIVNRMKAALIRLGIRGFNPKLKKAAERLDGLRTPEGEPIPPNTLAELRRDMARRRLVSDQIRQIEEARLERLKQTPSDGPHAMERLLARVIGVGVETGDMLVQEVLSRSMRDRRAIARYAGLTGSPDESGRKRRERGLTRSGNARVRRGMIELAWRFLRFQKDSVLAQWFRTRTENARGTRKTMIVALARKLLIALWRLVREGVVPDGVVLRPAS

SEQ ID NO: 278753 - protein, 338 aa, unidentified
MRELYAGVDIHREKYVGCILDQKGKVVREHTFPPTREGAQSFLCGMPLKGIAIEACTMWRYAYQLFRELGYSTKLSSAKKTHDIACRKKTDKVDAKILANLLRTGFLPEVYIPSDEMLQLRDICRHKASLTRSRVETQMKIKSRLLTLGVEYPDKLWNEKNLDLLRKWNDPVLSNMLVMRETYLHEEKEVLSRIETKAHGHRLANLLMTLPGVAEFSALMILGEIANIKRFKTPKQLVMYAGLCPGVYQTGNTELSVKNNAVNKWLKWILTECSGRAATLRGTDFQAHYATMARKKNPKVARRSTARKMLIIIWHMLHDEEPYHASKRKKVGTGNPLT

SEQ ID NO: 278754 - protein, 416 aa, unidentified
MLFVGDDWAEDHHDVELMDEAGRTLAKVQLPEGVAGIARLHAMIAEQLGEDTAEQLGEGTDEAQVRIGIETDRGPWVAALLAAGYTVYAVNPLQASRYRDRHSVSGAKSDPADAHILADMVRTDAHQLRAIAGDSPETEAIKVVARAHKTLIWERTRHVLRLRHALREYFPAALEAFDDLDAPDTLELLGKAPDPASAAKLNRSQIRAALKHARRRDIDTKTTHIQAALRGEQLGRDAVITAAYAATTRSAVAVLITLDEQVKTLQGQVEAHFGRHPDTEIILSQPGMGPILGARVLAEFGDAPGRYADARARKNYAATSPITRKSGKKKSVHARFVHNDRLVDALLSQAQSALRASPGARAYYDKQRARDLEHNAALRQLANRLVGILHGCLKTRTLYDEATAWSHHNQDQQSAA

SEQ ID NO: 278755 - protein, 349 aa, unidentified
MGQVSTIGLDIAKNLFQIHGVDAEGMVVIRKRLSRGRVLEFFADLPPCRVGMEACATAHQWARELRKLGHDTRLMPPTYVKAYVKRGKNDAADAAAICEAVTRPSMRFVPIKDVEQQSMLMLHRARDLLIRQRTQLINALRAHLAELGLVAAKGREGLHQLVAVVMECGDERLPSNARFACQAIVTQLHAVQIEISGLDKRITQIQRTNADCKRLTTIPGFGVILSTAVAATMADPKVFRTGRDFAAWIGLVPRQNSTGGKERLGSISKQGDRYLRRLLVVGATSVINCARARPYKYPWVIELLGRRPTKVVAVALANKMARIAWAVLAKGEPYRAPTRSSNAVVPAAA

SEQ ID NO: 278756 - protein, 393 aa, unidentified
MSLIEDCAGLAGAEPQTWGTDLMSNMVFVGLDVHKATIAVAVAEGARGGEIRELGNFLNHPDHIKKLVERLAKGGRTLSFCYEAGPCGYGLYRQLIGLGHECVVVAPSLIPMKPGDRVKTDRRDAVMLAKLHRAGELTAVWVPDDAHEAMRDLIRARSTAVRVLVKARQHLQGFLLRHGRIYAAGKKGWTLAYRRWLATVRFDHSAQQVVLQDYINAVTNGEERVERLTQQIADLAQTWSQAPVVAALQAMRGVAFVVAVTVVAEVGDFTRFANPRQLMAYLGLVPSEHSSGCTVRRAGITKAGNALARRALIEGAWTYRMQARVSRKLHDRIEGLPQTVRDIAWKAQVRLCARYRRLAAAGKPKVVVTTAIAREMLGFIWAIAQSVQAPRAI

SEQ ID NO: 278757 - protein, 333 aa, unidentified
MPILKCVVGIDVSMESLETRFGTTDTDQHVILSPSKTFSNRLTGFKQLLRWATQSNATPEIPIVFVMEATGVYYERLAHFLFLNKRPVAVVLPNKIKNYAKSLQSKSKTDPLDAAAITRFGLDRQLTLWSPPSPTIKALHNLSREYHALKATITSIKNQRHALSESFDPQRRSLARKAQLLKFLKRQCDQIQEELHQLVDADPVLSQRVPTISTIKGVGFITIVSVLAETQCFNHVTSQKQLASYAGLDVVFNDSGLRKGKTSISRKGNIFLRNAVFMPALSATRCNHQMKELYQRLIAKGKNKKLALIAVARKLLLLIYALWKNDSTYCPDY

SEQ ID NO: 278758 - protein, 522 aa, unidentified
MATSFKARPRRSGRFLNVAKPSGSLHPRVQKVGPEHFGIVAVDCAKARSKWMLADFYGRILVEATVVEHNKQGFDAAIAQIRRVLKRHALADVIVAIERTGIYHLPVKRVFSSNGFETRIVHPLTTRQYRLPADPGNKTDDTDLLAIHRATTNGFGLIEPPLDETHGPLRLLARYRRSLVRKNASSRNQIIALVDVALPGYTGLFDIFKNQAALTVARCVTSAAEVKSLGTEGLAQLLESHKVRYQRRTLIKILAWANGVGNTTEYSSMYNTIIVSLDDERCARLQQIAMIEEKMAGFLARTPYVVLLSIPGIGIVTAAEFAGEMGPIMNYASDQTITGRAGIYPSRYQSDKVDRCDGPLVRRANRSLRGVIMLIADNLLLINGFFQGLKERWQAKGMDHRDMCVHAAKRFCRIAYQMVAGGQVFRHPSCQRRDAILRKLSCFHADHGTSMAQVMSDLQAAIDHIPKSEHLPEAKRLFEAMQPSNHRQQCGPRRLGEILPVVLAKLGVTAVELSSKGENDLT

SEQ ID NO: 278759 - protein, 341 aa, unidentified
MNIVVLGIDLGKTLCSMVGLDREGAVVLRRRIRRASLAAFVEKQSHCIIGMEACCGAHHFARQFASLGHNDRLMPPEYVKPYVKSHKNDDRDAEAIAEAATRPTMRFVPIKSEEQLDVQTLHRARERLVGTRTALINQLRGVLFDRGIVIAKGRPKLNLWLRENLPDNTLLTTRMRQLVDDMVDELHALDRRIKQLDQEFEALAKSDQRARLLRSVPGIGALNATALAAAVGDVSAFAKGRDFAAWLGLVPRQITTGGKPRLTGISKRGSTYMRVLLIHGARAALPYLARMDTQLGAWLQALLQRAKRNVVVVALANKLARIAWAVMSNQRPYEAVVASKG

SEQ ID NO: 278760 - protein, 388 aa, unidentified
MKPFSVLPHRPEAIAQWASSLKQRFQGQPIAVCLELAKGPLVYALQKYDFLVLFPVNPATLAKYRQAFAPSHAKDDPTDAELQLELLTRHRDKLKPLRPQGVSMRTLQYLVEQRRGLVDDRVRITNRLTYALKQYFPHALQWFKDKDTAVFCDFLSRWPTLKQAKHARKATLEASFQEHNVRYPNIIEARTRAIKTTTPLTEDVAVITPHQLLVQALVELRVSLATIERFDTQIDGVAQALPDYALFRALPGAGPTYAPRLLAAFGEQRERYQSAAEIQKYAGIAPVTERSGKKCWVHWRLQCPKFLRQTFVEWAAETIPRSFWADAYYRSQRDKGCSHQAAWRALAFKWIRILYRCWQTRTPYDESTYLNALKRRGSPLLNSIVEAT

SEQ ID NO: 278761 - protein, 356 aa, unidentified
MTKLLMAGIDLHSNNLVIGIVDEDGRQLRSQKLVCDLQAVVAFLKPYKRRLKSLAVESTYNWYWLVDGLVALGYPVVLADPAKIDQYSGIKHANDKSDAFFLAELQRLKILPTGYIYDPQLRPVRDLLRRRMSLVQQRTALMLSFKSHYTRMTGQAMSLSRVKGMAVAEAKALYEHPADQLIATVQQAHVTELNRSIQQIEKLVLAKAQTLPCYAKLDTLPGVGRILGMTIALEVGEISRFGSPGQFASYCRAVDAVRTSNEKHKGWNNRKCGNKYLAWAFVEAANFAKRYDAQSRRWFDRKAARTCGVLATKALACKLAKAAWHVMSGNVVYDATRVFGRVAESQVKGLVQALQD

SEQ ID NO: 278762 - protein, 423 aa, unidentified
MDVLYPRCAGLDVHKASIVACVRTVVGGKTMRECRTFETSTTGLQSLLAWLTEQGCTHVAMEATGVFWKPVWNILSDGAFELIVANAAHIKTVPGRKSDVNDATWIADLLACGLVHASFVPAQDFQELRALLRARTQLTREQTRHVQRLQKTLEEANITLDSAITDIMGVSGRRMVEAIIAGETNPAALADLADRRIKASRQELIEALRGRVSDHHRFMLRLHLDQYDRVAAAIATLDAQINTAIARMDRREAAGQASFRALMLLLCTIPGVGLLAATVILAEIGTDMSRFPTAGHLLSWAGFCPGQNQSAGKRRSSKLRKGAPWLKVILVQCAWAASRTKGSYYKAQYHRLCAKHGKKQAVCAVAASMLTAIYHMLKNGTEHQDLGADYFDRRPAEVKAQRLVSQLGKLGFEVELRPVAKAA

SEQ ID NO: 278763 - protein, 444 aa, unidentified
MDEADSVAGGAGSSEASPGGITPPAPRETAASKQATDLPPVAEAIGTPAWSEPQEVGAQGRSVMRSVGLDLGARHIAYCEVRAGQVVDRVAVTRLEELASRLGNGTAPACVAFEAAREAWHVHDVLTQWGHQPKIVDTTRLKTIGVGQHKRKNDAIDAEHIAMAVDHGRIPEAHVLSPARRELRKQLSIRQALVETRSQYVVTIRGLARAEGTALPSCSTHNFLDRLQATELDGKIRALIAPLVAALEAIEQQLAHVDDELEQVAKTDPLIRLCATVPGVGLIVAATFLSVIDDPKRFKSAHAVSAYLGLVPSESTTGGPAKRRLGSITKQGNPHARAMLVQAAWSILRASPADDPLRMWGARIAKRRGSPIGAVAVARRLAGVLWAMCRDGTFYSPAEQANASSTGVRRRIQDDTAHAAALELAAKKIHRRTKRRPTSEVASM

SEQ ID NO: 278764 - protein, 366 aa, unidentified
MRSDIKSKELSSLEETRRQVNVRTGAIKLGIDVHQAFYVVVMQEDGSNPKPAQRMSRAAFLSWAAKLRRSHPRAVLHAVYEACGFGFGLQRELTALGIACHVVCPQKLDERKQRVKTDGRDAKALCQKLDRYVEGNKDALALVRVPTPEEEQLRAVHRQREQLVRTRKQLEAHGRSLLVNHGCEGISKWWKPRTFAKLEVPAWLQTLLSHTQPILLALEAQIRALALQLEASAAPGQPRGLGALSSVVLDREVGDWSRFQNRRQVGSYTGLCPGEYSSGNTRVQSCVTKHGNPRLRAALVETAWRLVRFQPEYRAVRKWRHLLSKGALATGAARKKAIVAVARQLAVDLWRIRTGQLQPADLGLQS

SEQ ID NO: 278765 - protein, 394 aa, unidentified
MDVLHPRCCGLDVHKSSISACILLREAGRVQKHQRRFGAMTQELQELAEWLRQFGVSQVAMESSGVYWKPVWNILEGQFTVVLANAQHIKNVPGRKTDQKDAEWIAQLLQYGLLRPSYVPCEIIRDLRDLTRMRASLSQEASRISSRIQKVLEDANVKLASVATNVLGKSGRAMLEDIISGEDDPEHLASLALGHLRVKIPQLRLALEGKVRSHHRFLLRRLVDQIQFVEHEIGLLDERLEEIAQQRPELSQAVARWDTIPGIDRVAAWALLAEIGDNMAQFPTAGHLASWAALCPGNHESAGKRLRGTTRQGSPWLCRMACQCAWAAARTKNTYLTSQFRRLAARRRKQRAIIAWRIPSSSLAITCRRTRATMRILAETTSIASTPTVSNGTW

SEQ ID NO: 278766 - protein, 335 aa, unidentified
MKSYLFIGIDISKATLDVCLLSASMEIHYHEFSNSLKGFIQLLKWLREKSEGVAVEDWRVCMENTGIYSLELNCFLHEKGIWQSMENALQIKRSMGVVRGKTDKADCKTIALYAYRFYDKLKPYVLPNRTLLRLRALFAQRERLVSMHSQLLVGNQSMKGYAKELVKDIQNQNEALLKNLAEQIKTIDKSLKDCLQQDEELQRKAKLIQSVPGIGQQTASYLLIVSRGMQSFATAREFACYSGCAPFAHTSGTSIRGKTKVHFIANKKMKMLLHMAAMNAITFNEEIKAYYQRKVAEGKNPMSVLNAVRFKLICRIFSVVKRNEEFQKDYKKIAA

SEQ ID NO: 278767 - protein, 332 aa, unidentified
MQQEPTFVGIDISKLTLDICIRQGTTNEHYVIDNEPAAIKVFFTPLLTLKAEGLYVGMENTGCYNYHLYEALSELDVVYYVIPPIHLKKSLGLTRGKNDKIDAYRIAGFLETNLKNMAAYIPQRPVLTQLQLLLTTRSQRVKIKKQVLAAKEHYQYTVDGSNELLTLDNELISNIDAQIKVVEKKIQELISADSKLNKAYQLITSVPGVGKVLACNLLVRTGEFVAISDPRKLACYAGVAPFDHRSGTSIRGKSRVSHHADKDLKMLLHLASMSVIRLSGDMRDYYQRKVAEGKNKMSVLNAVRNKIIHRIYAVLKNQRPYQIYLSDNLVLS

SEQ ID NO: 278768 - protein, 411 aa, unidentified
MEAAVITAVGIDVSKSKSTVAVRRPGGEIALRPFEVHHTNSDLKKLASTLKKLGGDIRIVMEHTSTYWRPIALTLKEAGFFVSIVNAMLIHDFSDNTIRKLKTDRADALKIANYALTCWDTLPPFNNEEETRLLLKMQSRANERITATATALRNGLIALADQTFPGVNIAFAPNTKNANGHEKWVDFFLRYWHKDCVCQYSMEAFTESYRGWCKRKNYKFRTDTAHQIYLLAQEGVATLPKCESTKMLITQACKSLNAVCEAKQSTQLEMQRLAAMLPEYEVVMQMEGAGPITGPALMAEIGDVRRFKNKKALVAFAGIDAPPFQSGAFESKSRHVSKRGSPHLRRTIFIVSNIILTRSNPENAVYCFMDKKRSEGKHYYVYTVAGSAKFLRVYYARVTEFLRSQPSPGAC

SEQ ID NO: 278769 - protein, 389 aa, unidentified
MIYVGIDVAKDKHDCCILGSEADKLFPVFTIPNNKAGFDELYEKMFSVTDDKTKIKVGLEATGHYSLNLLGSLIDKGLPTCVINPLHTNLYRKGLSLRKTKTDKVDARSIAMMLMTNKTLKPYSDISYHNEELKSLTRYRFDKVQERAKLKSSVARLVNILFPELEKLVPSLHMASVYSLLSKLPGASYITECHLTHLKNLLETASKGHYGRDMAIALRNTARDSIGSVIPAKSMELKHTIHLIKVMTEEIDEIEDSIKSIMDTCNSPIMTIPGISYRMGAMILAEIGDFTRFNYADQILAFAGLSPSTYQSGQLDSSYSHMEKRGSRYLRYALFNAAKFVCKWDENFGAYLSKKIGEGKHYNVAIGHATKKLVRTIYRMELTGEAYRR

SEQ ID NO: 278770 - protein, 347 aa, unidentified
MRFYNRQHRHYCGIDLHVKTMYMCILDAAGRTLVHRNVKSNPDAFRETVTPYRDDLVVAAECMFTWYWLADVCAAEGIPFVLGHALAMKAIHGGKAKNDKLDSFKIATLLRGGLLPQAYVYPAAMRSTRDLLRRRLHLVRKRGQLLAHIQNTRAQYQLPEFGRRLAYPANRAGVSEHFPDPIVRKSIEVDLALLERYDALITDLELTIVREAKQHNGDAFHRLRSVPGIGKVLALTILYEIHDMSRFDRVQEFASYARLVKCAHTSAGKVSGSGGAKMGNVHLKWAFSEAAVLFLRHAPGAKKLLGAIEKKHGKGKALSILAHKIGRAVYYMLSRGTVFSLEKFRAA

SEQ ID NO: 278771 - protein, 318 aa, unidentified
MNSPSVTVGIDISKQRLDLARFPQGDTFSVAYTDAGLAKMLKRLHGWSPQIILLEASGGYEYGVVAALVAASLTPVLINPRQVRDFARSLGILAKTDKIDAKVLAEFAFRVQPEPRPLPAAQQQELNHLLSRRRQLLEMIQMESNRRELSPFPRVRQSIDHNLNSLRRQLANLEREINDFFHQSPLWVQQDTLLRTVPGVGPQTVLSLQAWLPELGALNRHQIAALAGVAPFNRDSGTFRGRRMIRGGRSKVRQALFMATLSAMRYNPAIKVLYDRLTSQSGKSGKVALVACMRKLLTILNAMVKNQTPWRHMIPLTT

SEQ ID NO: 278772 - protein, 420 aa, unidentified
MTILDSTPAAAVLVAIDIAKLRNEVLIEAPGHKRRRRLLVLNTRAEHDHLIEVLQAYGRPVVCAFEATGNYHRPIAWRLAEAGFEVRLVSSLAAARTREALHNSWDKNDPKDAQVILHMLRIQATQLYHDPLRAGINDVQELSKTHEAIARAKTEIQHRILTHYLPLYFPEIDRFRGNSRSDWFFAFLHAFPTPASVTALTKEEFVAAAWDVVGRKVSKTQILMDIYETARSSIGLPLPLDAPAIRMFRMVIDEARSLIRQRNEIEAQADELLRHSQDYQLLRQIPGIGPINALTIIAEAGDLRRFGHHRQFLKFCGLDLSTQQSGQYRGQTRLSKFGNARLRRTLWIAGQVAIRQRENGFRHKFERYIAKDRDNPDLRRKAMTAITAKMARVVHAVVKGGSDYRPFVEGRVPGGRTSVS

SEQ ID NO: 278773 - protein, 347 aa, unidentified
MRPKLLMENDYILRQCVGIDVSKETLVVTMCMFSFAEEAHYSDVKTFKNNKTGFNQLVKWSRKEAYTDKPLRYVMEATGVYHEELANHLVKIGCTVIIMMPNKAREFAIWEGMISKNDTIDSRVLALVGCVKRSMRPWQPSKEIYHELRAMTRFAQDTKKLRLALKNHLEALEHSHQAEKSVVKHYEAMVSYLDKRLEMNLKNMKEKVASDEALNKKVENIITAPSLGFTSVITVIAETNGFALIQNRKQLTSYAGFDVKDNQSGNVEGTSRISKKGNSRIRAILYMPAVQAQLRSRHLKEAYDRIVQKHPDKKMIAVTAMERRLLLLIYALWKSDKPYDEDHDKKK

SEQ ID NO: 278774 - protein, 406 aa, unidentified
MKIAGIDVHKKVLMVVIIDASMPEEKPVRRRFVTLPSELQRFSLWLREQGVEEAVMESTAQYWRSVWLELEPHMRLHLAQAFSNRAPRGRKHDFKDAERLVRRLIADELILSFVPNGEQRIWRSMTRMKLQLTRDRVRLQNQMECLLEEMRIKLSIVVSNLLGASGLRILHALAKGETDAHRLAQLGDERLQCTEEQLVDALSGRVHPLHREMLALQLQRLQLIEQQMVELNGLIAQAMKPHQDAVQRLAEVPGLGVDSAQQIIAEVGAHASTFPSAAELTSWVGTCPGKEESAEQNHSSRSAKGNKYLRRVLNQAAHAAVKRKGSYFQAVFRRLLPRLGYQSAVWAVAHRLCRVVWKILHEGVRFIEQGQEPDPRAKKQRAQMLARALRKLGYEVTLTPIEPVTA

SEQ ID NO: 278775 - protein, 337 aa, unidentified
MKYSGIDLHSNNAVVAVIDDRDRVLYCKRLANDLQLIVAALEPYRDELQEVVVESTFNWYWLVDGLMADGFAVHLANTAAIKQYEGLKYSGDEHDAVFLAHIFRLGLLPEGYIYPSHERALRDLARKRMQLVQQRTLNILSIESLLARQLNLRINGEHVQRLDDAAVRALVLPPHVERALMANLAVLHTLCTEIQALEATLHKEVKLRPQFDILKSAPGIGNILAATIMLETGTIARFASVGHFSSYCRCVDSKRISNGKKKGEGNASNGNRYLAWAFVEAAAGALRCCPQARRFYDRKKSKRLRVVAMKALAHKLARAAYYMMREGKPFDLNRCFG

SEQ ID NO: 278776 - protein, 440 aa, unidentified
MPHLLWQFTNELDVEVRSLLRLSKEVVSRKMCEGITCKSIFVRCLMYYLGIDIGKNNHEAGLIKGDGIHVGRSFRFSNTEDGFQALLSFLENRLPEDESFSIGMEATGHYWLALYSFLLGQGFILHVINPIQSDSLRNFHIRQQKTDAVDCFLVAEVIRFGNFAETKLANEDVLALRNLARFRESLKDSCANYKRQVITLLDQVFPEYDQLFSNLFGESSKAFLKTYGTPDQVIDVNTKSLATLLRKASRGHHSTEKAREIKSLAARSVGVSFCAETFAFQIRILIEEIEFTENQITEIDKRIKKQLAKLNSVILTIPGVGPATGAIILGEIGDIERFSNPKKLVAFAGMDPTAYQSGNYTGANNRLSKKGSPYLRRAVWMSAVVASRSDPVFKAFYDKKRSEGKSHGTTIGAVARKLLYTIHAVLKSNTPYEVRLDTIE

SEQ ID NO: 278777 - protein, 355 aa, unidentified
MNDAKYIGMDVHQATISVAVRDSAGNLVMEAILETKAETILQFIGGLRGSLYVAFEEGTWAAWLHDLLQPHVARVLASDPRKNALLKAGNKSDRIDARKLSELLYLNKLSPVYHGEQGIRTLKELARSYITITRDLTRVMSRLKAIYRGWGIPCAGQQVYAPRYRAEWLAKISEAGVGRRAELYYQQFDALAALRQGTRRELLAEARKHPAMRLLRQIPAIGPIRAALLIALIQTPNRFRTKRQLWAYCGLALRTYTSGEYRFVGGQLQRSQKVLAVRGLNINHNHDLKNIFKGAATRAAATAGPFQDFYQATVARGMKPHLARLTLARKIASITLLVWKKGVCFDAEHLKQQAA

SEQ ID NO: 278778 - protein, 370 aa, unidentified
MLDTTTFIGLDVHARSIKAVSLDVMTGEVRAATFGYDAGAVAEWVRSMDPRARCVYESGVTGFDLQKRLSGLGVDCVVGAVSKMIKPSADRRRKNDRNDAEFLARMLSVGNVVEVWVPDDECEAARDLTRALEDARDDLSRSKQRLSKFLLRHGLVFDERTPTGRRKGNWTRAHWSWIESIRFAEGADNDVLAYYVDAVRRAAEEKARLEGLVEAEARKPRWRRRVDSLRCLKGVDTASAADLVFEAGEFSRFGNARSFAAWVGLTPSEHSSGESDRRGAITKAGNKHLRKTLVEAAWHYLTCSERPKDLAKGQAPDRVARRHAAKGVRRLVERREALLARGVHGNKANVATARELACWVWAVGLMAEEA

SEQ ID NO: 278779 - protein, 329 aa, unidentified
MKRNCFIGIDISKKTLDVVIYDQEKKRSKIHFMVNNELKGFKEMIKKIKSEGVNLNEVFFCLEYCGVYGLGLGHFLEGKVDFCFCSPLHIKRSLGLTRGKNDKLDAFKIARFSFLFRDELSPSSMPSETMLKLKTLMGERNRVIKGITIEKQVLNELSAQLNKNAIKRANKRLSILTADIKAIEQEVTELIMCEPELKKSYDLLISITGIALVNATMMILCTNNFEGITNARSFACYCGVAPFEYRSGTSIRGKTKVSHLANKKMKADLTNAARSAVVHDPEMRIYYKRKRDEGKEHGTVMNAVKFKIITRAFAVINRGTPFVKLRQAG

SEQ ID NO: 278780 - protein, 347 aa, unidentified
MKILSLDLGKYKTVGCDYERESGRHRFKATFTTPAALQQLVKEVKPDRVVIEVCNIAGWVSDLLRDMGVEVQVANTSDDAWRWRKVKKKNDRCDALKAAQLSAVNQLREVHIPRIEVRQWRALIAFRQQLVRRRGRIKNHIRDLLVTEGQILPRGGKCWTQLGVARLEAMARPLSEIGMNELWRGELDIELRQLRAVQEEIDRAEEKLDALAAADPRVALLRTIPGVGPRLSEAIVALLDRPERFRKSSEVSAYIGMVPKELDSGETERRGRITRHGSRLVRSLLVEVAWAGLRYNPWVRETYQRISGGKKSRKKIAIVAVGRRLLVRCWAMLRDGTSWQLPATRAA

SEQ ID NO: 278781 - protein, 327 aa, unidentified
MTITKYIGMDVHKESISIAVMNAVGKIVMECVLETKASMILQFIDGLRGDVHVTFEEGTWAAWLYDLLKPHVSEVVVCNPRKNALLKDGSKSDQIDARKLAELFRGNHLKPVYHGEQGLRTLKELARSYLIISKDVTRVMNRLKALYRSWGIACAGTQVYAPRHRSEWLGRISEAGVRRRAEHCYQQLDALRLLRQQVRRDLLLESKKHQAWRLLGLIPGIGPIRAALLIALIQTPHRFRTKRQLWTYSGLGLETHDSAQYRVVEGQLQRSKKPITLRGLNQDHNHDLKDIFKGAATRASSSRGPFHDFYEHLEVRFDASYLKSQAA

SEQ ID NO: 278782 - protein, 355 aa, unidentified
MSHYAGIDVSLKSSAVCIVDGGGNIVREAPVESEPAALIGWFKQLGLEIERIGLEAGPLSQWLYAAMREAGLQVELLETRHVRDAFRAMSVKSDRNDARGIAQLMRLGWFRPVHCKSIEAQETRAVLTARKLLQSKLHDIDNCLRSVLRGFGLKVGKTTERSFAKRIEELVDGHTGLTLVVQALLEAHAVLLREFKKLDRQVQQLAKAHPQAKLLMSTPAVGPIVALTYVFAIDDPKRFRSSKATGAHFGLTPRRYQSGETDYSGRITKVGDASVREALYQAAHIMLTKPVKNCSELKSWAMRIAKRAGPRKAKVALARKLAVILHRMLADNMPFNPAAKPVTAKPAAKAKPAAA

SEQ ID NO: 278783 - protein, 415 aa, unidentified
MEVLYRCCCGLDVHKQTVVACLIRTLPDGQRTTEVRTFSTLTEGLLALADWLRAAGCTHVAMESTGVYWKPVYNLLEGQFTLLVVNAAHVKAVPGRKTDVRDAEWLADLLRHGLLRASFIPDRPQREWRDLTRTRTVLTDERSAAVNRLQTVLEDANIKLAGVASDVMGASGRAILAALLAGQTDPAVLAELAKGQLRKKRDLLAQALTGHVSDHHRLLLTTHLAHIDFLDEQIAQLSGEIAERLRPFAAELERLDTIPGVDEQTAEVLLAEIGPDMGRFPTAAHLASWAGMCPGSHESAGKRHGGKTRKGSKWLRRALVGAAHGAARTKQAGRTGLARRYRRLVVRRGKAKAAVAVGHQILITAYYVLRDQVTYHEPDPGELEARRRERAQARAVEQLRQLGFAVTLTPKQPAA

SEQ ID NO: 278784 - protein, 390 aa, unidentified
MERPMQKLNDFSRSFVALEPDSTLIAVIEMSLSSWLVAGIVPGVERQPLKKLAADESALLKLLHRWREEAEKAGRRIERVAVAFEAGRDGFWLARWLKARSIEAHVIHAASVAVSREHRRAKTDRLDTELLKRAFLGWLRGERDHCKMVDIPTIKNEDAKRPNRERENLVSEQSRIINRMKAALIRLGIRGFNPKLKRAARRLEDLRTPEDEPIPPNTLAELRRDIERRRLVRDQIRQIEEARLQRLDHAPGDGPHAMVRLLARVIGVGIETADMLVHEVLSRSLRDRRAVARYAGLTGSPDESGRKRREKGLARSGNGRVRRGMIQLAWRFLLHQKDSALAQWFRARTENARGTRKPMIVALARKLLIALWQLVRQGVVPDGVVLRSAQ

SEQ ID NO: 278785 - protein, 311 aa, unidentified
MATYVGIDIAKHSFDMAIDSEQNVQHFDNDAKGIQTCGKRLKQLKPDLIVMESTGGYEKALVDQLQTLHLPVAVVNARKIREFARASGQLAKTDKLDALIIARFAAMFQPPAQEALDPQTQQIKALVSRRHQLVQMHTAETNRIEHAHDKAVARSIRTILKTIEKQIENVDRQIRDHIDNNPELKRKTEQLESVPGIGETTASLLVTELPELGHLNRRQIAALVGVAPINRDSGTYRGKRMTGGGRRHLRARLFMPTLVAARHNPIIQQFYQRLVKKGKSKMTALIAAMRKLLTILNTMLKKNEAWNPKTT

SEQ ID NO: 278786 - protein, 341 aa, unidentified
MSIMTVGIDLAKNVFAVHGVDQNGKAVLIKPKVLRDQLLALIAQLSPCLIGMEACSGAHHWARLFRTYGHTVKLIAPKFVTPYRMTGKRGKNDAADAAAICEAVSRPNMRFVPIKEEHQQIILCLHRTRQGFVEERTATYNRMRGLMSEFGIVLPQKVACLRRAIGERLEDLPGYANQCIGDLLSHADQLDARIADYDKAIAKAARDDARSKRLMQRPGIGPVTASAFLAGIGNGHDFKNGRQVAAWIGLVPGQYSSGGKTRLGRITKAGDSYLRSLLVMGARSILSGLGDKQDGFSRWARSLVERRGYWKAVVAIAAKNARLAWAVLKYGEDFRLNPSAA

SEQ ID NO: 278787 - protein, 344 aa, unidentified
MNVTTFGLDIAKNVMQVHWVDGQTGEVGRRSLKRSQLAPFFARQAQCRIVLEACGSSHYWGRTLSALGHEVRLIHARHVRPYVRGNKNDAADAQAIWSAAQQPEMRWVPIKSEQQQAVLSLHRVRAQWIKVRTQTTNGLRGLLYEFGVLLPGGRQAGVKALGASRAEIDAKVPVLMHGLIDGQLQMLRQIDERIAAIEGELQGLEHQLDSARRVRQIPGVGLLGATALAAVLGEDARGYRNGREFAACLGLVPCHRGTGGKVVVGRLSKRGDPYLRTLLMHGARAVIFHAKSKSTWLEKLLARRPLNVVVAALANKMARTAWALVTHGREYQAGGFAKASSPNT

SEQ ID NO: 278788 - protein, 409 aa, unidentified
MKLYVGIDVSSTDLCTCIMDQEGNTCAQFKVDNHLLGATFLRDQILLWANKRQPSEILIGMEATSVYSWHPAMFFHQQEELKSWHVKVFTINPKLIRKFKEAYTDLDKTDGIDAWIIADRLRFGRLKVTAVMHEQFIALQRLTRMRYHLVHQLTREKQYFLQHLFYKCSSFTQEVDSSVFGHAILELLLESFSLDEISQMDVQQLADFLRQKGRNRFADPECIAKSIQKAARSSYRLSKCVEDSIDLLLGLSIQSIRSLQAQIKELDKAITRHLEGIPNTLQTIPGIGPVYAAGILAEIGQIERFDNQAALAKYAGLTWSKHQSGRFQAEETSLIRSGNRYLRYYLVEAANSVQRHDATFRAYYRKKYEEVPKHQHKRALVLTARKLVRVIDALLRNGQIYTPRKEEDR

SEQ ID NO: 278789 - protein, 314 aa, unidentified
MKRILKIGMDVHTTNYTLCAMEPIIGEDDRVFATIKVTPDYKNILMFIENLKLKLGLNDEYDIQCGYEAGCLGYSLYNQLTAAGIKCVILAPTTMLTPQGVRIKTDMRDAYMIAQCLSYGGYHAVYIPTEDDDSVKEYLRMRNDHKLALKKIKQQINAFCIRHGFCYDGTKWTLSHLKWLKKLEITNGLYRETLDEYMASYEEQEAKIERYDKRIGEIAEQTRYHDKVKKLGCFLGIKTHTALSLIVETGDFERFAKGNQYASYLGLAPGENSSSDNIHRLGITKAGNSHLRQLLIEASGGIYERKEMVYPWNE

SEQ ID NO: 278790 - protein, 360 aa, unidentified
MSTYYIGADVHSNGTDLAIEKRGKIVARYSVPTSIPAIKNVLDSLQGRKYLAVEEGPMSGWLYRNLNDKLDQFISSDPRRNKLIASDGDKDDKIDAGKLASLLRGGFLRAIHHSDDNSRAELKHWVSLYHDRVRDAVRGINKIRARCRMHGVKISRAALRDPASRIDWLQQTNHNALANQLRMLWLGYDATVQQVKLAKRQLSTLSKKHNIINQWSILPGIGLIRATTIFAYLDTPWRFKKKNKLWKYCGVGLQRTTSGTDKKGKPKPARLKLPWAVNRALKNAVLGAALSAINQKDNAFRDYYERMVHNGVITSNARHAVARKMLTVMWGMWKTNSRFDEKMITVDAAANISAVSALSR

SEQ ID NO: 278791 - protein, 422 aa, unidentified
MGDDRVVLEWEVAMDVIVERPGALDVHKEQVTACVRASDEGGRRVAHVEQFKTTVRGLLVLRDWLKAHGVTQVTMEATGVYWKPVFHVLEDDFELVLVNARHVKQVPGRKTDVCDAAWLCQLAEAGLLRASFVPPKPIRALRLLTRYRKAQIGERQREANRLHKALEDTGIKLDCVASDILGVSGRAMLEALTCGTTDPSVLADLARGRLRAKIPALREALEGRFEPVHALLIGAILAHLDFLDEQIERLSDAIEVQLAPFGPAVELVCTIPGVAQRSAENMLAEIGLDMSVFPSAAHLASWAGQCPGNHESAGKRRSGHTRKGSKWLNEALKNAAMAAVRTNDSYLQALYLRLRPRVGHARAIGAVKHSIICACWHMLSTGEVYRDLGGDYFRRRDPERQTRRLIAQLERLGHSVTLQEVA

SEQ ID NO: 278792 - protein, 281 aa, unidentified
MAYIGVDLHSDKFTAAFRDKTNKETLKSYYMSEYENFKRKLKRDDYIFLEASTPTFAFTDLLKDKVKKTIVIDPFKFKAIADSRKKTDKVDARQLAKMGKYHVETDKDFLPEVYVVEERIRKLRSLFTTFRLIKREINMNKNRIHSLFKQNLKPYSKKHIFDEIMTGLKPIDLDEEYKIQVEVLFDVLSKLEEKKAEIKKKILLTGEPFLADIDILVSISGISVFTALGLISDYATVERFQNAKQFSKYLRSTPRSEESNKKVKTGKTQKSGRKLSMELML

SEQ ID NO: 278793 - protein, 331 aa, unidentified
MSVHVGLDVGSRTTAMGWRDKGRAAGSWDIAQTPKGRKAAVKKLLALKPLSVVMEATGIYYLDLALELSTAGLPVSVINPKSSRNFARLILQHSKTDAIDAQLLAEYGERMTPRLWTPPSPAQLELRAIGRHINRLTCHCTRAKNELHALQATETTSAMLIEDEEEAIAMFGRRIERFRRAGRDIIASCPILQEQFDHMMAAPGMGEVSTFAVLAELTTLPVTLKSPQISRYAGLDVRLTQSGTSIDKPGRLSKGGNAYLRSAMFMPAMSAIRCDPYVKAFYDVLVGRGKRKMQAICAVMRKYLTGLWACIRAGEDFDTAKLFSEKHLLKA

SEQ ID NO: 278794 - protein, 331 aa, unidentified
MFRYLIERGERMEAMVKRCAGLDVHQETIVVCVLKGELDKKPESEIRTFGTYTKDLEELHEWLLQEEVEQVAMESTGVYWKCVWNIIEDEKYEIKLANAREIKNMPGRKTDVKDAQWIAELLRCGLVKGSFVPDIEIRELRDLTRYKRKIVQQISSEKNRIHKILQDANIKITTDISDIFGDTGRKLIEKIIEGKKITDEDLLEITSGRGKTSLKNKIPQIKEGLKGTTREHHRKMMKLIYEHLKYLEKEKKEIEDLIDEKCKEYKKEIELLDSIPGINEDSAKAIIAEMGVNMYQFPTVKHLTSWAGMSPGNNESAGVKKKERQRMETKH

SEQ ID NO: 278795 - protein, 417 aa, unidentified
MKDGEKSSPCRYIALDIHKHYSVVAGVNREGEEILPPSRVEHLNLEDWLAKHLLPTDRVVIESTTNAWHVYDLLEPLVAEVLVANPIKVKQIACARVKTDNRDTLILARLLAANLVPTVWVPPKAVRELRQFISHRRRLAQMHTQVVNRMHSVAHRHHLNHPKGKSFQPKNTAWQQDASLSQLEKLQLELDMATRAHLEEQTERMTRELGRMSHEEPWASQMLCLMQIPGCGVVTGMTILAAIGDITRFENPKALASYSGLTPGLEQSGVKVRGKGITKEGRKELRWAMVEVAWRAVKADPHWKKHFEELKRRMHPNQAIVTIAHHLLVVVWYVLIRHEPYRHYSPERIAYKYLTWSWALDEEQRQGMTRPQFARYYLMRLGIGDELKRVALTPQFPYRLASVEEILALRPELRPPE

SEQ ID NO: 278796 - protein, 467 aa, unidentified
MWSCVSPGWPVAESPVGSPRLFERLYRGDVGCGGRVRKGESSLKQRRFVEGEFRIYVGLDWGTEFHRACVLDSTGKILRQCRIDHNGQAITDFLRSLDNLANGQPGTIAMAIEVPRGPVVEAFLEGGFAVFSINPKQLDRFRDRHTAAGAKDDSRDAYVAADSLRTDQHCFRRIATDHPDMVRLREISRTEESLGEDLRRTVNQLHQLLLRYYPQLLQLNSTPDEPWIWALLEVAPIPQRGAKLTPARLKSLLAKYRIRRWTAEELQAILRTPPLPLSAGSADAISEHALLLLPQLRLLYSQRNKVRDRIEALLNHMTLLGREHPDCREHRDVGILLSIPGLGYLIAAKLFTEGSDALAQRDYDALRAHSGAAPVTRQSGKSKQVLMRRGCSERLRNAVYHLARCSVLHDPHSKRHYAQLRGVGHKHGRALRGVADRLLTVLIAMLKTGQPYDANRRSDAATPAEAT

SEQ ID NO: 278797 - protein, 413 aa, unidentified
MDALRPSYFVGIDWASATHAVCVLDVAGRFVWQGMIPHTAAGLTDLVRRLARLAPPVEIAIERPSGLLVDTLVEAGFRVVPIHPNALKATRPRYAAAPGKSDPGDAYILADVLRTDGHRFRPLRAPSDATRALRAAVRTRDDLVATRIHLANQLRSVLESFWAGAAALFADIDSPIALAFLDTYPTPESAARLGEQRLARFLQRHAYCGRRSAAALLTRLRAAPEGRAAALESETRGQLVRSLVAVLRPLVEQLRELEGLIAAQLAQHADGALLQSFPRTGTVNAAQLLAELGDDRVRFASAAQLAAEAGVAPVTHSSGKHRGVACRFACNKRLRQAATTWADNSRHGHPWAAAVYRQARARGCDHPHAVRILARAWLRVLWRCWQDHTPYDPQRHGRALPFLKSPHRAPAAA

SEQ ID NO: 278798 - protein, 336 aa, unidentified
MQNVADRPGASTAICTNLGAIFVSLELSRSTWLVTSLSPGGGERMSRHSVTGGDVAALLARLTDLQGKAQVRTGRCFPIVVIQEAGLDGFWIHRALRKEGVESHVVDPASIAVQRRRRRAKTDRIDGEALVRALLAYKRGEPRVCAMVKVPTPEEEDGRRLCRELKSLIGERIRHANRLKGLFFAQGITGYEPRRQDRRERLEELCTGDGRPLPPHLKALALREIEVLELLTHQIDTVKAERNALLAVQCTADTTPGRVEMLLRLKSIGPGIAGALWSEGLFRHFDNRRQVAAYAGLAPTPWQSGSIDHEQGVSKAGNPRLRAMMVELAWLWLRRF

SEQ ID NO: 278799 - protein, 410 aa, unidentified
MKRDRHIYIGLDLHKFQHTAVILNCWHEKLGEMTIQNKPIAFPSLLEYVNRYLTEDLTPVFGLEDVGGYGRDLALYLIGQGYIVKFVNSSLSNAERNSYAMTQKHDSWDAQCVADVLIRKLPFLPDAAPSDIHWIIAQLVGRRNALVKAQTALKNQLHMQLNYHYPSYKDFFSEVDGKTALAFWESYPSPSHLEGATIEDLRKFLLEASNNACSTRKAEQILSLVQTDGEVKRKYQTSRDFIIQSIVRDIRFKKQEIKKVDKELKVTIQTLGMQLEPMPGIDTVTSSALIAEIGDIHRFANSDKLARYAGIAPIRMGSGGKETMKKTKQGNRKLYDTFYNLAVQQVQVCKGSKTPRNPVFYAYYNRKLSEGKSKSQALLCIMRRLVRIIYGMMKNKKAYIMPDQPETIAS

SEQ ID NO: 278800 - protein, 355 aa, unidentified
MSRLAGAIDGVIGVDTHRDTLAAAATDPVGGVLAQASVRADAAGYRRLLDFARAQVSTRRCWAVEGAGSYGAGLAAFLQANGERVVEVGRPKRPPRRTGAKSDALDAVRTAREALAHDHPLAPRCRGDREALRVLLATRHSACVAKVSATNQLKALIVGAPEELRAELRGLGTKRQVRRCALLRDRPARSLEHRMTVRALRSTAQRIQLLAGEAAELRAELERLVAAIAPWLLELPGVGPISAAQVLVSWSHVGRLRSEAAFAALAGASPIPASSGQVTRHRLNRSGDRQLNRALHTVVVARLRDDPATRAYAARRTSEGKSVRDIRRCLKRAVARQLFKLLERCDRAGVEVARL

SEQ ID NO: 278801 - protein, 370 aa, unidentified
MQTRSFVGLDVHKATIAVSIAEDGRNGEVRFLGAIPNTPDEIAKLAKRLSRHGTLDFCYEAGGCGYCIYRQLTLLGHNCMVVAPSMIPRKPGERIKTDRRDSQKLAILHRSGDLTAVWVPDVTHEAIRDLVRARLDASAYYKKTRQQLVAFLLRQGRTYTDGKNWAQRHRRWLASQTFEIHAHQIVFQDYVEAVWTAQQRKDALIERIEGMVNEWSLGPLVHALRALRGLDTLSAVTFVATIGDLGRFESPRLLMGYLGLVPSEHSSGESVRRGGITKTGNREARRMLVEAAWCYRYPARVAQKKAEVLLHPTKSVREIAWKAQTRLCGRYRMMVAKGKKPTVVVTALARELAGFVWAMGQEIKITTGAG

SEQ ID NO: 278802 - protein, 322 aa, unidentified
MSVSNQRCAGIDVSKGTLDIAISNIASQFTVPNGTDGFTQVLRELKRNETRLILMEATGGLESGVACYLQSEGFDVAVINPRQARDFARAMGYLAKTDRIDARVLLQMSEVINQHPEREKYIRPLPDAHRQILAAMVARRRQLTAMLTAERNRLHPSHPLSHASIRSIISALKGELARIEGEMAIHIKKHFSELSELLNAVKGVGTATVAVLLAEVPELGSLSRREISALIGGAPVNRDSGTMRGRRTVFGGRASVRTALYMSALVGTRHNPIIKEFYTRLVAAGKPKKVALTACIRKLLTILNAMLKKNEAWDPMYHQHAS

SEQ ID NO: 278803 - protein, 374 aa, unidentified
MSNIASLETERQRFLYVGMDIHKDNHTAVATNCFGQNLMEKEISNSKEDFVNFVAAVKQLSKQNDLTPVFGLEDSYGYGHRLASHLYQNGFLVKMVAPVLVDRARRYETHPEKSDLLDASQVARVLVQRTDRLPNYSISRDDEIAKTIKELNLDREFLVKEQTRLKNQLHRLLHQAYNSEYRSKFKDPFSLKALLYWQSHPLPRKSDEARSNTFILKNQIKRKVKRLLDIRGEIKTIEAELNVLIKQTNQKLDTLNGCGIALAAKVLAEIRNIERFKSSSSLAKYAGLCPREKSSGKTFRYIKTKSGNRKLNMAIHRIALSQISKTGNQYAKSYFQRKVSEGKTKSQALCCLKRRLVDIIFMMLKYKQAYNYQG

SEQ ID NO: 278804 - protein, 331 aa, unidentified
MTMFAGIDVGASSVVLVCRQNGRGSAPETFDQSVAGHAALVRRLCRVAPQCVVLEATGIYYLDLALALQAAGLPVAVINPRSFHHFAKLKLVGSKTDGVDAALLAEYAERMNPALWQAPEPHRLALRDVGRQINRLTAARTQAKNRLHALRARASTLPLLIDDELEGIAVFDRRIQRLTAAATDLLDQAPLLARQCQLIDAATGIAKASAIAILAELCVLPGHLKANQVSRYAGLDVRLWQSGTSVNQRARMSKAGNAYLRAALFMPAMSAVRYDPRAKAFSLALQRRGKKKMQAVGAVMRKYLTGIWACLKTDQPFDSAKLFSEIHLMGA

SEQ ID NO: 278805 - protein, 345 aa, unidentified
MHIASIGIDLGKATFHLVALGEHNKVLLRKKFSRPQLLAYTANLPASLIGLEACAGAHFMGAALRGQGHQVRLIPAQFVKPYRKSNKNDFIDAEAIAEAVTKQNMRFAQLKTQEQLEWQAMHRVRDRLVRRRTALINEIRGFLLERGITFAAQPIHLRKNLPAVIEDAEQNLSPRLRWLLDRMWQEWKQTETEIQAITDEIERISEEDARCRQLRQIPGFGPLVSTATVAAIGNGSAFRRGRDFAAWVGVVPRQYSTGGKQKLYGISKRGNVYLRRLLIHGARAVLFRVKYDTAGFGQWVHRLAQRAPRNKVVVAIANKLARIAWAVLSSGKDYRHQPLLQLAAA

SEQ ID NO: 278806 - protein, 422 aa, unidentified
MKSVGLDVHLEFCEVAIVEDGVVRSAGRVETKPEQLEEFAAGLSADDRVALEVTGNAWEIARILERHVAQVVVVSPSDTAIRQARAKTDRLDARTLARLLAAGSLDGVWMPDQATWVMRRRLSRRSQLVWARSRAKNQVHAVLMRQLVGRAPVSDVFGVKGRKWLAGLALAVEERETVDGAMRQITFLDSEIAGVEQLIASAALESGEIKRLMTVPGVNVIVAATFLAAVGDIHRFKNQRKLVGYLGLDPRVRQSGPGPATHGHISKQGSNSARHALVEACWTTVRQPGPLHAFYQRVRARRGHSVAIVAAARKLACLFWCLLTREQDYAFAQPSLTAKKLRLLEVTAGAPTRRGQPSGVWATRERMREAERELAHQAEVAYAQTVRDWHAAQAGKVGASVTPGHASKGPSKGQAARQTTSP

SEQ ID NO: 278807 - protein, 353 aa, unidentified
MAHPTAPPVTIGVDTHLDVHVAHAADQLGRRVATVQVPTTPAGYQHLLAWARGLGQPVAWGVEGTGSYGAALARFLAANHQVVVEVNRPDRQARRRHGKSDPVDAQAAAKAVQAGDATVVPKAGTGQVEMIRCLRVARQTAMRARTQTINALKALLVTAPAELREQLRGMSATRLVGAAADLEPGPITSPLAAAMLALGTLARRHQALSAEITALTSELDRLTATAAPKLVALFGVGQDSAGALLVAAGDNPGRLPSDACFAMLCGSSPIQASSGKTTRHRLNRGGDRQANAALYRIVLVRLCHHQQTKDYMARRLTEGKSKKEIIRCLKRYVAREVFAVLHQMGQDALTAAA

SEQ ID NO: 278808 - protein, 354 aa, unidentified
MSKDIMLTVDYHDRACVVRRLDRATGREQVLTEIPTTAASLRRVVDQAWCDVRRQGRVLWIQESTTGWARVQELLADRVDFHLANVLQMPLPPKARRRKTDKVDTARMQREYLAGTLPLAYQPPAAWRQLRRLVAYREGLVSRRTAVRNWIDRFLAHETWFDRTGLWSPKGQKRLRTLLKGLPRTDRVILEQKIEELARLEGQLEVALKELLSAYHDSPDAQRLDAILGIDVVSAVSIVARIGPVARFANAEVLIAFAGLAPGIQESDRTRRDGRIGGGGTDRHLRHYLIEATVWARKLPRYRATYERIKKRRGSKVGRLVVARMLVRSIYKILKDGVAFDPGVSPRVTEAAAC

SEQ ID NO: 278809 - protein, 341 aa, unidentified
MKKILKEVVGVDVDQKKLVVSLGRLHEDLEQEIYARKVFDNNATGFPALLSWVSNLADPAVETCFVMEATGVYHESFAYFLDENGKVVSIVLPNKISNYFRTLEIKTITDKSSSEAIASFGLSRKLSRWKKPDPTFKKLKQLSREREQLIVERTLVKNQLHAENAEAEPYKASLQRMERRITLLTKQEKEILQEMKLLIASNEKINAQVKLACTIPGVGILTSAIVLAETNGFEHVKNKRQLVSYAGLDVREKQSGTSVKGKPRISKKGNRYLRKAMYLPALAAIRSNEQHRDIFARLVGRHGIKMKAAVAIQRKILELIYVLIKNNTVYNEHHLKLVHAA

SEQ ID NO: 278810 - protein, 314 aa, unidentified
MTSTTPRYVGIDVAKHHLDVAVRPDGDSWRVPHDADGLAALVAPLHDLVPTLVVLEASGGYERPVVAALSAASLAMAVINPRQTRDFAKATGKLAKTDTLDAAALAHFAEAVRPPPRAVADDATQALGAALTRRRQLLAMLAAEQHRLSTALPTVRERIAAHIVWLKAEVADSTKALARTIQDDSAWREREALLRSVPGVGPILATVVLAELPELGTVTRQQAAALAGVAPLNRDSGTWRGKRATWGGRAHVRTALYMATMSAIRANPVIRAFYERLRAVGKPQKVAVVARMHKLLTMLNAVLRQRIPWAGAAG

SEQ ID NO: 278811 - protein, 340 aa, unidentified
MGDITTIGLDLAKNVFQLHAVDEAGSVVMRKRLRRGQVLAFFARIPPCLVGMEACATAHHWARELIALGHEARLMPPTYVKAYVKRNKHDVADAEAICEAVRRPSMRFVPVKTAEQQSALMMHRARDLLIRQRTMLVNALRGHLAEFGLIEAQGLHKVARLIAIVMDEKDGRVPDIARQVLKVIINEIEDIQTRIAGLETQVLAWHNSSPVSQRLATIPGIGPIIATAIAATVADPNIFRSGREFAAWLGLVPRQNSTGGKARLGGISKRGDSYLRRLLVNSAHTVLLCSKQAKTDPWLTSLLSRKPRLVAAVALANKTARVAWAIMRKQDTYRHAAVAA

SEQ ID NO: 278812 - protein, 419 aa, unidentified
MTDMTVPQTSPVLVAIDIAKNRHEVLIDIPGRKRRRRMSILNTREEFDRLIALLLEYERPVRIAFEATGNYHRAIAYHLASVGFEMKLISSVALARTREALHNSWDKNDPKDAEVILHMMTIGAEQFYHDPLMHDLNDIQELSKTHDIVSKSKTELWHRLLTHYLPLYFPEADRFNRTSRSDWFMAFLELFPSPHFITAMKKEDFIKAAWKVVGRKVGKERLLADIYETAATSVGLPVAPDSDAIRMFRLVLAEGRSLIAQRNQIEARAARMLADNPDYQLLCTIPGIGPINALTILAEAGDLRRFAHHRQFLKFCGMDLATIQSGTFRGQTKLSKYGNARLRRTLWMAGQVAIMQTANSFRDKFERYISKDRHNRHLRRKASTAIAAKMARTAHAIIKSGKPYRPFFEGAVHGGRTFL

SEQ ID NO: 278813 - protein, 365 aa, unidentified
MIKDTLYVGLDTDKKHIDVAVAEPLPGGEVRYWGKIANEAAALDRLIKRLQRHGRHLVVCYEAGPCGYGIYRRLNDKADVTCQVVAPSMTPRRPGVRVKTNRRDCLTLAKLLRAEELTAVWVPDRAHEAMRDLVRARAAAVEDLLRCRQRIGGFLLRQEIRYAGKPWTRKHRAWLGGLEFVEGAHRLMMAELVEALDQAQARRDRLRDHILELVPSWSLAWLVEALQALRGFALINAATLAAEIGDPRRFESPRQLMAYLGMVPSEHSTGAAVRRGGITKTGNARARKALVEAAWTYARPAKLPKPAGQSAALRAIADKARHRLSGRYRRLVARGKRPPVAVIAIARELAGFLWAIAHAAAKHPH

SEQ ID NO: 278814 - protein, 445 aa, unidentified
MAKSNRLSRGDKRRNTRLAALRRLVPADHAIVGIDLADKKQAVVVCDHDSQVLARTTVRVRAWDMGPVLDWVHRQAAKYGFAGVTVGCEPTGHRWMVLNELAAQRDMTLMCVNPMLVGKAREAEDYTRDKSDDKDAMLIARLVAQLHCYRPERAEETWARLRQLGARRARLVTEATACIQQLRDLLECAWPGVLEAAASPFDSANWCAALAVVLDRCDGRPERLNKGGLARFEAAVGRELPRWGGSRRRRAIIEAVFVALVDPTGVMAQRRGALERARWVLGDWRSTRARRVQVEERMVEVLDELELTQLLTSIAGLSAVGAAAILAETGDPARFDSPRALVKHAGLCPRDNNSGTFQGRARISRRGRPGLRLAAWRATWGALHHNPAMAARYRYLTGRQHNQLTDGQARAAIAAALLRWIHVVVTKQVSWDAAIAGAEVVPTAA

SEQ ID NO: 278815 - protein, 356 aa, unidentified
MNTDKCWIGIDVGESSTSLCFLTSCNKISRATALGSGTREIAAALAKVDPKCIEAIVLESGAGHRLPRELAALGFPVTTVDSFRAAKFLSIRAMKTDDNDARGLAEIARYALQSSISVHVKNVTCEQIRLQLALRNQLLGQRVAARNALRSHLRTLGCGATRLASPTKLRGMVEAETERMKQEALGDVVPEVIALLEIVEALESCASRLDSRIKMRAQDSSITEKFMKIPGVGPVTALSFYSAIENPHRFPCSANVGAYLGLVPRLRQSGSVSHRGRITKAGNKLLRSHLYMSAGVMMSRARQDTAMGDWAKSLGTRVGYSKARIALARKLAVVMLTIWKADKAFTCYPAALATNA

SEQ ID NO: 278816 - protein, 401 aa, unidentified
MSKKNTRNALDTSLSYAVIGLDLAKADCAVAAVPCSDDELGLIDRMDYESLFEQAEKLEPTLFAMEPCCGYSQISLRLQNMGHEVKVISGHAVKNWIATHKSNQKTDLNDATALAKLALYDHDLQPIRVKNVEECRIASVQAIRIQLRTQATKSLVCFKSLCQCWGIVIRRGSLNTKKMAEAVAAVEKLLGAEVASSLMILRDAYKFTMKQINALDKVLDALVEANEQARTMKTVLGIGTQTAARLAVTTGDIKRFPMPRSYVAYFGLAPRNIITGHSGTPSPSKRDALKPVSSRGQGKVSRRGDRVARSFIIQGAATIYMLYCKDMLPECQLRRWLHEQIKRGKPYGKIIVSLAAKLLRIVWALLTYGEKFDIHKAGVPRSVLAAMEKPLKHDAAAESAA

SEQ ID NO: 278817 - protein, 426 aa, unidentified
MKSNTQNAKIAAITEKTLVVGIDVGSETHFARAFDWRNYEYSRKPFQFSNDEQGFEAFLTWITELTEKHGKTKVMPGMEPTGHYWFNLGSFLQENGMCPLHVNPHHVKKSKEMDDNDPSKNDRKDPKVIAALVNEGRYSYPYIPEGIYAEIRVLSGLRTRAQSELTRLKNQIARWFSIYFPNYKDVYGNAGAVSGLMILKQAPLPEDIVKLGVEGVNRIWRDAKMRGVGLKRARTLVKAAEHSVGCRDAQDAARIELKILLADYDMQLRRESELMAMIEEKIAEVPYIDKLLDIKGVGMKTVVGFVAEVGDIRRFTDPKQIQKLAGYAIVSNDSGKHTGESHISYRGRKRLRYVLYEAAVSVVSHSPEFKSIYQYYTTRDKNPLKKMQSMIAVACKLIRIFYKIMTSGVSYDGKKLITDIKRPLAA

SEQ ID NO: 278818 - protein, 446 aa, unidentified
MKKEAIEKEFGAWVGIDWGDEKHAVCVRPEGSEEIEYFELKQEPEAIVDWIHGLRSRFEGRKIAIGLEQSRGALIYMLMNFDFLTFFPINPKTMKMYREALRSSGAKDDPSDAELLLDFLQTHRKHLRVWKPEEPQTRKLRMLVEGRRKLVDESSDVSRRIEQLLKFYYPQDLDWVGDLKTPLACDFLMKWPSLKQIKKAKPAQLRKFYRQHNCRNNELIERRISEVGRAIPLTEDEAIISVSVLMVQALIPLMRDLTTGIERFESQIQECFEEYPDRFLYESLPGAGPALKPRLAAAMGTNRDRYQNAVELQQFSGIAPVTVTSGKNRWVHWRWACPKFVRQSFHEFAGCSLVKSSWAKAYYDHMRANGKGHHAALRAVAFKWQRIIFRCWKDGKPYDENQYLKVLQRRNSPFMSLVNLPKPASLSQSSWKSAGSIIAELIQKSC

SEQ ID NO: 278819 - protein, 400 aa, unidentified
MDPHLCVGRGLQSSLSRHRMSGWLDPRGVRHLPRPSRVREVLPSCRGGHRERTALPVAVAMEGYNGYARPLDRLVQEKGYRLHNVNDLKLARYKEGFPGAATTDPIDTRKILELFRLKDQLPLAKDAIQEVVSAPVVNEKLKRLSRRRRNLVIEKMRVLCRMQADLQAACPELLAATSDADNLWFLRFLTCREDLRQLARLRQSTVLQIRGIGQKYAAIIVGWQQHARFSDEVEYVGPMIIQDARRILELHVQIHVLDEAMAELSEHSEIARPLSTIGGFGKTSIAELAGEIGTTERFAYEGSLALYLGMCPLTHQSGQLSTARIPRQVNTRCKAAMMTAVARHIRCVPESRAYYDRKRAEGKTHNQAIRALGRHMVRVIWAMLRDHRGYEIREELHRAS

SEQ ID NO: 278820 - protein, 437 aa, unidentified
MNHQRLQAQREALAGKLVIGIDPAKDKHQAAVLDAQGNQRGASFSFPVTAAGYGETLWRNIAKVLPSYKMDDLVFAIETACNLWETLAFYLRSRGYHVVLVSPLSTHHARPIMSMEFSRTDPKDAYLVATVAQRGAYHHYEQFPSESNAMHQLAVTYDKLRKNRAQNRARIRALLDRDFPELPHILEPDTDTAVYLLRKYLFPDEFLSMDIRQEAKAIEKISRRQCGRATLELLQQAARTTIGLVRQSDERLADRLTLDAYLALVDTLELHMQRVLDELLARAQELPQFERINSLSGAGTILTALFLAEVRDLSRFTHYRHLEKLAGLNLRLYDSGRYSGTRHISSIGNCRLRWILYKMTEETARRVPEVRCKYLRRQLKRRRHVKNVVAAVPQLLQLIIAMEKHQRPYELRPQAVATMHALEEQYTQLKTVKRTAA

SEQ ID NO: 278821 - protein, 346 aa, unidentified
MLYVGLDLSRKRVDFHALGAEGELVDRGAVPADADGLARLVHRLGGCDREVLAVIESMNGARFVHDQLELAGFEVEIADAQRVKGLAPLACKTDRIDAWVLAELARRDLVPAIWLPAPAVRAERERARFRLHLVRQRTRLKNRIHATLIAHGHACPVSDLFGVKGRALLTRLDLPEPWRGTLEASLRLIDALEGEIAGCERELRRLGADHRYLPLLITCPGIAWVLGYTIASELGDIGRFPSPRKLTGYTGLCPKVDQSGERDRRGPLTKNGPRYLRWALIEAAQHASNSVPYRDLSARKRAQYPGPRGTKLANICVARRLAEAIWHMLTRNQPFAPAGATGPLAA

SEQ ID NO: 278822 - protein, 387 aa, unidentified
MPQPNDLSRSLVALDHNSTIIAVVEMSQSSWLVGGMLPGIERQPRKKLEPSPERLLALLHRWRDEAVKAGRTITRIALAFEAGRDGFWLARWLAARGIEAHVIHASSVAVSREHRRAKTDRLDTELLKRGFLGWLRGERGHCSMARVPTIAEEDAKRPNRERDCLVGERTRIVNRIKSTLVRLGIRNFKPTLRKAAERLATVHTPEGTPLPPNTLAELQRDMARLGFVISQIREIEEARQKRLEQQHETGAHDMVRQLARIVGVGVETADLLVHELLSRPMRDRRAVARYAGLTGSPDESGARRREQGLARAGNARVRRSMIQLAWRFLMFQKESALALWYRARTADSRSGTRKTMIVALARKLIIALWRFVTTGEPLEGVVLRPAS

SEQ ID NO: 278823 - protein, 352 aa, unidentified
MRKSTAVGPEYNEYYIGIDVHKRNWTVTVRYQHMELKTFSMEPSAAALKRHLDSNYPDGRFFSVYEAGFSGFSAHRQLCALGVANIVVHAADVPTSDKERERKSDPRDSRKLARELQKGELQAIYVASEQDEEFRMLCRLRERCQREVTRTKNRIRGHLSYFGLEAPDDHPWSGAFIRRLREEFCDDRLRDVILRAHLDQLDERRRQLSGVLREVRAAVRRSRHAQTLRFLLTIPGIGFITAITLISELVDIGRFPSLNELCAIVGLAPSTSSSGERDAVRGLSRRKNHYLKHLIIESAWLAVRKDPAMLASYQSLTRRMRPTRAIIRSARKLLNRVRFVWRNQQPYVSLVS

SEQ ID NO: 278824 - protein, 433 aa, unidentified
MLKLNYMSTLFVGIDVSSKTNAVYAMDFEENKYISSSFGNNQPGADQLVNMIAECMQKHKNLDTVLIVLESTSVYSVHISNFLSASEVLMPYRPYVFCVNPKAASNYRKSYIGMEKTDPTDAYLIADFGRVGRTKKLEPWRGGQFISLKRLTRHRMHLSECITREKTYMVSNLYLKFSELQLLEGDDKPFGSLYGATSSAVLTEFLSPQEIIDMPEEDLLTFLAGKSRNRISDLSKTSELLRKAARDSYRLDKCMYEPLSISLASSFNCIHAYQKEIKLIEQAIEKCINGMNPNALLILQSIPGIGPIWASGILSEIGDITVFHSSDALAKYAGLYWPKGDSGDFTSEDNKMSKAGNPYLRCYLGEAANSVRKHIPEYADFYARKYTEVTKHQHKRALALTSRKLVRLVFGLLVKNQLYTGEKLDTEYNIESN

SEQ ID NO: 278825 - protein, 350 aa, unidentified
MSNLSNVKNFIGVDISKDTLDICVLNYKLAKQSKANLDQTTNANLDQTQSKEQKQFFKIPNNPNSIKAFFMNFNPNQTAVTFESTNNYGVNLAKTLSELKIPFQELNAYKSSLFLKHLSYIKTDITDSYGLAYYCANFSNIFIQSKFNPNFKLIKSYQTTLNMLSKMQTQMKNLEKSQIGVNDEYLKQAINSFKLTIKSLFTKLEDFTYEILSQEIPQTKEIIENNKGFGKSLAIAIFPIMQYNKDKNYKQIISFLGLSPRVFQSGTSVLKSPHIDKKGPSKARKALFLSALSCIRYNEYFKAKFDRLLANGKPKMVAIIAVMCQMIKYLKLRYFSDDLNNVDLKAVQGS

SEQ ID NO: 278826 - protein, 355 aa, unidentified
MTFVGFDLHKRYITACALDAEGELLAEIRQLSTSLEAILAWLEALPGPLTVGLEATLYWEWLTTRLTARQITVKVAHAYHVKLIWQARAKTDPIDARKLAELLRVNLFPAIWIPDAETRERRQLLRGRAFLVRERTRLKNRIHGHLTSENLVAPGADLYGKGGRAWLATAPLSPALRTQTEHLLTLHDALTVEITALDGAVKTAAKGNPMVAQLRSLPGVGIFGALFLQAEIGDIRRFPSSRHLAAYAGLVPTTRSSGGKTAHGGLGAASNRWLKWILIEIVVTLKVAPGPVGAYYRHLLRAKGKPKAQAAAARKLCCYLYWMLKKGWTYEEWLQQHVTIPRSEVRPVQRMGAMA

SEQ ID NO: 278827 - protein, 490 aa, unidentified
MSIIVLMIILNIHGGIGMSNSIFKFASNDLKNLLAICKPEQLLYAPIDVAKYNHSAMIVNLLGEVITPKFDFPYNLHGIDFLKNKLQSACDISHAKKLFLALESTGHYHENLVASLVDSGYDIAVIRPIDSKNERDNVHAKTDAIDLAAIARVVISNKGTRSNMPDTVYYNLQRASRTHRQLTWQDTRVKNIITMLIDKTFNGLWNPDNEIFADKWGKASLLFVSQYPTPQQAIKMGAKRLSEFFKKHNTKLGIDTADKIIALAKNTPTRPLDVMESDIKAVKSNIVILQALLSEIVEQKKQMVKFLIQTPGIYLLSIPGISVVYAGDFTAEVGDIHRFAYAGQVVSLAGTAPRKYQSGELDKANLPTSHKGKNLLRMTVNQIALSLNTHCPEFHKYYSDKLFHYQDAPPKARTATANRFIKLAYAMMKSETLYSPKTGNPLTTEREYYQSVWNKVKEKLTDYLSDDIPQDNYLVKIADQLEEKYGIIQD

SEQ ID NO: 278828 - protein, 295 aa, unidentified
MCMFCRPAKRFRSVTIMPEWEELAGRLAALSPTAIGLEATGGYEQLAVATLADAGLAVVVVNPAQVRAYANALGKRAKTDAIDAAVIAAFIAATKPELRPLRDAEARTLADLVTRRRQIVQMIVAEENRARTIGARQAQKSIKRLLAALRRELESLDADLDDHIRKSPLWRVREKLLSSVPGIGATIARTMIAEMPELGSLDRRQIAALAGLAPWTRQSGTWRGKSFIGGGRSRVRAVLFMAALVAIRHNPTLKAFRDRLVEAGKPKIVAVVAVMRKLLTILNAIIRDQKPWQTA

SEQ ID NO: 278829 - protein, 414 aa, unidentified
MFAVGGDVSNGRSMVAVLGARRSVVVQPHEVPHTADGFAELAARLHALDGEVRIVMEHTGRYYESFAMSMYRAGFFVSAVNPLAIKGYQEGISVRKVKTDKADALKIAQFAIDKWEILPHYTPMDTIRYDLKTLHRQFQLSSKTKTALNNNLIALLEQSYPGANRYFDSPVRPDGSQKWVDFVDTFWHVDCVARVSRKAFVERYQKWCKRHGYNFSEAKAVEIHEDARQRFPLVPKSDTCKLMVREAVAQLNAVSRTVETYRAEMDRLASQLPEYETVMAMTGVGKSMGPQLIAVIGDLRRFAHQKSLVGFAGTDPIKDDSGDKVSDSKPSSKRGSPYLRRTLFVIMTILLQLQPPDDPVYQFLDKKRSEGKPYYVYMTAGMTKFLRIYYGKVRDCLKEKGLWEQPNVDEVNPV

SEQ ID NO: 278830 - protein, 370 aa, unidentified
MSVYVGIDVHRKRSQVAVIDQAGEVLVNRNVPNGTETILKVIGGLPAGTPAAFEAAFGWGWLVELLEDYGFAPHLVHPLRCKAIASARLKNDKVDAAILAQLLRADLLPEAWIAPPAVRQLRALLRHRIQLVRLRTLLRNRIHAVLADHGHDRPAGCWSGPGRAWLGSLPLPPVSREVIDDDLAMIDALQIPIDRLDWEVHQRARSDPRVKVLAQLPGVGPFIALVILAEVGDASRSGSARKLAAWSGLTPTVRGSDRTIRHGHISKQGSAWLRWALAEAAQNAKRSPQFAASYQAIAARRGRKIATTAIARKLLTRAWHLLNDAERTAVPQAATAPAPPTGTRPQTRRGRQAPGELAIIHEPATPRSKN

SEQ ID NO: 278831 - protein, 320 aa, unidentified
MESTEFFVGVDVSKAELEIGIIPESKTWKVSNDGPGIQQLIDSLVSLSPSVIVTEATGGYETLVASSLATAQLPVVVINPRNIRSFAKAIGILAKTDRIDCLVLAQYGKSIKPQQRPLKDEQAQELKAMLGRRKQLVEMLTMEKNRIDKAANRVLKDIQAHIFWLEARLQDVDKDLHNSIKNSPVWREKDKIIQSIPGAGPVLSVTLISELPELGVLNRRQIAALVGVAPFNCDSGKRKGYRRVWGGRAQIRSILYMAVLSAVRYNPVIGSFYKRLKAAGKKPKVSLTACMRKLLTIINSMVRTGSLWNQNHFLKSQENS

SEQ ID NO: 278832 - protein, 428 aa, unidentified
MNTSPVKYAAFIGIDWADQKHDLWLQPADGSTSEHSTLEQTPAAIQNWISQLRQRFGGQPLAIGIELSRGPLIYALMHCEFLVLYPLNPKSLARYRQAFRPSGAKDDRSDAYLLCLFVQTHFRDLTAWKPDDVQTRTLAGLVERRRHWVDQATGLQLRLRAVLKAYYPVMLELFGDHLATAMACHFLQKWPDLQSLQKARPTSLRQFFHIHHSRSEQRIQDRLQTIQQAQPLTQDAGVIVPHRMDALIAAKLLLTLHHQIGELEQQIAQVFAVHPDAFIFEGLPGAGPTLAPRLLAAFGSDREKFPDAKAVQQLSGIAPITVKSGQSECQFFRLSAPKFLHQTFWEFAKCSLVSCPWAQAVVTHLMKEKGLSFNAAVRALAFKWIRILWRLWKNRQTYQEGIYLDSLRRKKSRYLPTPSRVNNFSPAT

SEQ ID NO: 278833 - protein, 325 aa, unidentified
MFYLGIDVSKAKLDCALRNADNGKVKTKVMPNTAEGFQKLLDWLKKNDAPSPHIIMEPTGVYHELAAFFFVDAGLTVSLVNPVQLRKYAGGINVKTKTDKMDSQVLARFGAEQKPAPWEPPSAAARTLKALLARRDAVADDLLREKNRQEKLEATETPQLVTESVEGSIKFIEAELKRLQKCIDDVIDDDPDMRGKKELLNSIPGVGERVSNHMTCLLAGRDFKSGEQLAAYLGLIPVSWESGASVRVPPRMSKAGPAHLRKLLYMPAITAVKRNPHIKALYERLLARGKSKMSAIGAAMRKLAHLCFGVVKTGRAYDENFAIQS

SEQ ID NO: 278834 - protein, 338 aa, unidentified
MELYCGIDLHSTNSYVVVLDRDDRVMFQRRLANDLDVIIPALAPFAADIAGVVVESTYNWYWLVDGLAAAGYRMHLANTWAMKQYDGLKYGDDRTDAAWLARCLRLGVLPEGYIYPKAERPVRDLSRRRGRLVQQRTANLLSVQNMFARQTGRTPAANRVKKLEAAELDGLVGDATVALACAANLAVMGVLDQQIAILEKAVLARVRLRPEFGGLLTVPGIGRILALVIMLETGEVGRFAGVGNFASYCRCVEAKRVSNGKRKGGGNRKCGNAHLAWAFVEAANFSVRYDDRAKRFYQRKAAKSGRAVAIKAVAHKLARACFYVMRDQVPFDSERCFG

SEQ ID NO: 278835 - protein, 351 aa, unidentified
MPAPTEIAVSVIGIDIGKNSFHIVGLDQRGAIVLRQKWSRGQVDVRLTNMPPCLIGMEACVGAHHLSRKLRALGHDARLMPAKYVRPYSKGQKNDFRDAEAIAEAVQRPTMKFVATKTADQLDLQALHRVRERLVSQRTGIINQIRAFLLERGIAVRQGQRFLRVELPRILAMPPDVLSPRMVRVIEDLASDWRRLDERIETLSSEIETLARQDAGCERLMSIPGIGPIISSAMVAAIGTGDGFSKGRDFAAWLGLVPRQISTGDRTILGKISKRGNRYLRVLFVQAAWVVLVKVKPNRWDGHGLKHWIEAAKKRLHHNVLAIAFANKLARIAWSVLARGRAFEASKLQAA

SEQ ID NO: 278836 - protein, 408 aa, unidentified
MNTLYVGIDVSSKSNVIYLMLPNGDKHSNFSVANSHEGSTLLVKKIYSALTSHSLDTVLIGLEATSVYGDNLVYFLREDATLAPFNRKIHVLNPKQVKKFHDAYNDLPKNDYVDSFVIADCLRFGRINKEVYIGDYRYKALQNLTRAHYFAVSNLIKEKQRFMNILFKKYSTMTQEKVFSDTFSTTALAVYDEFESAEALANMDLHELTAFIMEKGKNRFPNPNAVAKAIQKAARSSYRLPKTVNDSVNQVLSISITSIKALEAQIKEFDKAIATQMELLPNVLISIPGIGPVFSAGIMAEIGDINRFHNQAQLAKYAGLAWKQHQSGDFEAQTTRLINSGNRFLKYYLCEAAFSLVRCDKEYSDFYHLKYKEVNRYQHKRALALTARKFVRLVFRLLKDNRLYCPAK

SEQ ID NO: 278837 - protein, 343 aa, unidentified
MGEISMIGLDIAKNVFQVHGIDVSGTVVVRRQLRRGEVEKFFAKLAPTKVGMEACGSAHHWARVIGRYGHEVRLMPPAYVKAYIKRNKNDGRDAEGICEAMGRPTMRFVPIKSVEQQAILAVHSTRALLVRQRTMVANVLRAALSEIGIVAKQGIEGLQELMQQLEMPSEAIPEITRGALLVLAQQWKALDANERALERQIKQAALADQKARRLMEVPGVGPIIASAVVAKVPDVSVFRTARDFAAWIGLTGRDHGTGGRHRPGPISKQGDRMLRTLLIIGASSYLRQQRARGVKDPWLRDLLARRPYKVVMVALAAKTARIIWALLLKGERYRDRASALAAA

SEQ ID NO: 278838 - protein, 419 aa, unidentified
MTDPSIQVWSRSIAIAIHTHYLMIGGMDAHKRIVLPPRKVELHRWRAWAQANLHPTDAVVIEATTNAWEIYDLLVILVGRAVVAHPAKVKLIAAARVKTDTVDVLTLAHLLRADMLPEVWVPPPHVRDRRALLAHRRRLVSFQTTAKNRLQSVLHRLNLRPPDGDLFARKQREWWNSRALSTTERLRVDQDLATLEQIGPQIEEVDSELRRLSTSEPWAEQTPDLVQLPGIGLLTAMTILGAIGDVTRFPASKHLVGYAGLGAGVHASGKRHRDKGITKQGRRDLRFVLIEAAGVAVQTHPYWKRECARLAKRIGEHKAVVAIARKLLMVVWHVLMARSADRRADAEQVAFKLMVWAWKLTDEQRGGLSSRQFIRAHLIRLGLGAELTHITRGGTRRPLATIEEVLALRPELRGPSETT

SEQ ID NO: 278839 - protein, 337 aa, unidentified
MVDVGVDLHRKRSHVVALDPAGEVVLSRRIGNAPVEFLRLFGELEPQPIEVAFEATDGWSWFADLLADAGIAAHMAHPLATKATSAARVNNDAVDAKTLAHLLRTNLLAEAWIAPPAAREARRLVRTRAGLVRMRSRVPSQLHALLAGLGVIPELTTLFGPAGRRWLAELPMPASARGRLDAGLRLIDAVTVEVGRADAELRSAFAGDDRTRRLLPIPGIGLVTAATVVAEAWDIQRFPAPERLCSWAGLTPGERTSDAHTRRGHITKQGSRWRRWMLVEAATTAVRDPQLGRFAGQVAQRRGPKIARVALARRLLTLCSDALRDDGGCRAYPAPAP

SEQ ID NO: 278840 - protein, 346 aa, unidentified
MEHYAGIDVSLELSSVCVVDAQGKIVKEAKVASKPEAVVAFFEALGFAVKRIGLEAGPLSQWLHAGLKEAGFETVLLETRHVKAALSAMTVKTDRKDARGLAQLLRMGWFQQVHAKSMASREVRALLVGRKQLLGRLIDVELSIRGILRGFGLKVGAVTRKGFEARIRELVTGQATLERIAGAMLSARVALKAEYEKLHKTVLAIVRDDAVCRRLMTVPSVGPLVAITYKSAMDDPNRITKSKAAGALFGLTPRKYQSGEKDVTSGITRAGDEMVRTALYEAANVLLSRITRFSKLKRWGIDVAKRRGSKRAKVALVRKIAVILHRIWVDGSTYRWTETQPIAAQA

SEQ ID NO: 278841 - protein, 368 aa, unidentified
MDRKSSKLFVGMDVHKESIDLATGEAQGEVRHYGAIGGDLAALARVVRKLESQGRALVFVYEAGPCGFVIYRWLRSRGHECWVVAPSMTPRQASDRIKTDRRDCLKLCRLARAGELSPVYVPDAADEAMRDLVRTREDAVVMQRQARQRLAALLLRNDIRYNGKTAWSAAHRRWIAEIKLPHAAQHIAFEEYVQAVEEAGLRVARLTQAIEAERTHWRWTPVAQALEAFRGIQAIHGTRIIAELGDLRRFPRPRSLMGYLGLVPSENSSGARRHQGSITKAGNSSARRALVEAAWAYRYHARVSVGIARRQSDLPQSVTDLAWAAQLRLCARFRRLCARGLHRNKIVIAVARELAGFVWAIGQQVTPR

SEQ ID NO: 278842 - protein, 457 aa, unidentified
MEQALAQRSRSVSLKPGKSRAALTITHPNAAGVDIGNTAHFVAVPPDRDDEPVREFPSFTVDLNAIADWLKACGVDTVAMESTGVYWIPLYELLESRGFTVLLVNARHVKNVSGRKSDVLDCQWIQQLMTYGLLSGAFRPADQVCVLRSLWRQRAMLLRSQARHVQHMQKALTQMNVQLANVISDVAGETGQKILRAIVAGERDGQVLGSMKNARIRASVDEIAKSLQGNWRAEHLFALKQALGAFDFVGKQLAECDIEIEQQLKTLQVHEGEPAKGKQRGRARNAPKFDLRTQLFKMCGVDLTRIDGIDVTTALAVISETGVDMSRFKTVGHFTSWLGLCPGTKITGGKVMNGKTKRCANHAAQALRLAAAALRASQSALGAYFRRMCARMDKPKAIAAAAHKLARLIYTMLTKGEEYTDQGQDYYEERYRERVLRQLSQRAHKMGMKLVVAEQVT

SEQ ID NO: 278843 - protein, 347 aa, unidentified
MSHKTAATVAPTIGIDTGKNILHLIGLDDNGTIVLREKIARGRIAARLANVPRCLIGIEAGMATHYVARELIALGHDVRQVPPAYAKPFRQGHKNDFRDAYAIAEAVQRPSTRCVPVKTDDQLDLQALHRVRSRLVGQRTAVINQIRGFLLEHGIAVRQGLRFLRQQLPDILAKRSDVLSPRMIRIIGDLSADWRRLDERIEHVTEEIEVLAQGSEGCRQLMTVPGIGPIIASAMVAAIGNGAAFAKGRDFAAWLGLVPKQMSTGDRTILGRISKRGNRYLRTLLMQGARVILLRPANWARHSFGPWLTAAAQRLHHNVLATALANKLARIAWTVLMQARSYEARVN

SEQ ID NO: 278844 - protein, 355 aa, unidentified
MKRRYFIGIDVHCQFCEIAALNNAGEVVGRHRCSTSITALAEVLKSIPRPCSIVIEEGPMAGWLWRNLHSQVDGMSVSEPRRNRLIAKDGDKDDDLDAEKLALLFRGGFIKEVHQVASLEQAVFKQQVALYHHRVRQRVREAHRLTHLFRQHGIIIRERAYVSKEDRPALLERLPAGALLRELVKSSWVSYDALVEQEDRSRKRLAQVAQKIETIQRFAELPGISWVRAATLYAYLDTPWRFRSKEALWKYLGIGLERRHSGTGPEHLGVPRRKHSLLKSTILGAALSAVAHKENPFADLYRRWLAQGLASKLARRNVARRLAATLWGLWKNSSAYQPEWVGGAAAAKAAAKVSR

SEQ ID NO: 278845 - protein, 319 aa, unidentified
MAQNNLVVVGIDVAKDKVDACIRPLSQRRTFPNSSAGRRGLIAWLGRYKAGKAVMEASGGYERSWAKALRQVGIEVRIVDPRRVRSFARSAGRLAKNDTIDAQMIAWFAETFGEVSGQAYDVVREQLSQLVNARQGLLDLQTNLQNRNEHAEVDAIQKMHARLLKRIALEVASLEAVIASLIKATPHFAELAEIIESVPGLGEITSAGLIAAMPELGQVSNKVAAALLGTAPYDDDSGRRRGERHIKGGRRKVRNLFYMACLGASTRHNPVLKTFYRRLIAKGKKPKVALVACMRKLIVILNTMITRRHKWDTSLCVAS

SEQ ID NO: 278846 - protein, 394 aa, unidentified
MKLIGIDIGKNKHFFCIMDQQTGEIISQPISFSNDKEGFDFLIQKIKSYSKDSILIGMEDTGHYHFALLKYLLNLQYTVALINPKTTDFNRKMQGGITKNDKLDTINICDVLDTPERKKQYRITKVNSFDLYEQKQLTRHHHNLKEEENVYKNRLQKCIDIVFPEFNNLFNSKYGTVYMNILKMFGSAENIANTDIRTIRKCFEIEGRGNRISLTPERLKECAGSSIGISSSAEVIQIKHLTAQIELIEEQLTEIDKKIEEFSIQNNSPILSIPGISHFSGTSILAELGDISNYSKPSQIIKFAGVAPLHYESSQFNAQHTAITKKGSKYLRKTLYQIILPVIRHNPVFTKYYQLKISQGKGHRCAQGHCVRKLIRIIYHLLKTNQQFDPQLLR

SEQ ID NO: 278847 - protein, 316 aa, unidentified
MVSSNDGIWIGIDVSKAHVDVAVFGGRQWRETTESTGLLRLTTELVEVGATLAVLEASGGYEVVVAAALAAAGVPVAIVNPRQVRHFGRATGILAKTDRLDARVLARFAAVVQPEPRPLPDAAQVELTELVQRRRQVIDMIAAEKLRRRGASGHVGQQIQAHIRWLETQLDELDHELTDLVRSSPLWRDKDDLLRGVPGVGPTLSATLLAELPELGHLNRRQIAALVGVAPLAHDSGTFRGRRSCWAGRASVRRVLYMAALVATRCNPTIKDTYQRLLHAGKPKKVALVACMRKLLVALNAMLAHNTPWHAEVQTP

SEQ ID NO: 278848 - protein, 481 aa, unidentified
MVVPNKDSKKPRGSKPATSKKRAKTTDSRARSFPVPVEASSAPLELVNPNAAGIDVHSDMHMVCVPAGRDENPVRQFGANTVDLEAIAAWLEKCGVTTVAMEATGIYWIPLFELLESKGFQVDLIEPGQLSRCGARPKTDVLDAQWIQRLHSYGLLRASFRPPDSVLALRAFVRMRQMQVRYAAGHVQHMQKALEQMNIKLAEVVRDITGLTGLSIIDAILAGERDPDKLAKLRHERCKRTEAEIALALQGSWRREHLFELRQARELFRFHHQQITECDQQIEAELANLSNRAGEKTRDATPRKCGRKRNNLRFGAKDLLFRALGVDLTLIEGIEEATAMVVLAEVGADVSRFPTEKHFSSWLRLCPPQNESNNTKKRRFRRKAASRVTTALRLAARAVGRTDTPLGLFYRRIRSRIGGLGAVKATAHKLACLIYRMLRYGEEYVTQSMEEYEAKAKANTLKALERKAEAMGYQLTPLPSR

SEQ ID NO: 278849 - protein, 347 aa, unidentified
MRFYTQQHLYYCGVDLHARSLYLCVLDQAGEVLLHRNVRATPEAFLKAVAPYRDDLVVAVECMFTWYWLADLCRAEGIAFVLGHALYMKAIHGGKAKNDRIDAHKIAVLLRGGMLPQAYVYPPEMRATRDLLRRRLHFTRKRAELLTHIENTNSQYNRPAFTKKLTYRGNRTAVVDRFDEASVQKTIAVDLALIAFYDDLLRELEAFILRTANGHDANTLYRLRTVPGIGKILSLVILYEIHDINRFARPQELASYARLVKCARESAGKVRGNGGRKIGNGHLKWAFSEAAVGFLRKNPAGQAYYERLVQKHGKGKALTVLAHKLARAVYHIWKHDQVFDQEKFLST

SEQ ID NO: 278850 - protein, 461 aa, unidentified
MKRKKKTQRSRRIRAHLKQVNLFAAGIDIGSRSHFVAIPEELDEKPVREFAGFTGDLHQMADWLVKIGIQTVAMESTGVYWIPVYEILEARGLEVLLVDARHVKNVPGRKTDVLDCQWVQQLHTYGLLRGAFRPQDEMVALRSYLRQREGLIASASDSIRHMQKALRQMNLLLDNVMSDITGVTGLAIIRAILAGERDARQLAKFRDKRCRSDEQMIASSLEGHYRQEHLFALEQALERYDFYRQQVKACEGVIEQYLRKIEDHNDDDQGVPPASKPKGHSKNGFSFDVRSELYRLTGVDLTEINGMSENNVLTVVSETGIDMTPWPSDKHFASWLSLSPGSKITGGKRLSGKTRPSANRAAAAFRLAAFSLANSKTALGAFYRRMRNRLGAPKAITATAHKLARIFYRLLKSRTPFIDFGQDYYDQQYRERATRNLKKKAAALGYLLIPEATNGLQKSTC

SEQ ID NO: 278851 - protein, 348 aa, unidentified
MENPTTIAVDLAKAFFQVSVSTAPGRVSERKRLSRAKFVSFLMQQSPAEIVMEACGSAHYWARTARELGHQPVLLPAHYTAKYVLRNKHDRADADAILEARRREAIRPIPIKTVEQQAIAFIHRMRSGWIQTRTARINAMRAIFRELGKVIPAGPRNVLPHLPDLMADIPGALHPCLLAIADEIRLLEAHIKDAEHQIKTLLADSDGARSLQSVPGIGLITCSAMIASVGSPSRFRSCRAYASYFGITPKEHSSGAKRRLGAINKEGDRYLRTLLIHGARAVLLAARRSKNPDRLHTWALHVHDRRGHNRATVALANKIARIAWAVWSKDTLYQSLPATAPARATAAN

SEQ ID NO: 278852 - protein, 352 aa, unidentified
MTVTIVETRAQAGAITGGVDTHADVHVAAALDPVGGLLGVQEFPATPAGYAQLLGWLGGFGTVCLVGIEGTGSYGAGLARHIAAAGVRVVEVDRADRQDRRRQGKSDPLDAVSAARAALSGRAAGAPKGRDGAVEAIRALMVAKRTARAERVQTINQARALVLTGPDDIRARFAGHATEALVAELAALRPRPGSMVRYHTLLSLRELGRRAQFLDQQLGRLDELIAPLVTARAPGLLARYGIGPHTAAMLLIAAGDHPGRLRSEAAWAHLCAAAPIPASSGKVKRHRLNPYGDRQANHALWQIVITRMSSHPPTRAYVARRSKEGLSKKEIIRCLKRYVAREVYPHLRPGAG

SEQ ID NO: 278853 - protein, 326 aa, unidentified
MEHELHYIGIDTAKEKLDVDVLRPDGRHRTKKFANTTKGHDELVSWLKGHKIDHAHICIEATGTYMEPVAECLYDAGYIVSVINPALGKAFAQSEGLRNKTDTVDARMLAEFCRQKRPAAEEAPHPLERALRATVVRHQALTDMHTQELNRTETAREVQRPSIDAHLLWLEAELKRLEKQIKDLTDDDPDMKHRRKLLESIPGIGEKTSAVLLAYIGLKDRFAHARQFAAFAGLTPRRYESGSSVRGASRMSKAGHVSLRRALYMPAMVATSKTEWGRAFRDRLAANGKKGKVILGAMMRKLAQVAYGVLKSGVPFDASRHNPVAA

SEQ ID NO: 278854 - protein, 363 aa, unidentified
MASIALERSDVIVGVDTHKDQHVAVAIDGLGGRVGEPLEIVATNDGYAELLSWALSLGRVHLFAVEGCGSYGIGLARFLRRHGHQPVEVARPPRAGARRMSGKSDAIDAEHAARMGLAGTGVVTPKLADGQVEAIRLVKIARDTAVKSRATAMVTLKAVLVTAPQELRDQLEPLSDFKLLTSCAELDTTGDLSDPAIAIHHTLAALANRWLALHDEIKTHAKHLETLTRTAAPQLVDAYGVGLDIAAQMLITAGDNTSRVRNEAAFAKLCGVCPIPTGSGKTNGRHRLNRGGNRQANAALYRAVIVRMRWHEPTIAYVTRRTTDGLSKKDIIRCLKRYLARELYQLLPTTSTATEPAPLRSAA

SEQ ID NO: 278855 - protein, 338 aa, unidentified
MGRYIGVDLHRNCFTVCVRWENGRSHLWTWKLNELNKFVSTLKSTDEVAVEATGNTRLFYDAVSSRVRRVVVVNPHQFKVIRESVNKTDDNDARNLALFLSKGLLPEVRMKGKRQAGVASLVQTRDKLVKLRTSLKNKINNLVSARGVNLKKEALSSEKGLQEVLKFRFDVLVDLELRVLVDQIRGLNRSIEELEEAIKGAGQELPGHRNIKSIKGIGSLGASILLSAIGDVSDFADEGKLASYLGIVPRIANSNESFRSGRITKRGNKLARTTLVQCALIAKRYSPYLSNYYERIKARRSSGKAIIALARKFLGVIYHTLKNNWVWDDFPNGVLAQG

SEQ ID NO: 278856 - protein, 403 aa, unidentified
MTACVRVPAADGKGREQHVAEFKTTVRGLLALGDWLAAHGVQQVVMEATGVFWKPIWHVLEDDFPLMLVNARHVKQVPGRKTDVSDAAWLCQLLEAGLLKASFVPPKPIRNLRNLTRYRKTQIQERQREANRLHKALEDTGIKLDCVASDILGKSGRLMLDALVHGTTDPEVLADLAKGRLRAKLPALKEALEGRFDDLHALWIGAILQHIDFLDEQIDRLSNAIEEQIAPFAVAVELLCTIPGVQRRAAEVIISEIGVDMSVFPTDKHLASWAGQCPGNDQSAGKRRSGKSRKGSKWLDWTLEESALAAVRTKDVYLAAQYARLKPRRGHKKALGAVKHSIICACWHMLTTGELYRDLGGDYFQRRDPERQTKRLVKQLEALGHLVTLQPTSTSTAQAVVAA

SEQ ID NO: 278857 - protein, 410 aa, unidentified
MQTLVERGCGMDVHQATVVACLLVVLKNGKVQKQIRTFGTTTRELLSLREWLLSEGCTHVAMESTGVYWKPIYAILEGAFEIVVANAQHVKKVPGRKTDVKDAEWIADLLCHGLLRSSFVPPQPIRELRELTRYRRKLVESRSAERNRLLKLLETANIKLASVATDVFGVSGRLMLQALVQATATSQQMADLAKGLLRKKIPELELALEGKVEEHQRFLLSVQLRRLQAVEEDLGLLEQRLQEKLKPYAMQLALLQEIPGVDWTLGAVIISELGVDMSVFGNVSQLASWAGICPGNNESAGKRRSSRIPKGNVYLKTALVEAANAAAKAKGTYLRDKFYRLKARRGYKRAAVAVAHKILVAIYHMFSHQVCYNELGDLYLDTLNKHHLTRNLVHRLERLGYAVTLEQKAA

SEQ ID NO: 278858 - protein, 340 aa, unidentified
MRTRKVARSFDSGKPVTLYDHYVALDWSLKSMAIGHMSHRDDHPRTFERLTDLKELKEYLGSLKGRVIITLEESGPAHWLYLELMDCAEKVLICDPFHNRLLSDGPKTDKIDAGKLCQLLRAGLLKEVYHSDNALYELRTLVSAYQDVVTAGVRAQNQQKALALGHRNEVKSASFIGGILQANIDLYRHNKQQYERRLADVARRNKQVRFQREIDGIGTIGAVRIVASVVDARRFPNGGKYLCYCGLVKHEKLSGGHSYGRRKPRYSRVLKAVYKTAALAAIRGENPIREYYDHLLAQGVAEHNARHAVARYIARISYGMLKNGTRYEPYRWKGEVQKVI

SEQ ID NO: 278859 - protein, 341 aa, unidentified
MQITTIGLDIAKNVFQVHGIDAAEKVVVRKQLRRGQVLGFFKALPPCLIGLEACATAHYWARELTKLGHQVRLMPAKDVKAYVKRNKNDAADAEAICEAVRRPTMRFVQIKSAEQQGRLMLHRTRDLLMRQRTQVINALRAHLAELGTTSAQGREGLKELLKIVASDADERLPADAHASLVVLAAELQAMQTLIGSIEKRIVTQHRENKASKRLLTIPGIGIIGATAIADTVTDPKAFRSGRDFAAWIGLVPRQDSTGGKQKLGPISKQGDRYLRRILVVGAHSVLRRARLNPQKHPWLTQLLARRPFKVVAVALANKMARMAWALLAKGGALAPALAATA

SEQ ID NO: 278860 - protein, 386 aa, unidentified
MQTPNDLSQSRIVLNQDTTLIAVIEMSLSSWLVAGIVPGIKRQPLKKLAVDESALLKLLNRWREEAEKAGRKIERVAVAFEAGRDGFWLARWLKARGIEAHVIHASSVAVSREHRRAKTDRLDTELLKRAFLGWLRGERDHCKMVAIPTIGDEDAKRPNRERESLVGEQTRIVNRMKAALSRLGIRGFNPKLKKAAERLEDLRTPEDEPIPPNTLAELRRDMERRRLVSDQIRQIEDARLERIEHAPSDGPHAMVRLLARVIGVGIETADMLVQEVLSRNMRDRRAVARYAGLTGSPDESGTRRREKGLARSGNARVRRGMIQLAWRFLMFQKDSALAQWFRARTENARGTRKTMIVALARKLLIALWRLVREGVVPDGIVLRPAQ

SEQ ID NO: 278861 - protein, 342 aa, unidentified
MKITTVGIDLAKQVFQVHGVDERGKAVLKKQLKRDQVLPFFANFQCCLIGMEACGGAHFWASKLQAMGHTVKLMAPQFVKPYVKSNKNDVADAEAICEAVSRPNMRFVPIKTGEQQAVLALHRARQGFVKARTAQANQIRGLLAEYGIIIPQGIGYIGKRLPEILEDGENDLPGIFRHLIARLGDHLKELDRQVQDLEIQIQAWHRESVSSRKLAQIPGIGPITASALVASIGNARNFENGRQLAAWLGLVPRQNSSGGKQTLLGISKRGDTYLRTLLIHGARAVVRIAERKAAYAGSWLAEVMGRRHKNVAAVAQANKNARIVWALLAHERDYEPCYGSAA

SEQ ID NO: 278862 - protein, 419 aa, unidentified
MRSFKAKKIKKFNEKSLIVAFDVGKKVHYGYFRAPDGTEVDSFRVYNTRKSFNDFWYKARQFAKVHGLEQIVVGFESSGPYAEPLCHFLKDKPVQLVQINPMHTKRVKELTGNSPNKTDRKDPRVIADIIALGHTLTVVIPRQAVAELRRLSHARQRAVKKRTAAVNQLGDLLFILFPEFNTIIKDVACQSAFYLFRHYPRPEDIAVADAQLLTQALHKVSRGRIGAERIQRLIDAADASVGIKQGTGAIVFELQQLVREIQFQDEFIGHLEQQMQQQLQKIPYSGVILSIKGIGVVTVAGLIGEVGDFRQFNTIAELIKLAGLDLYEISSGQHRGRRRISKRGRPLLRKLLFFAALNTVKADGIMHGQYQQMLQRGMVKIKALTAISRKLLGVIFALVRDNAVYVENYCQIHEFKRAA

SEQ ID NO: 278863 - protein, 328 aa, unidentified
MHVAAALDSVGGLLGVQEFPATAAGYASLLSWLRSFGTLAVAGVEGTGSYGAGLARHLAAAGVRVVEVDRPDRQDRARQGKSDPLDAVSAARAALSGRASGVPRGRDGAVEAIRALMVAKRSARQERTQAINQARALIMTGPEELRARFVRRSPAQLIEAIAALRPRPGDVPGYATRVALRELGRRGQFLDAQLDRLDELIGPLVTERAPGLLALHGVGPDTAALLLVAAGDHPERLRSESSWAHLCGVAPIPASSGKTAGRYRLNRGGDRQANSALWRIVIVRMSSHPATRAYADRRSEEGLSKKEIICCLKRYVAREVYRQLRDGA

SEQ ID NO: 278864 - protein, 362 aa, unidentified
MPEGMRWVGLDVHARETASAVFDGATGEVESRRFSGRPHELLEWLVGLERPFRAVYEAGPTGYGLARRARELGLDVRVCAPGHIARKPGDRVKTDKRDALRLARLLAAGDLTLVAVPPVEHERLRDLVRCREDVRGDLMRVRHRIGKFLLRRELYYPGPGGAWTRRHRDWLSGLRFEDRASELCFGDYLYAHDVLLARRDGLDRALAETAADGPFTATVARLRCLRGVDTLTALGLCAEVSDFGRFGGPESLAAYLGLVPSESSSGERRRQGSITKAGSAHARRLLVEAAHHYSHPPRISGKLRSRQEGQPAWVIETAWRCQRRLFGRWQRLRVERGKRGGIVIVAIARELAGFCWELAVSE

SEQ ID NO: 278865 - protein, 339 aa, unidentified
MFYSGIDQHKLFSYITTVDCDGKIIKEAKLNNNSFEILNYFSSLGKEHIATVETTGGWYWINDLLSSQGIDLKLAHAKYVKAIAYAKVKTDKVDSHILAQLLRLNFIPEAYKIPVDIRTLRDTLRARLRLSSKRTSCINFMHRMLEKFNHSDPSLLNEFYKLQYQQFDIQAKLLKEQMLTLEKSLYPSLIPNDDIQRLLWIPGIGKMNAFTILLEVGDINRFASEKNFFSYCRLTPSARNSGGRVKQKSSSKDGNRYLKIVFSDAAVHALQYYPVIKRYHISKLRKKKKQVAKAIISKEIARIVYYVLKNKSDFNNKFKGIDLEQKKSVQWPRITSPDV

SEQ ID NO: 278866 - protein, 367 aa, unidentified
MKKHTTMNKPVSATDVSVCTTVAVDLAKKVFQVAGEDALGQLAYEQRIKSREAFQVFLQKLPEGVTVLMETGPGAQAWARLLQAQGNLVRILPAQRVAEHRSGAKNDRNDAHAILRAGRDSSIASVPVKSVAALAMQAWHRVRRGYVRRRTAMGNQIRGLLLEQGIALAQGDVGLKQGVTRVLEDARQPLPALLRELIDEMLNEWQRLGERIAALTGRLEACAAADPTAKRLMTVRGIGPITATALLAKQVEPERFANARQFAAYFGIVPDQHSSGQKVRLGKMTKRGDAYVRSLMVVGSHAVLKQLRPDSEHPDDRRLQRWLQRLGRKGAAVRLANRNLRIAWVLLCSEQTYQRKPNACREMEMSH

SEQ ID NO: 278867 - protein, 348 aa, unidentified
MVADQLDYVVGVDPHRDEHAVGVVEVRSGVVVFETSVAADSGGYAEALRLAETHAPGRRAFAVEGTGSYGAGLTRFLTGRGERVLEVGRLPRERRGGGKTDALDAVRAARAVLAQDRPALPRNNGEREALRALMAAREGAANAKRAGLCQLRALLVTTAEPLRSELRPLTRARLLARLAAMRPERRTDPELRGSLLALRSVARRVQQLTVEERELAREIETLTRMLAPKLLDQPAVGPLLAAQVVLSWSHKGRVTSEAAFARLAGVAPIPASSGQTIRHRLDRSGDRQLNRALHMIIVTRRRAHPATIAYIERRIQEGKTRREATRCLKRYLARGLFRLLENGTPLDA

SEQ ID NO: 278868 - protein, 334 aa, unidentified
MVPIKQVIGIDISMDTFICRVGIITADQRTKVGSHQVFNNNNTGVRRFYKFALSQQIQDIPQYFLMEATGVYYETLAYFLKSQGAHVIVVLPNKAKHFAKTLTIKSKTDPIDAHMLTQMGLEKRLSEWEPPSELMKELKLLTREHLSLKELRTDAKNRIHAKTHSFKPGKDTIKRLKQQITLYERHIKQVEICINTLLKRDQQTWDKIENILTVNGIGLMTIAKVLAETNAFALIRNGKQLTSYAGLDVVLRESGKHRGKTIISKKGNRHLRMSVYMPAISAIKSNPQMKTYYDRMLERGKPKKAGVVAVARKLLLLIYYLWLNETPYDPAYSA

SEQ ID NO: 278869 - protein, 366 aa, unidentified
MGWMAPLRHLSAKLLADRISSEWEPSMGEVTPIGLDLAKLVFQVHGVDAEGATVLRKQLRRAQVLGFFSRLPPCLVGLEACATAHYWARELHALGHEVRLMPAQYVKAYIKRNKHDAADAEAICEAVVRPTMRFVPVKTADQQAAVLLHRGRERLVRQRTGLVNALRGHLAEFGVIAPQGLRNIGKLIAIVRDEGDARLPALARQVLQVLAAQIEQLEAAVAAIEKQLMAWHKSNPVSQRLTSVPGIGPIIATAIAATVVEPSSFRSGREFAAWLGLVPRQNSTGGKHRLGGISKRGNQYLRRLLINGASANLLRSKATNADPWVIGLRQRRPSLVVAVALANKTARIAWALMHRHENYQRVAAAA

SEQ ID NO: 278870 - protein, 402 aa, unidentified
MQFFVGIDWASQAHAVCVIDETARIHWQGSAPHTAEGLAELLGRLRRFRRGGRVRVALERPSGLLVDTLVDAGLELVPIHPNALKASRPRYSAAGGKSDPGDAFILADLLRTDGHRFPPLRPPSDDTRALRALVRGRDDLVAQRTALSNQLRALLDRFWPGAAAIFADVDSPIALAFLTRYPTPHSATRLGEKRLAQFLGQHAYCGRRPVAELLARLRTAPASQVGEAEAEASGEVVRALVAVLAPLVGHIQQLSAAIEAALPQHPDGPLLQSLPRSGAVNAAQILAELGDDRARFPTDEQLAAEGGLAPVTHASGKHHAVVFRWACNKRLRRALTTFADNSRHASRWAAVVYQRARARGCRHPHAIRILARAWARILRRCWQDRTPYDINRHRAAQAIAAA

SEQ ID NO: 278871 - protein, 357 aa, unidentified
MDRHKYVGMDVDQATCVIAIEDKAGNFVMETYLPTKASVLGPFFKGLDGRTHVAFEEGTQAAWLYELIEPLVEEVVVCDRRGDKIRGNKGDRVDARKLARELRQGDLRPVYQGERGHRELKELVRGYDYLVQDVVRTKSRLKAAFRSRGISCGGQAVYRKTDHKDWLRKIDVDALRARVSSLYEQLDCLTRLRKEAKDAMITGAKKHASYKLLVKQPGLGPVRSAQILGIVGTPHRFRTKRQFWPYCGLAVVVHDSAEYEIVDGQRRRRKRPVRTRGLNKNFNRTLKVVFKGAAKTVISRDPFKQYYQRLLDKNIRPEMAKLTVARKISAITLAILKSGEEFDPIRVNQAVSDSGDQ

SEQ ID NO: 278872 - protein, 405 aa, unidentified
MPYILALDVSMGHSYSVLYKDDTCLFEDEIEHTQRGFHALLEEIQHLPERPLIVFEATGIYSRPVEKFFQDHHFSYCLLNPLEAKKQMEENTLRSWKTDKSDAHRLAQTHLKNQRQPKEVQSNFYLEMRDLARFYQEIEKKITRLRMDLHNCLQLTFPELEQFFSNRLPPYALTLIRLFPHPDFVLASTRTKIKNKLINETRKKISANRAEQKADQIIHYAQCAYPAVEKDSIHCQKTIYYAELLQDLLEQKEALATQMIKKAEGSPCFLLYQTFPGIGALTAALLLGELGDITRFKTHKQLNAFVGIDIRRYHSGKYTGQDRINKRGNPKARKIIFFTIRNMIRQQRAAPNHIVDYYYKLKKQPIPKKDKVATVACMNKLLKCMHAMVRAHTEYDYAYAVSVDH

SEQ ID NO: 278873 - protein, 401 aa, unidentified
MSKKNTRNALDPSLSYAVIGLDLAKADCAVAAVPCSDDELGLIDRMDYESLFEQAEKLEPTLFAMEPCCGYSQISLRLQNMGHEVKVISGHAVKNWIATHKSNQKTDLNDATALAKLALYDHDLQPIRVKNVEECRIASVQAIRIQLRTQATKSLGCFKSLCQCWGIVIRRGSLNTKKMAEAVAAVEKLLGAEVTSSLMILRDAYKFTMKKINALDKLLDALVEANEQARTMKTVLGIGTQTAARLAVTTGDIKRFPMPRSYVAYFGLAPRNIITGHSGTPSPSKRGALKPVSSRGQGKVSRRGDRVARSFIIQGAATIYMLYCKDMLPECQLRRWLHEQIKRGKPYGKIIVSLAAKLLRIVWALLTYGEKFDSHKAGVPRSVLAAMEKPLKHDAAAESAA

SEQ ID NO: 278874 - protein, 427 aa, unidentified
MYRIAGIDVHKKKLAIVVADVEGHGEYQFERCWFGANPEQLRLLSQWLAEHQVEEVVMESTALYWKPVWGALERYWQPICQKREGAVPTSGILHLAQAQSNRGPRGRKKDFRDAERLVKRLVADELKLSFVPDREQRLWRTLTRRRYQLTRARVQLQNQLEALLEEAHLKLSSLVSDLLGISARRMLQAIAHGETNPEALAGLGDRRLRATPAQLCDALGACTELHPVYRRLIKMMLEELKVIEEHTAELNQELATLLRPHQDAVKRLAEVPGLGVDSAQQILAEVGAEAATFASDKNLCSWVGVCPGDEESAGESSSHRSPQGNRQMRRLLNQAANAAVKTKGSIFEIAYRRLVPRLGHNQTIGAVAHRLCRLIWLILRKGVRYEERGPAVSQRSRQNRTSKMIRELRILGYRVEFLNAVPSIPIP

SEQ ID NO: 278875 - protein, 415 aa, unidentified
MLVQSSERSYCPTEFDLFLGMDVDKKSIDFTCADARRIIRAVHIPNDVEHLVRYVRKHFPEKKVLFAYEAGPTGYGLYDGLTAAGFGCMVSPPSMIPTAPGQRVKTNRLDSKKITEALRAGQLKSIHVPSPTYRHLRHLTKVRDLVVRQIAGNKCRIKALLLFEGIPFPEAPQKSHQWSRSVIAQLQKLPCSGAVRFRLDRLLEALEFQRQQFLRITREIRNFCRQDPELSRCLSYLTSIPGIGQIVAPHLLARIGSWQNLQEHRVDELAGLLGLVPTEHSTGDRVHRGSITHGGDGRLRSKLIQSAWAAIRQDPELREFYRSVYRRHPQHLAARKAIVAVARKLTTRIFAVLKEQRPFTFRSPVHSRPLLPGEIGPRERLDASQKEEDRNLPSFVPKTETLPGPPPKWGASKQV

SEQ ID NO: 278876 - protein, 312 aa, unidentified
MMTNDSIGIDISKDFFDAHRLSDGGTACFPNAPAGFRALSKWLGEDIPARVIFEATGPYHRHFERSLSRQLPLVKVNPLQARRFAQACGTRVKTDAVDARMLARFGSALILEPDTPIDEKQYELRELFSARGSLVKDRIRLKNRLQTQTLTLVKRQTKARIEQLTCQLKAIQQEINTRLQECPQRARANTILRSIPGIGEVAALSILIEMPEVGTLRQKKAASLTGLAPMTQQSGKWRGKARIQGGRKPLRDALYMPALVAAKHNPDMRAKYQDMITKGKPPKVALTAIMRKLIELANTLIKEDREWTQNTA

SEQ ID NO: 278877 - protein, 400 aa, unidentified
MISVGVDVSKGKSTVCILKPYGEIVCSPFEVQHEEGEMEAFADLLSKLDGEIRVVMEATGIYHLPVLTFLQDKGYFVSVINPFAMRKYAKDNSIRGAKTDKLDSMMIANYGIEKWYKLQKYEGDEETYAELKLLGRRYRYYMELHVKALQELTHILDYVMPGIKKMFNSWNEANGKDKLSDFVEKFWHFDLITSMNLEEFTEEYLSWAKEKKYHRSRSKAEAVYELACNGIPTLSSNTPSTKMLVEEAVSVLRAVDSSLALILARMQSLAKSLPEYSTVREMGGVGDVLAPKLIAEIGDVRRLHNAKALIAWAGIDPPPYESGQFVGSKRKITKRGSSTLRKVGYEVMRVLKSHPAPKDDAVYNYILKKESEGKSKKHAKIAGLNKFLRIYYARVIEVYQ

SEQ ID NO: 278878 - protein, 392 aa, unidentified
MPWDIGSKQHRVGIGLADGKLLEEFEISHDRKGFELFFSRILIYEKRLGLPVVVAMEGVGGWARPMDRMILRHGYQLLNVNNVKLARFKEIFAAPAKSDKIDTRKMLELMRMREVLPLAKAVVHRVEAIPAENEQLKRFTRRRRQLVEEKVRVVNRLQADLHAVSPGLLEITVAVDNLWFLNFLTSRTDLTKLAGLKGPSLLKIAGVGKAYAAKIEAWQKHATFAEETAWVGEMVIADTQRVLDLVRQIQAVEERIETISASSEIATRIRTIPGFGLISSATLAGEIGILDRFAFETSLALYTGMTRLNNSSGAYVGTKNTRQVNTQARAAMMTATARHIDNVPESRAYYDKKRAEGKTHNQAVRSLGRHLIRVIWSKITHQRNYVSKNPIT

SEQ ID NO: 278879 - protein, 343 aa, unidentified
MKIHALGIDLGKTVFHLVGLDASGQVVVRKRCSRTQLLAFTANLQVQLIGMEACSGAHFLGRALRAQGHEVRLMPAQYVKPYVKTNKSDYIDAEAIAEAVQRPRMRFVPIKTEEQLDLQALHRVRERWVMRRTAVVNQIRSLLLERGLTLPKGRRYLEEQLPRILEDAELNLSGSFRVLLSQLKLELEQLAGRIEQMDRVIQKMAKENEDCQRLTEIPGVGPVTATALIGAIGNGSAFGKGRALSAWMGIVPREHSSGGKQKLLGISKRGNKYLRRLFVQGARSVLQQRQKQTPGLRDWLAQLLARTHQNVVVVALANKLVRMAWAVLCKNERYRAPVLAVAT

SEQ ID NO: 278880 - protein, 349 aa, unidentified
MSGYAGQQFVGIDLHRRRSVVVRTTESGEVLESIQILNDVDRLGSVIARAGEAPEVVLEATYGWYWAVDALEEAGANVHLAHPLGVKAFEYRRVKNDIRDATDLADLLRMGRLPEAWIAPPATRELRELVRHRAKLVGLRSHCKVEIHAVLAKCGIQVPMSDLFGINGQDLLDRVAMPRPYTARVQSLRRLIDDLDEEIDLFARLVRGKLVAHPGYTAVQQLPGVGPVLASVFVAEVGEVGRFTTAAQLACWAGLTPKHHESDAHVHRGRITKQGSRLIRWAAVESVKALSPRTPVGAYKARVAASRGKNIGTVAAARKQVEFVFYALRDHHVRALHRPARPPAAAVPA

SEQ ID NO: 278881 - protein, 392 aa, unidentified
MIYVGIDAAKRKHDCCILDPQGKPYPVFSFSNSHDGFQAFFQKLFSICSDKGQIKIGLEATGPYSENLFNALVDRSLPVLRINPLLVKNFKSSMSLRRTKTDKVDAQAIAQMVKEKGDSLQTYSTSLYHMEELKSLTRYRLKLVGEQSKLRVSVSRLVTILFPELESLVSRLHLASIQALLIEWPGHQQLADCNLKRLTNLLKKHSRGQFGKPKAIAIQQAARQSIGRVSPSKSLELRQTLKKVAYVQQDLDEVEAQIKEMVDSLHSPILDIPGIGYTTGAMILAEVGDFNRFANADKLLAFSGMSPSKYESGEFKGTTGKMEKRGSSYLRYALYTAAKLVSQFAPQFKSYYQKKRAEQKPYNVALSHVAKKLTRVLYKLGTTGEAYQPQAA

SEQ ID NO: 278882 - protein, 388 aa, unidentified
MAQFQGSAQARVDYNATIIGALELSKKKWVLAVQLPGVDRHSRHVLDACGDRLVSFVERLKAKCASAGRRIARVVLTHEAGRDGFWLARFLARQGIEVHVMQPSSLPVDRRARRAKTDKIDVEMLLRTLMAWLRGEPRVCSMVPIPSEADEEARRANREREDLTRERRSIVNKIDGILATLGVKGYKALRRDRRGQLNGARQPNGDPIPQKAKARIERLLDRLELVLKLIDQVESARDAVLKKDAPADEAEWMIRSLTALRSIGPDIATLLVREAFVRQFRDRRALAGYVGLGGTPFSSGGNEREQGIGKDGNRRVRAAMVELAWTWLRWQPDSALSVWFRARVGAVGRGRIRKIMIVALARKLLVALWRYLKDGVIPEGANVKIAAA

SEQ ID NO: 278883 - protein, 412 aa, unidentified
MEVLYPRCCGLDVHKSSITACVLLAQSGNPRKHIRRFGCTTRELRELVVWLEEFGVVHVAMESTGVYWKPVWNVLESHFQIVLANAQHIKAVPGRKTDTKDCQWIAELLQHGLLRGSFIPPLVIRDLRDLTRARTSLSQEHSRIASRIQKVLEDANLKLASVASNTLGKSGRAILAAIIGGEESPERLADLALGHLRAKIPQLQAALEGQVRDHHRFLLQSLLRQLYFIETEIELLDARLEQLGQQHLDLAEALNRWVTVPGVDRVAAWSFIAEMGTDCNQFPSAAHLASWAGVCPGNNESAGKRISSKIRKGSPWLRRMACQSAWAAARTKNTYLSAQFKKLAARRGRKCAIIAVAHSILVIGYHLQRKRCAYTDLGGNYFDRLHADGLRRYLVKRLESLGHSVTLQPRIA

SEQ ID NO: 278884 - protein, 366 aa, unidentified
MKRIAYIGIDYHMETVSAAVIIENEKDFFDTIRMSNNDEIILKYLKKISKKFEIKACYEASCNGYDFQRKMGKWGFNCDIIAPSLIPKKPGDKRKNDFRDAQNLTKLYANGQLTIVHPPTEEQESIRNLIRCRLNLKENEKNVKLQINSFILSQGLRWPNSKWTVKHRAWLSGLKLQESYSQQVLSEYLGHLEYLGARINNLDATIKEISESEIYEPSVKKLKAFKGLDILGAMILIAEITDFRRFPNPGALMAFLGLIPSENSSGNKQKGGGITKTGNHRCRKQLIESVQHLMKKPIISYKMKKNLQEVDSGSANIAIKCMNRLHKRFWALMAKGKSRNKAKVAIAREFVGFIWAMMTQPESATI

SEQ ID NO: 278885 - protein, 339 aa, unidentified
MDKSIVYGGIDVSAKQLVVVRQRDGKNEVARSFANTAAGHRELKRYLTRAAARVRVGLESTGLYGLDVALFLQADSRMEVMVANPRAVKDFAKALLQRSKSDPVDAGVLAEYAARRPFQRWQPPSPAALAVTALARRIHALTESATREKNRLHALSATGTSLQVLVSDLKRSLQAIARSQVRLTRECRKIIAADGLLERRFRLLLSLPGVGETSALQLLGELALVPADAEVRQWVAYAGLDPCTCSSGSSLARRPRISKVGNRHLRRALYMPALTAAHHHAAFVSYYRRLQERGKCKMVALVAVMRKLLHATFGMFKHDAQFDASRVFGGTAASTGVAA

SEQ ID NO: 278886 - protein, 407 aa, unidentified
MEHVIIGVDPHKLSATIEVVDHHEQLLGSGRFTTDQAGYTAMRTYAKSWPHRVWAVEGANGAGCPLAQRLLEAGEHVVDVPAKLAARVRLFDTGHNRKTDALDAHSIAIVAVRTESLRVLKIDGELEALRMLTDRREALTRRRVQTVNRLQALLADLIPGKAKRDITALQAKEMLATVRPRGIAGRTRRRIAAEELVELIAVDSKIKKATAELKAMVLARNSRLMDISGVGPVVAARILADVGDISRFADRNRFASWTGTAPLDASSGEQNRHRLSRAGNRRINHMLHIAAVTQIRLDTDGRTYYRSKRTAGKKPMEAMRCLKRRISDAVYRQLLADAQRNAERNPTEAADAGPGGHCGASQESSAVDLPPHIDTSDQPLPGPATPTLQPATPPRKSPTKRPLKTAS

SEQ ID NO: 278887 - protein, 351 aa, unidentified
MSYPLFIGIDVSSKENSVCCLTKDEERHPIARFSIANNRPGIHTLKEKINHLTEKHDFDRLLFGLEHTGCYSTHVAMYLQQHLKFHCSDVAVYKFNPGMIKQFKKAHFLDAPKNDRVDAWYIAARLKSGLLPHPFTWNEPLLALQKLTRARYHLIQNLVRESNVLMSNLYLKCSDYTLVFKNKLSATSLAVMEEFESVEELAETSLDTLIEFLIAHGKNRFPDPEDFAKQLRKAARSSYRLPKAMADSVNLAMASNIRIIRTLQEQIKSLQKAIQDHLGAIPQTLDSIPGIGPIFASGIISEIGDINQFKSHKQLAKLAGLAWTENQSGDFTAKRTRLINSGNRFFAVLLN

SEQ ID NO: 278888 - protein, 367 aa, unidentified
MDHITYVGLDVHANSITAAILPDESQRAEVIELSSDLMKVRRLFRRLADKSPVRACYEASGAGFVLQRVLTRDGFHCEVIAPSLIPRKPGDRRKTDRLDALMLARLYRSGHLTPVHVPTEDHEALRRLLRLRTTYHSYCTATMHRISGILRNHGFVFTEGKSTWTKKHRQWLAALRQKLTGPLQTALAIELEHLEYLETQQHALDAELEHFACSHQYRAQVEALCCLRGVKTLTALTILCEIDDIRRFASPRALMAYFGLVTSEHSSGDKEHRGPITKAGNIHVRRLLVEAAWNNRHQAAAELILQRRRQGQPPAIIAIALKAQHRLHKKFWRLDQRKHRHVAITAVARELCGFIWAILYQVQPTQI

SEQ ID NO: 278889 - protein, 316 aa, unidentified
MTDLITVAGIDVSKATLDIALHGRSEHWTEKNDVAGWRRLAAALAKAGVRRVGLEATGGYERGVSEHLRAKGVQVIVLQPVQVKAHAKVKRRKAKNDRLDAILIADLTARQDDPKGEPDPRLAKLADVLTFIEQIEEDIVRLKTRLEHITQPRLRRSVIADIARLERRQKAEQALLLKTLRTEADLARRFDLVCSVPGIGARTALSIVIRMPELGQVSREEAAALAGLAPFDDDSGSRQGTRHIEGGRKRLRRALFAAALPAAFRWNKALIALYRRLIEKGKAHKVALIACARKLIIYANTVVQRATPWLEKPTAI

SEQ ID NO: 278890 - protein, 347 aa, unidentified
MNFYTQQHKHYCGIDLHARAMYVCILDQSGTILVHKNLPTTPEAFLRIIAPYREDLVVGVECIFTWYWLADLCSKEGIAFVLGHALSMKAIHGGKAKNDKIDAHKIAVLLRGGMLPQAYVYPAAMRATRDLLRRRCHLVRQRAELLAHIHNTTSQYNLPEIGKKLAYKATREGVEDHFPEPSVRKTIEVDVSLIDHYDQLLGEVELYITRSAKAHDVQTFSRLQSVPGIGQIVALVILSEIQDIARFPRVQDFVSYCRLVKCAKESGGKRLGTSGKKIGNVHLRWAFAEAAVLFLRYNQPGKAYFTKLAHKHGKAKALTVLAHKLGRAVYYMLTREQAFDLNRFVSA

SEQ ID NO: 278891 - protein, 435 aa, unidentified
MEEVTDEPLYRDRICGIDIGKAELYATIRVPSDTSPQRRMSETRAFATTRRGVLALADWLRSWHVPAVVMEATSTYWMGPFFRLEAEGLECVLADARQVKNLPGRPKRDPSDSSWLAQCFERGAVRPCFVATKEFRVIRLHTRYRRDLINERTREKNRAEKLLETAAIKLSSVLTDLHGVTGRDIMDHLIAGQRDPKVLAQMARTRARAKITELQHALEGAEFFTGHHARLLKTMLQRIDQIDDQIDGLTAVIEELLAPYEEQLAQAESMPGWGRRSAEDAVAETGVDMTRFATGGHLVSWAGRAPLDKQSGKRKGQARHKKGNTYLGGVLGETAICAGRTQTREGARYRKLARSRGKNKACVAVGNTQLKVYHTLLSSPGMRYADLGPDYYQRRAQNRRTIDYHVRELEALGLEVTLCRIPEPEPGQAATTPAA

SEQ ID NO: 278892 - protein, 340 aa, unidentified
MSYYAGIDVSLESSHVCVIDGNGKIVREAKVASEPEALIAWLGSVALELTRIGLEAGPLSQWLYAAMRDAGLAVELLETRHVRNAFKIMPVKTDRKDAQGIAELMRLGWFRPVHCKSMEAQETRAMLTARKLVQKALHEVEMSLRGVLRGFGLKIGKVAPTQFEARIRKLVEGHPSLEVIATAMLSVRATLRREFNGFEKRLRAMARSDVRAKLLMSVPGVGTIVALTYAAAIDDPARFTSSKTVGAHFGLTPTRYQSGETDRIGRISKIGDASVRAMLYESAHIIITRPVKGCTALKSWAMRIAKRAGTKKAAVALARKLAVIMHRMLVDGTTFTTEPA

SEQ ID NO: 278893 - protein, 451 aa, unidentified
MSKRSNKPTGLPVIHDRAAGIDIGSRFHVVGVPPELCDEPVQTFQAFTGDIERMADWLVSLGIQTVAMESTGVYWVSVFEVLQGRGIHVIVANAREARSVPGRKSDVNDAQWLQRLHACGLLRASFRPERDIAALRAYLRLRERHVDYAAAHIQHMQKALTLMNLQLHHVVSDVTGVTGMKILRAIVGGQRDPAILAAMRDVRCKATNETVRAALVGNYQPEHVFELTQALALYDFYQERLGECDAEIERALLELNADKQDPTEPMPKPRHRTVQPNAVGFDTRPLLYQLTGVDLTQIHGIGPYLALRMVAECGTDSSKWPTAKHFTSWLTLAPGCKISGGKVLSAHTRKTTNRVSALLRLAAVTVGRTNTALGAFYRRLATRVGKAKAVTATARKIAVLFYNAMRFGMTYQDAGADRYEQRYKERVIKQLHRRAAEFGFTLQEAEPQRVS

SEQ ID NO: 278894 - protein, 478 aa, unidentified
MNKNKTKNVSQETQEAQKEPCLVMEKVCGLDVLKKSCTAAIIDQGKTPIVLEDVENSGPGIHHLYQRLIKERCGTVVMESTGPYWIGLYDYLDLRGIKTVIVSPQSLKAFGGKKTDDHDAVWLAHLYRLNLLNPGYVPPRHIRELRSLTRRYEKIVQMMASMKNSIQSQIDAFSTGITTIYTDPFGLAGTKILSTLAKEMETMETKDKDKEAHGIRADSVLERLREEGLPEEKIRQVEKMLRLSFDPTSNGWLIEQGLATLQALREQRDQVMNRVARHIRQHQDLSRSVGILLSMSGIDLISAAVIVAEMGDPHRFGEGKGVSAYFGLVPSVDQSGPTTVLGRITRNGSPHMRRILCQVAQVVAGKGAPHLRRWCAQVKARRGGQKAMVALARRILVISWAMLRDQACFEDPDQDKAQKHNAAKLHRAKLRAMDKRARRSTNTISMWKALHLLATDQKLRSELGLARIVRTLPRKAPT

SEQ ID NO: 278895 - protein, 428 aa, unidentified
MPTRFFGLDVHREFTQVAVLEGGCLTHLGRIPTTPEALRAFARTLGSDDHVVLEATGNTYAIVQVLKQHAGRIVVSNPLQTRAIADAKIKTDKIDAEVLVRLLAGGWLPEVWVPDADTQALRQRVAYRVRLVRHHTRLKNRIHGVLHRNLVPGCPRTDIFGKAGLQWLMEHALPQLPAHEQEIVLATLRQVESLRVELVQVGQTLAALALERPFVHRLITIPGIDAVTALTLVAVIGDIHRFRSPTKLVGYFGLDPRVRQSGSHTARYGAITKRGRAHARAVLVEAAWAAIKSPGPLRGFYQRVRARRGPQIAAVATARKILVVAWHLLTEDKDYAFVRPSLVGRKYRTLELDAGQPAKFGKRGIGYAYNLKTVRQRELDICLQAERAYTELTRNWQPRQPQQDAGATNGEATPRRRSTNQRGGAFIP

SEQ ID NO: 278896 - protein, 336 aa, unidentified
MNSIGCDLHKKSITFCVVDPERRVVTRRRMYCEEVEEIAAFLKEHRPFQLVVEATSSYEWLFQLAGPLAERLVLAHPKKLRIIAESTRKSDRIDARILAEFLALDMIPEAYRPTPRERAYRRLVRQRIHLKKRIKGVRSKARAILAEYNADRKDLFTVAGLKYLVQVEVSAEDRFVLRQLVAQWRFLMKQVEAMDRRLEAFAKSAPVAEQEARKLLDTIPGVGPVTIDVVLSELGDSRRFRSQKRACAYAGLNPGFRESDGRRHELRITKEGSPLLRWALVESAWRLVRQSKRWRTIFEALARRRGKKRAITAVARRLLCVMVAMLQRGQGYRMAA

SEQ ID NO: 278897 - protein, 487 aa, unidentified
MACGRLSTPSNTVVPCEAVYRAGRRMSLYGPLTVAALTSTRIRFVVPVAISAGDHSHVVRVKEESMLAESHDEEQIIARVAALDIAKAELVCCVRVPSPAGGKRRLQEVTTHSTMTQALTELANRLVEMGVQRVVMEATSSYWKPVFYLLEAHGLDPWLVNARDVKHLPGRPKTDVLDAVWLCKVAERQMLRPSFVPPWPIRRLRDLTRYRTDLVAARTAEKNRVEKLLEDACIKLSVVASDIFGVSGRAMLAALVAGERDPKVLAQLARARMRGKIDRLEQAFDGHFADHHRFLLSRMLSRIEGLDADIAAIDAQIEAQLAPFAEAAAHLDEIPGIGSVAAAAIIAEIGVDMSRFPTAGHLCSWAKFAPGINSSAGKTKRSASSGHGDPYLARVLGEAAVGTTKTDTFLAARYRRIARRRGQPRAVVAVGRSILVIIWHLLQDPDARYQDLGADHYNRHVDPSAKKRSHIRQLEALGYTVTLTPAA

SEQ ID NO: 278898 - protein, 347 aa, unidentified
MRFYTTQHPFYCGIDLHARTMYICILDQGGEVLVHRNMKTDPETFLKAIAPYRPGLVVAVECMFTWYWLADLCADQGIPFVLGHALYMKAIHGGKAKNDKIDSQKIAALLRGGMLPQAYVYPAQMRATRDLLRRRMHLTHKRAELLAHIQNTNSQYNLPAIGKKIAYKANRDGVADRFADAAVQKSIEVDLALITYYDELLRDVELTIVKTARHHDANTLYLLQTVPGIGKILSLVLLYEIHDIQRFPRVQDFVSYCRLVKCSKESAGKRYGTSGTKIGNAHLKWAFSEAAVLFLRDHAAAQKYLARLEHKHGKGKALTLLAQKLARAVYYMLKRQVAFDTETFFQR

SEQ ID NO: 278899 - protein, 418 aa, unidentified
MKKHSKSSQRSEPSLKRTKARGPVQRDAKEVLAEVLGKLTGKLDGPAVSTSAKENYRGNPVGPNRDRLTVGVDLGDRWSQYCILGLEGETLAEGQLRTTQEDIREFFQALPVARVVIEVGTHSAWVQDVITEWGHEVLVANPRLMEGSKRRKRKSDRIDANKLARLGRVDPQSLYPIRHRSREVRQDLVVLRARDALVSVRTELINTARGLVKSMGTRLPRCSSPSFADKVKDAIPDEVREALLPLVQLVETVKDCIARYDQKIEELGREKYGHTTLLRQVKGVGPITSLAYVLTLEDAQRFSSSREVGPYLGLVPKQEDSGDSQPQLGISKAGDRMLRRLLVGSSQYMLGAFGPDADLRRYGLRLCERGGKNAKKRAVVAVARKLAVLLHHLWVTGDVYEPLHHTGAEPRTAQATAA

SEQ ID NO: 278900 - protein, 397 aa, unidentified
MIAVGIDVSKSKSTVAILNGDGSIRAKPFDVHHVADELQALVDYIKRTSEPPTILMEPTSHYHYPLLKAFTEAELPVCLINPYQMKKYGDTELRKAKTDKRDSLRIAQYALEKSYSLIPYTPQDQKYEDLRFLSRQYSQRISTLTVAKVQLLSLLDETMPGITTILPLKSRDPDNCVLLRFIKRFKSFDVIRKMGKTRFLDSYQVLVKKTKDRFAGSKGLAIYELVLNSVTTRGENPLSAMTQDQCVDLVSTSQKAADEINLQMRIIAETMPEYKVLRSMAGVGNRLGPIILGEIGDIRRFHSGKALNAYAGNDAPPYQSGQFESRNRHISKRGNPALRKACFEVMQALKLTKPQDNPVYLFLLKKEQEGKPYNVAKMAAVNKFLRIYYAHAMELYK

SEQ ID NO: 278901 - protein, 339 aa, unidentified
MKYIPVGVDIAKHLMQVHFVDEHTGEIIDKQVKREKFLEYFSNREPCLIGMEACGGSHHWARELQKLGHKVRLLKGRFVKAFVMGNKNDVMDARAIWLAVQQPVKSVAVKSEEQQATLGLHRMRQQLVKFRTAQINALHSLLLEFGETTHKGRAALAKEVPEALERLKERLPLYLINMLDEQYQRITELDEHLDHIEKQLQAIARQNETCQRLLNILGVGPLIATAAVATMGDASAFKSGREFAAFIGLVPRQTGSGGKIRLLGISKRGDKYLRTLFIHGARAAALLTKEPGPWITELKKRRPASVAIVAMANKLARTVWAIAAHGRKYDKNHVSIRPD

SEQ ID NO: 278902 - protein, 358 aa, unidentified
MLGVDVGKAELHGTWRDPETRRIRWQGAVPNTSAGIETLLRRAPQTPIVVEPTGRYGEPLIRAAQAAGREVLLAAPRKARAFLWSEQPRAKTDRVDSAGLALYGLTGRLRPYLLPSPAVDQVKQLLAARRGLSQSLTSLRQQRATLPLAADVLTPAITALERQIAELDRQMKRALGAATEPPAQRALPAAAAAAPTVTDPDTTVAAAAPRGHSLTTAAAALMAIPGSGEVTAPALAACLVDKQFTHPDQFVAYVGLDLRVSQSGQRRGQVTLSKHGDAELRRLLYLAALSAGHATHDTTFATRYQREQAKGLAKTAALNAVARKLAKVTWSIVTHGTTYDPKRVDSQPVDDKPLDNQP

SEQ ID NO: 278903 - protein, 392 aa, unidentified
MIYAGVDIAKVDHVIGAVDETGAEAARPMKFKNSEAGFERCIAWLESVAESEDDVFVGMEATGHYWKACFAYLMAAGYRVCVVNPMQVHAMRKLKSLSGVKNDRIDSWLIAETLRQGDYDETRLATDEVQALKQLTRYHQGLKQELAAVKTQAICVLDAYFPEYAALFSDMFGAASLKVLAECPTPSEVARKRASSIAKLLSEGSRGRLGDAKAAEVKAAAKSSVGLRLGEEAASFQIRTMVSQVEFLNATIAKVEKEVASLLGKVEPNITTIPGVSTTTGAQIVAEIGDVKRFRNAASIVKYAGLNSGVDESGKYSAEGVPITKHGSPYLRRSLWLAANRARQYDPRLKEYYDKLRRKGKPHRVAVTAVARKLCHVVYAVMRDGKPYDPAK

SEQ ID NO: 278904 - protein, 411 aa, unidentified
MQRRENYLYIGMDLYKESHTAVFVNCWNEKLDVFVIENKPSEFSKLEKRVNKKASQLGLSPIYGLENAYGYGRALAVWLIEKGYVVKDINPALAYDQRKSNPTFQKNDEYDAFAVATVLINQLHNLPDAKPEDNHWTLSQLVNRRDILVKDGIRLKNGLHEQISIAYPSYHKFFCEIDTKTALYFWKAYPSPMHLQSKTAIDLHAEFKDIAAQTSISKAELVLEFVRNDGDTHRDYQESRDFITQSLARCLEQQKEEVALIEAEIKRMLQFFDYKLMTIPGVSIATASKLIAEIGDIRRFPNADKLARFAGVAPIKFSSAGKGKEQSSKQGNRQLHGLFYFLAVSMVTVPKSGKPNQPIFYAYYQRKISEGKTKSQALVCIMRRLVNIIYGMMKNKTEYRPFVVEEQATKE

SEQ ID NO: 278905 - protein, 342 aa, unidentified
MSEIITVGLDLAKNVFQAHGADASGRAVLRKKLRRHQVLEFFGRLPSCVVAMEACGGAHFWGREIGKLGHDVRLIPPAYVKPFVKRQKNDAADAEAICEAAQRPTMRFVPVKSEETQGAAMVFRVRELLIRQRTQTINALRGHLGEFGQIVPQGAANASKLIAIVEDPDCELPADAIPTLKVLVGALVQLEAEIGKLDTEITRRAKENDVARRLMTVPGIGPLIATAIATLAPPPENFRKARDFAAWLGLVPRQHSTGGKQRLGATTKMGERSLRRLLIIGANSVIIKRHVHAAARPGTWLGGMLSRKPPMLVRVALANKMARIVWALMARGGVYKSPATAA

SEQ ID NO: 278906 - protein, 350 aa, unidentified
MVTLGGDSHKRTHTLVAVDDNGRQLAEKTLLATKAGHLEALQWAARWSERKWALEDCRHVSRRFEADLLGAGELVVRVPSKLTGGARKVARTSGKSDPIDALAVARAALREPDLPVAKLEGAGRELRLLLDHREDLVGERTRIQNRLRWHLHELEPEAAIPARMLSRYHTLAELEGRLRSQHGVVVEIAIELVVRIRELTRCINHLEADIAGRVSGLAPTLMQLTGCGALCAAKVVGEAAGVSRFRSKAAFAMNNGTAPVPASSGNQMRHRLNRGGNRQLNAAMHRIAVTQLSRPGPAKDYVARRLANGNTKTEAVRALKRRISDEVYRRLLHDERAVLASPSGSVEVAA

SEQ ID NO: 278907 - protein, 350 aa, unidentified
MLIIGCDFHTRYQQIAMMDEASGELTERRLDHESGEAQTFYRNLQGPVRVGIEATGPIHWFERLLLELGHELWIGDSAKIRASEVRKQKTDERDARLILDLLLTKRFPKIWVPTAAERDLRQLLWHRHKLVCMRTMLGNQLHALAMSQGLCRKRKLFTKKGRAELAGLGLGPWASRRREELLKLLDQLNPPIAELDRAVLEEAQRRDDAVRLMTHPGIGPVNALAFVLTIGPVTRFERSRKLVSYLGLNPSEESSGGRRRLGAISKQGNTMVRWLLIEAAQYASRSDPALRQDYQRLKFRRGHAVAKVAIARKLAVRMYWMLRSGADYARLVRMQGSPAATLVDASSSLG

SEQ ID NO: 278908 - protein, 337 aa, unidentified
MLHYGLDVHKKYTNICVVDDAGAILAEGKSATDRVPTHPAFSLEGQKRAVMEAGGNWHYLYNLLEPNVDQLLLAHPLRVRAIAAARVKTDAIDARTLAHLLRADLIPAAYIPPPAVREARELSRFRFDLVKQRTALKNRVHALLAKEGLTSPFADLFSRSGRKWLSEAPLALEKRQRLESFLRVLDCLCQEISEAETSIRRSVADDSRARLLTTIPGIGFQIALIVLAEIGDVGRFPDANHLVSYAGLAPRVRSSGGKTKLGSITKQGSSALRWALVEAAHVAVRRPGPLQETHERLRRGKSGAVAITACARQLLVAIYFMLSRGEAFRPTGARTIQ

SEQ ID NO: 278909 - protein, 373 aa, unidentified
MNYSTVYVGMDVHKETFSLCCYTNEKEQAEYCQKVDGHYSKVLNYLEAMRFHYGDDAVFICGYEAGCLGFTLYHQLTDHHVKCVILAPTTMLKPSGRKKVKTDKRDAALIARCLAHHDYSPVHIPTEKDEQVKEFIRMRDDHKLALKKVKQQILAFCLRHNYRFNETSNHWTQAHLKWLRSLKPEEIYQEILTEYLATYDQLTDKLERLDRRIEELAADEDYQENVHKLSCFLGVKTQTALSAVVETGDFKRFPSAEKYASYLGLTPGEDSSGDDQNRLGITKAGNTHLRRLLVEAAQSYSRGQIGYKSKALKARQAGNPADVIAYADKANERLRRRYYKMVLGNNKKANVAKTAIARELACFIWGMMTGNIA

SEQ ID NO: 278910 - protein, 345 aa, unidentified
MSLFVGLDVSQRLTHLCVVDADGKRVWRGKCATDPTILAQTIRAQAGSDARVAIETGPLTPWLVHALRAAGVAMICVEARHAHAVMAAAQVNKNDRHDALALAQLVRTGWYRAVHVKSYPAHQLRAVLAARAQLVGMATRVSNHIRGVMKIFGLVVVGVRGTAFAARVEELVADRPEVQSIVAPMLHTWLHLRSQVAVFDRQLLAIAKTRPACRLLMSIPGVGYVSALAFMGAIDVPERFARSRAVGAHLGLAPKQHQSGEVDRLGEISKCGDAYVRTVLVEAANSLLIRCRKPSPLREWALALEKRSGPKKARTALARKLAVIMHSVWRSGMPYASALPSDMTL

SEQ ID NO: 278911 - protein, 315 aa, unidentified
MTILNTMPARVLGFDVAKDTITVFDSLTGSLQTIANRRAAVGALLCGLDRHCFGVCEPTGGYEVLLLEQLVAAGIACHRADTVKVKAFIRSFGTLAKTDALDARALARYGQERWQRLALFSPADGDQQVLTALVTRRQELGTLKVAEQNRAKAPGRDAINASCRAMLRVIARQIARIDADIDALVKRCQVLARSIAVLQELPGVGPRTAIGLAAFMPELGSMTRRQAAALAGVAPHPKDSGTIRGHRSLRGGRPHVRTILFMAALAASRAKGHLSAFFQRLVDNGKKPIVAIAALMRKIIVTLNARLRDDRCKQS

SEQ ID NO: 278912 - protein, 366 aa, unidentified
MKAPSTRPAAVLGLDVGKSSHWACLIDRDGEVLDSAPVRNREAELDALFASAPAGTLVVVDQFRNIGSLAVRRARAAGLGVAYLPGLAASRAAGLFAGEAKTDERDAAVIARTALGVPDSLSGVPGRGEALEAARALSSQRDHLRAVLLESCPALEAAVDLSDRRWLELLAGFGGAWGIARSGAEGPRAEAAGEAAAASTAPPPALVEAENRQVRFLAARISEALDEAGALEAETAALLEGDETYACLLTVPGIGPRTAAQLAVSVDIGRFPDHDHLASYCGIAPRVRSSGTSVRSVRASRRGDARLKSLLIFSCNSLVRSSGRYGEYYRACRARGMGHGRALKAVARKRLRAIYAVMRDRVPYRE

SEQ ID NO: 278913 - protein, 377 aa, unidentified
MRRVKFVGLDVHAETIAVAIAEQEGEVRSLGVIGNREESVRKLVRKLGPVEDLRFCYEAGPTGYSLYWQLTALGVKCEVVAPRLVPMKSGDRVKTDRLDALKLARNHRAGELTAVWVPDAAHEALRDLVRARESAKKDQLRARHRLSKYLLRQGRRPPKEVKPWTATYLEWVKREVHFEQRAQEATLMDYLHEVEHVAARIARLDGEIGEAVKLASSKMRAVIQALQALRGIAQISAVTIAAELGEVSRFGRARQLMGYGGIVASEHSSGEYTRRGGITKTGNAHLRRIVVESAWAYRHRPSVGVSLRHRQEFVSEEVKEIAWKAQHRLHGRYRKMMAQGKNQTVVVTAIARELLGFIWAIGVKVEAAHKQSLQEAA

SEQ ID NO: 278914 - protein, 393 aa, unidentified
MTTIGIDIGGRTHVVARCRDGQPRADREILRVSQSRAGFAAFDTWLERQAEPVTLVTMESSGHYWMSLASHLRRREVPVAVVNPLAAKYFARSRLGRTKSDPADARSLAEMAMRDSPPVRDPLAGAELRQAARFAMTLVTEQARVCQRLIRLVELGFPELGELFDDPTCRTAREVLRIAPTARAATRRHTSTLANANAGAGHRRLGTARAERLQAAAAETIAVPELDAEVAFEVGLLLDQYDVRERQIEDADRRVASLLDGETARRLQTIPGIGPSTAATLLAEIGDIARFTDFDQLLAYAGVHPAERSSGRKGANPETAWHMSKAGNSHLRAAAYRMAVVGVQHNPIIAEHYARKRAAGKSKMNALGHCMRKALSIVWGVWRNGADFDPTWG

SEQ ID NO: 278915 - protein, 431 aa, unidentified
MKYKLKQKQNQRITRITESTLVVGADIAKKIHVARAVDFRGIELGKDCVFHNDAVGLTKLVAWMKDLKQRHNKTEIVFGIEPTGHYWFPLAAFLEDQGIKIVVVNPHHVNKSKELEDNSQTKSDYKDAKVIADLIRNGKYSEPNLPTKEYADLRILMNLREKVSASLTQVKGRIGNWFDRFFPEYASVFKKWDGKASLMTMREFPLPAEIVAMGARGILERWKTVVKRGVGIRRAEKLYETASASIGLTEGVAAARVELTALLQQFDLFNEQHEMIMAQVVQILESIPGTAQMLTVPGVGVLTVAGFLAEVGDIHNYDHGQQIIRLAGLNLKENSSGKRKGKTGISKRGRSRLRALLFRAVMPMVAKNSAFKALHQYYTTRSQNPLKKKQSIIALCGKLIRVLFTLGTKQKEYNSIDVIGPVRQAQMQMAA

SEQ ID NO: 278916 - protein, 412 aa, unidentified
MLFVGDDWAEGHHDVEIVDDDGEVLARRRLPEGLEGVTRLHALIAQQMPAEWADLDPGEAASRVKVGIETDRGSWVGALVAAGYEVFPINPLSVARYRERHSTSGAKSDAADAHLLAEIVRLDRAHHRPVAADSDEGEAIKLTARTHQSLIWDRSRHVLRLRSTLREYFPAALKAFEDLDAPDALELLGKAPDPDQAARLSTPTISAALKRARRRNVEGRAKQLRSMLAAPQLRQPPVLQSAYAEVVASEVAVIASLNLQIDRLGAVVGNHFGRHRDAEIYTSLPGLGLILAARVLGEFGDDPERYADAKARKNYAGTSPITRASGTKKVVLARYARNRRLGDALQQWAFCSLRGSPGATAYYRQLRNRKIGHQAALRQLANRLVGILHGCLKNRTTYDEQTAWSHILKASA

SEQ ID NO: 278917 - protein, 379 aa, unidentified
MKKHSTRFIGLDTHKDTIAVAYATDSRTEPVTYLGTIGTQHYAIRKLVRQLESHHPGCQLQFVYEAGPCGYWLYRLLSSWGYPCFVVAPSLIPKKPGQQVKTDKRDCMQLAQLLRTGDIEPIYVPEPEDEAIRDLSRARETTMWDLKNAKSQLKAFLLRHDIRYTGTANWSAAHVRWLSELVMPTPAQNTVFREMLYTIVERHKRLERLDNELTYQVRRWRFYPLVKAVQALRGVQLLVATSVVAELGDLQRFDTPRKLMAYVGLTPSERSSGNRRRIGPLTCAGNKRARRMLIEAAHAYRYPAKTSRILQQRQEDLPKAIVEKAWEAQVRLCRRYRALMQRGKHRNVVVAAIARELVGHIWAIAREVVIAKPDPRLML

SEQ ID NO: 278918 - protein, 340 aa, unidentified
MGGGRRKHALDDSMRMFIGLDVHKNFLQAAVLDDEGQLLKQERIPNSKDETINFFQEFNKAKIAIESSSTWYPIYQLLSEKHEVTLSNPTRTKAIAQAKVKTDKIDALTLAKLLRGGFIAESYIPPRKIMDLRELVRYRASLVRLRTMVKNRIHAQLLMHGIRIQDVYPFTKTYNEKLQALEDYKIHGYLNILESLNIQITETSKRIKQTAEEDETSKLLMTIPGIGYYSALLITSEIGDVNRFPDSAHLCSYAGLTPSTHSSGGVTYHGRITKTGSRYLRWILTECTRTHIRHNPNSTITRFYHKLAARKGDGKAIVAASTKLLKIIFWVLKEKRPYHS

SEQ ID NO: 278919 - protein, 438 aa, unidentified
MWWNSQWLLSIFQKGVFPVKVVYQTCCGVDVHKSFLVATIIKTTSGVQPSYRKKRFSTFNHSILAFKQWLLDNSCRDVCMESTGKYWIPVFNLLEDDINVTIANPKWVKAVKGNKDDTKDSKWIGDLFRLGLVPGSYIPCKSIRIIREFTRYRYKLTSCRSSEKNRFQNALTVCNIALDSVVSDIFGKSATSVIDYLLERSTDSINHEEISARLLRSLKKKSESVIKSIEGYQMTDAQKYRMRLVHAHMDYITSTISDIDSMINSLVEPYENAVQLLCTIPGIDRSSAITIISEIGTDMTQFSNSKRLCCWAGLTPGNNESAGKKKSVRITRAGVYLKPALVQVAHAAVKSNKSPYYKAKYERIMKRRGKKRAIIAVARMILTSVYHMLSTGEAWNPTDLYKIDMPEPLKNKQKEKAVKQAMKLLIAEGLIKESQLAS

SEQ ID NO: 278920 - protein, 341 aa, unidentified
MKKNLFFIGLDISKADFAASIYKTPGEPIVTKEAIPNDRKGFEMLLLWLNDYHIDKKNCRICMEATGVYSQAISYYLLFQGFPVSVEPPLKVKRAFDPVGHKTDPVDSKQIAEYAYRFQDELTSWQPKDEILEKIRQLLSVREQFTKQKVALKNAIQAYHKQRVQVALIKKAHQETLAQLEKQIARIDKELAKLINQDPGTFQKVNNLKSIPGYGMLLAAHLLVITENFTKIQNYKRLAAFIGIVPYKHQSGTSVCKRAKIRHFGPMPSRKLLRLAAQSVATHDMTFRRYYLRKVAQGKAKALVLNNISNKLLKIACTIIRNNTHYIKDYRSIHPMYLKSA

SEQ ID NO: 278921 - protein, 466 aa, unidentified
MGNRAGVDWASEKHDVRVCDAAGEQLLAATFAHDEAGLGSLCRVLVQMKVELVAVERPDGVLVDRLLDAGLRVLALHPNQVAAARARFRASGGKSDHFDAFVICELARTDSHRFRVLEPDSDQAKALKALTRAREDFVSARTSLVNQLRAELERFWPGPVGLFSSLDCLISLAFLRRYPSPLDTQRLTAARLTTFLRSQHYSGGKTGAELLEKLRAAAAACTGEIEAQAGRAVVLALVAALETLGEQVKQLDRQIASAVRAHPDGAIFLSLFKGADTVLTAATLLCEIGDCRARYPTRDSLAGDAGQSPVAVESGKHKVAHFRWACNKRLRAAFCTLADSTRHWHPWAQAVYARAIAKGHDHQRAIRTLGRAWSRIVWRCWQDRVPYELARHRAALQYITVIIPSPSGDCVDVAATQRMAGDALDPSLDVGAGQGSLRAAQPSPPKQRSGGGQSRAARQGRAQRAA

SEQ ID NO: 278922 - protein, 449 aa, unidentified
MSNGSGVSRGDRNRNARLGRLRELVPVMNAIVGIDLADKKQMVVVTDHDSRVLARRTFRCRAWDLGLALDWAGSQAASKGFAGATVSCEPTGHRWRVLGQLAADRGMPFVCVQPMLTSWARRSEDLTFDKTDEKDAVLIARLTAQLRCYVPEPVDEIWGRLRHLGARREQLIVETTSQVQQIRALLECVWPASLDAARQPFRSVTWAAAMSVIVERDGGDLARTRRLGLARLEALTGRLIVARGRHKPCRRIVRQLFTALSDPAGVLAHRPGALERVALLLQDWDHAQRRQADTEARMLTVLDELELTELVTSITGLSAIGAAAILAETGDPHRFATARALVKHAGLAPREKLSGTFTGRTKLTGQGRPGLRLAAWRAVWGAQRSNPVYRARYQHLISREQNKLRPTQAQTVVAAAILRQLYAVITSGQAWDPVIATHGKRHPVLPAVA

SEQ ID NO: 278923 - protein, 367 aa, unidentified
MKQVTTFVGIDAHKKDLFIAMLSGDQSTPVTWQLANEPNAVRRLVRKLEREAPGPVRACYEAGPCGYALQRQMTTTRVRCQVIAPALVPRKPGERVKTNRRDARKLVELLRAGLLTEVRPPTPEEEAVRDLCRARDDARTDLQRCRHRLGKLLLRRGLHYSGRNWTRAHRQWMASLTWTHAAERVVVEDYLLAIDQVEARLRELDAHLTETAQTDPYREPVAWLRCFRGIDTLTAIVILAELHDFRRFQSPRALMAYLGLVPGEDSSGEKHRRGRITRTGNTLVRRLLVETAWHYQHRPTVGIALTRRRKGQPGRVIAIADKAQQRLCRRFRKLAAEHKPAPKIAVAIARELAGFLWAALQPPVVAN

SEQ ID NO: 278924 - protein, 343 aa, unidentified
MTQQTIIGIDLAKHVFQVCMVTPTGTLKTNTAVARGKLLALMARQPPALIVMEACGGAHDWARRFCALGHEVRLLAPQYVTPFRRGQKNDPNDALALAEAGQRPNLPTVPIKTIEQQDLQGLHRIRERLVKHRTAVVNQVRGLLLEYGIVIPQGIARLRKRLPRVLEEADNGLSFLMRDLLQSLQSELSALDARVTEITGQLARLSHEMEACQRLQEMEGIGPLSATALVAALGNGHDFQTGRQVAAWLGLVPRQHSSGGTTRLGGITKGGNSYVRRLLIHGARSVISHVRDKPDAKSAWIRQLVMRIGVNKACVAVANKMARVAWVLLHTGEPYRKPVVLSI

SEQ ID NO: 278925 - protein, 346 aa, unidentified
MSHYVGLDVSVKSVSICVVDAQGAILARGETASDPDRIASFIHKHSPDPERVVHESGILAIWLTRELQKRGLPIICIDARLAHKALSGRINKSDPGDAEGLAHLARTGWFTQVHIRSEVSERVRVLIGIRERLIRMRKDLEGHVRGILKTFGICMSSVHRAKLRKGFRDQLAQAGTTDPAISVMIEMLNPIHKALCAATEAMDEELREIARESGLACRLMTVPGVGPIVALSFIATLDDAERFKRSRDVGAFLGLTPRRHQSGDMDWSGRISKCGDRDLRRLLYSAATTLITQVRKPSPLLAWAKRLQDRKGFKKAAVATARKLAVILHCIWRDGTAFEPNMEAKA

SEQ ID NO: 278926 - protein, 338 aa, unidentified
MFIIGIDPHKGSHTAAVIDRDEQLVGEVSVVADRRQRERLLRWAAPFAPRVWAIEGATGVGALLAQQLVASGESVVDVPAVLSARARMLDSGRNDKTDAHDARSAAVVALRHRNLRSVELEDHRQVLRLFARRHHQLTAARTRAICRLHAVLCEMIEGGLSKNLSAKRAAIELRKLRPHDPVAIERKRIAAEFLDEVRRIDRTLVELHGRIDDAVKAARTSVTDVFGVGPIVACYLIGYSGDVRRFPTAGHYARYNATAPIEASSGPTKRHRLNPNGNRQLNHAIHIAALGQISHDTPGRAYYLHKQTQGKSRKEAMRCVKRRISNAVYRQLRADTTP

SEQ ID NO: 278927 - protein, 343 aa, unidentified
MDIHVLGIDLGKNSCSVVGLDPTGRVVLRRRMRRESIVGLAAKLPGCVVAMEACCGAHHLGRLLAAQGHEVRLMSPEYVRPYVKAQKNDDRDAEAIAEAATRPTMRFVALKTEAQLDLQVLHRVRDRLVGQRTALMNQVRSILLERGIVVPQGRRKLLDALSELSGESERSGVGPRVRLLLDDMLDQWRGLDQRIAALGDEFAEMARNDPAARRLATIPGVGVLNATALVAAIGDGRTFNRGRDLSAWLGLVPRQATTGGKPKLLGITKRGSKYLRKLIVQGARAALPGLSRTATPLGSWLRGLLSRAHGNTVVVALASKLVRIAWALLRHETVFAAGRPAAA

SEQ ID NO: 278928 - protein, 342 aa, unidentified
MEAKRYIGIDLHRNCFTACLRLENGREYLKEWKLEDIAKFAGKLRPTDQVAVEVTGNTRLFHDAVAPHVERVVAVNPSQFKVITHSVKKTDPNDARNLALYLAKDLLPEVRMKDKTQAQIASLTQTRDTMVKLRTALKNKVNNICSAHGVNLNKESLGSEKGLKAVLEMHFDLLVNLELKIIVDQIRSLNKSIAELEEAIGKEGQKLEGHKNLTSIKGIGGLSAGILLSIIGDIGDFADEGRLAAYFGIVPRISNSNETEHSGRITKRGTKLGRTTLVQCALIAQRYSPYLKAYYEKKKSRGTGKAIIALARKFLGIIYRTLKNKWLFEDFPNFVLAEEATA

SEQ ID NO: 278929 - protein, 352 aa, unidentified
MDDPILAIDLGKFNSVCCWYEPASKAATFRSTRTTRAELEREMRRLPVSCVVIEACSPAGWIRDTCSELGLRCLVANTTGAAWQWKNVKRKTDRDDALKLARLAAIGELPTVSLPSRPVRQWKSLIGLRKRLVGERGRGQNRIRGLLVGQGLAAPVGNKAWTELGLAGLQQLAKPLPECGPEELWRGELTSLIARHRFVEAQIREAESALDALAKRSPAVQLLLSVPGVGVRTAEVIATHLHPERRFQSAEQVSAYAGLVPRQYQSGLSDRRGRITRRGPKLLRAALVECAWCSLRYNGWALALWRRLLANGLTKKKAVVALARKLLIRCWAILKTGQPWRNPLTVVTPLAG

SEQ ID NO: 278930 - protein, 417 aa, unidentified
MGPEDKGPQSPTDRRLNWRAQLAHNRLGENGSGGFHRSGGVRRLNCLDQFGRVASAVPVVCHPLGHLPTKGAAMRIVGVTGGVDTHADNHVAAAVDHNGGLLGIESFPATETGYEDLLVWLVGFGPVKQIGVEGTGSWGVGLSRFLADHDVTVVEVDRPNRQKRRKHGKSDPTDAVAAARAALSGEASVTPKSRDGRVEEMRVLLVARRSARQQRIQSLNQLRHLVFTAPESIRDRFKDRPKMGLVSEAANMRPRKGSDPVTYTTNLVIRNLARRIKHLDTEMRTIDETLRSLINETAPALLEMYGVGVDTAATLLVTAGDNPQRLHNERSWAHLCGVTPLPANSGKTTTKFRLNRGGDRQANAALYRVVLTRMSSDEETRTYVTRRREKGLSTPEIMRCLKRYVARQTYKHLPHMI

SEQ ID NO: 278931 - protein, 434 aa, unidentified
MRGAFDMADCDKGKPYSSWVAIDVAKDYNAVMIERSDGTRKRFRMANSADDHDKLVAFIRELPQPARIGFEATGNYHRALGFRLVSEGFDTCLISSIAGARYREVMFNSWDKNDPKDSEVLLELLKKGIVQRHVEPLIAGHHDLQELSKTYYNVTLSRTRLQHSILNHYLPLYFPEMRKFWCSTRSEWWVNYLLRFPTPSCVRSLPFSDYVTVAWPLLGRKVAKQRKLEELYAVAQRSIGLPIASDSVACETFKLQLHRYLDLNAHRKALEERAHEILSQNPDYAVLTSIPGIGPITALTIFAEGGDLRRFGHHRQFLKYCGFDLAKNQSGSMRGLEQLSKRGNARLRLALWMAALNATTHKENSFREKFRRYIQTDPQDADLRRKALTAVAAKMARVVYGLIKSGKTYQGYFEQALPSGSIPLCRAVEAVRTS

SEQ ID NO: 278932 - protein, 353 aa, unidentified
MTINYSPKEYDIFIGLDVDKKSFSFTVTDNNNMKRSKKIPSNPEKFYNYLQNNHADKKVVCAYEAGPTGFHLYDYLNMKDIPCLVVSPLSIPKAPNERVKNNRIDSEKLTQHLKSGSVKSIRVPQDEYRQLRYLVKTRENYSKLCKATKQRIKALLLSAHLDPSIKDDCEQWSRNYINELTHLSCDNAVRQSLDMLLNDLKYAREQTLAIHRALKAFCKKHETIDNYRRYLQSIPGIGFIVATTILGKIGDPMELRNPREIGAFTGLVPTEKSTGDAIKRGSITHLGNTTLRTLLIEAAWVAIRKDVTLQQFYHRIKGRHHPKMAAKKAITAVARKLTLIIHRILKEQRMYIP

SEQ ID NO: 278933 - protein, 321 aa, unidentified
MNKYKEIYGIDISKDVFDVYGSQSGHNQFKNDAKGFVSFMKHLQKDVLVVMEATGYYHYRLAQFLYKSGVSVSVVNPLSVKRFIQMKLAKVKTDKSDAKAISEYGAMNEVPLYTALTDVQSECLQLFRLLDSYIKHRTTTKNKLKGEEVLDIPSKIVYRSLKRNLKHLNKEVLDLETRLLALVKQDQQHQLTLIQSIPGMGVKTALFLIVVTDGFKKFKTASQLCSYVGITPTIRISGSSVRGRSRISKVGNKKLRNLLFLCSFSACKYNKACRAIYERLVAKGKSKKLALIAVSNKLLKQAFAIAKSGRPYDENYVSRLA

SEQ ID NO: 278934 - protein, 443 aa, unidentified
MMRIVVKRGAGLDVHKKTVVATRMRVTEDERMVWETQTFSTMTTDLLGLYDWLQEWECTHVAMESTADYWKPVFNILEGSFEVLLVNAQHVKHVPGRKTDAKDSEWLAELLIHGLLKPSFIPPKPQRQLREMTRYRSTLVRDRARVVNRVQKQLEGMNIKLASVATDVMGASGRAMLEAIIADRLTPQEMAELARGRLRNKKAELEKALTGIVGPQQRKVLALQLEHIDFLDEQVEDLSAEITCHMQGMDQPPSSGNSEAGSSGTEGTPADEPLPPMSYEQAIVILDTAPGVNERVAETALAELGADMRRFPTPEQAVAWSGIAPGNNESGGKRYSGRTRKGNQALRSALIQAAWAAVRTKDTYLKAKYERLVVRRGKKRAIVAVAHSLLKSMWYMLAYHVPYQDLGGDYFDSRRKESKINYHLRQLQKLGYSAQIEPQPVTG

SEQ ID NO: 278935 - protein, 347 aa, unidentified
MNRSKIAPVPGKGKDLVLEDYDHYVALDWSERTMAIAHMGKRVQAPTVFERPSNLKDLKAYLATLRGPIVMVIEETTTAHWLYLELRGSVERLVICNPYRNRLLSEGAKTDKIDAGKLCMLLRSGLLKEVYHSTDKLFELRTLVSSYQDVVQAGVRAKCQRSALNRARAEGGAYGAFVTGHLDKVIALYEETKKEYEKKFQEQCRKNKQLKLLTPITGIGVIGAVKILATVVDARRFPRRGQYWAYCGLARNEKLSGGRSYGHRKPKYSHVLKSVYKSAALAAIQSKGPIREYYDRLLADGEAEHNARHAVARYIATVTYGVLKNGTPYDPYRWRKSSVSQKENKVA

SEQ ID NO: 278936 - protein, 360 aa, unidentified
MAKAKTLVGLDVHATKIVAVVLDAETGQLQTFSMDGDAVGAAGFCAGLPGPVRVAYEAGPTGYGLARELARRGVECVVAAPSKIPRASGDRVKTDRRDAEHLVRLLLAGKLHAVRVPGDEEEALRDLVRAREAVRVDLMRSRHRLSKLLLRHGIRFDDGHAWTARHRQWLATVTLEWPAAQTTLLDAQGAIDAIAHRRDSLEREIIAMLPTSPWALQVGRLRCLRGVDTLTAVGLCAEIGDFERFARAEQMMSYVGLVPSENTTGQQRRLGAITKTGSGHARRLLVEAAWHYRPRPSIGKALTDRQADQPPEAIAIAWSAQRRLHRTWTRLEARAKRRTIIAVAAARELAGFAWAITQIE

SEQ ID NO: 278937 - protein, 401 aa, unidentified
MVSDFWKVMYNLMKIYVGIDIAKLNHFAAAISSDGEIILDPFKFTNDADGFQLLVSKLESFDKNSIIIGLESTAHYGDNLVRYLVAEFYQVCVLNPIKTCQMRKNNVRKTKTDKVDTFVIAKTLMMQDDLRFITFFDLDMMDLKALGRFRQKTIKQRTRLKIQLTTYVDQVFPEIQYFFKSGLHQNAVYALLKEAPSPKEIASMHMTHLANLLKVNSHGHFTKEQTKELRVLAQKSVGANDSTISIQITQTTQQIELLDSQLEKIEAEMTDIMKFNDSVIMTIPGIGYINGGMILGEIGDIHRFSNPNKLLAFAGLDPSVYQSGNFQAKTTRMSKRGSRVLRYALVNAAWNVVRNNATFKAYYDAKRAEGRSHYNALGHCAGKLVRVIWKMLTDEVEFNLE

SEQ ID NO: 278938 - protein, 409 aa, unidentified
MRYYVGVDWADAAHAIWVVDEAGGMVTKRTVAHSAEGLSEWGRELDEWRAQGIELWAAIERPEGRVVDFLLDHGVVVYPLNPKALDRARDRFRQSGAKSDPFDARVAADFLRTDQGHLTALQPSSAAAQELKYLTEDCQRLIRQQTRLLNQLTATLKAYYPRALEVAELPTALARAFLAAYPTPEALRQLTERQWQRWARAQHVSASRTAELWEVLHAPQLPVPAHVVRAKARLMHTLVAALEPVLAAVGSYRQAIDDFFAGMPAAATARTLPVGERGLLVPTLWARLGDAPGRWSSFRHLQAQAGSVPVTERSGQQRRIHFRYACDKTLRYILDHLAFRSLQTSDWARAYYDQQRARGHGHRQALRALGAKWLKIIFVMWRDGVAYSEEHHLATMARQQLRCSVTKIA

SEQ ID NO: 278939 - protein, 385 aa, unidentified
MQTPNDLSQSGIVLKQDSTLIAVIEMSLSSWLVAGMVPSVERQPLKKLAIDENALLKLLHRWREEAEKAGRKIERIAVAFEAGRDGFWLARWLRARGIEAHVIHASSVAVSREHRRAKTDRLDTELLKRAFLGWLRGERDHCKMVAIPTIEDEDAKRPNREREGLVGEQTRIINRMKAALSRLGIRGFNPKMKKAAQRLEDLRTPEDEPIPPNTLAELRRDMERRRLISEQIRQIENARLERIEHAPRHGPHAMVRVLARVIGVGIETADMLVQEALSRNMRDRRAIARYAGLTGSPDESGTRRREKGLARSGNARVRRGMIQLAWRFLMFQKDSALARWFRARTENARGARKTMIVALARKLLIALWRLVREGVVPDGVVLRPV

SEQ ID NO: 278940 - protein, 414 aa, unidentified
MLYVGDDWAEDHHDIAVCDEQGMVLRQARIPDGSIGISAFGEVVGQCLPPNEDPAAESDEPVAVVCIEVDHGPWVQALVAAGYRVYGVDPKQAARHREILSNSGAKSDKGDAVALADMVRTRRHQLRQVGTDSDLAEAIGIAARAHQRAIWETTRHTNRLRAALRQYFPAILIICAEVGLELKSAAILGLLEKAPTPEKAAKLSVAQILLFLKRRQDKQAKAERIQQILRAEHLGESAVITAAYVASAKAEVAFIRVAVEQTAALQEVVADHFSRHPDAEIYLSQPGVGLTIGPRLLGEFGDDPSRYRSAKARKNAAQTSPITRQSGKSWVVSARWVGNDRLLDAALAQAQDAILHDEHARAYYRKQRDRGVEHNAALRQLANKLVGVLHGCLAGGSRYDPAIAWHITEQTTAA

SEQ ID NO: 278941 - protein, 320 aa, unidentified
MNCIGIDVSKQTLVTYDGKKERVFPNTTGLAELVSFVRRKGKGVAIVFEPTSTYSRRLETLCRQERIRCCYLNPRVIPHLREVAQERSKTDRSDAELLYQYGQEKAKAEARLLQRDPIAHALSAILSCYKAAQKARVTCQGVLEALRHDPDTPPELLTELKEQIVHLKAWEKKELNRAEGVVRADKEASSSLGKLLSICGVGPVTAITLIGLFRRYPNTNRKQVVALVGLDPVERQSGSSVRGKPRISKRGSPEIRKLLYEVTLPAARYNPSIKAVYHRLKAKGKPEKVARIAAARKLLLMAHAIYKSRESYNAIKGETT

SEQ ID NO: 278942 - protein, 353 aa, unidentified
MIVIGVDPHKSTHTATAMDQPTHSEQSSLRIRATLTDYRRMLAWAKQWPDRRWAIENAEGLGHHLAQWLLACGEVVVDVPTTATARIRQLSRGGRRKNDRIDAAATACVAALQGDARPVVPEGPVDALGLLDERRMNLTQNRTRAVNQLHRLLREMLAGGAPTDLTAAKATAVMRRLRPRSTCERVRLQLCRELIGEIRRLDTQLANNQAEITALLDEHGTRLRDIDGVGPVLAARVLGRTRRASRFATEAAYATYNGSAPVEVASAERQCHRLNRYGDRRLNSALHTIAMVQVRMPHSAGRRYYDRKIADGKTPRAALRSLKRHLSNQLWRAMIADEDHHHNKPDDQSSTAA

SEQ ID NO: 278943 - protein, 421 aa, unidentified
MSSRTLSKKLSSVKPGTLFVGVDLALDRNVAVVLTERAEQLGRFGFPNDRDGYDYFYRRLEAAQEGQQAPAVLVGMEPTNYFWKLLAADIEQHCPDYSYRLVNPYTVKKNREGDQLDRSKDDNRDAFTIADLLRTGKYTETQLLHGTYAELRQYVTLYSRLQRDIRRQKTLIRNIAGQLFPELPRVFKDLTGETALAMLHHHAAATAVRRMSQEAFIASVRADFQGRRLQVAKLRRAYVLAKRSVGLKDGVEALQLALRTHIETLKTLQQQLEEARTALVDVFLSLPESDYLLSVHGLGVITAAIILSEIGDPSHYTNGRQLIKLAGTQPVLNTSGRKTRSKTPMSHKGRPRLRTALFFAVMRLVQVDEAFAREYLHLQTRKKNPLTKMQALGVLMNKLLRILWALMRHRTFYNPDFQGAA

SEQ ID NO: 278944 - protein, 367 aa, unidentified
MQKVYIGIDAHKESNVLALAFAGTADPELYGKASADLKAFEAVLRRIMKKYDLSKEDVALCYEAGPTGFVLARRLIKLGFECIVVAPSKIPSKSGDRVKTDRRDARKLARLYRAGELSGIHIPSVEDEVIRDVCRGRTDAVDERSRTKKQLLSFMLRNGYRYKGTARWTEGHMRYLREQVLADPAQKMVLEEYLQRIDFAVKQVERIDDQMGKLLQTWSRKPLVDALMGFRGFKQTAAMVIVSEIGDFKRFKHPKQLMGYLGLTPSEDSSGGRRRQGGITKCGNGHARWMLVESAEHYRKPPKISKGLSVRQEGLSREVKTISWHAQNRLSKRSYKLAMRRLHPNKIRVAIARELSSYIWDLAQIVG

SEQ ID NO: 278945 - protein, 400 aa, unidentified
MNAVGIDVSKGKSTVAVLRPFGEVVASPFDVIHNDSDLKQLVDLIKALPGESKVVMECTGTYFEPIAQFLHNNGIFVSVVNALLVHDYGGNSLRKVKTDKKDALKLASYTLDRWTELEEYVPADEQRKTLKILNRQYNQSNKIQTMMKNNLISLTDSVFPGINKLFTSPERQSDGHEKWVDFLNAFPHKDCIAGLYLSVFKTKYKSWCKKNKYNYSDSKAEEIHTFAKSIIAVLPLNYSVKLLVTQAVMQLNTILETVSSIRKEMDRIASSLPEYKTLMAMYGVGKVYGPQLMAEIGDTRRFRNRRAITAFAGLDAPPYQSGQLDITSRHISKRGSAALRKVLFQITQVFILNKPENEPVYQFIDKKRSEGKHYYSYRIAAANKFLRIYYAKVNQTLKLL

SEQ ID NO: 278946 - protein, 429 aa, unidentified
MDGVDITRLERFRQLRKEIRGSDEHLIVGVDVAKDNHHAFFGTATGKTLLKRLVFNNNLQGYEKLFTYVEAAKVKNNFNKVVFGLEPTANYHKPLGEYLIKCGLDVVLVAGTAVKRNRELLDGRWDKHDTKDAANVADLISQGKCLFYEYPIMPIRELRNLLSFKRRLKKQEHGTRVRIRNHLLAQYFPELDPYFSRMSACSLSVVKWCLEPSLIAGLEYEEFLRLVAPGKRTIKQREHVKLIWEKAFESIGCNAGETVQFEAKMMVEELQHVRESISEVEEKIEEICLNFPEYTYLLTMPGFGKDISSKVLGAIGNPFRFDNAKQVIKLSGWDLNANRSGKSSGYATAVISKKGKADLRYALYQAALVASSRNQLFVAYFTEKLCQRSREKGIKTKMRVKLAAKLLVTAWTLMKKQEPFNPEYLKVTL

SEQ ID NO: 278947 - protein, 346 aa, unidentified
MNYYAGLDVSLKEISICVIDGTGTTVARGVSPADPEGVAGWFRARSLSPELIVHESGQLSIWLQRGLERLGLPVFCIDARRAHKSLSARPNKSDAADAEGLAQLARTGWFTPVHVRTEDADRLRALVSARAQLIDLRKDLEGHIRGILKTFGIRLTGIGKGRQRQGFRDQLAAAGERDPILRTIADGFISVHTTLCQAAAELDRAVKEKAETHPVTRRLMTIPGVGAIVALNFVALIDDPSRFRKAENVGAFLGLTPRRHQSGETDWSGRVSKCGDGVMRSLLFEAATTLITRVQKFSALKSWAVRLAGRRGFAKAAVATARKLAVLMLTLWKNETEFTWKKEAVA

SEQ ID NO: 278948 - protein, 341 aa, unidentified
MLEVNTIGLDLAKNMFQAHGSDASGAVLFRKKLRRDHVLRFLAAQPACTVAMEACAGGHYWAREIAKLGHDVRLIAPGYVKPFVKRQKNDAADAEAICEAAQRPTMRFVAAKSEEQQAAAMVFRVRDLMVRQRTQTINAIRGHLAEFGLVAAQGLFHAARLVAAIEDEDNAVPEAARPILSLLVAQLRSLGEKVAVLDREIARRAREDAEARRLMTIPGIGPITATALAALAPSATTFKRGRDFAAWLGLTPLQRSSGGKQKLGETSRMGERTLRRLLIIGASAAVRWAMRKGSTRDSWLSRMLERKPPMLVIVALANKTARIVWALMAQGGTYRMPAVAG

SEQ ID NO: 278949 - protein, 483 aa, unidentified
MASKPKPPYHSTNAGAKAQKGKRRRRRKGMCLEDRPILEPNAAGIDIGSREIFVAVPPDRDPNPVRVFPTFTENLLELAAWLLRCGVTTAAMESTGVYWIPLYDILEQHGIKPCLVNARHMKNVPGRRTDWHECQWLQFLHSVGLLRSAFRPEAQVCAVRTLIRHRSELVQAASQHIQHMHKALTQMNLQIHHVISDITGATGLAILDAILEGQRDPVVLAQFRDPRIKASEETIRKSLVGNWRREHLFTLQQSRELYRTYQQRIVACDQEIESLLTEFTPRVDPHEKPLPPDRKRNRAARTRRKKTGNPDTTFDLRTEAYKLFGVDVTQIPGVETIALPLFSEIGRDLSKWPTAGHFASWLALCPDNDISGGQVLWRGMRKVNNRAGSLFRLAAYSLHHSLTPMGDYLRRLKSKIGPAAATTATARKIAVVFYTIVKRQVEYDETIWATRNINRQKSLETQLKRRAKQLGYELIPIGQKPAA

SEQ ID NO: 278950 - protein, 324 aa, unidentified
MTAVVGIDIAKQTFDIATLQSNGKYRTKTKLPNDLKGFETLQQWLLKHAEPQAWIVMEATGIYHEALAEWLFKQGYRVCVLNPAQPAFYARSQLQRVKTDKVDAKLLADYGSRHLAELRSWQPEAPEIRRLRALVHRLKDIQELEQIERNRLESTQESKVRDSIQSVLDHLKKQTDETLKAIKQLFDDNDDLRGKRDLLTSIDGIADRTAALLLAELGDIQRFNSSKAVTAFSGLNPRLQESGKHKGHVRISRMGPARLRAGLYMPAVSSLTHNQAIREMGERMKAKGKAGKQIACAAMRKLLCIAYGVLKSGRPFDPALAIAR

SEQ ID NO: 278951 - protein, 347 aa, unidentified
MKEVSTIGLDLAKNVFQVHGVDGVGGVVIRRALRRSQVLVWFAKLPRCLVGMEACATAHYWARELEKLGHEVRLIAPAYAKAYVRRNKNDPADAAAICEAVGRPSMRFVAIKSTAQQAAAGIHRVRDLLMKQHTMLRNQLRGLMAEFGLVAAKGQRGLSELIAILVDPEDRRLPSPLREGLVAIVETLRGIDRKLEAIDRQLVQAGRENATYRHLITAPGYGPILASAMVAMVVDPGAFRRGDDFAAALGPCSSQGQALVPRQEGTGGKTWLGPISKRGNGYLRRLLVNGATAVLKSKRAKEDPWLAKLLTSKPRKLVAVALANKMARIGWALMTRQEDFRGSLAVA

SEQ ID NO: 278952 - protein, 275 aa, unidentified
MLSSNVKYIGLDVHKEAIAIAVLNGAGKLVMESIVETKSSTVLDFLHGVRGELHVTLEEGTWAAWLYDVLKPHVREIVVCNPRRNALLKEGSKSGKIDARKLAELLRAGLLRAVYHGENGLQTLRELARCHLTISKDLKRVKNRLKALYHSWGICCAGKQVYTARHREQWLSQIVQVGVRRAELFYQQLDGLLILRNTARGELLVESRKHQAVKILRQVPSIGPLRAALLLAMMQTPHRFRSKRQLWTYSGLAVVTHDSAQNRFRGVIQSSNPDA

SEQ ID NO: 278953 - protein, 338 aa, unidentified
MTVVTVCIDLAKNVFAVHGVNAAGKAVLVKPLVRRAKLLELIATLPACLIGIEACTGAHYWAREFQKMGHTVRIIAPQLVSPYRMGGRHGKNDAADAAAICEAVTRPNMRFVPIKSVEQQGQLFVHRAHQGYVSERTALINRIRGLLSELGIVLPQAFKAFLSGGAQVLEDLPGYCNQVIGDLLNELYHIEEKIKNSEKLIQQLARDNSAAQLLMQFRGIGPMTATAIVASIGNGHDFKNGRQFSAWLGLTPRQQSSGGKARLGRITKAGDSYLRTLLVLGARSVLLGAAKNDDPVSRWVLQLKERRGYGRALVAIAAKNARMCWAMLHLRDEFIFPA

SEQ ID NO: 278954 - protein, 323 aa, unidentified
MQRIIIGIDVSQDFLDGHIRPTSVRQRFANTSAGIAELVAWVRPLAAERILFESTGPYQIAAVGALLAEGFPAVVVNARQVRDFAKAMNYLAKTDTIDAAVIAHFGEVATTKVRPLESEEIRTLRDLYDRRGQLVHMRAMEKNQRHSASVARASANVLHSIDKHIEYLEKQIHNLEQRMDRLIEKTAAFQARNEILQTITGIGPHVSRTLLVHLPELGQYTRQKIAALVGLAPFNDDSGEHVGHRHIRGGRNKVRVGMYQAAIAAIRHCPRMKAFYATLKARGKASRVAIIAIARKILILANALVRDMKPYEDRTNSICLKTT

SEQ ID NO: 278955 - protein, 343 aa, unidentified
MNVTTIGLDIAKNVFQVHGVDGHGKGMVRKKLSRGKVLEWFANLPPCLIGIEACPGAHYWARELLKLGHSVKLMPAQYVKAYVKGNKNDGNDAEAICEAVSRPGMRLVAINTEAQQEIQMLHRIRSRVVAERTALLNQIRGLLGEYGIVFGQGPSQVRRGIAALLTGEDPRLSAMARELVLGFQAELRELDERIGHYDARVKATCAGDARSVKVAALPGIGPLTATALVAAVNDGKQFQNGRQMAANLGLTPREHSSGGKQRLLGITKRGNTYLRTLLIHGARTVLRHATDKTDRLSRWALAIQARRGANVAAVALANKLARIAWAVLARDRIYRADWAEQSV

SEQ ID NO: 278956 - protein, 339 aa, unidentified
MKKQYVAIDLHRQRSLIVRDDHHGKQLAVTKIENDPLTLATAMADAGEAPEVAIEATNGWYWAVDVLQELGANVHLVHTKGLNWEDRRTKNDYLDCRELLDRLHLGKLPEAWIAPVPIRELRELVRYRVKLVNMRTSAKAQVKAILIKHGLHPPVKDLWGVAGPRYLDEIGPTLAEPYVLRLQSLRGLVEHFDAEIARLERHIARTLKGHQGFRAIQVIPGVGPILGAIFVAEIGDVSRFSHPKQLCSWAGLTPRHHESDTTVWRGRMTKQGSVLVRWAAIEAVSKMRGGPKLQADYRRIADRRGRNIGRTAVARRLLTLVYYGLRDGQLRCFEQAEAG

SEQ ID NO: 278957 - protein, 307 aa, unidentified
MFVGIDVAKDRLDVHVRPTAEAFTVPRDGEGVEALGKRLAAVMPSLVVLEATGGFETIVAAGLAAAGLPVAVVNPRQIRDFARATARLAKTDTLDAAVIAHFAEAVNPPARPLADPQQRLLGELMARRRQLIEMMVAEGNRRRLLTARRIQKTVDRVLATLKAQLEEIDHDIDIAVRGTPAWREAEDLLISVPGIGHKIARTLLAEMPELGRLGRRQIASLTGVAPFNRDSGTLRGRRTIAGGRPVVRSALYMSVLVSIRRKLPLALTYHRLRASGKPAKVAIVACMRKLVTILNAILRDRKPWATA

SEQ ID NO: 278958 - protein, 419 aa, unidentified
MAFKIFRKNCCGLDVHKTWIYGCIGITDTNGRTEYKQARFSSFSKGLRELSDWLSKYHCTDVCMESAGKYWIPVFNVLEKTCNVVLAHPKYTKPQKGNKTDRKDAKWICDLFMCDMIKPSFIPPAEIRHLRDLVRYRFKLTCMLAGEKNRAQNCLTVSNLKLDDVFSDVFGKSSRSITEYILAHPGESFDVAPFVNRRCKTPIEEIQAAVDGAICPEQAIKLRQCLDHIDELEKHKEEIEREILCVSDPYSDALNLIRTVPGLDKNPFTAIQILSEIGGDMSVFPTDKHLVSWAGCCPRNDQSNFKIKSTRISRAGSYLKPVLVQVANALIKSKNHPEFVDRYRRIKSHRGHKKAIIAICRMLLTAIWHILSDLKPYTSDGFMSQNPVKKDKKLTTSQALNLLKLQGYVITDDICPDST

SEQ ID NO: 278959 - protein, 405 aa, unidentified
MDIIVERGAGLDVHKGTVVACVMGTGIKKEIRTYLTMTNDLFRLKQWLKENRITHVAMESTGVYWKPVFNVLEDAFEVMLVNARHVKNVPGRKTDVKDSEWLCKLLRSGLVRGSFIPPKPVRELRDLTRYKRKLIQSVTSEKQRVEKILEDANIKLSSIASDTFGASGKRIIEELMKGELRPDEMAELSKGKLRQRKEELKEALVGNMEEHHKRMIRTSLGHINAMEEILLSVEHKIQEKIELHFKEEFELLKTIPSVKDSASVIIAEMGVNMDLFPTEMHLSSWAGMSPGNNESAGKKKSGTTTHGNKYLKTILTEFAWIASKMKGTYLFAKYRSLVGRRGKKKALVAVGHKILISCYHILKYKVPYKELGADYLTERKKDHIAKSYIKRLNSLGYAVTLKEVA

SEQ ID NO: 278960 - protein, 402 aa, unidentified
MNSVGIDISKGRSTIAVMRPFGEIVISPFEVRHTDSELSELARRLKSLNGETRVVMEATGNYHAPVAKLLHDAGLYVSVVNAKLVHGYGNNDLRRVKTDRKDAVKLANYGLDRWLTLPRYVPEENTRLLLKNCYRQYRQYSKVQTVLKNNLISLLDMTFPNANRLFNSPARADGSEKWVDFVAEFWHCECVSERPLKSFVNKYWRWCRKHGYNFSEEKAHAIYDEASGHIGVMPKSETTKLLVEQAVSQLSATSAALAALKQEMQSLSSQLPEYPVVMGMFGVGPILGPQLIAEIGDVRRFYSKKALVAYAGIDAPPNDSGDVIGRHKSMSKVGASSLRRTLFLIMSAYLQNSPPNEPVYQFMDRKRSEGKPYRVYMMASANKFLRIYYATVKAYLETLEQF

SEQ ID NO: 278961 - protein, 410 aa, unidentified
MQALVERGCGLDVHQATVVACLLIVRKDGKVQKQMRTFGTTTQELLSLRQWLLSEGCTHVAMESTGVYWKPVYTILEGALEIVVANAQHVKKVPGRKTDVKDAEWIADLLCHGLLRSSFVPPKPIRELRDLTRYRRKLVESQAAERNRLLKLLETANIKLASVATDVFGMSGRLMLRALVEGKATPQEMAELAKGKLRKKIPELEPALEGKVEEHHRFLLRLQLDRLEAAEKDLAVLEQRIQEKLKPYEAQLTLLDEIPGVDWTLAAGFIAEMGVDMSVFGSVSQLASWAGVCPGNNESAGKRKSSRIPKGNVYLKTALVEAANSAAKAKGTYLRDKFYRLKARRGYKRAAVAVAHKILVAIYYMLSHRVCYNELGDAYLDKRNKHQLTRNLIHRLERLGYSVTLEQIAA

SEQ ID NO: 278962 - protein, 371 aa, unidentified
MNREVIYLGDDWAEDHHDLCLLGEGGERLAVKRVPEGLAGVAALHTLVAEHADDPDQVVVGIETDRGLWVEALAVAGYQIYAINPMAVARYRERHHVAGAKSDSADAKVLADLVRTDRHNHRQVAGDSADVEGIKVLARAHQSLIWARTRHTNQLRSALREYYPAALVAFDDLHHRDALAVLSRAPGPQEGAALTASQLRAALKRGGRQRNLDRRAGEIQTALRDAHLEAAPAVVAAFAATTRATVAIVAELNRQIDQLEATMADRFEQHPDAGIYLSLPGLGRILGARALGEFGDDPDRYATPKSRKNYAGTSPITIASGKKKNVIARHVRNRRLYDAIDAWAFASISAEPPRVQWRLGSPGSGCCRAFI

SEQ ID NO: 278963 - protein, 449 aa, unidentified
MANGNGVSRGDRNRNARLGRLRELVPLENAIVGIDLADKKQMVVVTDHDSKVLARKTFRCRAWDLGAALVWAAEKAAAKGFAQVTVACEPTGHRWRVLGQLAEQRGMPFVCVQPMLTSWARRTEDLTFDKTDEKDAVLIARLTAQLRCYVPEPVDETWGRLRHLGARRQQLITDAGSQVQQMRALLECVWPAVLDTAKQPFRSATWAAALAVVVDLDCGDLTRTRRLGLARFEHAVRREISRQGKQKPCLRIVRAVFTALADPAGVSAHRVGALERVALLLGDWKQTQLRLADTEARMTSVLDELQLTALATSIIGLSAIGAAAILAETGDPRRFATARALVKHSGLAPREKLSGTFIGRTKLTGQGRPGLRVAAWRAVWGAQRANPVYAARLSHLTKRDVNKLTVTQAQAVIAATILRHLHAVITTGKAWDPVIATQGTKKVRAPIAA

SEQ ID NO: 278964 - protein, 382 aa, unidentified
MNLLLDCCAGLDVHKKTVVACIRRVGTDGAVTSQVRTFATVTTELLALSDWLDEQGVHDVAMESTGVYWKPVFNQLEGRFAVMLVNAQRLKNVPGRKTDVKDAEWIAQLLQYGLLSPSFIPPPEIRQLRDLTRQRTELIRDRAAVVNRIHKVLEDANIKLASVASDILGASGRAMLGAIVAGCEDPESLAELAKKQLRGKIPELKRALHGRITEHHRFLLKALLDQINSLEGLIARFDTRIGEAMAPFAEAAARLRDIPGVGAQTAQVIVAEIGTDMTVFPSAGHLASWAGVCPGNDQSAGKQRDGKTTKGSQWLRGVLVQAAWAASSSKETVFSACYRRWAKRLGRKKALVAVAHKLLVVVYHVLKKRTEYQEHWAPPQVA

SEQ ID NO: 278965 - protein, 391 aa, unidentified
MPMYFVGIDISKYKHDCCIISAADQQIISKFTITNDKDGFEQLLTALNSLSNPEDIKIGFESTAHYALNLELFLENAHHSFMEVNPVLIKEYKKSTTLRRTKTDSVDCESIARWLITVEYKPHSKGFYHAYSLKSLTRLRDRLIRQRSFYLVKITNVLDHTFPEFKPFFNERLSKTALYLLENYGSAEKMARMNSASYDKLRCISRGKFSIQQFLRLKELAANTVGVNNSIFDLELNTLLTLYKSLSDEINTLETEIIKLIEEVHPHYMSIPGIGPISSAVIYAEYGDISNFSNPGQMLAFAGIEPRINDSGTESHGGRMVKHGSSQLRYVLLNACLPLIRFDLTFATYYEKKRAEGKKHRVAITHVAKKLIRVIYALERQDVDFNAQKLR

SEQ ID NO: 278966 - protein, 344 aa, unidentified
MADNTLVAVDLAKTVFQVAFSNHPGQVSKNKRLSRTQFAEFLGQLPQSTIVMEACGSAHFWARRMQALHHTPILLPAHAVTPYVDRNKTDRADTKGMLEAHRNEAIRPVPVKTVAQQALCSLHRIRAGWIAERTARINTLRGLLREFGIAIPVGAQHAVPNAWLHIEDAESEIPDSLRPALAEICTEIRELERRVKMVETQLDALAEQTPAVAPLMTIPGIGLIIATALVAFVGDIHRFPSARHFASYLGLTPKEHSTGSRRRLGAISKKGDVFLRTLLIHGARSVLNAARKKTSPDRLHAWALSRHAARGHNRAATAVANKIARIVWAVWKRDQPFISAPPVA

SEQ ID NO: 278967 - protein, 471 aa, unidentified
MSTTPTRAKRRPKVRSVSKPKVPLPPQLKRINLNAAGIDIGSEEHWVAVPPGRDSEGQDVRRFGAFTGDLGVLADWLKQCEIETVAMESTGVYWIPLYELLVERGIEVLLVDARQAKNVPGRKTDVLDCQWLQELHTYGLLRGAFRPVDQVCILRSYLRQRSMLVAYASHHIQHMQKALEQMNLKLAHVVSDISGLTGMGIIKAILNGERDPAKLAKLRDPRCKNSETTVARALEGHYRGEHLFALKQAVELVEFYQQQITACDCQIEVCLQQFEEKSAESPVSTRRHKRRRGGITFDAHSYLYRMTGVDLTQIDSIEANTALTVIGEIGLDMSRWPTEKHFGSWLGLAPGSKVSGGKRLSGRTKPSANRAAAALRLAAQSLNQSQSALGAYFRRLKARLGAPKALTAAAYKLARILYRMLKYGAGYVDQGEAAYEERYRDRLLRNLKRRAAELGFQLTAISSSTGQPALT

SEQ ID NO: 278968 - protein, 439 aa, unidentified
MKSSTITIAGAAAPNATSTFAAFVGLDWADEKHAIALMPADGHAKEHSILEHTPAALSDWVAGLCQRFPGGKIAVILEQTRGSLLYALLPHAHLVLYPINPQMAAQFRQAFYPSGAKTDPLDAELLLDLLLHHRDRLKPWQPDEPTTRRLQLLVEARRRFVADQVRLSNRLVSALKTYFPQALELVGQTLSTRLACAFLQKWPTLEAIQKAGPVRLRKFYYAHHSRSEELIQQRLQLLAQAKALTTDAPVVAAQSLLVSSLARELAALPAILAEYEEQIATLFAAHTDYAIWDSFPGAGLALAPRLAAAWGTQRDRFASSDAMSSYSGIAPVKQASGRSQSIRMRWACPKFLRQTFHEVARTSLSFCLWAQCYYQLQLKRGKGRQAALRALAFKWQRIMWRCWQNRVPYDDGRYLESLKRNHSELYALVVGTQSKPPCG

SEQ ID NO: 278969 - protein, 395 aa, unidentified
MFIVGIDVAKRSHEVCMITSDGQTVQRPFSIRNNCTGYNLMLEKIRKHTNIKSQIVFAMESTAHYWLALFTRLRKDGYHVILLNPIQTSAMRDMFIRKIKTDAKDSFIIAELIRFGRYAESNVAQDRLLALKELCRNRCYLVDMAGDLKRKLIALNDRRYPEYDAQSDTTICKSSVALLKKYPTPQKLSNAHLDKLTELLWNSSNGHFGEWKARELRELARNSFGVEDCDGAYSTLILLMLDQIQSLSGKADALEKEIFRLFQSFDTTVTTIPGVGPIIGAVILSEVGDISRFSSADKLAAYIGVDPSVNQSGEFQAAHAHMSKRGSPYLRRCIWMASQVAVQRDPMFRAYYEKKAAEGLKYMTIIGHVTRKMPAVVFAILRDHKVYEPVLPTAA

SEQ ID NO: 278970 - protein, 347 aa, unidentified
MTDLMLEKTVRVAGGVDTHLDVHVVAALDQLGRVLGTASFEATACGYEQLGAWLESFGVVACVGVEGTGAYGAGLARHLAGAGVRVVEVDRPNRQARRLKGKSDPLDAIEAARSAWAAPADSAPKSRSGQAEAIRALLVAKRSARRTRVRTIVQMRHLSFTAPEALRCRLRGLGTSRFVSTCARLRTVSVDPVLVATTTALRVLARRVQRLDEELASLNADLSPLVRSLAPALLARPGIGIDTAAALLAAVGDNPKRLHSEAAFARLCGVAPQLASSGKVSRHRLDRGGNRQANEALWRIVMCRLAHDPATRAYMERRVKDGRSKREVIRSLKRYVAREVFNLLATS

SEQ ID NO: 278971 - protein, 335 aa, unidentified
MGIDVPKATSTVTCVGQRRMVKTATVPADPARLAVSVPRWFPGATLSAAYEAGFSGFVLHRTLTQAGITTIVVNPASVAVAANDKVKTDRRDAQQLAIDLADGRLRGISIPTEAEELARLLPRTRAQIVAHRATLTRQSKAKLHQFGLIPPGSRRLMRRRYVREMAAWSLPPELQASLTLLAEQWRFATRQLLERRRRLRRQAQAQEQIEKVYRSVPGIGEVVARTLATELGDMSRLTNERALFSYTGLTPSAYSSGASMRRGHISRQGVSRLRHVLVETAWRALPGDPILHAMFERIAATRGKQRAIVAMARRLIGRIRACFRHGTTYAVGTAG

SEQ ID NO: 278972 - protein, 315 aa, unidentified
MKNSQVFVGIDVSKSCLDVASRPTGEVWQVPNDAGGISALAQQLTEMSPSLVVLEATGGLERTLTAELAAAGLPVVVVNPRHVRDFARAAGILAKTDALDAQVLAHFGQAMEPDLRPIPDADAQDLQALVGRRRQLVEMITAEKNRRRTVIARIHPQVEEHIRWLEKSLEDLDQDLDGFIRSSPMWRTKERVMRSVPGVGPVLSATLLANLPELGALSRGQIAALVGVAPFNRDSGTLRGKRTVWGGRRRVRAALYMAALVASRYNPVIKEFYQRLCSMGKPKKVALTACMRKLLVILNSMVKQGRDWQPNLQTP

SEQ ID NO: 278973 - protein, 325 aa, unidentified
METRSLCCGIDVFFTSLDVCYQNNLGELFHLRVGNNNEGFTKIMEHTGTQYHFVMEATGVYYIRLAFFLHGKGCSLSVVNALSIKRFIQMHGERNKSDKKDAGWICRFAIEQQPPLWQMPEGAYFQGKQLYNTIREYQEQIKRFNNQLHSLGLLPIQSKDAIRSIERMKTSLKKEVKSLEGKLQELLQAWQPEQLKNISSVKGIGKRAAAMLIIFTQGFKHTHSHRQLISFAGLSPTEYSSGSSIVGKPKICKRGGKPLRDVLYMCAMNAMKTNQACKALYERLRAKGKTGKQGLIAVCNKLLKQVFAVMKSQTLYQPNYCSPKP

SEQ ID NO: 278974 - protein, 350 aa, unidentified
MIVGADVSKDELVVHELGGGTSSIQNNRREIEGLLLTLSPEATIAMEATGNYHRLLADAAFSRGFRVIVFNPKDVLHYARSTSPRAKTDRVDARVIAQCVASSEAADKELHPYQPVPDAIAKLRSLLQTRASLVHTKVALTNRLKQCPESASYLEDSVDGLMQPMKGLNEEILRLARSLPGYEHLRGAPGFGPVVAPYLTALLAGKNFLTSDSFVAFIGLDVRVRESGKRKGRSSLSKRGDPEARRLLYLAAKAASRNSGPFRDLYLRHQAKGLSKIAALVAVARKLARTAWSIYTKGEPYNADRVLTQRRGGNKPATNALSTHSHPQATAPVAGTSKQQERTTRLDNTT

SEQ ID NO: 278975 - protein, 413 aa, unidentified
MLKIVYPICCGMDVHKSFVVACIASTNDHGVTTYKSKRFSTFTGDLRRCAAWLAESDCKDVCMESTGKYWIPIYNILEPTCNIVLAHPKYVKAIRGKKTDKRDAKWIADIFKHDLVSGSFIPPADIRQLRDLVRYRWKLTNFTTGEKNRAQNCLTVSNIKLDDVFSDVFGKAASAITTRLLEHPTEKITDVSGFRTRGMKATDEEVLAAVDGEMCAEQAEKLRIIRSHMDSLEMCKANLDSLILTTAEKYLPQLNLVMTVPGIQSFAAIGIISEIGVDMSVFPTSKHLCSWAGLTPQNNESAGKKKTTRISRAGAYIKPLLVQCALCAIRTKSNPEIRTRYLALKKRRGHKKAIIAIARMLLTAIYNILKKNEPYNAELYRCCNTPPEHRAVSVEEAIFILQRQGYLVTPSAT

SEQ ID NO: 278976 - protein, 459 aa, unidentified
MNTIGLDLAVEAVHKAVVIDEQGRFITPVFTLRTRPSDLEQLLARARHRDQSAALQVVMEPTGMAWFPIAVYLVRHEVTVYLVNSQEVADLRRYYRRHAKSDRIDARVLARLPLVNPEKLHRLHLPSATTLACQRSCKQLDRLSTLLTATQNRVQAIDRFAWPGLEEQVFADPFAPAARWMRAHWYDPQRVLAAGAATIREQWEGSSEATDSAGAWCEALVALAAEVVALYGSENQYLDFAQLQAEVCREQAWLATFEQQHQTLRKQTVRPLYRQVHPSRNLETLKGVGQDSAAVYASFIGDTKRFSSSRLFRGWSGMVPESAQSGDTEAKGLQMSQAGPDLVKKYAYLDAEVARRWDPQIAAIYYDQMVHKGKHHKQAVCACATHLLDRVFAVLREDQPYQLRGVDGTPVTVEQAQRLIAERYCVSPEVRRRTTKHQRKERAERQAERNGKGKVAEAW

SEQ ID NO: 278977 - protein, 428 aa, unidentified
MNYNTQNAKIASITEKTLIVGIDVGSETHYARAFDWRNYEYTKKPLEFSNTEAGFLTFKAWMEDLAEKHGKNVVIPGMEPTGHYWFALGKFLQDNGMKPVHVNPHHVKKSKELDDNSPSKNDRKDPKTIAALVNEGRFSYPYIPTGIYAEIRSLSNLRFQTQEELTRIKNRIARWFSIYFPEYKDVYGDVKAVSGRKVLQIAPLPEDIKKLGAEGVNQIWRDAKLRGAGMKRAKTLVSAAEHSVGSKEAPEAARIELRHLLNDLDVYATRLDELLHRIEAILEEIPYVDKLMEIKGIGLITVSGFLAEVGDIKRFDNPKQLQRLAGYAIVADQSGKHNGESRISYRGRKRLRYVLYEAAISVVGKNAEFREIHEYYRTRKKNPLKKMQSVVAVACKIIRIFYAILTKGIAYNAEKVRSDIKRPEIQAA

SEQ ID NO: 278978 - protein, 319 aa, unidentified
MRFYKNQHQFYIGIDLHARTMYICVINNIGETVFHKNMECSRDNLELVTNTFGKDIVVGVECIFTWYWVADFCAENGIDFALGHAYYMKSIHGGKTKSDKIDSEKISNLLRGGMFPIAYAYPKEKRAVRDLLRRRLFFVRQRAELSVHLQNTNHQYNINEPLTSSRMRSEVYRNTIPQKFTDPATLKMVNADLAMFQAYHDIITKLEFQIEDSMEVQDPVSYSIINSVPGLGFILSLTILYEIDDIHRFSDVGKFISYCRLVKCSHESAGKKEKGGHNKIGNVHLKWAFSEGAVLFLRNNERGQRWHDKLVQRYCHCRC

SEQ ID NO: 278979 - protein, 338 aa, unidentified
MAILYVGIDLAKNVFAVHGVDEHGKPALVWPKVTRDKLHERVAALPPCTIGMEACSGAHHWARLFGDLGHTVRLMAPKFVAPYRLSGRRGKNDAADAAAICEAVQRPNMRFVPVKSVDPQARLTLHRTRQGFVEQRTATLNRIRGLLSEFGVVLPLKAATVRREAAAGLEALPGWARLAIGDLLDEVRRLDERVVEYDRHLAHLAREDERARRLMRLSGVGETTATALLATVGNGHDFRCGRQFAAWLGLVPGQYSSGGKTRLGRITKTGDPYLRTLLILGARAVLALAKTKTDSISRWAAVLEQRRGYWKAVVAIAAKNARLAWAVLAKGEAFKMPA

SEQ ID NO: 278980 - protein, 408 aa, unidentified
MIYCGIDWAENHHDVALIDNTGQLLAKRRITDDAAGYRLLLDLLVDHGDNEDSPIPIAIETSRGLLVAALRQGRRNVFAINPLAASRYRDRHSVSRKKSDPGDALVLANILRTDMPMHRPLPDDSEQSRAIAVLARAQQDAIWNRQQIANQLRSLLREYYPAALDAFSGLKHSLCRAEARTLLALAPTSRKSAMLSRPQLRAALKRAGRSRGIEDEVDRLHGVFRADYPHQPQLIEDAFGKQMLALLRQLDAACVAADELEEAAEQSFRQHPDAEILLSFPGLGVQIAARVLAEIGDDRKRFIDARALKAYAGSSPVTRASGKKEQISRRWVKNDRLNHAGYLWAFSAFRHSPGAEAHYRHRRLQGDWHAAAQRHLFNRMIGQLYHCLQKGQLFEERVAFPPALPAVA

SEQ ID NO: 278981 - protein, 389 aa, unidentified
MRFAGVDIASLTHVIAIMTEIGKVLVKPTSFGEDAAGYEKAFALLGPSTDVLVVMEATGHYGRNFMAALWVRGYQLALINPIRTRLFAHEDLRRAKNDPIDALGLARFGIQKGPLLPTPPFDEATDQLREFVYLLERLTQDFGDRVRQLHRLIDLGFPEFTRHVPNPSAQRATAILAAYPSAQAFSDSCLRELATLRYDGSHHVGEPLASALVETAKASVGRHHGPAYHLETRYICQDIDRLRSELRQIQQEIERRLAENPVAVLLATIDGLGAIAIGRIIAAVGDPARFRSGAALASYVGAVPGTDRSGKGHRRSDPLCPLGNARLRRTLFMTTLGAVRRNPWLGAYYARLRARGKPPKLALLAAMRKLLMAIYSVAKHRKPFVPQLP

SEQ ID NO: 278982 - protein, 344 aa, unidentified
MDHFAGLDVSVKETSVCIVDDTGRIVKEVKVASEPEALLKVLGNPIYRFKRIGLEAGPLSQWLFSGLAEAGLPVVCVETRHMQAVLKAQINKTDRNDARGIAQMMRVGLYRSVHVKTLRSQKLRMLLTHRKLLQSKAIDIENDLRGTLRNFGLKVGIAGMVRFEARIHELVENQPDLAVLVEPLLIVRRALREQIVILHRRLLAIVREDEVCRRLMTIPGVGPVVSLTYRATVDVPARFRKSKAVGAVFGLTCSRYQSGEVDWSGRISRCGDEMMRVMLYEAAQSMMHSKKWSWLKAWAMQIARRRGMKKAIVALARRLAVIMHRIWVDGTEFRWTREQAAAAA

SEQ ID NO: 278983 - protein, 345 aa, unidentified
MELHTIGIDLGKTVFHLVGVNLRGEVVVRKKFSRKQLLHFTANLRVKLIGMEACGGAHFLGRALQEQGHEVRLMPAQYVKPYVKTNKSDYIDAEAIAEAVGRPRMRFVPIKSDDQLDLQSLHRVRERWVARRTAVINQIRGLLLERGITLRKGRCHVDAALPGILEDASAKLSGALRVLLAQLRLELAHLETRINEADAVINKTAGENEACRGLVAIPGIGPVTATAIVAAIGNGAAFRKGREFAAWLGVVPREYSTGGKQKLLGISKRGNSYLRRLFVQGARAVLQQSAKQSSGLSAWLAQLTSRTHRNVAGVALANKLARLAWAVLAKNEKYRPPMLAGAATA

SEQ ID NO: 278984 - protein, 399 aa, unidentified
MATTTKTAARSTATRYIGIDVHCEFCEGGVIDSLGRESSQFHVATSIPTLLEVVEKVRRPRTVVIEEGPLADWLYRHLSPHVDQMIVCDPYRNALIAKEGEKSDPIDWRKLAHLCRGGDVKAVHQRQSLERSLLKQHVQVYHDRVRHRVSEANKILWRVRRLGVFVTEADLKDDARRQAMLERLPGGPRENERRKDGNGKGIADGKGKDNGNSKDTGNSKDTGGEGSSVIRQDVELLLKGYDLAAEQVTQLRRRLVALGKQEPVIRAFCELPGVSWVRAVSFFVMVDTPFRFASKQKLWKYAGIGLERRQSGNGPVRLSVPRRCNRVLKNVLLGAAKSAAASKDNVFADQYQRWLDAKCSPRIARRNLARSLATTMWGMWKSGSVFDPTMIGCSPAVIA

SEQ ID NO: 278985 - protein, 346 aa, unidentified
MRILALDLGKYKTVACDYEAESGRHRFATVLTTPKALHDLIVDREPQRVVIEICSIAGWVGDLVRSLGIELQVANTSDERWQWRKVKQKNDRRDALKAAQLSAVNQLCPVHVPELTMRQWRALIAYRSKLVQRRTKVKNHIRDLLLREGQLLPRGRTAWTQAGMATLAAMTQPFADVDSDQLWRGELSIELAQLQELQHQISAVETKLDELAAADGRVALLRTIPGVGPRLAEAIVTMFDDVTRFATAGQVGAYIGMVPKQFDSGETARSGRITRHGNRLVRSLLVEIAWASLRHNPWARQTFQRISGGKKSRRKIAIVAVGRKLLVRCWGMLRHQTPWHWQSGVA

SEQ ID NO: 278986 - protein, 339 aa, unidentified
MNEITTIGLDLAKHVFQVHGVDASGAPVVRKRLRRSEVVAFFARLPGCLIGLEACATAHYWARLRAVGHEVRLMPAQYVKAYVKRNKNDAADAEAICEAVRRPTMRFVPIKTAEQQAALLVHRGRERLVRQRTALVNALRAHLAEFGVIAPLGLRNVARLIAVIRDESDARLPDLARKVLRVLAEQVEQLEAAVAALEKQLMAWHKSNPVSQRLATIPGIGPIIATALAATVVEASGFRSGREFAAWLGLVPRQHSTGGKARLGGISKRGNRYLRRLLINGASANLLRSKATNADPWVIGLRRRRPSLVVAVALANKTARIAWAVMHRQENYQRMAAAA

SEQ ID NO: 278987 - protein, 450 aa, unidentified
MKKDSIQTNSTNATPPAPLPPIVCWVGLDWADQKHCLVVRTRPAGPSKTHRLDQKPEKLEEFFLGLRAQNPQGRIAVAIEQSRGAVLYALMKYDFLALYPVNPRTLADYRRAFKLSGAKDDPLDADLLCELVCQHSDRLRCLVVEDASTRKLRLLTEARRSFVDERTGLSNQLGATLKCYFPLALELAGEDLTTTMVLELLRRWPNLAKLQAAKPGVLRAFFYQHNSRSEDKISARLQAIEQARPLTEDPALLEPLQLQMQRLVAHLRIVQQTIDQYDERISQVFATHSQAWLFAPLPGAGPVLAPRLAAVFGTIQSNFQAALDLLCFSGVAPVRKQSGNQEVVHFRYARPIFLHQSLVEFAKCSIGQCAWARLLYEHELKQGKSKWMAIRKLAFKWIRILWRCWTAGQPYDETKYLRSLQRDGVQLYRSLYEALPPLPTPIVNNSQKHV

SEQ ID NO: 278988 - protein, 420 aa, unidentified
MKRMTPILPSANPLVSGRLVAGIDTHKNTHHVAVVDHLGRPIADSQFPATGRGYQQVINFFHAHGHIDRVGVEGTGSYGAGIARELTVAGFTVVEIIRQNRQARRLRGKSDPIDAHQAALALLSGADTIPKTADGQVESLRILITERRSAAKAKSQTMNQIHALLVTAPEPVRDTYRALGSTKIVKTLARTRPTGSGFDPNLVTRQTLKRLAVRYLILQDEIDEIEKQLDPLVRAVNPTLLSLSGIGLVTAAALLVAAGDNPERLATRATFAALAGVAPQPASSGQRTRHRLSRGGNRQANAALHRILLLRRRHQEPRTMAYFARRRAEGLTDRDIMRCLKRHVANEVYAALLNPATENPAGRQLRTERQRIGIPITVLAASLGVPYQQLRRLEIGTRADPELEQRATLALARVDHTEAV

SEQ ID NO: 278989 - protein, 412 aa, unidentified
MRVLYPTCAGMDVHKKDIKVCLVTRDNQEQRQEDVRSFRTMTRDILAMRAWLQAHGCTIIAMESTGVYWKPIFNLLEGDFTVLLVNPAHIKQVPGRKTDVKDCRWIAELLEHGLLRGSFIPPIEIRDLRDLTRYRRQLVNTHSAEVNRLQKVLEDANIKLASVATDVMGVSGRAILRALLAGVVSPEALAELAKGRLRKKKPDLQAALQGRFRPHHTQLLTHILAHIEFLEESIAACEAQIEARCRPVAEVITLLDTIPGVSQRTAQDLIAETGVDMAWFPSAKHLCSWAKVSPGNNESAGKRKSGRTGKGNKWLRAVLVECAHAAGHTKGTYRGTKFRRFASRKGKKRAAVMVAHRILEAAYFILRDKVPYRELGDQYLDTHHREHIIRHHVRRLESLGLHIDIRELPLTA

SEQ ID NO: 278990 - protein, 428 aa, unidentified
MADQMQDIVPKTWVAIDIAKRSHVVLVEFSDGTRRHYRVQRGLADIDRFVAFLHAQDAPIRVGFEPTSNYHRTLAYRLNREGFELRMISSVASARYRDAMFNSWDKNDPKDAAVILALMKQGLTQYYYDPLEAGVHDIQEISKTHHQIVLSRMRIQHSLLTHYLPLYFPEMDRYWHSTRADWFVRFLLRFPVPGSICALTEKAFVKQAWGVVGRKVGKQSILEELYQLAHRSVALPIAEGTPAVEMFRVQLRRYLDLSEERSRMEQLAHALLGDDADYVRLRTVPGIGPILALTILAEAGDLRRFAHHRQFLKYCGLDLAKSQSGATRGLNRLSKRGNARLRCGFWFAGRVAVRMRENSFRAKYERYIRTDPKNPDRKRKALTAVAAKMARVAYAVVKHGQSYRPYHEHDFPGGVIPFNRAMEAVGTS

SEQ ID NO: 278991 - protein, 324 aa, unidentified
MMSTVKAEKIFVGVDVSKFTLDVFQPDTGELLKLDNTEISVEEFCRSLKKKKRPVMVVMEATGGYETLLLNQLAKHKIEAAVVNPKRVRDFARGVGSDAKTDPIDAQVISQYASVVNPQPIAMKSDQDQKHVALVARRNQLLELINQENNRLKQSWDDDAKKSIREVLEMLKNQLKSIDSQLASMLEKDTKNQRKIEILRSAKGVGSVTISTVIVGLPEIGLLNRGEIAKLVGIAPLNRDSGKKSGKRFISGGRGHVRRVLYMATLAAIRHNPTIKAFYLHLKSKGKESKVAIVACMRKFLTILNLLIKQNEVWINEKSISAKS

SEQ ID NO: 278992 - protein, 385 aa, unidentified
MKKNSEQAVVATIGVDLGDKQSRVCVLDEAGDIVEEGSFSTSASALTRKFERLERHRIVIETGTHANWVHDLLVSFGHQVVVANARKVRAISANERKCDELDARMLAQLGRSDTRLLRPVKVRPAQVRQDMMLIRARELLVKSRTQMVNSARGLAKSAGERLPCCSTNSLHKKDLGRLEFELRPIFDALEKLDDQIEAYDKKIKEVTAKNYPQAALVRQVAGVGPITSLYFVQALGDVRRFKDGRAVGAYFGLIPRRDQSGSRDPKLSITKCGDELGRRLLVQCTHYILGPYGPDTDLRRFGLKLAAKGNKKRAVVATARKLAVLLFALLKKSEVYEPLRNSPKSPCTAKAVPDGKPPISRPPRTQPSLKCVADGRSAPHAPTTK

SEQ ID NO: 278993 - protein, 402 aa, unidentified
MRYFVGLDWAKLTHAVCVIAEDGAIVLRLAVDHTAEGLARLVTALRRFGDPTDLGIAIERPSGLLVDTLVEAGFVVYPIHPNVVKASRPRYSAALGKSDPGDAYLLADLLRTDGHRFRALCSLSDETRALRALVRARTDLVSTRVGLANQLRALLESFWAGAVAIFGEVDSPITLAFLLEYPTPASAARLGPKRLAAFLSAEGYSGRRSPDELLQRLRAAPSAKLGPAEMEAKGTLVGSYATLLDTTVQQIRQLTSAIERAALAHSDATVFTSFPRIGKLNAAQILAELGAHDRFLSEQQLAGEAGVAPVTRMSGKHRAVVFRWACNHRLRAALTWWADNSRRASPWAQAVYLSARQRGCDHPHAIRILTRAWLRVLWRCWKDAKPYDPTQHRAATALTQPA

SEQ ID NO: 278994 - protein, 364 aa, unidentified
MFSERTSVGLDVHARSVAAAAIDGVTGELFQARLTPSFEQVRAWCAGLPGPVAVAYEAGPTGFGLFRALTAAGIRCEVVAPSKLQRPSGDRVKTDARDAVHLARLLRLDEVTSVAVPTLAQEAARDLVRAREDARGDLMRARHRLSKLLLRHGIVYDGGNAWTGKHDDWLRRQARGQLAGGGTGLAFDADYDAVLATLARRNRLDQAIAELAADSEFTLLVRRLGALRGIGPLTGFALAVEIGDWHRFTGATIGSFIGLTPSEFSSGASRAQGPITKTGNTHVRRLLVEAAWHHRGRYVAGKTMRDRWDLTTPAARARGEEGNRRLHQRWVTFTERRKRPVVANVAIARELAGWCWSLAVLEDN

SEQ ID NO: 278995 - protein, 457 aa, unidentified
MQNTKNYYLGIDVSKGYADFVILDAQKQPVEENFQLDDTFEGHALLYEKLSQFFKDHPQSIIYAAVESTGGYENNWFNSLRKFQATLNIRIARLNPLGVSANSKAGLKQNLTDKISAQNIAEYLIAHPEKVSYQQQDPFLSLRKQWNFVKMLTKQSTQLLNQLQFLLYTAFPEILVYCKWGIPEWVLNLLKRYPTAPNLAKAKAKTIAQIPYISRERAKELIASAQKSVASATDTVTQELIVSMVKQILQLKKVIQLQTKVMEKACCFPEVKLLKTFPGISNYSALGLMLEIQTLERFPSVKKLASFFGLHPVYKISGDGVGAFRMSKQGRKEPRCILFMVTITAIAHNPYLRSIYNRYLQRGMEKMVAIGICMHKILRIIYGMLKHNQPFDLEIDRKNVEKSFTVKFRVQRDKSRRLQAYDPRAPISRRQTKKREERRKSQGDQVAVSGIIAPVPL

SEQ ID NO: 278996 - protein, 318 aa, unidentified
MPQGTCVVGLDVAKSKVDACIRSEGLRLSTPSTAEGEAKLLAWLRANRVGRAVMEASGGYERRWAEALRAAGVEVRIVDPKRIRHFAKAAGRLAKNDPIDAETIAWFAEAFPDADPQPHDAAREELDRLVQARTALKDEEDRIKQQREHRPPPIVAQALAAVAKAIRAERRKLEAAIAARIKANPTFARRAEIIDSVPGLGDQTVAGVIAWLPELGHVANEAAAALLGAAPYDDDSGSRKGQRHIRGGRRKLRNLLYMPVMGAATRHNPVLKAYYQRLRARGKEAKVALIACMRKLIVILNTMLARDETWNPPARAAA

SEQ ID NO: 278997 - protein, 349 aa, unidentified
MNATIVAVDLAKSIFEIAAADADWRVAQRSRLPRSKFFGFFVQLQPCQVVMEACGSAHYWARRISALGHTVRLLPAHYVKAYVRRNKTDRADAAALLEAARCADIREVPVKTIEAQQIQSLHRLRSQWMSTRQRYVNTLRGILREFGFAIPLGVNVAKDRIGTALADPHSEVPTALRATLAEMLQEIRLLEQKILGIEHQLNALTRDDLRVQQLRQIPGIGALTSTALRAIVGDIRRFPSGRHFASWLGLTPNERSSAEKRRLGKISKQGDVYLRTLIVHGARSALLGAHRAERSGHALDHLRRWALDRERQRGHNKATVALANRLARIVWATWKHERSFNGNWSAMAS

SEQ ID NO: 278998 - protein, 346 aa, unidentified
MKYYAGIDVSLESANVCVVNEQGLIVREGKVASEPEALIGWLSKLGARIVLIGLEAGPLSQWLHAGLSQAGLVVELLETRHVRAAFKTMAVKTDRKDARGIAQLMRLGWYRPVHCKSLPAQEMRALLVARKLLQKQLHATEMSVRGILRNFGAKVGQTTARSFAGRVRSLVEGQPTLQAVADALLAARTTLADELARLEKRVRSAARHDDRVKLMMTAPGVGSIVGLTYVAAIDVPERFRSSSSLGSHFGMTPRRYQSGQIDVSGRISKIGDGSVRSALYEAAHIILTKPVKGAGALKRWALAIVKRAGKKKAKVALARKLAVILHRMWMDWTPFDPTKAVGAAAA

SEQ ID NO: 278999 - protein, 388 aa, unidentified
MGAVVIGMDPHKRSATIEVMTGNESIVGGGRFATDAEGYRAMLNYAKQFPERTWAIEGCNGIGRHLAMRLLADGEQVVDVPPKLSARARVFATGQGRKTDATDAHSVALVGTRMAGLRPVVNDKQLTVLRVLADRRRALGEEHNRLIARLHHLLLELIPGGAKLHLSHMQARALLAKVRPRDAAGKAIRRVASELIGDLERNHERTKAADKELKQLLAETGSTLMQLRGIGPYNAARLLVEVGDVTRFPSKAHFASWTGTAPIDASSGDHVRHRLSRAGNRQINHVLHIMAVVQLRNQTEGRAYFDRKKNTGKTSMEAMRCLKRRLSDIVYRQLLTDMLTPAGTGPGGHSGTALTSSVADSHPDIDSSDKPLPGPVTTKPRTASLAAS

SEQ ID NO: 279000 - protein, 312 aa, unidentified
MEKLSYGGIDVSKDRLDVVVLPEGWFFSVSNDTAGWAELVARLHPLAVSAIGLEPSGGYERGIIRALLAAGLSVRRINPNKLRQFARARGVLAKNDRLDARLIAEYVAIMPTRAVQRDDAVDRLAEVVTMRRQLCDEHVTVENQTAHLEDAMLRRLSKRRLVRLEADIRLLDKRLAEMVATNAAFAQPYELLTSMPGVGPVLAFTLIALLPELGKMSRKQIAALVGLAPYDFDSGKLRGHRSIYGGRMPIRNVLYMAALSASRYNPALKTFSNRLAHANKKSKVIIVAVMRKMITTLNAMLRDNAAWQPQSN

SEQ ID NO: 279001 - protein, 385 aa, unidentified
MKQPCITVDVSKGKSFYQGFISIDEQISKAKPIEHNLTGFMEIIDLKKTIEEKSGQTPIVVFESTGVYHKGLQQFLENNKLEYIIMSPLASAKIRKASIRSTKTDARDCRSIAKAYYLGDFEVYTKESDLYRTLKESHRHYQFLINEQVRWKIEFRRLLDILYPNIDKQFPNMYTDIPMYILENYHHPDDLKNIKAESLAKDLSKVVNRRNDYCLNEASKIKSYLDTCVPGCTRNDFECISFARSVHMLKEIIELAKGCMEDLLTLAKKTPYFQLLKSIPGIGDKLAVIMIAEIGDIMNFSNADKLVAFAGIDPRVYQSGKNTGEHLSITKKGNKRLRTALYLACQVACQKKMKPNRIKDFYKKKSSRIVHYPLKLLILHVQINY

SEQ ID NO: 279002 - protein, 355 aa, unidentified
MVTIGVDAHKRVHVGIALDDAGQEIGHWRGPNSVVGWESLLGWVSAFGESRAWGIEGAWNYGRGLAQHLVEQGETVYEVNARWTAAGRRRARTPGKTDRLDARAVARCVRQEAPHLPSVGADDATAVLDLLTSQRETVLTETTRLRNQLHALLLQLDPEYRDRLPSMDSSTGLEALERYQAAPGSTVLQQERAAAARRLTQRLRIASQQADELKAQIETRTEEAGLLPLIAIHGVGLLIAGTLAGILGPGCRFRSDAEFAAYAGVAPLEASSAGYVRHRLNRGGNRRLNSLLHMVALTQLSSWKPAKDYVKRRITEGKTKREAMRALKRFLARAVWQAWKRCLAISNGKGNAQPA

SEQ ID NO: 279003 - protein, 402 aa, unidentified
MAYDCVIGMDVGKYFHHACVLDPQSRQVLSKRINQHEGSLRKLFGKFLANDAEVLVIVDQPNNIGRLTVAVAQAMGADVRYLPGLAMRQLSRIHVGNSKTDVRDAYVIAHAGLNLPDALRSVDRVEDVFLQLKVLNGIDEDLARAYTRLINQMRSALVGTHPAFEHVLHGQMIHRKWILHLLAKYGGPTKIRRVGKARLAAFARSHRARNPEPVIDAMLAAIHSQTVTIAGAEYAELGVAMSAKDALAKLEHRKEIEAQVLELIQDIPQTEILLSMPGVGPRSAAQILMTVGDMSDFPDAAHLASYAGLSPRTNQSGTSIMSNSPNRAGNKKLKNALWQSSFASIRFHERSRQFYERKRKEGKRHNAAVVALARRRLNVLFAMMRSGELYRDISTVQEAAAA

SEQ ID NO: 279004 - protein, 390 aa, unidentified
MEARTVNNLPPAASHDDDAVRCVLAIELSKKSWIVAVNTPLSDKISRLTLKPCDGKELLDLCERIRTRVARETKQRVEIVSCYEAGYDGFWLHRLLEAHGIRNYVIDPASLQVDRRARRAKTDRVDAERLLRSLMAYLRGEPKVWSVVRVPSVAEEDDRRLHRERGRLINERIQHVNRIKGLLAIHGIYDYQPLRRDRMQPLDRLRTADGRTLPPRLKAEILRELQRLELVIGMIKAIEAERDAIASAKAQTEHTSAKKIQGLAKIKCIGPEFASTLVGEVFYRSFDNRKQLASYVGLTPAHFQSGATCHDQGISKAGNAKARTVMIELAWLWLRHQPDSPLSVWFRDRVGKLKGRIRRITVVAVARKLLIALWRYLETGLVPEGAALKV

SEQ ID NO: 279005 - protein, 341 aa, unidentified
MQIAVLGIDLGKNSCSIAGLDASGRVVLRRRMHRESVIKLASRLPVCVMAMEACCGAHHLGRALQAHGHAVRLMSPEYVQPYVKAQKNDERDAEAIAEAATRPTMRFVELKSETQLDMQSLHRARSRLVGERTALINQLRAALLERGITVPQGRRRLERFLELVLDREDAPPLLGPRIRLLIDDMRAQWRELDRRIAAFDAEFVAAARSDVTARRLSTIPGIGTLSATALVAAVGNARSFARARDLAAWLGLVPRQATTGGRPRLLGITKRGNKYLRTLLIHGARAALPALSTTEGSLGNWLRGLCARAHRNTVVVALASKLARIAWSVLRSAATYNAAMA

SEQ ID NO: 279006 - protein, 420 aa, unidentified
MTVDLERGYKRREFCGPKQYLNLLLRSVLMIYIGIDVAKDKHDCFITNSDGEVLFPVFTIQNNRNGFDDLFSKIQSISSDVFNIKVGLEATGHYSYNLLGYLIDKGLPTFVINPLHTNLYRKSLSLRKTKTDKVDARTIAMMLMSDVNLKSYSDTSYHNEELKSLTRYRFDKVQERAQLKQSVSRLVTILFPELEKLVPSLHLASVYALLSELPSAREIASCHLTHLTKLLENASKGRYSRERAIEIREAARVSIGSNMPAKSLELRHTLRLIGELDSEITEIESEIKRIMDQIPSPILTIPGIGYRMGAMILAEIGDFSRFDSPDKILAYAGASPSTYQSGQMESSYSHMEKRGSRYLRYALINAAKYVCHWDETFGAYLQKKISEGKHYNVAITHATKKLVRLIYAMEKSGKPYIKMA

SEQ ID NO: 279007 - protein, 355 aa, unidentified
MTHATALPVMLTSGLDLGDRTTHRCTLDSERRVTSRGRFTTTRESLQREFGGIARQRVVIEAGSQSLWVSHLLRELGHEVLVVDPRRVQKLVAGNRKTDRRDAESLARLALGVPELLGAAHHRSFEAQADLSMLRSRDILVRMRTKLVCHVRGILKAFGIKLASSSAASFHRRAIEQIPANLQPALHPVLAALGDLERRIGELDDALQLAATARHPEVKVLRQVPGVGPVVAMAFALTVGDPQRFRRSRDVGAWVGLTPDKRSSGDSDPQLSIHRRGDGYLRRLLVVASHYILGPFGKDSDLRRYGLRLCERGGGNGKKRAVCAVARKLAVLLHRLWVSGAPYEPLRNSNKVEVA

SEQ ID NO: 279008 - protein, 317 aa, unidentified
MAKSSMVCAGIDTGKRKLDVALHGRAERLQVDNAGDGHTRLLRWLRQHRVKRVGIEASGGYEAGVVAWLRGNRFVVIVLQPGQVRAYAKFVLQRAKNDRIDAALIAECTALTSTIHAPPDLRLAPFAEHLTMIEQLRADIACDKTRRESCRDPRRRRYWNEEIARLKAVLRSELKALVAAIGQHADLAERLALLTSIDGIGLPTAVAILVRMPEIGRVTREEAAALAGLAPYDDDSGDRVGGRHIAGGRERLRKSLYSAALAAAFHWNDQLKALYKRLIGAGKPHKLALIACARKLLIYANTVVQRGAPWLANPAAA

SEQ ID NO: 279009 - protein, 339 aa, unidentified
MSVKTVGLDLAKDVFQDHGISENGRVIFNKAIKRAKLLAFFENLPPCIVGMEACGSSHHWGRTWRKLGHDVRLMPANYVKPYVKRGKTDAVDAEAICEAVRRPTMRFVEIKTENQQAVLSIHRTRDLAVRQRTQMANMIRSLLREFGHILPLGVEAVTAFSKRHLDGDQPDMPDIANGMLEMQCYQFIGLSERIAGYTKMIEQHALLSTDARRLMGMPGIGPITASAIVATIGDAHQFRTGRDLAAWLGLTPLNKSSGGKERLGKITKKGDRYIRKLLVVGMTSRAVMAKRSPEKVDLRTAKIIADKPFRLATTAMANKAARIIWAMLTKKQEYRQPTF

SEQ ID NO: 279010 - protein, 338 aa, unidentified
MYYSGIDQHKLFSYITTVDSDGKIVKEAKLINNSFEIVNYFNSLGKDHSATVETTGGWYWMNDLLSSIGNDLKLAHAKYLKAISYAKVKTDKVDSNILAQLLRLDFIPEAYKIPDDIRTLRDTLRARLRLSVKRTSCLNFMHRMLEKFNISDPALLNNFYKLQFQQFEIQSKLLKEQMLTLEKSLYPSLIPNEDIQRLLWIPGIGKMNAFTILLEVGDINRFHSDKNFFSYCRLVPSARNSAGKMKQRSSKDGNRYLKIVFSDAAVHALQYYPVIKRYHSSKLRKKKKQVAKAIISKEIARIVYHVLKDKTNFNNQFKGQELQHKKYVQWPRITSPDV

SEQ ID NO: 279011 - protein, 349 aa, unidentified
MIHVGVDLHQRFCYMTALDSRGRQLNAQAVANDAAALQAYFRQFRKPVRAAVEACSFWPAFRAAVGEQVELRMVHPMRVKAIAAAKLKNDRIDSATLAHLLRCDLLPEAWMADETTRELRQQVRLRATLVRQRTRLKNQVHAILHQHGLKAGGGTDLFGKAGRVWLRQARVGQKAQDALSIYLKLIDEFTVHVEQQDRGVKHFVNGDQRAQWLMTIPGIGQYSAMLLLAEIGDIQRFAHPRALSNYAGLVPWLRESADKRRSGGITRVGSPWLRWIMVEAAQVAVRTSPAVRCYFERLCRRKHRNVAVVAVARKLLVVAWALLQHGECFDESTFVRDCGKDGAARLGKR

SEQ ID NO: 279012 - protein, 355 aa, unidentified
MDNTKYIGMDVHTETIFIAVLNSTGKLVMESVIETKALTIIQFVQGLRGDLHVTLEEGTWAAWLYDLLRPHVSEVLVCDPRQNAFLKVGNKSDRIDARKLAELLRSNLLRPVYHGEHGVRTLKELSRSYLAISGDLARVMTRLKAVYRSWAIPCAGKQIYAPRYRAEWLGKLSEAGVRRRAEIYYEQFDALRSLRQQVRRELLAESAKHKASKLLCQIPSIGPIRAAQLIAILQTPYRFRGKRQLWAYGGLAIETHSSADHRYVDGQLRAAKKQVSLRGLNRNHNHELKNIFKGAAIIAATKPGPLQEFYAALVAKGMRPEMARLTLARKIAAIILIVWKKGVSFDAQHLKPQTA

SEQ ID NO: 279013 - protein, 347 aa, unidentified
MNFYKLPHKYYCGVDLHSRTMYLCIVGRDGAVLLHRGLPCDAARFLLAIAAFREDLVVAVECVYSWYWLADLCAREGISFVLGHALYMKAIHGAKAKSDRIDSEKIAVLLRGGLMPVAYAYPADMRATRDLMRRRLLFVRQRGSLLAHIQITHHQYNVDPPGRRITYRSNREGLGEGFADPSVRHTIAADLALADHYEVIIGELELAVLRQARVHDPSAFVLLSSVPGIGKVLALTILYEIHDISRFPSVRDFASYSRLVKCEHSSAGKSLGSGGNKIGNAHLKWAFSEAAVLFIAKSEQGRTVLKRLERKYGKPKALSVLAHKLGRAVYYMLARKQAFDPQRFLAA

SEQ ID NO: 279014 - protein, 457 aa, unidentified
MLPFSSAGSHQRFSDRILIREVVDAPVSRVSESLLVQNTDRLEEVIKLKPLYVGIDVSKRNNVVYLMKSDGSKHSSFAVQNNLGGAKQMVEKIVFAMKTMQLSDVVIGMEATSVYGENLMCFLREDGRIGQFNRKLHLLNPKQVKKFKDAYSDLPKTDLVDSFVIADNLRFGRITAEVYMDDYRYRALQNLTRARFHAVSSLTKEKNRFLNYLFMKCSGLAQEKVFSDACSATAIAVAETFETVDELAYMSLDELTDFIAKSGRGRFEDPERVAKAVQVAAKGSYRLPKTVNDSINQVLSISIATMRTLEAQIKAFDKAIEKHFELIPNTLTSIKGIGWVYSAGIIAELGNINRFESQASVAKYAGLVWNQKQSGDFKGEHTRMIKSGNRYLRYYLIEAANSVRRCDPEFMRYYGLKYKEVNKYQHKRALALTARKLVRLVFRLLRDNRLYITPEFH

SEQ ID NO: 279015 - protein, 410 aa, unidentified
MDLLVDRVAGLDVGKDEVVAAVRIPDGSGGRRQEIRTYRTFTPVLEEMAAWLTAEGVAEVVMEATGQYWLPVWYVLEDAGFDLKLVNARHVKILPGRKTDVADAAWLAELLEHGLLRGSFVPPHEIRELRDLTRYRKRLIQDHTREAQRVQKTLESGGIKLDSVASDVLGVSGRAMLRALLDGERDPEVLAGLAKGVLRKKIPDLRLALQGRFNDHHALLIRLALDHLEHLETAIAALDAEVDRVMAPFVVARDLLDTIPGVAKRAAEVIIAEIGVDMSRFPTPGHLASWAGMCPGNNVTGGKRHSGKTNKGDRWLGETLNQCAWAASHTRDTYLSAQFWRLARRIGKKKAAVAVGHSILVIAWQLMTNGCVYEDLGGDYFVTKDADRARQRAINQLQNLGYRVNLEPAA

SEQ ID NO: 279016 - protein, 345 aa, unidentified
MARDGLVIGVDTHKDVHVAVVLDRLGRRLAVREFPASDSGNAQLAAWLAGLGPATDAGAEGTGSYGYRLARLLAGHGLQVWEINCPNRSRRRRKGKSDPVDAENAARAVLAGEATAIPKDRTGFVGELRLLVRTRRSAVKARTQASNQIKAFLVEADDELRARLHGLRKARFGRTCAALEPTDALRRALATLGRRWLALDTEARELEQLIAALITAHAPQLLARHGVGAVTAAQLLVTAGANPDRLRGDAALAALCGASPMQASSGKTSRHRLNRGGDRAANNALWVIAHLRTISDPRTRAFVAKRTATGNSRREIMRMLQRYLARELYPLIIDALRTAATIELT

SEQ ID NO: 279017 - protein, 320 aa, unidentified
MDQTEYVGVDVAKDKFDVATFINNRYKHSVYPNDAKGHAEFAAWLTQNSTSPWVCMEATGHYSEGIADFLLKKSIKVSVVNPYQIKNFAKASLARNKNDIIDGRVIREFCKCMQPRVYVTTSEAQKQLKGLMKLLDMLKGQLVQLNNQLHSLHEGMATNLLIKWIKNLEKEVSLVEQKMTALINEEPMLNRNMRLITSIKGIGKLTAFRVLALMPDVSSFQTAKQFAAYIGITPKQHQSGKLFGKTTISRLGDSRLRKALYMAALVAKRHNKGLAAFVTRLQNNGKTPKTIVCSVMRKLAHIIFGVLKSKLPFNENLSCI

SEQ ID NO: 279018 - protein, 359 aa, unidentified
MMDDTEIATRRVIGGVDTHKDVHVAAVLDEQGRLLETTSFATNAFGYRDCYRWITSFGEVLAVGVEGTGSWGAGLCRFLRARDLNVVEVNRPNRQTRRRKGKSDTVDAEMAARAVLAGDATVTPKAGDGPVEALRQLRLARRGAIKARTAAANQMHSLTDTAPDELRAKLRGLTTLQRARLCTRFRAGDLLTPAGAAKRALRSVAARYLTLHDEIRDLDAAIRQLLNTIAKPVVDRYGFGYETVGTLLCAAGDNPERITTEAGFAALCGSNPVKVSSGKTKRHRLNRAGDRHANAALWTVVMTRLAAKHPPTVAYIERRTTEGLSKREAIRCLKRYVAREIYNDIRAIVLTPEAARTAA

SEQ ID NO: 279019 - protein, 355 aa, unidentified
MKELTKVEGLTVGLDLGDRFSQFVVLDAQGRVCAEGRLATNQAALGRYFAKRPPMRIAIETGTYSPWVSRQLAGYGHEVLVANSRKLRLIYENPSKDDKVDAQYLARLARVEPALLWPVQHREVSIQQDLALLRSRDALVAARTMLVNHVRGVGKSFGKKLPACSTACFSKVASSQIPQTLQPALSPVLEQIASLSQQIKQVNRTIQVLADDHYPQTRLLRQVIGIGPITSLAFILTLQEASRFQKSRTVGAFLGLVPGRRQSGHYDPQRRITKQGDSGLRRLLVNAAHYILGPFGPDCDLRRFGQKISARGGKLAKKKAIVAVARKLAVLLHHLWLTGEQYQPLRRQVGQTAAA

SEQ ID NO: 279020 - protein, 367 aa, unidentified
MKKVSTVAVKASRKISPSKLTVGLDLGDRCSWYCVLDEAGRVLLEQRVSTTPKALREVFGGMPGSRIALETGMHSPWVSRLVSEVGHEVIVAHARKVRLIGESRKKDDRLDAQTLARLARIDPELLCPVKHRTAKAQADLTVIRARAGLVRARTALVNTARGLAKSYGERLRGCNVRNMNPEKAEGLSPELQAALQPLLGALESLSEHITEYNERIEKLAKESYPQVALLKQVKGVGTLIGLTFLLTLEDPRRFRKSRDVGCYLGLQPGRRNSGQSEPQMHISKEGDPYLRTLLVQGAQHILGPFGMDCDLRRWGLKLAERGGKSGKKRAIIAVARKLAVLLHRLWVSGEVYEPLHNSRQSAMPAAA

SEQ ID NO: 279021 - protein, 355 aa, unidentified
MLSTKYIGLDVHRESISIAVMNSAGKLVMECVIETKANVILQFVDGLRGDLQVTFEEGTWAAWLYDLLKPRVTKVVVCDPRRNALLKEGNKSDRIDARKLAELLYLNKLQTVYHGEHGARALKELVRSYLTISKDVARVMTRVKALYRSWAIPCVGKQVYASCHRAEWLAKISEPGVRRRAEFYYQQLDALRSLRREVRRELLEESKKHKAWPLLCEIPSMGPIRAAVLMAILQTPHRFRTKRQLWTFSGLGIETHSSADHRYVDGQLRRSKKPVVIRGLNQNHNHDLKNLFKSAAIVAASKPGPFQQFYAARLAQGIRPEMARLTLARKIAAITLIIWKKGARFDAQYLKPQTA

SEQ ID NO: 279022 - protein, 347 aa, unidentified
MTTVTIGMDLGDRKHQICVLDEAAGKVAEVTIDNTATALRKYFRKYAGALVAMETGTHSPWISRLLVSLGCRVLVGNARKLRAIWKSPNKSDLRDAEMLARIARFDPQLLYPVHHRSEQAHADLERIKARDTLVRSRRSLINHVRGAAKAFGVRLPACSAESFATRVTTHLPQVIQEAMTPLLETIGHLTAQIRDYDRQVVGVSRQRYTASERLQQVSGVGPLTALAFVLTLEEPGRFDKSRSVGAYVGLTPKRDQSGQMDKQLRITKTGDRYLRQLLVTSSHYILGPFGPDSDLRRYGLRIAERGGKNAKKRAVVAVARKLSVLLHHLWKTGADYEPLHSAGSQGA

SEQ ID NO: 279023 - protein, 393 aa, unidentified
MVCVGIDVAKDKHDCFIISSEGEILADVFTIPNNAEGFDTLLQAIRRSTRPEDKIKVGLEATGHYSYNILGFLLDKGLPTYVINPLHTNLYRKSLSLRKTKTDRVDARTIAAMLMSDVDLKSYTDTAYHNEELKSLTRYRFDKVKERAKLKQSVSRLVTILFPELEKLVPTLHMASVYALLSEFPGAKQIARAHLTHLKALLNDASKGRYGRDMATELRDAARCSVGSVMPAKSLELQHTIRLIRELNTEIEDIESAIQTIMGEMQSPITTIPGIGFRMGAMILAEIGDFSRFDSPDKILAYAGMSPSTYQSGQLSLSGTYSHMEKRGSKYLRYALYNATKYVCLWDSTFEAYLAKKRAEGKHYNVALSHAAKKLVRLIYAMEKSRQPYNSVA

SEQ ID NO: 279024 - protein, 461 aa, unidentified
MRRKAKRKAKAATALPPGLESINLNAAAIDIGSTEHYVAVPPGRSAEAVRTFGSYTAALHEMALWLKECGITTIALESTGSYWIAPYQILEANGFEVVLVNSRHVKNVPGRKTDVLDCQWLQKLHTHGLLSGSFRPEDKICVLRSYLRHRENLVRAAGAHIQHMQKALIEMNLSLHHVLSDITGLSALAIIRAILAGERDPWKLAALKDNRVKKSKEEIARSLEGDYRKEHLFALSQALELYEFYQTKIAQCDCEIEAQLHKFQARIDVGEHPLPEKSKKKTLKAQDNFELKNHLYAICGADLTQIDGMEVLSVQALLSEIGLDMTRWKSEKHFTSWLNLCPPSRISGGKPLSRQPRKGHNRAADILRLCAQSALKSKSALGAFGRRLRARLDAPKAIKAVAHKLARIVYRMLKYGQQYRDAGVRYYEEKYQHHLVRRLHKQAAAFGFQLTPQQRSVTTVS

SEQ ID NO: 279025 - protein, 389 aa, unidentified
MQCFDANKSLIVLDQDSTLVAVIEMSLSGWLVAGVVPGLKRQPKKKLDPDPDALLALLQRWRNEAMKAGRQVERMTVAYEAGRDGFWLARWLNGRGIEAYVIHPSSIPVPREHRRAKTDRLDTELLMRAFLGWLRGEVKHCTMAAIPTLEEEDAKRPNREHQMLTGERTRLINRLKSALIRLGIRNFKPTLGKAAERLAELRTPEDVPLPENTLAELKRDMARLSLVKDQIKAIERDRLVRIAKAANHGPNVMVQLIAQVIGIGLETADMLVQEILSRNLRDRRAVARYGGLTGSPDESGSRRREKGLPRSGNSRVRRGMIEFAWRFLQFQSDSPLAEWYRNQTQSGRKDVRKRTIVALARKLLIALWRLATQGVVPEGIALRKASAIH

SEQ ID NO: 279026 - protein, 372 aa, unidentified
MTKSITWVGLDAHKRSISVAQLLPGRRQAVEWEVPNERAAVKRLARKLEREASGEVRCCYEAGPCGYTLQRQLMDAGIVCEVVAPSLIPVKPGEHIKTDRRDARKLAEISRAGLLTEVHPPSEDEEAARDLCRCREDAVEDVARCRHRLLKMLLRRGLVFGVGKRAWTRAHREWLRSIRFERVADQAVYEDYLLAITQVEERIKALDERIATLATEEPYRAPVGWLRCFRGIDTITAMTLVAELHDFRRFGSPRELIAYLGLVPKEHSSSDRTRRGSITKAGNSHVRRVLVESAWHYRHPPGIGETLRRRRQGQPPRAIAIADKAQQRLCRRFRRLIERGKPNNKAAIAVARELAGLYLERDGRAVEGCMRG

SEQ ID NO: 279027 - protein, 360 aa, unidentified
MQPEASQEVKDGMARFVGIDISKAKCRAAIMDPGGIILEEFTFANNHEGIEGLASRLNLDDRVVMESTGSVWTNLYNHLDARHIPVALANPLKTKAIASAKIKSDKVDARILAHLLRSNLIAESYVPPQHLREIRALVRHRVGIVKIRTMVKNEIHAIVDKHGFRHEFSDLFGKRGLEWLRSIELPPLDRLILDNHLTHLESLNQQTEHVDEEIHNKACEDSDVKLLLSMTGIDVYSALLIRSEIGSIDRFPDHKKLVSWAGLAPSLHQSGSVKYHGAITKQGSRTLRWIIVEAARVAVNHDAKMQGFHERVKHRRGDQKAIIAVANKMLKIIWFMLTRREPYQSRNEKRYQQKLNSITS

SEQ ID NO: 279028 - protein, 416 aa, unidentified
MTFKVVRFICGGMDVHKNLIVATIGTTDRQTLITEYIQQSFSTFYSDLIRLKEWFISHDCYDVCMESTGKYWIPIYNVLETELNICLTHPKYVKAIKGKKTDKRDSKWICDLYKCDLVKHSFIPEKEIREMREIARYRCKLVYMRSSERNRYQNCLTVSNISLASAVSDPFGKTATNIMKEIMHSEIIDDDKILKLIHKKCKDKDKILDSLQGYHIESDQRFKMDTVLNHIEYLDKQIQACEAELIKRAYPLRDYFQHITHIKGISALSAILIVSEIGTDMNQFESDKQLVNWAGLSPANNESANKKKSVRISKAGQYLKPLLVQCALSSIKDKNSYFGIKYCRIKKRRGHKKAIIAIARMMLVCIYHMILTGEEFNPCDYESLTNPKPKKEPIMTVESALQFLKDSNFDFSSIQL

SEQ ID NO: 279029 - protein, 408 aa, unidentified
MNTTLYVGIDVSSRSNVVYLMLPNGDKHSNFSVANSHEGSTQLVKRIHSALTSNSLDTVLIGLESTSVYGDNLVYFLREDATLAPFNRKIHVLNPRQVKKFHDTYNDLPKNDYVDSFVIADCLRFGRINKEVYMGDYHYKALQNLTRARYFAVQNLVKEKQRFMNVLFKKYSTMTQEKVFSDTFSTTALAVYDEFESAEALANMDLHELTDFIIEKGKNRFPDPDTVAKAIQKAARSSYRLPKTVNDSVNQVLSISITSMKALESQIKEFDKAINAQMEPLSNVLISIPGIGPVYSAGIMAEIGDINRFGNQAKLAKYAGLAWKQYQSGGFEAETTRLIPSGNRFLKYYLCEAALSLVRCDKGYSNFYHLKYKEVNRYQHKRALVLTARKLVRLVFRLLKDNRLYRSV

SEQ ID NO: 279030 - protein, 300 aa, unidentified
MKDMMIGVDLAKNVFQIHGALRTREVQFRKKLTRQQFTAFMARQAPCLIIFEACGGAHYWAREMKAPGHEVKLIAPQYVRPFVKRQKNDAADAEAIVIAARQAEMRFVGPKTVEQQSRAAVFRGRERLVHQRTADVNALRALLYEHGYVFPVGMRYLDRMTALVDDDTSDLPALIREECQDLLAQIAEKTARITKRTAKLKALASQSDRARRLQTMPGVGPLTAIAVEAFGPDMAHFKTGRNFAAWLGLVPRQHSSGGKERLGRMTKAGQADIRRLLIIGAMSRLGWLGRHTIAQGNCPA

SEQ ID NO: 279031 - protein, 344 aa, unidentified
MQVTMIGLDLAKNVFQVHGVDAHERPVLRKRLSRTKVAEFFAQLPPCRVGMEACPGAHWWARQLLQLGHDVKLMPPQYVRPYVKRNKNDAADAEAICEALTRPSMRFVPVKSLDQQAALLLHRTRDLLVAQRTQLTNALRGHLAELGVVAAKGIGRVRELVTLLAEANDDRVPPLAREVLMTVVVQLREVEQKITELERQLLGWHRTNEVSRRLATIPGVGPITATALVATVGDPAYFRSGRQFAAWLGLVPRQRSSGGKEWLGGISKRGDGYLRRLLVHGARTVVRWQKVRDPASTWLGNLLTRRPVNVATVALANKNARIAWALMIRDETFQAGYIPKARAA

SEQ ID NO: 279032 - protein, 437 aa, unidentified
MRSVPSRGSVGSDAPLRLVMGIADPTLPRDGTDVMKQAPPSVSGKLTDQSRSVAQDMRLKGGAMNTIYIGVDFHARQQTICYLKIETGELVTCELKHQDKEQVRAFYKQFQGHVIIGLEASGYSPWFEAMLEQLGCEVWLGHATEIRRRARWRQKNDRRDAELILDLMLHNEFPQLHRPTVQSREVLRMLRYRQKLIKVRTMSKNSLQAIALQAGLAKGSRLFTTAGQQELRTAEMSPVLQWQRDHWFELLKPLNQQLLETMVWCKAQSKGDAAITRLRTHPGIGLLTSLCLLHTLQPVSRFRNARKVTAYAGFDPVERSSAERQHFLGISKAGSRLLRYLLVEATHTAVRHDEDLKRFYKRLAERRGRPKAKVAAARKLLIRAYIMLRDEIDYAEFRRRAVAARLARRGQRPEVPEVLIGQPASAGCQEQTHASEK

SEQ ID NO: 279033 - protein, 333 aa, unidentified
MTYIGIDVHKRQSQVAVVDDDGSTQREIRLDNADLEEFAAEYDESQAVLEATSNYYAIYDVLDKYLDVSVAHPTKLAWIAKSRQKTDEADASKLAELLRLDAVPESYVPPEEIRECRALARGRKKLVEKRTDAKNEVHAILDQNALRIDSPFTDEGREELAALDLEGSDQVMLEQWLGMVDDLDARIKELDREIVEMSKSISEVDLLMTIPGVASYSGLMIYGEIGEIDRFDRAKELVSYAGLDPTVRESGDSRTEGPISKEGSEYLRHTLVQCANIAVHNCDDPYLSEFYERLRRRGKPHQVAIVATARKLLVSIFHMLTKEEVYDPPPVRE

SEQ ID NO: 279034 - protein, 414 aa, unidentified
MKLFVGIDVSMKDFKARMFDAEGEEIAKRMRYKNDDPGAESFVKYLVEICGANEVDSLRIGMESTSVYGWHLQMRLAGEPLLASFHPQVYVFNPKVIANFRKQYVDIPKDDWFDCLVIADRLRFGRLPESCQVDFRYLPLQRLTRFRYHLIQTITREKNYFLTNLFLKFNTICQDKVLSDIFGATSEAILTEFLSPEEIAARPLDELIDFLMEKGKSHFSNPEATAKALKHAAACAYRLHGSLLEPVNLILATSLQTIRTLEQQVKSIDKAIEKELSHFPNTLQSMPGMGPVCTAGIIAEIGDIHRFDNEKAVAKFAGLTWRKHQSGEFEADDTPLTKTGNVYLRYYFVMAADSVRKWDPRFAEFYARKFKESSTHHHRRALVLTARKLVRVVDALLRSNQLYVPQGQRKVVKV

SEQ ID NO: 279035 - protein, 343 aa, unidentified
MQAITTIGLDIAKSVFQVHGVDADGRVVIRRQFKRRYVLAFFEKLTPCLIGIEACASSHHWSRQLRALGHTVRLMPPAYVKPYVKRQKNDATDAEAICEAVTRANMRFVPTKTPEQQSGLVLHRARHLFMRQQTSVINAIRAHLAEFGIVAPVGRRGVEELLRVVSDAHDRRLPELARACVAALGSQLRVIKAQILNFDRMIAAWHRSNEMSQRLDELPGVGPALATALVASVADPRAFRSGRDFSAWIGLVPKQSSSGGKQRLGGISKQGDRYLRGLFTAGALAVIRYAKIHGTSQRPWLTALLARRPTKVAAIALANKIARMAWAMMAKGESYREPVALIA

SEQ ID NO: 279036 - protein, 419 aa, unidentified
MESSKTQKIKRINPRTMIAAVDIGKGFHVGYFRAPNGEESKPFVFASCEKSFNEFWHKAQEFSGRHDLEEIVVGFESSGPYAEPLFHYLRKKPVRLVQVNPVHTKRVKELTGNSPNKTDRKDPRVIADVISLGHALTLVVPKGPAAHLRRLTQARERVIKRRTAALNQLQDLIFVIFPEFLKIMKGISTKTALYLIKNHPTAESIVALGLESLKGLIKATSRGKLGPQRGEELFHASQSCVGVQEGKRSILLEIEYLISQISADDRFVATLEKQMVEHLEEIPYSHSILSLKGMGKVTAAGLIGEVGDFREFGTISEITKLAGLDLFEISSGKHRGQRRISKRGRPLMRKLLFYAAINVVKTNGVLHKPYQEMLSRGMLKVKGLIAIARKLLRIVFALARDNTVYMEDYCRNQPLKLAA

SEQ ID NO: 279037 - protein, 461 aa, unidentified
MSKRKKKTSAGTAKRGVLEPSIHPKSAGIDIGAEELVCAVPPDLDQQAVKTFPTFTRDLHALRDWLTSLGVTTVAMESTGTYWIATYEILEAAGIEVCLVNARHVKGVPGKKTDVCDAQWLQQLHAAGLLRASFRPSREVVAVRQLVRHRSDLVRESSRHIHHMQKTLIEMNIKLHHVFSDLDGMSAMAIVEAILAGERDPESLWLLRDRRCRCSREEFEKALEADWQSAQLFILGQSHRAWQQTHEAIAACDEAIEDHLEQVSSESDDDLPPEEENRRKRRGKNDVGFDIRAEAYRQYGVDLSRVDGISNGTLLVLLSEIGNAEELRKNFRSAKAFSSWLGLCPDNRISGGKVLKTKTRPVVNRVSNALRLAAFGVGRSDSALGDYCRRMKAKLGKAEGITATAHKLSRVIYGMIHSKQPYDEAIAFQTQPSTRTRRLKKLRKIAHSLGMQLTAIQPESI

SEQ ID NO: 279038 - protein, 373 aa, unidentified
MEQHTEVFVGLDVAKARHAVAVAEDGRQGEVRYIGEIGADTDSVRRLVTKLEKRHGRLHFCYEAGPTGYGLYRQLTKLGHQCTVVAPSLIPRRPGDRVKTNRRDALQLARLLRAGELTAVWVPDEAHEAMRDLIRCRQMAVDDLRRKRQTISSMMLRQGRIYPGKKTWGARHTQWLQAHRFDHLGQHLVLQELLLAARHAGEQLDRIEAAIVELLPKWSLAPVVEALQALRSINLVIAATVMAEIGDLKRLENPRQLMAYLGLVPGERSTGDTVHRLGITKAGNGRVRQALVESAWSYRHPPRTSQNKHYILEHLPPAVRDIAAKAQSRLCARYRALSQRGKKLTVVVTAVARELAGFIWAIGREVQAMCTVI

SEQ ID NO: 279039 - protein, 429 aa, unidentified
MNSTQNKKIEQVKETTMIVGIDVGSEKHYFRAFNWRGIELTRKPVAFSNSMEGFNSFYNTIVELMQKSELEEALVGIEPTGHYWFDLGQFMGEKSIKFVMVNPHHVHKTKELDDNSPSKNDRKDPRVIAGLVRDGRYFYSYMPTGVYAELRNASNRRFVLVEEQTRAKNRLQKWITVYFPEYKGIYTHIDAKGGLLVLKQAPTPEEIVKLGEEGIIKIWKDAKLRRNGNKKALKILNAAMRSIGLRTGLTEARMEIQDLIEDYELQTKRLERVNDLIKELCQQIRYADKLLEIKGIGITTVAGFIAEVGDITRFDSTKELQKLAGLELVADSSGKHNGKTKISKRGRKRLRYLLFEAAISVVGKNEEFKEIHRYYTTREKNPLKKMQSLIAVACKLIRVFHVILTKGVSYDASKMLEGIRHPGEQLKAA

SEQ ID NO: 279040 - protein, 350 aa, unidentified
MPKAPLQHVSTLGIDIGKNSFHLVGLDARGAIVLRQKLSRGQVEQRLANMPSCLVGMEACVGAHHLSRQLLALGHEVKLIPAQFVTPFRKSHKNDFRDAEAIAEAVLRPTMRFVPTKTVEQLDLQALHRVRSRLVSERTAVVNQIRAFLLERGIAVRQRLRSLRQALPDILAQRTDVLTPRMTHMIEGLMQDWHHLDERIEAVTGEIEALVAADEACQRLMSVPGVGPIIASAMVASIGNGAAFRRGRDFGAWLGLVPRQISTGDRTVLGRLSKRGNSYLRSLLIQAAKVLLLWPAKWPQHGFGEWLAAASMRLHHNVLAAALANKLARIAWSVLSQNRVYEPRAAAVAG

SEQ ID NO: 279041 - protein, 317 aa, unidentified
MPYATRFVGIDISKSFLDVCLLPDQEKARFANTAEGVAALIAFLAPLKGIERLVLEPTGGYEHLTVAALQAAQLPVAKVNAGQVRQFARACGQLSKTDTIDAFVLADYGLRMQTRILPQRSSRQAALEELVLRYRQLSHMIVQEKNRREKLNHGTQGRTKEWIEQTLGFLVKQRQAVVDDMAECLRADPELGRKAEVLMSLKGIGLRTACFLLAGLPELGLLNKAQIAKLVGVAPLNRDSGAMRGKRMIAGGRRPVRDALYLAALPAIRFDPAIKAFYTSLRGRGKPGKVALVAVIRKMLIILNARLRDNNPAVLDR

SEQ ID NO: 279042 - protein, 428 aa, unidentified
MSYRIAGVDVHKKMIVVVIADVMSEGAEYDFERRKFGATPAELQILAEWLTQQEVQEAVMESTAQYWKPVWGALERYWTPECKKRGGAGPMSGTLHLAQAKSNRGPKGRKNDFADAQRLVKRLAAQELVLSFVPPPEQRLGRTVTRKKYQLTRQVVQVKNQLEAFLEETHIKLSSLISDLLGVSGRRILKALAEGETDPARLANLADQRLRATTAQLRDALGACTDLNAVYRRLLQMTLEQLRLLEEQIEQLEKECAGLLRAQRDAVERLAEVPGLGVDSAQQIIAEVGADAANFESAKDFSSWVGVCPGEEESAGESRSSRSPKGNRNLRRLLNQAAQCAVRVKGSIFELVFRRLLPRLGWKAAIWAIAHRLGRLVWKLLHDGVRYIEKGPAVSEKSKKARTARMIKELRAIGYHVQILNPETGVAR

SEQ ID NO: 279043 - protein, 414 aa, unidentified
MELSYKVAGIDVHKKMLAVVITDAAEVGEFRFERRKFGAGDAERRALAGWLAECGVKEAVMESTAQYWKPVWQALEGAVKLHLAQAYSNRAPKGRKRDFADAERLVRRHIAGELILSFVPDEQQRLWRTMTRTKQQLTRDRVRLQNQLEGFLEETRIKLSSHLSDLLGLSGKRMLQALADGETDPSRIAALVARGVRASQEQLCDALCAAATLSEPHRQILKLFLERLALLETQMDTLEKSVGQALREYEDSVHRLAEVPGLGADSAQQIIAEVGPHAATFPSPGQMASWVGCCPGREESAEVSKSDRSPKGNRHMRRILNQAANAAIKTKGSSYERLYRRLAGRIGHFKAIWAVAHRLCRIAWKILHQGVRYEERGHRPDPQAVRQRANRLIRALRNLGYQVQLTQPSTEGIG

SEQ ID NO: 279044 - protein, 404 aa, unidentified
MSRLFAGLDWGGTRHAVCVVDEAGKVVVDFEVAHDAEGLASLLKRLAKLSPAAELAVAIERPSGLVVDTLVAAGHPVVPVHPNVVKACRPRYRAVGAKHDAGDAYLLADVLRTDGHRFRPLTPQSDAIKALRALVRTRDDLVAERVALANQLRSLLESFWPGAAALFSDIDSPIALAFVRRYPTPQSAAHLGEKRLASFLAQEQYSGRRPVAELLARLRSAPASVASEVEAEAKGELVRALAHLLETLVAELAKLSSRIEHDVAALADGQLVMSLPRTGRINAAQILAELGDVRERFQTEEQLAAEAGVCPVTYESGKSRGVGFRWACNHRLRRAITTWADNSRHASPWAADIYARARARGCDHPHAIRILARAWVRVLWRTWSSRSAYDPSLHGGAKRFLAAA

SEQ ID NO: 279045 - protein, 416 aa, unidentified
MQVVYPSCCGLDIHKKFVVACFMSTGADGSVQHEIRTFTTMTQELLTLVDWLQTVGCTHIAMESTSFYWRPVFNLLEGLFEVLVVNAYHMKAVPGRKTDVKDAQWIAELLRHGLLRASFIPSKTQRHLRDLTRYRTHLIEERARLVNRLQAVLEDANIKLASVVTDVRGVSARAILEALVAGETDAQALAELARGRLRAKRALLAQAVVGHFSAHHAFMITEQLSHLDTLDEAIERIGAEIGQRLQEEQQAIELLDTIPGVSRKAAEIILAEIGTTLERFPDAKHLASWAGICPGHAESGGKRFSGKTRKGNVWLRQVLIEIAHVASKTKNTYLAAQYRRIAARRGKKRALVALAHTILVIIYQILTKREPYREMGGTYFDERERQRVEQRLVHRLERLGYQVTLQATAPPQTAIA

SEQ ID NO: 279046 - protein, 364 aa, unidentified
MATQPTATPKLYIGMDIHKKSWSVHLRTDISDHKTLTIPSDCKVLYDYVHKHFKDHEVSLTYEAGCCGFSVSRYFLNLGWNVLVVNPADVPRMDKQNYQKTDKIDCRNLAKQLHAGQLHGIYIPDEAQDLLKSLLRQRAETSRQLRGIKSNIKGLLLYHGIDIPMQFDNPNWTKAFVEWLQQLEWTHPTGKACIDSKLRMYEVIHQEYLQLANELRAYCRKHHKKDYYLLKSIPGVGGYLASAILAEIGDLRRFSNEAQFASYVGIVPTMRNSGGTEKIQGVTPRCRGLLRSYIIESSWVALRMDPEMQAYYRKHIGRNPKSIIVKIARKLLNRMLAVIKSEQPYQTNHCLNHEEETKKTGTLL

SEQ ID NO: 279047 - protein, 414 aa, unidentified
MTQSLIVGVDPHRKKNVMQLMDSQGQELGAPFRVDNNRPGTAAFVQHLTEQLESGDYEAVQIASEATGWYWFHFFQSLSQNPDLNQWPLDLYLFNPRLTAKFKQSYGERDKTDPNDAFIVADRFRFGRDLPAPFQYDETCLPLRFLTRYYFHVTHNLVREKAYALAILYLKVSEYSHPHKRPFKDVFGAASRAVLQDFASIEEIAAIDFDELVEFIDVKGKRRFPDPQDNARKLRQVVEHSYPLPQALQQPINSILSLSFKHISFLEAQRKRLKSAIADHLTTIPHTLDTIPGIGPVFSAGLIAEIGPLDRFDYKETKVAKFAGFMWRKSQSDDFQAQHTPIIRNCNHYLRYYFCEAANSVRMHDPEYKAFYDRKYHEVPKHKHKRAIVLTARKLVRLVVRLLTTNQPFRPRRS

SEQ ID NO: 279048 - protein, 350 aa, unidentified
MCSLPVFVGLDYHDASVRVCVLDTDGRELANADRCNDWKAIAEFADRFGRPVRAAIESCCGAADLAEELVSCAGWSVDLAHPGYVQRMKQNPDKTDYQDAQLVADLERIGYLPRVWLAPQHIRELRQVVRYRLQLTEQRRATKLRVRALLREQRCRAPQGVNAWTKAWDHWLRHTAELSAEGRWVANQHLQELACLVTRIRQVEKRLERLTANDVEVQRLQQQVGIGPVTAWTIRAEIGHFDRFRTGKQLARFCGLSPRNASSGQRQADAGLIRAANPALRAVLIEAAHRLVNYDRYWQKFAQRLRAAGKPGSVVAAAVANRWIRRLYHEMKTPSGELAVAVRSARSEDS

SEQ ID NO: 279049 - protein, 405 aa, unidentified
MEVVYTHCCGLDVHKKTVVACTITPEGKEICTFSTMTDDLISMVDWIKNKGCTHVAMESTGSFWKPIFNLLELEGIQAMVVNAKHIKNVPGRKTDVKDAEWIAGLLRHGLLQGSYIPSRDQRELRELIRYRRSLIEERAREINRIQKVLEGANIKLSSIASDILGKSGRAMIEAMIAGEQDPEILSELAQRRLKKKKADLQRALNGLIGPHQRLMLKTQLRHIDFLSDEIKRLDEEIKERMLPFDEDLELLDTIPGVGRRTAEQILAETGTNMDQFPSAAHLCSWAGLSPGNNESAGKRKSGRTRKGNQKLRSALVEAARAAARTKNTYLSSQYHRLAARRGANRAAVAVAHSILTIVYHMLKRKKPYIELGPTYYEERKRETIIKQSIKKLESLGYKVTVEVVA

SEQ ID NO: 279050 - protein, 318 aa, unidentified
MAAWHVGIDVSKETLDVQVLNGSSQQFPNTSQGHQTLVAWLKPESIARVVLEATGGYERLAVAALVAAELPVVVANPRQVRDFAKGIGLLAKTDRIDAYALARFAQAAEPPQRPLPDEQTQKMRELLARRAQLLDMRVMESNRLQQAHTRRVLNGLRSSIEFINKQLDRLEKEIDEELRKSPAWQEKIELLKDVPGVGPQTLRTLIIELPELGDCTRQQCAALVGLAPINRDSGKSRGRRMIQGGRAKVRQALYMATFSARRHNHLIRAYYDKLCAAGKPFKVVMVACMRKLLTILNAMLRERQPWREPTQPALAEIT

SEQ ID NO: 279051 - protein, 320 aa, unidentified
MTILDSQVVVGVDVAKDEIVIYRSDLERTRNVANKRSALKQWLKTLPANSAIALEATNIYHLDTTEMAHEMGHDVYVIDGSRLNKYRDGIGMRAKTDALDAELLARYLSRESDRLRIWNPPPKAYTQLKSLLRRRAQLVRGCVALKQSWKNEPLLKEQFNQLLAAIAQFEKTIQKTLKEIAEDAGMQDQVKRCQAVEGVGLLTATAAATAFLRGEFANSDEYVAFLGMDPRVRQSGQKDQRRWLSKRGDSEFRRLFHNSAMAASRSPVWKPYYQSYLARGLKGTQALVILARKLARVMFALMKNQSEYRPNSMLGGSPQT

SEQ ID NO: 279052 - protein, 345 aa, unidentified
MDTIGLDLHKRESQLCMIGSRSEITEKRIVTTRERFTAVLLGRDRCRILLEASTESEWVARHLESLGHEVIVADPGFAPMYATRSKKVKTDKRDARTLAEACLLGAYRATHRVSAEQRHVRSELLVRDALVRTRTRYVALIKAVVRREGLRLSQGEPEHTASKVRAIELREEVLQELRPILDLLLPLNREIETADRRIEQLGEKDPVVRRLMTAPGVGPVTALTFVAALDEVTRFQSAHQVESYLGLVPSEYSSGERQHRGRITKRGNARMRSLLVEAGWRIMQSRRSECAALRAWAMQIAARRGKRIAVVALARRLSGILYAMWRDGNEYRSPNARVEGRREAA

SEQ ID NO: 279053 - protein, 325 aa, unidentified
MTLHVLGIDIAKETYQVVLLRDDKKRSHTFRNHPDTFAELTAWLAKHHVAQVHACMEATGRYWEDLAVFLFQAGHLVSVVNPARIHGYAKSKLSRNKTDKLDAALIADFCATQNPPLWTPPPPEVHELQAMVRHLEALHQMRTQEGNRLASGVPSDQVLQMLREHVAFIDEQIDALKQRIQDHIHQHPGLKQQQDLLTTIPGIGDLTAAKLLGENIQSFSSTRSLAAYAGLSPQKGESGTSVHRRSKLCKVGNGSLRKALYFPAICAMRFNPLIMDFCDRLAQRDKHTMVIIGAAMRKLLCLALGVLKSGVPFDPYYAENVQLTA

SEQ ID NO: 279054 - protein, 412 aa, unidentified
MKQIRDKVGGLDVHRDGVVACSRIQMPDGSVEVQKQRFSTTQAGLAELTAFLVDAGVTTVAMEATGIYWRPVYYALEGLFSELWLCNAAHVKNVPGRKTDLSDAEWLADVAAHGMVRPSFVPPPEIRELRELTRYRKAEVDTRAREIQRLEKVLQDAGIKLTSVASTVWSKSSRAMIEALIAGERDSTVLAELSKGVMRKKIDRLGVALEGNFGRHHALLCRQIIDHLDFLDRTIATLTEEICARLVPFAPKVTLLISIPGISEVTAQVIVAETGADMTRFPTAGHLCAWAGVAPASYESAGKRRPAGTRHGSPYLRRTLIEAARSAARTKGSYYSAQYSRIARRRGPNKAAVAVAHSMLETAWHLLTTGALYQDPGADYFERRHDPAIEAKRLQRRIEALGFAVTISEKAA

SEQ ID NO: 279055 - protein, 350 aa, unidentified
MEYIAFDSHKRYTFASVEEHTGNVLRDARIDHHRGAITEFLSAWKTGTEVAVETTGNWYWIVDEIEAAGMVPRLVHARRAKMMLASVNKTDKLDAHGLNRLQRTGTLPTVWIPPAQIRDLRDLPRTRMVLSRERTRMKNRIHATLAKYGLSIEGASDAFGKRGREEIGKLLGLLPPHSRFSVERLLEQLDVVQDHIQQFEGRMKKVFAANRELELLQTLPGVGSILAVVILLEVGEVGRFADASRLAAYSGTTPRVHGSGDKFRYGQVRSDVNRYLKWAFVEAANVICLTHRRCPSRHVSQLYLRIRQRKGHQKAVGAVARHLAEATYWILKKGEPYRQPHRKAVSSTKG

SEQ ID NO: 279056 - protein, 419 aa, unidentified
MARRKDAQSIRVLHPVCCGLDVHKKSISACLLKMDCDGEEEFEIREFGTFTNDLTELRNWLMDNRCPIVGMESTGVYWRPVHNVLEGFMEVVLANARHVKNVPGRKTDVSDCIWLAGLQRHGLVRGSFIPEKKVRQWRELERLRRTHTETLGDYKRRVHKLFETANIKIDSVVSDLFGVTGRNLIGLLCDEKADLSLEDVQNSTRGSLQSKVKELHSSIQGFFEDHHRFQLKGMLKLISELEHQIESITKRLRELMKPHEELVNRLDEVPGINENAAQCVLSHIGITLQEFRSDAALCAWGGLCPGNNETAGKQKSGRHPVRSHPFKTIMVEIAWAAIKKKDSYYREKYYRLRSRLGPKKAITAIAHRITKAVYHIIKRGERFKDLGQNYLNRNDKCRNIRNLAKNARKLGFDLVPMKA

SEQ ID NO: 279057 - protein, 314 aa, unidentified
MKNAVFVGIDVSQAWLDVYIHPVNEQMRLENDACGLQKLKDKLVEFQVDLFVIEATGKLEFWAAKELEETGFPVVIANPLWIRQFARAKGILAKTDRIDARVIALYAEGIKPEVRPLRNVVTQQLKEMVSHRQALVNMQTAERNRQKRACKEVACIITEHLTWLAEQIKGIQSQIKKLIQGNKALKEKARLLQSIPGIGPTLAASLLAELPELGHLGRGQLAWLVGVCPRNRDSGKFRGKRTIYGGRAGIRKALYMATLTAIRFNPLVKTHFEALMDRQFAFKKAMIPCMRKLLFIANAVLKTGTLFQKERQIA

SEQ ID NO: 279058 - protein, 321 aa, unidentified
MEPATPETFVGIDVSKARLDVAIGDEPPFAVDNDPAGHAALAGRLAPRRPRRVVMEATGGLEAAAAAALAAAGLPVMVVNPRQARDFAKAMGYLAKTDAIDAKALAHFAAAIKAEPRPLPDEAARGLDALLDRRRQLVGMRTMEENRKATARGRVLRDLEAHLRWLGEHIEEIDRELDERIRSSPAWRERDDLLRGIPGVGPVLSRTLLAGLPELGTISRRRAAALAGLAPLADDSGRRSGPRRIAGGRGQVRAVLYMAALSARRFNPALRALADRLEAAGKRPKVILVAVARKLLVIANAILKAGKPRDPEIAAKLAQNA

SEQ ID NO: 279059 - protein, 342 aa, unidentified
MPQYAALDVSNEETALHVIDETGATVWCGKRASDPDVLTTTLRRHAPDLVRVGLETGPLTPWIYHTCKTLGLPIVCLDARHARAATAPQRNKTDARDAETLAQLVRMGWYREARVKSYAAHAVRHLVGARAQLMGVAVDLSNQIRSTLKTFGLMAGKGAGRAFEIRVHDLIADRLTVVAIVEPLLAAWRAVRGQIGVLDRRLIVLAKGDATCRLLMTCPGVGVIVATSFAAAIEAPEHFRHSRSVGAYLGLTPVRPQSGETDRTGGISRRGDRLMRSYLFEAAASLLVRVRQDSALKAWGRARVERMGFKHAVVAVARKLAVVLHAMWRAGTPFQPWPTAAA

SEQ ID NO: 279060 - protein, 406 aa, unidentified
MDVIYPRCAGLDVHKQTVVACVRIAGDAPPLQEVRTFDTTTSGLLALCDWLDTFGVEHVGMEATGVYWKPVWHVLEGHFELLLANAAHVKNVPGRKTDVNDAVWLADLLAHGLIRASFVPPTAVQELRTLTRTRKQFVRERGSHAQRIEKILEDANLKLSVVLSDILGKSGRAVLQALIDGQDDPERLVSCIGRVKASRAELLEALRGHVSAHHRFMLKLHLGHIDALDKAVADIETEVGLGLEPFRQAAKLLSTMPGLSSVSANVVVAEIGVDMSRFATPGHLLSWACMCPRNDESAGKRRSTRLRRGGKWLKTTMVQAAWAAIKVKGGYLQAQFHRLRARRGAKKAIIAVAASMLTAAWHMLRDGTEWHDLGAVHFDRADAHKTAARLIRRLQQIGYTVQATPA

SEQ ID NO: 279061 - protein, 370 aa, unidentified
MKKRITFIGLDTHKNSIEVALADEGANSEVRLYGSIGGDLDSLDKVIRKLHTPGVELRFVYEAGPCGYEIYRHLRAQGLHCDVVAPSMVPRRSGDRIKTDRRDACNLARLYRAGELTAIYVPQEDDEAMRDLVRGRQDAINAQRKARQQLGGFVLRHGVRYPGKCLWSQAHGRWLAGVKMPHPAQQIMMQEYIHTVEECTQRVIRLNEQIQQLLPDWRMHPLVAALQALRGVAPVVAATVVAEIGPMGRFKNPRQLMAYLGLVPSERSSGGSVRRGAITKTGNGHARRALIEAAHSYRHPARISRTILKRQETLAEPVRQIAWKAQLRLCARFRRLIARGKSRNRVVAAVARELSGFMWAIAKQVPVPQG

SEQ ID NO: 279062 - protein, 416 aa, unidentified
MKIVRPICCGMDVHKNIIVATIGITNKKTRITEYIQETFSTLNPDLLNLKQWLINHKCFDACMESTGKYWIPIFNILEDEINIYLTHPKYVKAIKGKKTDKKDSKWICDLFKHDLIKFSFIPPKEIRALREISRYRYKLVGMRSSERNRYQNCMTVSNIGIGSVFSDPFGKSAQAIMKEVLESDIIEDEKILKCVHGLCKNKDKIIDSIKHCNIETDQRFKMNESMTHMEELQVHIDNCEIEMMKRAAPMFDQFMHITQLPGISTLSAILIISEIGVDMKQFESDKQLTCWAGLAPANNESANKKKSVRISKAGQYLKPLLVQCALGAIKDKEGYFGIKYSRIKKRRGHKKAIIAIARMMLVSIYHMILTGETFNPSDYESFRNPKPPIKQQDLTEESAIEFLKKSGFDVSKLTKP

SEQ ID NO: 279063 - protein, 358 aa, unidentified
MNMHKVQDFVVEGKEIFVGLEDSKRTWRLAVRCERMLVHQTSMEAKYPLLKQYLKNRFPGCSIHVVYEAGFKGFNLYDRLTEDGIECIVIPPHMVTEPKVSRVKTDGRDANRLARIMESHDFKDPCHVPDKERREDRQVSRTLIAIQKDIVCTRNRIRRFLDYYGIKPPFADKERWGRKEFHALRELDLGESLKIGLAVLLTHLEQLWCHQATLRSYLRGLCSKERYVKAFRVARSLPGIGWFTAIRLVLELGEDLSRFTSGKSIASFVGITCREYSTGQTERKGCITGMGSAFIRHVLVENAWVAIKRDQVLLSKFLRVWKSSGSKKKAIVAVARVMIVRLRACIIAGRPYMMGVVR

SEQ ID NO: 279064 - protein, 315 aa, unidentified
MSPEIMVGVDISKAHLDVAVLPTGEQWQEANELTAINRLAKRLLKLGPKLIVMEATGGLEILVAACLGRAGLPVVIVNPRQVREFARATGQLAKTDKIDARILALFGERVRPEVRPLPDAVARAFEALLARRRQLVAILAEEKNRLRQAQSRPVATGIQRHIRWLEQEIKDVERDLTKSVRESPAWRAKDDLLRSAPGVGSTTSFTLLANLPELGRLNRKQIAALVGLAPHAADSGTLRGKRIIWGGRACVRQPLFMAALAACRSDPGFRAFHHRLVASGKPPKVALVACMRKLLIVLNAMLRDGTPWNPTFSRI

SEQ ID NO: 279065 - protein, 343 aa, unidentified
MQAVTTIGLSIAKSVFQVHGVDAIGNVVIRRQLKRRYVLAFFQKLAPCVVGIEACATSQHWSRELKAFGHTVRLMPPAYVKPYVKRQKNDAADAEAICEAVTRANMRFVATKTPGQQSCLMLHRTRHLFVRQQTAVINAIRAHLAEFGVVAPVGRRGVAELLDVVVDSSDERVHEVARACVAALGAQLRMLKAQILEFDRQIMAWHRSNETSKRLDEIPGVGPALATALVAGVADPKAFRSGRNFSAWIGLVPKQHSSGGKDRLGGISKQGDRYLRSLFTAGALAVIRYARIHGTKHRPWLAALLARRPTKVAAIALANKIARIAWAMMTKGERYKEPAALAA

SEQ ID NO: 279066 - protein, 398 aa, unidentified
MEVMDAAGRRLSAAKLPEGIAGMARFHAMIAAQLDPDADLAAQAGQVLIGIETDRGPWVQALIAAGYRVYAVNPLQAARYRERLGVSGAKSDPADAHLLADMVRTDSHQLRVVAGDSHLAEAVKVVTRAHKTLIWERTRHTLRLRSTLREYFPAALAAFEDLTDADTLELLAKAPDPASAARLTTTQIMAALKRARRHHRDRRAGEIQAALRTEQLGQPAVVARAYAVAVRAQVAILGVLNEQINLLQEQVEAHFGQHPDAEIYTSQPGLGQILGARVLAEFGDDPTRYGDTRARKNYAGTSPITRQSGKKKVVLARYVHNDRLLDALGGQAFAALTRSPGARAYYDKQRDRGLGHRAALRQLANRLVGILHGCLKTRTRYDEATAWSHTQQDQQVAA

SEQ ID NO: 279067 - protein, 348 aa, unidentified
MHPTTVAVDVAKNVFELAIADAQWRVAGSARLTRTQFERWFDNRQVELVIMEACGSAHHWARTLAARGIEVRLLPAQYVRAYVKRNKTDAADARALLEAARASDIKPVRVKSVEQQALQALHRTRSAWKATRTARINALRGFCREFGLIVPEGAATGIAQMARYLADEHSGLPALLRGSMRLLLEEIRLLEARIGQLECELAEVASTSAACQALISVPGIGLLTSTAMIAAVGEPRSFDSARRYASFLGLTPREHSSGDKRVLGGISKRGDRYLRMLLTHGARSVLRAAIVAKRAGRSVDRLKTWALEVQARTNHNKATCALANKLARIAWAVWTKHEKYQSAAAAAA

SEQ ID NO: 279068 - protein, 353 aa, unidentified
METPIKQTAGIDCGMLELVISFGMLTNDGTFICSATKIFANNNKGFKQLLQWINEVSSKETTVLYTMEATGVYHEKLAYYLIAHDCRVSIVLPNKVNAFAKTCTSKKQDDSQASKVLCEFGCVKHVDEWQPPHPLFAALKQLTREKHQLQQELTIIKNQLHAEQTKAITASASIKRMKARHRLIEKQIAEVEKEIIDTLNQDTAIKEKINKVCTIPGVGLPTAVTVIAETNGFNLIRNARQLVGYAGLDVVQKQSGTSVRGKAHISKKGNPHLRHCLHLPSFTAVKYNIPMQNLHHRIVEKQAIKMKGYVAVQRKMLMLIYTLWKKNEAYNPSIKFLEQPVEAALTELDLIRS

SEQ ID NO: 279069 - protein, 345 aa, unidentified
MSLMFFLGVDVAKKTLSVVLTDHKDKKLWSNKSIPNDEPGFKKLVETVIKNVSKKAGKEEYSIAAGMESTGVYGERLAYYLNGNSHDGRILTYVLNPAAVRSFGDSVMAPNKNDSADAQLIASYLSMAITKEQISPWKAPSPEGRALKELSRRRDELTGLLASEYNRLEKLEYMQEPSEIITESVRELISYLKDSICSLEKEIEAHIDDDPRMRDDIELLRSIPGIGEVTSVTFQGESDGLNNFTSVKGLVSFVGITPSEHTSGTSVFKRSKISRRGNTRIRHHLYMATLVATRVNPVIKEFYERLLNRGKCKKLALVACMRKMLHIIWGVMKNRKSFDPCYSLK

SEQ ID NO: 279070 - protein, 348 aa, unidentified
MPVKCVSQVLTNFNCKAMNYSCFIGIDLSKKTFDVSIISPEREELNYFQLPNTAAGTRRLVKRVHELCIPLSKILFCAEDMGELAIELCLASQSAGFPLALACPLSIKKSAGICRGKSDRIDAYKIACHASLHHRNLRLYSLPEPALTRLKLFITLREDLVKSKKRFSSVDTTLIESGKIADTGEHRQVTKEQLDLLDRQIKHVENCMLECLKESPLLYRNFRLLRSVKGIGLLNACLLICLTGNFTRFENHRKFACYCGVAPFEFSSGTSIRGKNRVSKLGNKQMKVYLTSAAQAAIMHDDQIKKYYKRKLEEGKHKGTVINAIRAKLVARCFAVIRRQQPFIAMLA

SEQ ID NO: 279071 - protein, 337 aa, unidentified
MTIIRIGLDIAKHVFQVHGVDENEVTVLRRQLRRSEMKKFFNKLAPTRIGLEACGASHYWARLLRGLGHEVVLLPPQYIKPYVKRGKNDANDAEAICEAMSRPGMRFVPIKSAESQAELMPLGGRDLLIKQRTAVINTIRGYAAEFGVIATKGPVKVAELLQQAHAEEASVPALALDMLRLLAAQLDALDAKLKLIETWLMALHRENPVSQCLASQPGIGPIGAVSFALRVTDPKSFRSGRHFAAWLGLTPKDNSSGGKRRQGRISRQGNEALRKLVVLGATAVIRFAKPGRASPWLLNLLARKPKKLAAIALANKMARTLWAMMKSGEVYRRPLPV

SEQ ID NO: 279072 - protein, 356 aa, unidentified
MTSMAHPDAPQLTIGVDTHLEVHVAHANDQLGRPVATIQIPTTPAGYQQLLVWAHELGEPIVWGVEGTGCYGAGLARFLAANDQVVVEVNRTDRQARRLKGKSDPLDAQAAARAVQAGQARVVPKAGDGQVEMIRCLRVARATAMRARTQTINTLKGLLVTAPAELRQQLRGRTATRLVQTAAALEPGPITSPLAAATFALGSLARRHQALSAEIDALSNQLDRLTQTAAPELVARFGVGHDSAGALLVAAGDNPDRLRSEAAFSMLCGASPIPASSGKTIRHRLNRGGDRQANAALHRIVVVRLRYHQPTRDYMTTRLAQGKTKKEIIRCLKRYVAREVFAVLHQLHHDNITPAA

SEQ ID NO: 279073 - protein, 355 aa, unidentified
MKKETQSITFKNQNFYVGIDVHKKRWVVTILHSGLSLKTFSMDPCPEQLKKYLYANYPQGTYHITYEIGFSGFWICRRFKQLGMDCIVVNSADIPTAHKEKDEKSDPVDSHKLARELEKGDLQSIYAPSEQIQHLRSLSRLYHHIVQNMTRVKNRIKGHLHYNGIKLPKHTSHWSNNFILYLKTLDLDNGPGKECLLLLLEELHQHRKRLAITLQKLRHYVREYDFGTTLRNLMTIPGVGFKTAITLYTEIMDMNRFRNLDHIKSYVGLVPSTYTSGENSRDQSITNRRNKYLRYVLIEAAWVAISKDPVLLESYNKLIVRMKKQQAIIRVARKLLNRIRYVWLNNRPYVYGCIQ

SEQ ID NO: 279074 - protein, 324 aa, unidentified
MIKDIKYFGIDISHLVFDITDSDGNYHQFKNNSSGFKKFVKLLNQQSHCVMEATGYYHYQLAYFLLESGIKVSVENPLAVKRFIQMKLSKIKTDKSDSKLICEYAQKVDLKLWKGNTKDEMECLQITRALSVYTKQSTMLKNKLHGEAVLGEPSKAVVRSLKRSLKQLEKEMKTLEDKLLVLVKQSHQDLLTRLKTIPGIGPKTSIMLVVLTGGFDRFTSAAELCSYAGLTPVIRQSGSSVKGRPRISKIGNQKLRNLLFMCSFNACKYNKACRDLYERIVAKGKSKKLALIAVCNKLLKQAFAIAKSGLIYDKEYKSTLVRNK

SEQ ID NO: 279075 - protein, 393 aa, unidentified
MFFVGIDVAKYKHSLAAITKDNEKVIERFEFANTTEGFTKMLERLAECGITHENSRVALEATGHYGNALVAHLGACGFELVIGNPLQTHNYAKAQSIRKVKNDAVDAMALAQWLLIGKPDSAKLSSSETACLKSIARFRTFQSQIIGDCKRKVIAVLDQVFPEYASFFSDVFGSTSLAVLSRYPSAQALSHAHIDSLTNLLIKSSRGKIGAEQAVKLRTAARSSFATNAATAAQSIEIRQLISQIEFTKKQLVEIDHKMKALLEKAATPIMSIPGIGVVCAATILGEIGDVTRFERPASLVAYAGLDPSVFESGEFVGTKNHLSKRGSRYLRWALWIAADRARMFDPVFGDYYAKKRAEGKCHKVAISAVARKLCNTIFAVLTNDTQYVCRVA

SEQ ID NO: 279076 - protein, 401 aa, unidentified
MLSIGIDVSKGKSTVCGMKPGGEIVYTPFEVQHTREGMSELVSLLHNSGEEVRAVLESTGSYHCPVVAALLENGIFVSVVNSLRMKRFCSQSIRKVKTDRIDAMQIALYGLAYWQELQPTRLPEDTYRELQLLARQYYQMTSLLIKAKVDFNAICDQVLPGMQELMSDHAGRHKLSDFVLRYHHTAHILKMGETRFRKDDCKWAGKKGYRNRERMAVLIFATAQNGIPVLPDAPSTQIVITEAIRVLHTVEASRDAILTQMQALAKTLPEYSLVREMPCIGDTLAPRLIAEIGDVRRFHSKRALIAYAGIDAPPYQSGKFCANNRHISKRGNRYLRKTGYEVMQSYVMHKPANDPIFTFIEKKRGEGKSGKLAMVAGLNKFLRVYYGKVTELYRSLPARIS

SEQ ID NO: 279077 - protein, 351 aa, unidentified
MSEALQADLVVGVDTHLDTHTAAICDARGRVISQLQVPATTAGYAQLLAQVRSAAAGGQVIWAVEGTRHYGLGLARHLAGQGEQVAEIDCSRHVGKRRAGKSDPIDAVRAARELLARPAPAQMRADGDREALRLLMIDRDNAVQSCKTARTALAAVLVTAPADLREQIRPLPRERRAKACAALTCPDGADRQTRVLHQTLIRLGQRIAALAGVAAELEAQITEIVEEMAPGLVATEYGLGYLSAAQILLSWSHAGRIRTEQAFAMLSGTAPVPVSSGRTDRHRLNRLGDRQLNRAIHTIAVTRMRCHQPTQAYVQRRRADGKTDREIRRCIKRYLARHLYRTLNNGILSSA

SEQ ID NO: 279078 - protein, 409 aa, unidentified
MVERCAGLDVAKDEVVACVRVPDGKGGRRQEIRTFLTFTADLEALADWMASEGVTQIVMEATGQYWKSPWYVLEERGFDLMLVNARHVKIVPGRKTDVKDAEWLAELLEHGLLRGSFVPPAAIRELRDLTRYRKRLIQAHTAECQRIQKALEDAGIKLDSVASDVLGVSGRAMLKALVAGERDPKVLAELARGRLRSKLPELRRALRGRFSDHHALLVRLALDHVEHLEAAVATLDEEVDRVMSPFAEARDRLDTITGVGKRAAECIVAEIGVDMSVFPTAAHLASWAGRCPGNNVTGGKRRSGKTNKGNRWLGEILTECAWAAARSRDTYLSAQFWRLGRRIGKKKAAVAVGHSILVVAWNLLTNNCDYNDLGGDYFVQRDADRQRQRAVAQLQALGYYVTLEPVAAA

SEQ ID NO: 279079 - protein, 318 aa, unidentified
MALSVQFVGIDVSKAWLDVWFEGTKRDERFSNEEAGWTALLVRLAAAGETAGVRIALEASGGYERGLREALLAAGVEVYLLNPLRVRLYARSLGRNAKNDKIDARTIARYARTAELHPETLDPARERLAELVCHRRRLIAERTAISNQLEATVVPELRAQHRERLALLARQIDATEATILAAVAPQTALVDKVRLLKTLKGIKDITAITLVALLPELGRLNRRAIAALVGLAPFDHDSGKHKGKRAIAGGRAPVRTALYMAARAAALSKSPLGAYYQRLIKLGKTPKAATVALMRKMLVTLNAILRDQQPWKHASLKG

SEQ ID NO: 279080 - protein, 341 aa, unidentified
MNHYAGIDVSLECSSVCVVDANGKILREAKVASEPEALIAWFRSSGFDLERIGLEAGPLSQWLFAAMREAGLAVELLETRHVRKAFEAMPVKSDRNDARGIAQLMRLGWFRPVHCKSMSAQETRTLLTARKLVQSKLHDVENSLRGILRGFGLKVGKTTELKFAGRIEELVAGHPHLQVIAKALLAVRAVLRTEFEVFEKQVRKLARSDMRTRLLMSTPAVGPIVALTYASAIDDPARFKSSKQAGAHFGLTPKKYQSGETDYTGRISKIGDSSVRTVLYEAAHVMLTKPVKGCSQLKSWAMRIARRAGMSKAKVALARRLAVIMHRMLADATPFNAAAAA

SEQ ID NO: 279081 - protein, 419 aa, unidentified
MELKPLYRCVAALDVHQAKLTVCILYEDGAGELRVELREFGGFKRDRRAMAEWIASFNPDAVVMESTGIYWKSPYAALERCGIRALVVNARHVKQVPGRKTDIADAQWLAILARSGLLRGGFVPPANFRELRLTSRQMQKLTGMLAAEKNRLHKVLTDAGIRLPVVVSDIHGQSARAMVKGLIAGERPEQVLASASKRLKATEEELLDALDGELTAEHRFVLSELMDHIEELERRIARFSDRLLQGLAPQQGLLQALQTIPGLDERGAAMLLVEIGDDMDAFGSAAKLASWAGVCPGNHESAGKRKAGKKRKGNPYVRRILCEAANAASRTRSALAELFKSLLIRRGRKRAIFALAHKILKIVFVLISRGDYYRDATVNYEAISVERNAPRWMRMLRKYGYLGAASGTAAASRPQPALP

SEQ ID NO: 279082 - protein, 355 aa, unidentified
MPSKADTAIARTIGIDTGKNTLHMIGLDEKGAIVLREKVSRTRIAARFVNLPPCLVGIEAGMASHHVARELVALGHEVKQVPPAYSKPFRQGHKNDFRDAHAVAEAVERPSTRCVPIKTDGQLDLQALHRVRSRLIGNRTAVINQIRGFLLEHGIPVRQGHRFLRQQLPLILATRTDVLSPRMIRIIEDLMADWRYLDERIEGVTDEIEALAHADEGCQQLITVPGIGPIISSAMVAAIGNGAAFCKGRDFAAWLGLVPKQMSTGDRTILGRITKLGNRYLRMLFIQGARAVLLRPASWAKHSFGPWLTAATRRLHRNVLAVALANKLARIAWTVLAQGRRYEARVEPRVEPAAA

SEQ ID NO: 279083 - protein, 333 aa, unidentified
MQYYAGLDIHKKTCQAIICTEKGNIVKKGRIPTDPEKIQEFFQEFKELTIAIEACNTWEHIFETLESQGHQVALAHPMKTRFIAESRVKTDKVDAEILMHLLRTGFLPTSYIPKKEIRDLRNLVRQRIFLGRYTTRIKNKIYAELLRQGIKYKKGPTLFKGIGIKWLHNLKIPSVKTYLNLYESAKKEIKKLEKEFKKQGKQYKETQLLTTIPGIGTYSALIILSEIGDINRFSNEEKLFSYAGVTPSVHQTGQNTYHGHITKQGSKHLRWILTETVRIHLIWTARHMVETKISQFYQRLCKKKPRNVAATAAARKLLQIIYHMLKNKNEFRG

SEQ ID NO: 279084 - protein, 365 aa, unidentified
MFYLGIDQHARQITISLRDESGDVVQARQVSTQPEKVHAFFQQLTRQRLCDGASFVAVLEVCGFNDWLIRMLQEYHCHKVVLIQPEDRKKCKTDRRDAAALSELLWVNRDRLLQGKPVRGVRQVDIARGTDQENRRLTTLRKEAGQARTRLVNQARHVLRRHNLQWQMPTKRLPTQAAIAWLKQLALPAIDRLEMDHLLTDLEQVQRRLKDLERVIAQRCGVSEEAVLLSSIPGVSYFTATALACRVCRVERFPRARSLANYWGLTPGCRNSGEATQRLGNITKAGSGMARWLLAQVAIKVLRKDARLREWYKRIRRRRGSTIARVAVMRKLATIIWHMLSKRKSYAECRAVAGTGAEEREKQEC

SEQ ID NO: 279085 - protein, 362 aa, unidentified
MFESTTIIAFDQHAATTVAAVLLPGHRTPALHQLSSDVPTILRFVERLRHDRTVQCCYEAGPCGFDLQRALVAHRMPCDVIAPALIPRRPGDRVKTDRRDAGQLAVLYRAGALTAIHIPTELEEAVRDLLRCREDIRADLLRARHRLSHFLLRHGRRFTATKRAWTKRHAEWLQAQRWPLPALEHTHRAYVRAVDEGVARLHAVDLELREFLTVDPLRDRVERLRCFRGIDDLTALTIAAELGDARRFPSAPSAMAFMGLIPSEYSSGTRTVRGAITKTGNAHLRRVLVESAWHYRHHPFLGDALRHRQRGAPATVIEHAWLAQRRLHRRYRRLAARGKPKQLIVTAVARELTGFLWAALTQ

SEQ ID NO: 279086 - protein, 419 aa, unidentified
MREGGGAVDVIHPRCAGLDISKKDAKVCVRINGAGRRKTSETVTTFGATTRQIMAMRDHLAAQQVTCVVMEATGDYWKPFYYLLEDLSGVEVMLVNARHVKNLPGRKTDVADATWLASLGAHGLVRGSFVPPEPIRQLRDLTRTRTAITRERTREIQRLEKLLEDAGIKLSSVAADLNGASSRAMLEALLAGETDPAAMADLAKKRLRMKIPQLTEALYGRFTSHHAFLTRMHLDLIDQHTAAIEQLTDRIEVVIEPFRRFRDLICTIPGIGGNTADVVVAETGADMARFPTAQHLASWAGTTPGNNESAGKVKSRRTRPGNPYLQGALGTAAMSISHTHDTYLAAKYRRIATRRGPLKANVAVQRALLVAIWNIATTNTTYHDPGGDYFTRLNPQKARNNAVRQLEAMGYHVTLDQAS

SEQ ID NO: 279087 - protein, 459 aa, unidentified
MEEETNLGENARVSMEIVNPHAAGIDVGSRSHWVAVGQQDKDIREFGVFNQDLFDMADWLHEKQVKTIAMESTGTYWQNLYAVMISKGFHVILCNGKFTKNIKGKKTDVKDCQWIQKLHSLGLLSSSFLPDGKTEELRTYCRHRANLLHSAASTSKKMQKYLRLLNLRLDVVVKDICGLTGLLIIRAICDGETNPQKLAALRHGNCRKSEAEIARALQSNGRKDFLFALRQELDTFDHLQKKIEQCDLEIEKMLEQIINSDDNKRQHHLDPKPHKRINKNTPENIDLNLKSYQMFEGTDLLAIEGMSYSTVLSLMSEVGIEGIRKFPSAKHFCSWLRLAPNNKVSGGKVLSSKVPKGSNRLKIALRNAANAIGNLKDSTPLRDFFQRINFRKGRVSAISATARKLAVIIWNLVVKGIPYHNPAGYLFLDQKRKLGLVKRIQKQITKFDLTKEELGFVTT

SEQ ID NO: 279088 - protein, 337 aa, unidentified
MEYFAGLDVSMEETHICVLDREGVVVHEAKAASRPEAIADELARAPSCRRVVFETGRMAPMLFHGLSHLGLPIVCVESRQAYQALKSLATHKTDRNDARGLAHLARTGFFKPVHVKSLPAHAIRSLIIARKKLVGLRVTLENQIRGLAVVFGVRLPRALTAAFIEQALGASEGIAGLSAAMQGLAAARAAVLAAVVAIDADMKRMVRASEACRRLMTIPGVGQLTALAFTAAIDDPERFKRSRDIGAYLGLVPRRYQSGEVDYTGSISKCGDRRMRTLLYEAANVMLTRYRGQLKLKDWAFAIAKRSTMRKARIALARRLAIIMHAMLRDGTEFKPA

SEQ ID NO: 279089 - protein, 345 aa, unidentified
MIYIGMDVSSKSFTVHAINEAKKLVFKGDISPTRVGLRGMIDQLGNQTKLVIFEAGNQLKWIALTLKKIKGVHIHVVHPNEIKWINQSSGKTDKIDARKLAELARGDMLPRQVHIVEGKARELRELISARSTIQSKRIALINSIRGCLKQEGYKLPEGFFKNTRWREQLKKMRIGDIQKLILEKFMDSIEGMVRSEMELTSKILEIEHKDIELLETIPGIGGLTSRVLISAIDDAKRFDNKKCVSKYGGLTPRIYQSGGVTHLGRINRDGRMEMRKVLLQCAHTITRMKSYEARPLKEFFERIKKRRGKKIAVVALARKLLTIAYGVLKTKKVYDPKILLSGLGA

SEQ ID NO: 279090 - protein, 451 aa, unidentified
MKDLSMEVVNPNAAGIDIGSRSHFVAVGQKEEDVKEFGVYNEDLSSLAKWLSDHGIKTVAMESTGTYWQNLFTVLQGTGFEVILCNGKFTKNIKGKKSDVQDCQWIQKLHTLGLLSGSFLPDQATEQLRTYCRHRMNLIEQGADTIRKLQKYLRLLNFRLDIVVNDVTGLTGLSIIKAICKGETDPEKLASLRNGNCKKSEEEIAKALQYNGRKDYLFALRHEYEMYVTLQSRIEECDAEINTLLKAQISSDENKKQHHIEKKVHKRVNKNNPKNIDINLLSYQYFEGTDLLSIEGLGHSTVLTIMSEVGNGIYKFDTAKQFASWLRLSPNNKISGGKVLSNRIPKGSNRLKIALRNAANVIGNLKGTALSDFFKRIAFRKGRVSAISATARKLAVIIWNMLVKKIPYKPENTYEFLDQKRKRKVMEMKKLIHKFDITPDDLGLQLNISNL

SEQ ID NO: 279091 - protein, 402 aa, unidentified
MNAVGIDVSKGKSMVAVMRPFGEVVLSPFEVPHSSSELSKLARLLKSLDGESRVVLESTGNYHTPVAKMLHNAGLYVSVVNAMLVHDYGNNSLRRAKTDKKDAVKLANYGLDHWLSLPGYVPEEDTRLLLKNCYRQYQQYAKVRTMMKNNLLSLLDMIFPAVNRLFSSPVRTDGSEKWVDFIDAFWHVQCVSGLSANAFSAKYLKWCRKHGYNFSEEKALEIHRTARDHVAVMPKTDTTKLLVKQAVAQLRTVSSAKAALQNEMDALAASLPEYPVVMDMFGVGPKLGPQLMAEIGDVRRFHSKKALVAYAGIDAPPYQSGQLNVHSRSISKRGSPALRRTLFLVMSVYLQCSPADEPVYQYMAMKRAEGKPYLVYMMASANKFLRRYYAAVKAYLNALEQG

SEQ ID NO: 279092 - protein, 341 aa, unidentified
MLYCGLDVSLKQTALCVVDAGGRIVREAKLATDPEVIGRFLRGNELRCERIGVEAGGTSAWLCSELRRLGHPAICIDAKHAAAALQAGFRNKNDRNDARGIAELMRVNTFREVWIKSRESQRRGMLLTARGTLHVQRVALENTVRGLLRLEGIHFPTRGSRFAEEVLERIEGSDALLPIVRPLLEARATIVRQIVALDRQIITAAQDDPVCRLLMTIPGVGAHTAVSFKACVDDPARFRRSRTVGAHFGLTPRQYSSGEVDVSGRISRMGDRGMRRLLHVAANAMMTRGRWSALKAWAMRLAKTRGARRAKVALARRLAATMHAMWRSGEPFRWTERAEAA

SEQ ID NO: 279093 - protein, 365 aa, unidentified
MPSLSHRDLTHLGMDVHKDSISIGILRPDEEAPDVEKIFNDEASVRRFLNRFADHRVLSVCYEAGPTGYELDRLLTSMGIRCQVIAPSLIPRSAGDRVKTDKRDCRKLARLHRAGELVAIRVPTREEEAVRDLCRARADMVEDLDRARKRLGAFLLRHGEVWRGGSAWTLKHEVWLRARHFEDAAMAATFSHYRAVVEERSANLDAVDADLAVHYTGPLFADGVARLSAYRGVARLGALTLAAEVCDWRRFGRASAFMGFTGLVPSEYSSGGRTHRGRITKSGNVHLRTQLVESAWAYQHGPSVGVELRRRQEGLPPETVARAWAAQTRLCGKFRRLAQKKNSKNVVATAVARELCGFLWAEMTA

SEQ ID NO: 279094 - protein, 392 aa, unidentified
MIFIGIDVAKNKHDCCILGIGGEVLKDSFTFANNRSGFDELFTAIQSSMQGKQDNEVRVGLEATGHYSTNLVAFIRDSGIEPIILNPLSVNLFRKSQTLRKTKTDKVDARFIAAMLMTLNPSPRTPISYHIEELKVLTRNRSRLVGYCAKLKLSLTRLLDVVFPELPGIVWSRNQKSVHGLLLELPNARTIANCRIDRLTNIIKDASHGRYSRDKALIIRQTAAESIGSDSPAMAFEIQQTIRLIQNAQAEIKLLDKQIAIFIKSTKTPLLSVPGIGNTLAAIILSEIGDIHRFETPAQLLAFAGMEPSTYQSGNFNANNTPMVKRGSTYLRWAVLQAARLVAMRDKTFKDFLKKKRNEGKHYNVALSHVGKKLIRVIFHMLITDRVFVPQT

SEQ ID NO: 279095 - protein, 343 aa, unidentified
MGRKIGVDLHKNSFRVCYYQNDEKYDFETYHVSVKGLEHFKKGLKKTDELAVESTGNTGHFYRAVEGKVDRIRVVNPMQFKVISQSVKKTDDEDALKIAKFLSKDMIPEVRMKSKAESQLGSLIGTRDKFVKLRTALKNKVHNILNANGIVTKTELLTSDKSLDKVLGHKLDETCLFELEIITKEIRNLNEAIVKIDEQIKDKGSRLDGYKNITSITGVGDMSATIFLNTIGDIKYFKDDKALASYFGIVPRIRASNESVHMGRITKMGNKIARTALVQSTFVAIRYSPYLRAFYDRLKVKKGSGKAIIATARKLLGIIYNTLKNKWVFEDFPNYKLAPQCAL

SEQ ID NO: 279096 - protein, 365 aa, unidentified
MTSVTLPGAVHLGMDTSKDTIVVAVLMPGEELPAVDRIVNREEAVRRLIGRFGDRGRLRACYEAGPGGYDLYRLLASMGVACDVVAPSLIPKGGSDRVKTDKRDAVRLARLHRAGELTPVRVPAPAGEAVRDLARVRAAVLADRKRAQQRLTAMLMRHGRIWREGSYWSRPHRAWLAAQSFTEPALATTLAFYRATLDARESELACIESELAPWARRDPLAATVARLGCYRGIAELNALTLAAEVVDWRRFPCARAFMGYTGLVPCEYSSGPRIWRGHITKAGSTPVRTALIEAAWAYRCKPAIGTTLARRQQGAPPETIARSWKAQRRLHGKYQTMTARGKAAPEAATAVARELAGFVWAEMTS

SEQ ID NO: 279097 - protein, 350 aa, unidentified
MEFIAFDAHKHYTLASVATPDGQLVREGRIEHERGALREFLGRCEQGSPVAVETIGNWYWIVDEIEAAGCMPRLVHARKAKLMMGEINKTDKLDARGLNRLQRSGTLPTVWIPPGELRDQRDLPRTRMVLVRQRTQLKNRIHATLAKYALHDLEVSDVFGVRGRALLRERFERLPSHTGYASRQLLAQIEELGRQVRALETRIRVTFKLTPAIQRLLTLPGVGLTLAVVIALEVGDVARFASAEKLAAYAGTTPRVHASGGKTRFGPPRPDVNRYLKWAFVEAANVICLRRGRAPHCHVSHLYDRIARRKGHAKAIGAVARHLAEATYWMLSRQEPYREPKGSGRFVHGG

SEQ ID NO: 279098 - protein, 423 aa, unidentified
MEVMHCRVAGLDVHKETVVACVRVMAGRRPTRECRTFTTPTQGLLELLGWLTASRVTHVAMEATGVYWTPVWKILSEGDFTLIVANAAHIKQVPGRKTDMNDAMWIADLLACGLLKASFVPPEEIQELRSLMRTRKQLVREQTRHVQRIEKTLEEANIKLGTVLSDLMGASGRRMIEAMIAGERDPHRLAALAERSVKASPKALHDALHGRLREQHRFLLQLHLRQWDALDAAIRQIDEQVAGHIARVDQQAADGQPPFGELIARLCAIPGVSFLSATAILAEIGRDMSRFATAGHLIAWAGLCPGQNESAGKRKSSRLRKGAPWLKTMLVQCAWAAKRAKHSYYSAQFHRLCGRRGPQKAICAVAASILTAIYHMVRSGASHRDLGADYFDRRTPQARAKRLVAQLAKLGFAAQLQPLAEAA

SEQ ID NO: 279099 - protein, 344 aa, unidentified
MKFIQFIGIDVSKKTLDASIFVAGEVINKFPHVQVRNDKQGFKDLLRWAKEQGVKTKDTLFGLEFTGYYSDALELFLTKKQICYAMLPTTVVKHYQRGTHDKNDKIDSAKIADYLFRFNGTECIKLRVLPSKALQKLKELKSERKFLVQNRVGCECRLQVAKSKSEEKHMQKLIDLYNDEIEQVEKEMLDVVAQDPQIYTTYRLLTSIPGIGFVNAINTIANTQNFTAFETARQYAKYVGVAPSEHSSGTSVQWRRRPSPHADLQAKADLSMAALHAIELSAEMRQLYERKLGNRTKDKDMQKKALNTVKFKLIREMFSVVRQARNFELRGLDKAQAETYSTEE

SEQ ID NO: 279100 - protein, 398 aa, unidentified
MTESSDYESVQVFIGVDVGKDTHHAVAINRSGKRLFNKALPNDENKLRSLISDLKQHGQILLVVDQPATIGALPVAVARSEGVLVGYLPGLAMRRIADLYAGEAKTDARDAAIIAEAARTLPHALRTLKLADEQIAELSMLYGFDDDLAAQTTQASNRIRGLLTQIHPALERVLGPRLDHPAVLDLLQRYPSPEKLASLGEKKLAAQLCKLAPRLGKRLAADIAQALAEQTVVVPDTNAAAVVLPRLALQLITLRKQRDEVALEVEQRVLAHPLYPVLTSMPGVGVRTAARLLTEVACRAFASAAHLAAYAGLAPVTRRSGSSIRGEHPSRRGNKALKRALFLSAFAALRDPISRAYYTRKMSQGKRHNQALIALARRRCDVLFAMMRDGTFYTPQAS

SEQ ID NO: 279101 - protein, 408 aa, unidentified
MLKLYEKVCGLDVHKASITACIITPEGKEIKTYGTMTADIIEMIEEIKNKGCTHVAMESTGVYWKPIYNLLEAEDVETLVVNAAHIKAVPGRKTDVKDSEWIAELLQHGLLNGSYIPKRDQRELRELVRYRRSLVQERSREANRLQKVLEGANIKLSNVVSNVLGVSGRKMVEELIKEKDEKDLEVIAQLARGRMQEKIPQIIKALNGTIGKHQKMIIAAQLEHVDFLTKKIEDIDKEVEERMLPFKESLTLLDGIPGVGLRVAQEIVAEIGTDMERFSDSSKLSSWAGISPGNNESAGKRKTGKTTKGNKHLKSALTEAARAAAKTKNTYLSAQYKRIAARRGKNRAAIAVGHSILVIVYHILKYNKPFKELGDEYFIKQREKVVMKSAVKRLELLGFKVSLEPKAS

SEQ ID NO: 279102 - protein, 394 aa, unidentified
MKLVGIDVGKNSHHFCVMDKETGEFNVAPSSFSNNKEGFDFLINSLKPYSKKSILIGMEDTGHYHVALLKFLLSNGYTVALINPKTTDLTRKMEGGITKNDKLDTITICDVLDTPERKKQYRITKVDRFDLYEQRQLTRHHHNLKEELNVYCNRLQKSIDLVFPEFNTLFSSKYSIVYMNLLKTFGSAEAIASTDIRTIRKCFEIKGKGGRISLTPEKLKECAKNSIGISSEVETIQIKHLVSQITLIKEQIAEIDKKIEEFSITNNSPILSIPGISHFSGTSILAELGDIGNYSKPSQIIKFAGVAPYHYESSQYNAQHTGITKKGSKYLRKTLYQIILPVINNNPVFKKYYLLKISQGKGHRCAQGHCIRKLLRIIYHLLETGQSFDPALLR

SEQ ID NO: 279103 - protein, 391 aa, unidentified
MTYFVGIDIAKHKHDCFIMNHLGEIIHDSFSFTNDRLGFTQFIDALSKLNASQAIQIGLEATGHYGMNLKVFLEANGFSFMEFNPMLVRRFSQATTLRRTKTDKIDAKQIALHLTSVEYKPYPNKSYHIKNLKSLTRYRDSLVKHRSLQLVTLTNILDRMFPEFKPFFKHSLTSATCVYLLDHYGTPSKIARMNLDSYSKMSSKLRRTFSYAKFMELKRLAKDTVGLEDPILSFQLQLALDAYHFAQSQVEAVELHIANEYAQIHAHIHSIKGIGLQSAASIFAEAAPFERFDSYNQLLAFAGLEPSRHQSGNTEVKGYMVKHGSPYLRQTLMNVSSSMLIHNPVLYEFYRKKRSEGKHHRVALSHVAKRLVRIIYHLEIYNTDFDFAKMR

SEQ ID NO: 279104 - protein, 407 aa, unidentified
MEVLVDRGAGLDVHKDSVTVCVMTTEGRQVVKTQARFTTFHDDLVAMREWLLEMRVTHVAMEATGEYWKPVYEVLEGAVELVVANAQHMKNVPGRKTDPKDADWGARLLRHGLLQPSFVPPPAIRDLRDLTRLRRKTIEMGARVRNRAQKVLEASGIKLGSVVTDVFGRTGHAILEQLAKNNTDPVALAELAQGSLKKKKPEIIRALQGSFTAHDAALLKHQLIVHEQLQERRTAIELQLADSVTPYEDLISRLDEMPGINRDAAIEILGEIGTDMSPWENHRRLAAWAGLCPGNHESAGKRKNVGVRKGNPFLKTTLVQAATAAVKTKGTYYQAKFFRLSKRRGYKRAIVAIAHAMLIAIYHMIKEDKPYRELGAAIFDQRSAELKTKSLVAQLEKLGYAVDLRTA

SEQ ID NO: 279105 - protein, 362 aa, unidentified
MVKAMAFVGLDVHARQTHAAVLDPAAGELAVSRLRMAPLEVVSFLQTLGPGVRAVYEAGPTGFGLARAAREQGIDVRVAAPGSIPRGSGDRIKTDRRDAVRLVRLLAAGELSFAFVPSVADECFRDLVRSIEDARADLMRARHRLSKFLLRRGERYPGPGRAWTRRHTIWLGSHRFEDACSQATFADYLAAVELLTGRRGGLIDALEQAIPSCTHVTTVARLRCFRGIDTLSAAGLSAEVGDFSRFAAPKLLSGFLGVVPSERTSDLKRRQGSITKAGPGHARRLLVEAAHHYRYQPRIGEALARRQQSQDARVIEIAWRAQRRLHQRWQHLYRERCKPAGVVAIACARELAAFLWEAATLE

SEQ ID NO: 279106 - protein, 349 aa, unidentified
MTMLAERIDAVIGVDTHKASHTAAVVTPTGGATAHLTVPSDAVGAKRVLAFARRRAPDRRVWAIEGTGSFGAGLTTYLLGQGEWVVEVDRPRRPARRNGAKSDELDAMRAAREALSREHLAQPRRRGSREALRVLLATRQGAVVERTRAVSALHALVVNAPERLRDRLRHLGTHALVLRCARLRTGHTQSVEHRATVTALCSTARRALTCEAEAADLEAALEVIVQQERPELLAESGVGVITAAAILNAWSHAGRIRSEAAFAMLAGVAPIPASSGQTVRHRLNRAGDRQLNRALHTIVLSRLTHDPETRAYAARRRAEGRSDREIKRCLKRFVARRLFRLLEASAQTG

SEQ ID NO: 279107 - protein, 343 aa, unidentified
MVAQLLAIPAEGPVWDQAVMGWTPPRRRWCARVVAFLTIEQEASVSEVSTIGLDLAKRVFQAHGADASGKVVFRKRLRREQVLAFFAGRAACVVAMEACSSAHYWAREIGELGHTVRLIPPAYVKPFVKRQKNDATDAEAICEAAQRPTMRFVSVKSEVAQANAVVFRTRDLLVRQRTQAINALRGHLGEHGVVVAKGPSHVAKLIAHVEDPATGLPEAARTVLRVLTASLQFLSERIDLLDREIARRAREDKEVRRLTTIPGVGPVIATALAALAPPADAFRRGRDFAAWVGLTPSQHSSGGKQKLGATSKMGERTLRRLLIIGASSVVQKAIKHGTPSGPG

SEQ ID NO: 279108 - protein, 433 aa, unidentified
MRSRAYRATAVKRVDWEALSSGRDGQAVQVGLDIGKEEVLAVLRWSDGRFERPWLVKNPDETGDLVSLLKRVGAGRVLRVAMEPTGTYGDVLRQAIADAGWRLDRVSTKASHDYAEVFDGVPSQHDGKDAGVVAELAAMGKCSEWPYASRSAMEQEMAYWVDWMDAQQRQYVMWLGRLEGLVSRHWPEAREWLKLSSGTLLRVLQRYGGPAALGADAAAVEQLKRWGGPYLKATTIGGLIDSARNSVGVRQGEIDVRRMQQYAGQAMAARGEIAKSKRSLEKLASGHEVIQAQAKAVGIATACVLWVHLGSPLSYHCGEAYRKAMGLNLAERSSGMYQGKLRISKRGFGQVRRWLYFAALRMIAQSPVSRWYRRKRAKDGEGAKRAVIGVMRKLAMALYAVGATGASFEASRLFPGRPLDRLGREKQTSVSRR

SEQ ID NO: 279109 - protein, 404 aa, unidentified
MFYVGIDWAEAHHDVCVVDEAGEVLTRRRVPDGPDGVRQFQATLAERAGEPAEVIVGIETDRGLFVQSLVSAGYTVYAINPFAVSRYRDRHVTSGAKSDAGDAKVLADLVRTDRHNHRQIAGDSELVEAVKILARTHQSLVWTRQRQLNAMRSVLREFYPGALTAFGSDLGSSDALAVLGLAPTPEDGHKLTKARIARALRAGGRERYLESRARAIHQALQAPQLVGASIRSLAYGEAVRSMGRIVADLGQEISRLEAELTIRFEEHPDAQILRSVPGLGLILGARVLGEFGDDPTRYSDAKSRKCYAGSAPITRASGTKTIVLARRARNRRLADACYLWAFSALSRSPGARGYYDRQRARGRSHHQALRALGNRLVGILHGCLDHRQLYSEAIAWPPTLEAVA

SEQ ID NO: 279110 - protein, 341 aa, unidentified
MEVLHAHCAGLDVHKDSVVACVRHMVDSKVTTAVKTFKTTTAELMVLSDWLSAAGATHIAMEATGVYWKPVWHILSDGEFELILANAAHVKNVPGRKTDVNDAVWLADLMAHGLIRPSFVPDEPTQQMRDLLRTRKQMVRERASHIHRFLLKLHLDQIDAFDAALARIDEEVSANVEPFRAAIELLSSIPGISSLAAQVLVSEIGIDMSRFETAGHLVSWAGLCPRNDESAGKRRSTRMKNGAPWLKTTLVQCAWAASRKKNSYLQAQYLRIRSRRGSKKAICAVAASILTASYHMLKNGTLYEDLGANHFDDRAKGKHVLRLVNRLQNLGYDVQITPLAA

SEQ ID NO: 279111 - protein, 353 aa, unidentified
MKKLFIGIDFAKEKFDAAIIEACGLKEFGNREYGTFTNDKKGYRQFFKWVKTNADKSVENEWLFCGEDTGSCSLGLSKWLYGKGLDIWIENAYSIKHSCGIQRVKSDKTDSSMIAEYAWRHQDKAVLFEPLSESLSQLREVFLYRHKLVQQHIAMDVRKQDKEAAEPSKAISFIKRKSKHLMSEIDNAIKECDLMIDRIIESDAELKENYAIITSIKGVARQNGACLLIFTNNFRRFDLDARKIACYYGVAPFGKDSGTSIHSPAKTSHFANKLIKSLLGQAAHCAKKFNPEIREYYNRLIGRGKKPQVALNNVKNKLIRIIVALVRKKVYYDPKTYMFYNAKFTDVKKMLNS

SEQ ID NO: 279112 - protein, 369 aa, unidentified
MNDITYVGLDVHKTTVCVAIAESGRGGEVREVGVFENRPDVLRKMVARLGKHRRRLSFCYEAGPCGYGLHRLLTGLGHECVVVAPSLIPMKVGDRVKTDRRDALMLAKLHRAGELTPIWIPDAAHEAMRDLVRARATAVRALSKARQHLQGFLLRHDRIYHGARAWTLAYRRWLTTVRFEHPAQQIVLQDYIHAVEDAESRRDRLTRQIEELMPSWSMAPVAASLQAMRGVALVAAVTVVAEVGDFRRFTNARQLMAYLGLVPSEHSSGSTVRRAGITKAGNALARRVLIEGAWTYRMSARVSRKLHDRLEPLSAAIRDIAWKAQVRLCARYRRLAAIGKPKVVVTTAIAREMVGFIWAIARVTQPELI

SEQ ID NO: 279113 - protein, 418 aa, unidentified
MSKINERCAGIDVGKRFVLCCVLTAAANEEPCPRTLRFDTTVAALIRLREWLVAERITHVVMESTGSYWIPIFNILEDHFVVVLANPEEVKNRKGHKTDRKDAEHLADLLRHNHLRASYIPSKPVRELRDLTRRRLQLTQDATRERNRVEKLLEHVNVKIGNVLSDVFGASGQSMLLALLDGNATPEQIARLARGQAKRKIPQLTEALNGHGMSDHERLLIRSCLRHLACLEEELEAIDQEILRRMKTPLFQRPFLLLQTVPGIGQLAAASILAETGVDLSSFPTVEQIASWAGLCPGNRESAGIRKGSQTTNGNQYLRTTLVQCAWAAARKQGSVFQARFRQLSSRRGQKRAIVAVAHQMLTILYWMLKQDAPFRGSETAPQQRRRQRRAHHHLKCLRRLGVDVEIVTDRGIPNAIV

SEQ ID NO: 279114 - protein, 330 aa, unidentified
MKCIGIDVSKLNFTVAYPTESSYRLEVFQNNSRGIKKFITSIHDSDHHCILEATGNYSMLLVYMIQEAKIAVSMVNPKQISHFAKMMLSVTKTDNLDAKLIAMYGEKMEPAIYKIPSLTIQRLRQKRTLLRQFKKQLRMLLNLQESFLALPKVDATVSKALKRSITFIEKRVKELDLDMVAVTRAEFSAQLTRLSSIKGIGNGVATALIMATGGFTYFDSAKKFAKYIGVCPSYQQSGTSIKTKGVINRHGDPELRSLLYIASWSAIRFNASCKDLYERLKSRGKASKVALMAVINKLLRQAFAIVRSNTDYLDSHMPLVNKLNQKTFVI

SEQ ID NO: 279115 - protein, 411 aa, unidentified
MEVVHVRCAGLDVSKKHAKVCVRVAGSGRRKTIETVTTWGSTTSQILALREHLITEQVTSAVMEATGDYWKPFYYLLEDAGFEVLLVNARHVKNLPGRKTDVADATWLAQLGAHCLVRGSFVPPEPIRQLRDLTRTRTAITRERGREIQRLEKLLEDAGIKLSSVASDIAGVSGRAMLEALIAGERDSAALADLARRRLRSKIPALTEALNGRFTDHHAFLAKMHLDLIDQHSVAIEQLTERIEVVIEPFQGFRDLIATIPGIGPLNADIIVAETGADMTRFPTAAHLASWAGTAPGKNESAGKSKSSKTRPGNPYLQGALGTAAMACAQNPTTYLGARYRRIATRRGPQKANVAIQRSILTAIWHMATTGTLYDDPGADYFSRLHPERAKNRALHQLEAMGYKVTLDRAG

SEQ ID NO: 279116 - protein, 343 aa, unidentified
MQTVTTIGFDIAKSVFQVHGVDAVGKVVIRRQLKRRHVLVFFEKLPPCLVGIEACASSHHWSRELQALGHTVRLMPPAYVKPYVKRQKNDMADAEAICEAVTRANMRFVPTKTPEQQSCLMLHRTRHMFIRQQTALINSIRARLAEFGIVAPVGRRGVTELLRVVDDPNDKRVPDVARACLAALGAQLLSLKEQILEFDRMILAWHRSNQTSKRLHYIPGVGPMLATALVASVADPSTFRSGRNFSAWIGLVPKQHSSGGKERLGSISKQGDRYLRSLFVAGTLAVIRYAKIHGTEHRPWLTALLGRRPTKVAAIALANKIARMAWAMMAKGEQYKQPAALAR

SEQ ID NO: 279117 - protein, 324 aa, unidentified
MIDGVLGIDVSKNTLDASMSSCNKVRARSFANSPDGWRHLLDWLITQRVRRVHACLESTGRYSLGIAGALNEAGHVVSIVNPAQIRDFARTKLGRNKTDGVDASHIREYCELFKPKPWAPPSAAHRRLGELQTIRAGIITGLTEWKNRKNSGMIDAVAQSLADVTISHFTSQLGAVDEAITQTIDNDSVLRRKRDLLLSISGVGETLAGVVLAELPGPDVLHSSAQVVAYVGLNPRQHQSGTSIDRVTRISKIGNAVLRAALYMPAMSAMRYNPAIVALVARLKSQGRLKPKQIVVAAMRKLLVLCFGVLKTGKPFDPAIAMGC

SEQ ID NO: 279118 - protein, 319 aa, unidentified
MEILGIDVGKRQLHAALLQGDRCASKSAPNSPAGIAQLQAWLKNRKVERVHACLEATGGWSEDVAIALHDAGHVVSLVNPSRVKAFAQSEMLRTKTDRIDAALIARFCRLHAPEPWIPPAPEIRILQGLVRRYQSLVEMRTEEQNRLQAPIVAPAVNESIRAMLEHLEHEIERVDREIAQLFDQHPPLRRQRDLLTSIKGIGDTTAARILGEVPNIAEFRDVKAIAAFAGLSPRHYQSGSIHRPSRIAKTGNANLRRALYFPALSAMRFNPLLKRFADRLRQRGKSKMAVVAAVMRKLLTLAYGVLKSGRPFDPGYPSA

SEQ ID NO: 279119 - protein, 347 aa, unidentified
MRFYTQTHKFYCGIDLHARTMYFCIVNHDGKIMAHKNLPTEPEPFLKLIEPYREDIVVGVECVFLWYWLADLCADEGIPFILGHALYMKAIHGGKAKNDKVDSEKISRMSRGGMFPMAYVYPRKMWADRDLLRRRCFFVRKRAELLAHIQNTNSQYNLPPIGRRLDRKKNREGVGEHFPLPGVRKSVEADIQLLDYYDIVIKDLENYIKRMTKTHNPHAYYLLQSVDGIGPILAMTIIYEIEDIKRFPRVQNFSSYARLVKCSRGSAGKIHGFGGGKIGNAHLKWAFSEATALLLRENPRGKQYLARLEKKHGKGKALSIIGARLGRAVYFMLQRGEPFDREKFYAS

SEQ ID NO: 279120 - protein, 383 aa, unidentified
MKAVCGLDVHKDSIYLCILHPDGELFEQVFGVLTFQLHEMCKLLKKHHVSEVSMESTSIYWIPIWRVLSPHFTLRLVNPYFIKQLPGHKSDVKDAQWIAECTMKELVNGSFVPPEIIQQLRQYDRRIFDLNEEIVRKESKVDAVLQRCNIRLSNYVSNIECKSYRTVVRRLSEGVTDPQELIKEIHGRIINKHGRETILASMEGVVSQAEIDVLRQLREEIDIAESHKKECQDKMSEICQKYFPEELRRLQTIPGIKERAATSLIAEIGTDMSKFETANHLAAWSGLRPRNDESNKKVKSRKTTHGNSYLRRTIIQCAWAASRQKDCFFSWFSYHQTVVRRKNKMKVIVAVARKMLVAVWHLLHDNVEYIDFRHDCEESANNG

SEQ ID NO: 279121 - protein, 346 aa, unidentified
MAAFAALDVSKKSTSIHIVDEKGVCLWRGKTLTNPDALAEALSPFSDDLTLVGLETGSWTTWLWHELTERGFPMVCMDARQAHAALSVTINKTDANDAQGLAHLLRTGLFREVRVKGWEDMQKRTLLRARSTMLRCVLDLANAIRGALRTFGISPPAGTGNGGAKTFERRVVACLTARADLAIIIGPLLEAWRAGRTQVARHERAIRAIVRSDPRCQLMMTVPGVGYLTALGFVGAVGDPETFRSGRTAAAWIGLTPRRYQSGTINQQGRISRQGDKLLRAYLYEAAAHILTRSSKDSAIRRWGLKLRDRIGFKRANVAVARKLAVVLHAMWRSGRPFEAEGCATG

SEQ ID NO: 279122 - protein, 405 aa, unidentified
MNAVGIDISKDKSMVAALQPMGHVVLKPREYPHTGTGLEHLALDILALGEDTRVLMEATGRYHEPVAAALRKYGVWVSVINPLFIKQSGGGSIRKVKTDKADAMKIAKYALDNWVDLREYIPMENTREQLKLCSRQYNLYMKNVTALQNNLISLTDKTFPGVNELFSSPDRADGSQKWIDFMMTFWHCECISLVSETAFTERYRKWCKRRGYHFSALKSAELYAGSTRHIATLPKNSSTKFLITTAAKELAFAKATLAAMRTEMTRLAQQLPEYETVRAMYGVGEKTAPQLIAEIGDVRRFPRRSSIVGFAGVDPAADDSGKHISKSNPTTKRGSPHLRKTLYQIVCAYLRKAPANEPVYQFLDKKRAEGKHYFVYMTAAQNKFLRIYYARVKECLNTTDSLYTP

SEQ ID NO: 279123 - protein, 364 aa, unidentified
MPMLAECIDAVIGVDTHRDTHHAEIAHPSGAVIAACSIPSTSTGYAQLLAWASEHAPGPRLVISIEGTRSYGAGLAPAAAAAGLMVTECEQPTRKTRRGKGKSDPIDAHLAVLAALQLDTAKLAIPRADGDREALRILLCARAELTTTATGQANRLRALLRDGDDHDRDLARGRLTSTTLAALARRRLPGDASRAQAVRHREIRRLVQALQDATRALKDNNAELDAIVSDLAPGLTSRPGIGPVTAAQAIVSFSHPGRCRHDAAFARLAGTSPIEASSGQTTRHRLNRGGDRALNKAIHVIATTRMRSDPATRAYITRRRAQGKSDREIRRCLKRYIARQLYRALTTAMTPDLHPTATTRRSTT

SEQ ID NO: 279124 - protein, 370 aa, unidentified
MREDSVVYVGVEAAKAKHAIAIAEGGRSGEVRYVGEIEATPAAVERFGRKLERKDPRLPFCSEAGPTGSGLSRHIVALGHRCEVVAPSLVPRRPGDHVKTNRRDAITLARLLRAGELSGIWGPDAVHEAVRDLVRVRSAAGEDLRKKRQQWLSFLLHHGRVFTGRRSWGPAHTRWLAAQKFDHPALQIVVQDQVDAITEAWRRLERLEAQLAELVPTGSMAPVVSADQALRGVSVLVAVPFASEVGDGRRFDRPRQLRALMGLVPSERSTGDTVRRGGLTLAGHRRARRVRVEGAWSYRHPARVTEPMRVRLEGLPKGVREIAWKGQTRLCTRSRPMVGTGQKAPIVGAAIARERVAFLWAMGRPVAPAP

SEQ ID NO: 279125 - protein, 482 aa, unidentified
MKKIKNIFRDGNQRFKVITDKHSLNEVLVVAIEIGKFNSKGIIADMYGDLIMDNFQFPNNQRGYRFLTGKIKSASQIADSKLVFIGMEGTGHYHENIALQLKSDGFSVEIIHPYDSKHERENKNAKTDGIDLLSIARMLITNKGRRSTLSVGIYSKLKVVARSRRKLVFMRTSLKNRITALVDRIFPGYWPKEVDEEIFSDNWGKASLLVLEHYPHPEKITMMGVKRLANFLKKHNTKLGEETARKLVEAAKNSLSRPFKDMDSHCLTLKCLISIYRTIYENIEKLEREMAVLLIQTPGAYLLSISGISVIYAAEFMAELGDITRFSYPKQIMSFAGNVPYVSQSAEYEAKGLPLTKKGASGLRPLLNQIALSLNSHCPQFGRYYQKKHFEKCDRPGIARIATGNKFIRLAFCLIKHQKLFVPEGFDPSLMSYKDYYCEVFSQMSSKLRNYKIVPSDLSGCEENYFGKIKSRLEDAYGLNLG

SEQ ID NO: 279126 - protein, 471 aa, unidentified
MNDLQPQNLLAVGVDTAAKSHQAVLLRFPEEILLEREIENSPAGFKALDDHVQELAAAHGLSPLYGIEGSGFYGRALADFLLHRGRDVREVQAVKVNRQKAYYGQDKSDQIDARAAAAIALRSAQELPRVVRRDPTTEAIRKTSRFLDQLVREKTRHLNQLHAALLETYQALAKTLFEDLNLRAALAFYQSYPRPHDLAGTSTRKLANFLTKNARGKWGHGKGSQAWKLAETILVQTQPLIAEPPPPGAEIHAEVIRGLCAQILAAKELVRKLKGRLEKDLLPQTGLKLDTLTGIDTRAAAIIIGETISADRFPANDAFARYNGTAPAKHSTGGKTKHRARHDCNHRLKRIFYLIALSQSGHDPMGKAYYDACIARGLSKPQALKRLGRRISDIVYAMMRDKTEYNPLTARASMGRRDAKVKNQNGEAAHVESVPPGTIPREKSLTSPAVNFTTGESKCKKIIEEPKKLLT

SEQ ID NO: 279127 - protein, 358 aa, unidentified
MQLHDANTPKVFIGIDIHKKTWAVSIQTDLFFHKTFSIPSDPEILYHYVRNNFVDHQIWLAYEAGCCGFHAARYFLNLGWEVLVVNPADVKFSDKDRYQKTDAIDSKKLSGQLKKGDLKGIFIPTAEHEELTSLARHRSQLTRQLRKSKVQIKSMLLYHGITIPELYDNNYWTHKFLDWLESLELNSLPGNLSLQGKIRIYKFIKLEYQQTANQLRAYCRKHHKMDYYLLKSIPGIGGFLAAVIIAECGDLRRFNNENQFASFIGLVPGVYSSGQSEKKMGLTHRARHQLRSYLVEAAWIAVRKDPEMQAYYRKHYGKNVKNIIIKVAHKMSRRILSVIKTQTPYEVNHSLVTEITTS

SEQ ID NO: 279128 - protein, 342 aa, unidentified
MKDSIYDHYIAIDWSVKNMAIARMTKKSNTIKTIDVPSDIIELQAYLKNLRGTKILAIEETSTSQWLYTELEGYVEKILICDPYRNRLLGEGAKTDKIDAAKLVHLLKAGLMKAVYHSAEKFIYIRRVVSGYEDMVKAGVRLKNQRYALLRTCGKSGKEKDINVGDQGEQFVLECLDRQIKAYEEEKNGFGKEFVRLARKHPEIKHQKSLPGIGTINAVKIVSRVVSPYRFADKGHYLSYTGLVKLEKISGGRSYGKKNPRYCRQLKSVYKSGVLAAIGGNNPINDYYEHLIREKNYPVHNARNSACRRLATLSLGVFRSGKKYQPYRRDRVKVNKGIPSDL

SEQ ID NO: 279129 - protein, 406 aa, unidentified
MKEFTAKVETKSEAMTGLAGVRRVLEQAGELYGAYIGLDVHKETIAVAIAEYGRAEPAYYGEIANTPKKVTKLIERLSARYGGERLLWVYEAGPCGYGLYRQLIATGHACEVVAPSLIPKKAGDRRKTDRRDALGLARLARAGELTAVWVPGQEQEAIRDLTRAREDMKGLELKARQRLGAFLLRHGKVYDQGKSRWTQAHFRWLETVKFDSPIQQIVLQEYIEAVKALQRQVAGLEKQMREVLPGWSLAPVVEGLMALRGVSLITAMTILAELGDISRFDSPRQLMAYLGLVPGEDSSGPNRRLGPITKAGNGHVRRVLTEAGWNYRFPARKTRDIEKRAEKTSPAVQAIAWEAQKRLCGRYQHLLKAGKLKQQVVTAVGRELAGFIWAIACEVMGKAHGSRATA

SEQ ID NO: 279130 - protein, 346 aa, unidentified
MNKMDYGGIEVSAEKLLVALERDGVRQPQREFTNTPSDHAVLCRYLLRAGRTVRVCLESTGVYGLDLALALSGHPGLQVRGANPRAVRHFATALMPRSKTDPLDAEVLREFAQRMPFQPWRAPSPAALALQALARRLAALTELQKQEKNRVHAARVSETTPAAVLRDLQRSLRSQCRALARLTREALQLIAQDPELQLRFQLVLSTPGIAETSAVQILAELAVLSPNLQVRQWVAHAGLDPRQYSSGSSVHKKTRIRKTGNRHLRRGLYMPALVAVRHDPPVRAFYQHLLERGKLKMQALVAVIRKLLHALYGMFKSRQPFDGSKLYRLPEETCVLQPGFSTTEAA

SEQ ID NO: 279131 - protein, 387 aa, unidentified
MPHVNDSSRSLVTFEQDATLVAVIEMSQSSWLVAGTVPGIERQPRKKIIPDETTLLRLLHRWRDEAIQKGRTITRIAVAYEAGRDGFWLARWLIGHGIDAHVIHPTSVAVSREHKRAKTDRLDTAMLMRVFIGWLRGERGHCGMVAVPTIEEEDAKRPSRERENLVGERTRIVNRMKAALARLGIRGFKPELRRALQRLDTLRTPEGLLIPPNTLDEMRRDLARLAVIREQIAGIERARLERLNQAPDLRPHAMVRLLAGILGVGIETADMLVQEVLSRNLRDRRAVARYAGLTGSPDESGSKRREKGLTKSGNARVRRGLIQLAWRFLMFQKDSALAQWFRSRTEGPKGVRKTKMIVALARKLLIALWRMVTFGEIPQGIVLRQPA

SEQ ID NO: 279132 - protein, 383 aa, unidentified
MRTVCGLDVHKDSVFLCILCETGEIIERVFGVLTFQLRDMRRLMQSYEVTDVTMESTSVYWIPIWRVLEPHFHLRLVNPYFIKQMPGRKSDVKDAQWIAECTHKDLIRGSFVPPEIIQRLRQYDRRIFDLDAEIVKKLSKLDAVMQRCNLRLSNYVSNTDTKSYKQVVECLCNGVTDPEELIKRIHGRIINKHGRETILAALTGVVSDAEKDVMRQLRQELEMAESHKQECHNKMVDICQTHFPEQFKRLMSIPGIKERAATSLIAEIGVDMTKFQTAAHLASWSGLRPRNDESNRKVKSRRITHGNAFLRKTLIECAWGASRTQGCFFSRFSYFQTQVRKKNKMKVLVAVARKLLIAVWHVLHDQTDYRDFDPDRRLSTNNG

SEQ ID NO: 279133 - protein, 428 aa, unidentified
MNKNEANPTEEYAALIGLDWASEKHDVWLWDVATGKSRHRVIEHTPEALADWLSELQSQYPGQRVAVCLEQSRGSLIYALMGHAFLDLYPVNPVTLAKYREAFAPSRAKDDPGDAKLLAEILRLHRDKLAVWKPADDQTRLLGFLNEERRKAVNLRTKLVLRLQAALKLYFPQAIQWAGTDLGAPMACDWLLKWPTLEALQRAKPQTIRAFYYAHNVRRPDLVEGLLATIASAKPLTQDAPVIGAHRLTVQMLAKQLRTLHSSIAGYDKQIAQLFKEHPDALLFESLPGAGAILAPRLLTAFGPDRTRHPDAKGMQTYCGVAPVIERSGKSRWTHWRWNCPKFLRQTFHEFAKSSVIHSAWARAYYEQQKQRGKGHNAAIRSLAFKWIRIIHRCWQTRTPYDEGLYLQALARRGSPLCALIAAPAREA

SEQ ID NO: 279134 - protein, 425 aa, unidentified
MSRRTQPICPQWQHLQWCAGIDWGRQTHHVVLVDPDGRIRLDMPFDHDAEGWDRLRRAFRQLAGEDLSVVGVAIETRSGPAVEKLLELGCTVFPMHPKAAQRYRDRKAPSGVKDDGLDAWSFGDALRTDGYSWRAMDPEDPLTQELRLVCRDEVGLIERRTALINELRQALHEYYPAALEAFADWTSPAAWAFVKRFPTPQKLRQAGQRRWEKFLHTHRLYRPQTYSHRMEVFSRATGLCGSQPVTQAKSLLAESLVQELRNLQTQIDRYRKRIQQLFDQHPRREVFDSLPGAAEILAPRLLSECSSLPSRFDDADGMRCYAGTAPVQYESGQIRRVRLRRSCNKHLRAAMHLWVNASRRKCAWAQVYYQRKRQEGKSHACALRCLGQRWLKILWKMLETNRPYDEAYHTRNQVRHGSWVLALQP

SEQ ID NO: 279135 - protein, 341 aa, unidentified
MNIKRIGIDLAKQVFQVHGVDGQEKVVLRKQLRRAQMLDYFKTIPPCLIGMEACSSAHYWARELQKLGHTVKLMAPQFVKPYVKSNKNDANDAEGICEAVARPTMRFVAIKSIAQQDIQAVHRVRSELVQQRTAKVNQIRGLLAEYGIVVGRRVDVLHNALPLILEDAENGLTPDFRVLLEGLLQDLATLNGRVDELDKTIKTLASSNTDAKRLQQIPGIGPITATALVCAIGDGKQFKRGRDMAAWLGLTPRQHSSGGKDRLLGISKRGDAYLRTLLIHGARAVLKVAGQKDDPRSRWLQNLCSRRNKNIAAVALANKNARIAWALLSKETDYLPEGEPA

SEQ ID NO: 279136 - protein, 354 aa, unidentified
MKILAVDLGKYNSVACLFNTTTNQSEFETIATQRWAFEQLLNQTQPDQIVIETSSITGWVHDFCQNLGYPVLVANPSAEAWRWKNVKRKTDKDDAPKLAKLTALEQVSAVHVPVAERRQYRLGVKYRKTLVNRINRIQNHIRALFDHQGISIPSGHKAWTAAGIETLSQHRKPLAECQLNEFWRGELDLELQSLDALWQQLQQVDDQLEKVAQQDEQVQLLQTIPGVGRRTAEVIVAALDNPHRFQNARQVSAYAGLVPDQRQSGQTNRLGRITCRGSRILRSALVEVAWVMLRYNPWAESIYQRICGGQKTRKKIAIIAVARKLLVRCWAMLRHKQPWQDSTPSLSASTSPSS

SEQ ID NO: 279137 - protein, 386 aa, unidentified
MATSTTSRIKQNTLPQPTLYLAFELGQTTWKLGFTIGVAQQPRERTIPAGALETLQQEIARAKQRFGLPEDTRVVSCYEAGRDGFWLHRYLVAHDVQNHVIDSASIEVNRRQRRAKTDRLDVRKLLTMLLRHMAGERKVWSVVRVPSVDEEDRRQLHREMQTAKQDRTRVINRIKGLLAGHGVQLALQGDVDAQLDQVQQWDGAPLPSALRTRLKRAWQQVGFLTAHIQTLEAERRALLRHRADPVIAQVRQLFTLRGIGVNSAWLYVMEFFAWRDFQTSKQVGALAGLPPTPYQSGQSRRELGIAKAGNRHIRAMAIEIAWAWRRFQPDSALSQWYERRFGAGSVRLRKLGIVALARKLLIALWRFVKTGVLPEGAVLKTAAPRR

SEQ ID NO: 279138 - protein, 354 aa, unidentified
MSNRINSIVATIGIDIGKNAFHVVGLDRRGAIVLRQRWSRGQVEARLANMPPCLIGMEACVGAHHLSRRLQSQGHDARLMPAKYVRPYSKGQKNDFRDAEAIAEAVQRPTMKFVATKTAEQLDLQALHRVRERLVSQRTGIINQIRAFLLERGVAVRQGLRFLRAELPIILATRSDVLSPRMLRVVEELAGDWRRLDERIAGLSKEIEDLARQDPACERLMTVPGIGPIISSAMVAAIGNGAVFTKGRDFGAWLGLVPKQISTGDRTILGAISRRGNRYLRALFVQSAWVVLIRIKDWDRYGLKTWIDAAKKRLHHNVLAIALANKLARIAWAVLNKERAFECVKTHATARQPA

SEQ ID NO: 279139 - protein, 433 aa, unidentified
MQDVQDEPLFAERVAGLDIAKAGVEVTIRVPSDTAAGRRQQETRTFGTIRRELESLGDWLRCWGVTKIGMEATGDYWKPVFFLLESRGFGCQLYNAAQVKALPGRPKTDRADSIWLARITERGTICSSFVPPGPIRALRTHTRYRRHLTQARTAEKQRVEKLLEDGHLKLSSVISDIHGVSGRDMLGAIAAGQRDPKTLAQLARGTMRGKIRRLEEALDCSFFTGEHAAVLAMMLVTIDHYTTQIEALTARIEALIAPYLSQVEQLDAVHGIGQVCAQDLIAETGIDMTVFPTAAHLVSWARWSPQVKQSAGKRKGSNATGRGNPYLGAALGEAAISAGRTQSFLGAKYRRLTRRMPKKKALVATGNSMLTIIHALLADPAARYHDLGPDYYEQHMHARRQARNHVKSLERLGYTVTIQALSPDTSQPQTATA

SEQ ID NO: 279140 - protein, 264 aa, unidentified
MDRYIGIDAHATSCTLVVIGPSGRKLTEQVIETNATALVEYIQSVPRPRHLCLEEGNQSAWLHQVLSPHVDELVVTGTTEKRKDHKNDRRDALARAQELRLGAFEKIVFKAPNQFALLRHLASTYDLITRDVVRTQCRLRALYLSRGLHSTSKTLYGAAHRDEWMGKLPASCQPSAQMLYAELDAQRELKDRAEKQLVAESHRYPISHMLETCPGLGPIRVALMIPVVLTPARFRTARQFWSYCGLGIVMRTSSDWVRADLAPS

SEQ ID NO: 279141 - protein, 462 aa, unidentified
MNKNNVKCGSGKSSDKMRVPSEITKINPDVAGMDLGSEEHWVCVPSDRADKNVQRFGVFTEDFRKLAAFLRASRISSVAMESTGVYWIPLYEFLDKEGFEVVLVNARHLKSVAGRPKTDVYDCQWIQRLHSYGLLQGSFRPSDKICELRGLTRHRAELVADAGTKIQHMQKALQQMNVRLDKAVSDITGKTGTQIIERIIAGDRNPNELAKLRDSRVHASENEIAAALDGNYRREHLFALKQSYESMCFIHEQMEACDEEIKKVLDVLDKKLDSTKASPLQPRKGSKRSNKNQPHFELRPALYEIYGVDLTQADGFQAATVLSLLSELGPDLSKFRSGKYFTSFLGLCVNKEISGGKILTNKTRKVQSRAAKAFRMAAQSLKESNCYLGRFYRRIKIKAGAPKAITATARKLAVIFYNMVTRKEEYKPIDPDAFDKKYQERILKSLKKRAQSMGFDLVPAEV

SEQ ID NO: 279142 - protein, 398 aa, unidentified
MDLPVYYELETNNGNRDYRIQIGGHYMNYNTVYVGMDVHKESFTLCSCKYEDEKASHYQRTPASYKNVLRYLAFLRTIYGEDTRFVCGYEAGCLGYSLYHQLENFNVECVILAPTTMLEQRSKRRIKTDKRDAEIIARSLAQHNYSPVHIPTETDNQTKEFIRMRDDHKAELKKIKQQILSFCLRQGYQYDGSGNWTAKHVKWLRSLKPAGLYKEILDEYLLTYTILTDKLNRLDQRIEELASKEEYKESVSKLTCFLGIKIHTALSVIVEVGDFQRFVSARKFAGYLGLVPGQHSSGDDRNGLGITKAGNTHVRRLLVESAQSYTRGKIGYKSRVLRSRQAGNSPQVINYADRANERLRRRYYKMVLKDGKKYNIAKTAIARELACFIWGMMTDNIY

SEQ ID NO: 279143 - protein, 324 aa, unidentified
MNEYVGIDVSKDQLVVCLLTTQGSTESQVDNTRKGFNQLHHWLKKKRATQAHICLEATGIYGIEVAQFLHDKGYLVSVVNPARIKGFAESQMRRSKTDTLDAAVIAAFCRALQPERWTPPEPAWYELRALLRHLDDLQQTRQQQVNRLEAATTDWVREQLRQHIAFLDEQITQLKQQITDHLNQYPDLKQQVELLTSIPGIGNLTAARLVAEIRSFSAFEDVRQLVAFVGLDPTRHESGRSVRGGRSISRKGRAALRAALYLPALVAKRHNPLLRAFAQRLEASGKLPKQIIVAVMRKLLHLAYGVLKSGQPFDPHFGQSHLVA

SEQ ID NO: 279144 - protein, 342 aa, unidentified
MEAKRYIGIDLHRNCFTACLRLENGREYWKEWKLEELAKFVEKLRPSDQVAVEVTGNTRLFHDAVAPHVARVVAVNPSQFQVITHSVKKTDTNDARNLALYLAKDLLPEVRMKDKTQAQIASLTQTRDSMVKLRTALKNKVNNLCSAQGVNLNKESLSSEKGLKAVLEMHFDLLVNLELKIIIDQIRSLNKSIAELEETIGKQGQKLEGHQNLTSIKGIGRLSSGILLSIIGNIGDFADEGKLAAYFGIVPRVSNSNETEHSGRITKRGTKLGRTTLIQCALIAQRYSPYLKTYYEKMKSRRGTGKAIVALARKFLGIIYRTLKNKWVFADFPNFVLAEEAA

SEQ ID NO: 279145 - protein, 347 aa, unidentified
MAAVIIGVDPHKGSYTAVAISPAEEPLGELRVRACAGQAQRLLAWAAAWPQRTWAIEGAGGLGHLLAQQLLAAGEQVVDVQPKLGARVRLLASGDINKNDPNDARSVAIAALRSPARRQVQPDDHAAVLKVWSKRHRDLGRMRTQVVCRLHAVLCELVPGGVSKAITAGQAARLLESITPSGAVEAARCELAAAFLDDLRRIDAQLRDAKKKLDVTVRASGTTLTQVFGVGPVVAATVIGAVRNVARFPDRDHFAAYNGTAPIEVSSGPRKIYRLSRRGNRRLNHVIHMAAVTQIRYRHSDGRAYYERKLAEGRTPKEALRALKRRVSDVIFARLQADAHHAAADPR

SEQ ID NO: 279146 - protein, 415 aa, unidentified
MSSKIHKSCGLDVHKKFIIATILTDDDSSKKRKRFERNEKGIEEFKSWALSEKCDVIACESTSDYWVPIYESLNDHITVIVGNARDIKAFTHKKTDNIDSEFIARLALNNMIQPSRVFTRKLREFRSLIRIRHTFVRKRSDIKNEAHSVLSNEEFHLDNVLSDIFGSGGKRILYGVISGKPVDEIIKSLPKNLRKKQDQIIEVLNSEISENAIIRLKSCLDTISSFDVQIKKLENEFFRYAYHNYEREMKILTSVPGIGELGAATLLAEIGDFNDFPSGDKLASWLGVVPTVHQSADKYYNGRITKRGSKVARWILTQIAHAAARTKKSKLKDFYLRKKDSLGFGKAIIALARKIVTIIWHIITNDELYEDDTGYSKGYSVKKRTFEAISIPIDERIKILHEVKVVVDRKDHGIG

SEQ ID NO: 279147 - protein, 347 aa, unidentified
MGKSITDLSSVTTVGLDLAKHVFQVHGVDASGRVIVAKALRRKDVLAFFAQLPECLVGMEACGSAHHWARELIKLGHDARMMPPAYVKPYVRRQKNDAADAAGICEAVTRPSMRFVGVRTLENQAALMHHKLREMLVAQRTQLINALRGHLAEIGVIAAQGLKNARELAWVILAEGDETIPACVRAALAPLVRQLHALDQELARSDQTIAAMARDDEMARRLMTIPGLGPVTASAMATSVQDVSVFSGPREFAAFLGLTPRQNSSGGKERLGRVSKMGNRYLRKLLVVGAHAVLYHRKPHDDALRSWAKKLMQTKPFMLVAVALANKMARIAFAIMRGKTSYSAAPA

SEQ ID NO: 279148 - protein, 341 aa, unidentified
MRLFIGLDVSLAKTAICAVSEHGKIVQEAEVASEPEPLLAWLHTLDGTIAALGLEAGPLSQWLHRGLTDAGLDAVLMETRQVKGALKAMPIKTDRRDAEGIARLLHLGWFRPVHCKSVSAQEVRAILSARKAIQQNMLALEMSLRGLLRNFGLKVGAISRGRFEHRIRELAEGNAMLDTATAPMLRARASLRQELAGLEKLVRQMAQDDPVCVRLMTMPGVGAVVALTYRSAVDDPARFTSSKNVGPWVGLTPSRNQSGERDVSGGITKAGDVNLRRALCQAATVMMNRGRSTWLRTWGAQLAKRRGRKRAMVALARRIAVILHRMWVDGSTFQFEAAPTH

SEQ ID NO: 279149 - protein, 342 aa, unidentified
MKLYGAIDLHSTNSVTVVINEQDQVVYQKRLPNDLSLIAQQLSSYRRSLQGIVVESTYNWYWLVDGLMEKGYRVHLANTAAIQQYNGLKYTDDHSDARWLAHLLRLGVLPEGYIYPKQERMVRDLLRKRGQLVHHRTANLLSIQSLISRTTGNSISATYIKALNIEHVDGVLPNPDLVLALKANLAVMNSANAQIEILEKAVQDRVKLRPQFRFLKTVPGIGPILALTIMLETGEIERFASVGNYASYCRCVGSKKISNGKRKGAAIPKTATSIWPGRLWRRPILRSALIRGSKASIRKRNPRATQLWRSKRWRTSSAGLATTLSKIKWRLISPRPLPSRSI

SEQ ID NO: 279150 - protein, 344 aa, unidentified
MPTEAVKSVYAGLDLHKHNVFCGLIDQEGQPIYRRRLRAELPTILQALEPYRPQLQAIAVESTFNWYWLVDGLQAADYPVHLANPAGMSQYSGLKQTNDETDALWLAELLRLGILPEGYIYPKAERPVRDMLRRRMLIVRQATQTLLSLQSMVTRHTGQSVGATKLQDWTLQEVRATFADSYSQQTATALLELLGDQRRIQHSLEKQVLAAAKPTTTFQRLVSLPGIGQILGMTIALETGPIARFASAGDYASYCRTVNSRCESAGKKKGENNRKNGNQYLAWAYVEAAHFAQRYSPRAQAWFASKTARAGRVVAVKALACKLAKAAFYVLRDEVDFDEHKLFG

SEQ ID NO: 279151 - protein, 393 aa, unidentified
MDYIGIDIGKNNHVASMLDASRKTVFKAFKFANTREGAQSLLEKIQCHAADRTQVEIGMEATGHYWLALYSFLFDAGYVLHVINPIQTDGWRKGVEIRKRKTDDIDSLLIADLIRYGDFVETKRTDEGLLSLRTLTRFRSYLVDSIADLKRKVICVLDQVFPEYESVFSKVFGTTSKEVLLTYSTPAELETVSVEQLTELLASLSRQKSGAEHAQRLSQAAAHSFGVTFCRDAFTFQLRALLNQMNYIEQQVADTERQIKAIMDTLASPITSITGFGPVLGAVVLGELGDISRFDSGSKLVAYAGIDASVSQSGQYESINNRMSKRGSPYLRRALYQAAMVAAFHDPELTAFYQKKRAEGKHHNVCIGAVARKLCYIIFTILKQNRPYVKRQP

SEQ ID NO: 279152 - protein, 404 aa, unidentified
MNKPNAEVRLLPQVDKACGLDMHKDKIVCFISNKDGTDQHLEEFGTFSEDLFKIRSLITQHHVERCLMESTGVYWISLYSILTEAGVNTIVANPQHIKQIPKRKTDRKDARWLCTLALHGLARQSFVPGARQQALRELCRNRLFYKQAQTKITNRIVKILERANIKLRSVVSSINAQTAMEIIRLLAAGNTDAERLAACCKGRLKAKKELIKQAVVGTLSIDDKLILKMLLADLDHNQSQIDRLEKQISKLTDEHYKEAATCLQTISGIGALSAQIILSEIGNDMSVFPTADHLTSWCGLAPGNNESAGKRRNTTVKKGNKYLRVAMISVAWGAVRVKNSYWKPLFEKLRKRMKAQKAIVAVARRLLKVIYKTIKENKPYTEKGFDHFLDVQQRNLLKSSIKVG

SEQ ID NO: 279153 - protein, 347 aa, unidentified
MNASAKVIGLDIAKDVFFAVGLDESGKRVFKRKLARDQVLPMFMQMAPTMIGIEACAGSHYWARKFVEMGHDARLIAAQHVKAYVTGNKNDMNDAAAIAEARSRSATKYVPINTAAQQDLQMLHRARSALMTERVAMINRIRAFAGEYGQVFPKRVERFRDGLKAWLNDPDNGLSGMALETFRELKAQLDDKDERILAYDRRLNQAAKSELAKKLMEVPGVGPLMATAVQATIADPRHYKSARDFAANLGLVPREHSSGGKQRLYGITCRGDSYLRTLLIHGARSALRTANGKPDKLLQWATRLSERRSFNVAATALANKMARVIWALMAHGRPYVPAWSKDTPRPA

SEQ ID NO: 279154 - protein, 409 aa, unidentified
MPQLNDLSRSLVVLEQDATLIAVIEMGQSNWLVAGIVPGVELSPLKKLAVDESALLKLLNRWREEAEKAGHRIERIAIAFEAGRDGFWLARWLRARGIEAHVIHASSVAVSREHRRAKTDRLDTELLKRAFLGWLRGERDHCKMVAIPTLAQEDAKRPNRERESLVGEQSRIVNRMKAALARLGIRGFNPNLKKAVERLDGLRTPEGEPIPPNTLAELKHDMERRRLVRSQIRDIEGTRLERLKQTPGDGPHVTVRLLARVIGVGVETADMLVQEVLSRNLRDRRAVARYGGLTGSPDESGKKRREKGLARSGNARVRRGMIQLAWRFLMFQKDSALAHWFYARTKNAPQTRKTMIVALARKLLIALWRLAGEGAIRRVSSCVQLYERSYIEIFRQLRPASLQAREGSE

SEQ ID NO: 279155 - protein, 324 aa, unidentified
MLETTSQELIMVGVDVAKGKLDIAFADQPIMTIDNNEAGFKKLLKRMANRENLCWVMEATGGYEKALVSFLLTNEIKVAVVNAKRVRDFANAMGAYAKNDRIDADMIRQYAKTAYANNRLQLREPRSVVEQRIEALLKRRQQLVGQHTIELQHLESACDKASVRSIKRTLKYLAKEIDSIEASINSDIDNDELLTQRMTQLLAVKGIGPVSAYALIALLPELGKVSNKEIAALVGVAPYSKDSGKKTGKRSVFGGRELIRSILYMAILSATRFNKPIRDFYQRLLAKGKLKKVAQTACMRKLLVTLNSMVKNQSEWNPDFADLA

SEQ ID NO: 279156 - protein, 337 aa, unidentified
MHKKSWSVSIYSKHGEYKTFSQPPEVETLVHYLRHHLPGARYNAVYEAGYCGFWIHDQLKEKGIQCIVVNPADIPTKNKERRTKRDQIDCRKLARSLRNGEIEGIYVPCRPKLEDRSLIRTRQSMVRKQTRCKNQIKGMLLFYGIDLLKEETRGHWSRRFIQWIEQIRMERGSGDIAFQAHLEELQHLRQLIARLNRAILQLTRTEPYRPLVRLLRTVPGISTLTAMILLTELCEIARFRSIDELCSYVGLVPDIQESGEKEHVEGMTQRRHSQLRWLLIEASWVAVRKDPALMMAFDQYCKKMRKTKAIVKIARKLLNRIRYVLKNQAEYVPSVIQ

SEQ ID NO: 279157 - protein, 461 aa, unidentified
MSKKRPAGKQKGSAQGQVDWKALDIVHPDAAGIDVGGSEHWVAISPDRDPEPVRRFGCFTADLREMARWLVEKGVRSVAMQSTGVYWMPVFEVLEQHGLEVYLVNAQHTKNVPGRKSDVQECQWLLKLHAFGLLNNSFQPTDEIRIARTLWRQRGNLVAEASSAIQRMQKALIEMNVQLSSVLSDISGVSGMSMIAAILDGERDPWTLAALVQSGVKATTEDIAKSLEGNWREELLFVLRQDVELYGIYQGKIDDCDLELRNHLESFGSVVDLKTQPIGPKPKGKRGSKNAPKFDLRTELYRISGIDWAQVNGIDVLTAQTVIAECGADLSAFASEKNFASWLGLCPTNEQSGGKILKRRTRKVVNRAATALRNAATTLLRSQSYLGAQYRRLRTRLGAPKAITAMARKLACLFYRLIKHGQQYVDKGNEYYEAKYREQQIRSLTKRAQKLGLQLVIPKPA

SEQ ID NO: 279158 - protein, 412 aa, unidentified
MALTEAMFFVGIDWAAKTHAVCVLDAAGRGVAAFTVEHTAAGFARLAARLARLADDPESVPIAIERPDGRLVDALLEAGHPMVPVKPNAIKAWREGEVISGAKSDAGDAEVIAEYLRLRAHRLRPAVPYSDDTRAVRTVSRTRTDLVEARVAASNQLAALLDAQWPGAKEVFSDVAGQSSLAFLTRYPTPASAAHLGVKRMAAFCTKQRYSGRRSPEELLERLRAAPAGVTGPAQTEALRDAVIAHIRVLTALNTAIRDLDRSVAAHLTDHPDGQVFASLPRAGVINAAQILAEWGDARDAYDGPEAVAALAGLVPVTRASGKHRGVGFRWACNKRFRVALTTFADNSRHENDWAAEIYRRARASGKDHPHAVRILARSWVRVIWRCWHSGTPYDLALHAGAQRHLDTAEAA

SEQ ID NO: 279159 - protein, 395 aa, unidentified
MKGRYNLMIYVGIDIAKLNHFAAAVSSDGEILIEPFKFTNDYDGFYLLLSKLAPLDQNSIIIGLESTAHYGDNLVRFLISKDFKVCVLNPIQTSFMRKNNVRKTKTDKVDTFVIAKTLMMQDSLRFLTLEDLDYLELKELGRFRQKLVKQRTRLKIQLTSYVDQVFPELQYFFKSGLHQHSVYALLKEAPTPNAIASMHMTHLAHILEVASHGHFGKDKARDLRVLAQKSVGVNDSSLSIQITHTIEQIELLDSQLFHTELEMANLVTCLHSVIMTIPGIGFVNGGLILGEIGDIHRFSEPKKLLAFAGLDPSVHQSGNFQAKKTRMSKRGSRVLRYALMNAAHNVVKNNTTFKDYYDSKKAEGRSHYNALGHCAGKLVRVIWKMLTDEVEFNLE

SEQ ID NO: 279160 - protein, 466 aa, unidentified
MSKPEQSSGPKVAGRKGSNTKPVERKCQPDAAGCDIGAREIFVAAASDRDENPVRYSGTFTGDLHKMAEWMVQCNIKTVAMESTGVYWIPVYDVFEKHGLEVRLVNPRNRKNVPGKRTDYHECQWIQYLHSMGLFEGAFRPDADVRAVRTLTRHRGDLVEMASQHVQHMQKALTQMNVQFQHVISDITGLTGLAILDAIIAGERDPAVLAKRRDPHVKASEEILRQSLEGNWDPAQIVVLRHRLSLYRSHREKIDESDQEIEKLLAAFVPQVDPEEKPMPEDRKQKQRKRKKKTGSPGFDMRKEGYKLFGVDLTQIPGLMASVFTLFSEVGRDMTRWPTAAHFSSWLGLCPDNDISGGKVLWRGNRQVKNRAGTLFRLAAHSLHRDQTPMGHYLRRMKAKLGPAAATTATAHKIAVIFYTMVNKQVEYDATLWAERDLMREKRMEARLHKQAALSGFKLVPLEDAA

SEQ ID NO: 279161 - protein, 347 aa, unidentified
MVTLGVDAHKRTHTIVAVDVQGRQLAVKTIATRTKDHLALLRWAEQVADGEGLLWAIEDCRHLSRRLERDLLAAGQSIVRVPPKLMAHVRDSARTYGKSDPIDALAVARAAQREPDLPVARLDGPDREVRLISDHRESLVAERTRVICRLRWHLHELDPSWEPKARSLDRLSTLEQVAAHIADLEGTVARLARLLVDRCRQLTVEIDGLTKEITTLATALAPALIAIPGCGALTAAKILGETAGIDRFKSKDAYARHNGTAPLPVWSANKARHRLSRTGNRQLNAALHRMAMAQAHWHPAAKELMSRRKAGGDSGIEALRVLKRRLSDVVYAALLTDLANSGIPHGD

SEQ ID NO: 279162 - protein, 403 aa, unidentified
MNSVGIDISKGRSTVAVMRPFGEVVISPFEVRHTDSELSELARQLKSLNGETRVVMEATGNYHAPVAKLLHDAGLYVSVVNAKLVHVYGNNDLRRVKTDRKDAVKLANYGLDHWLTLPRYVPEEDTRLLLKNCYRQYRQYSKVQTVLKNNLISLLDTVFPNVNRLFSSPIRGDGSEKWVDFVAEFWHCRCVSEKSQKAFTSKYQRWCRKHGYNFSEEKAHTIHAEASGYIGVMPKSETTKLLVEQAVAQLRATSAALTALKHEMLALAAQLPEYPVVMGMFGVGPTLGPQLIAEIGDVRRFYSKKALVAYAGLDAPPNDSGDVTGKHKSMSKIGASSLRRTLFLVMSVYLQNAPLDEPIFRFMDKKRAEGKPYRVYMMASANKFLRIYYATVKAYLESLEHTA

SEQ ID NO: 279163 - protein, 347 aa, unidentified
MDHIGIDVHKTESQLCILGEDGQLSERRIRTTAERFAAVLGDRPRARILLEASTESEWVARCLEGLGHEVIVADPNFAPMYAARSRKIKTDRRDARALAEACRLGAYRPAHRLSDVQRHVRGRLTVRDALVRTRTGYIRVVRARLRQHGWRVPTGSAEGVIRRVLALGLPGRLLSELAPLLAVMRQVNQQVAYSDQRIAAIARADARVERLQSVPCIGPVTAAAFVAALDDAGRFARAHQVEAYLGLVPREWSSGEGQRRGRITKAGHRRVRSLLVQAAVSIRRGRHPTTAVLREWTERLVARRGGFIAVVALARRLAGILYALFRDGTRDQPARARLSPSTGPMAA

SEQ ID NO: 279164 - protein, 362 aa, unidentified
MSTIAQRTREITGGVDTHKDTHTAAAVDSAGRPLGAEQFEATAAGYRELLAWLRSFGNLVLVGVEGTGAYGAGLARYLHERAVTVVEIDRPDRKARRWQGKSDPVDAEAAARAALSARRTGIPKQRDGQVEALRSLRVARRSAVRQRADVARQMKMLIITAPEELRTVLRDLGDRQLIVACATSRPDAKRAGEPAVAARLALRTLARRHQRLGEEIAELEELITPLVAGIAPALLALNGVGADVAGQLLVTAGENPERLRSEAAFAMLCGVAPLPASSGRTHRHRLNRGGDRDANAALYRVVLCRLRWDERTKQYMQRRTTEGLSKKEIIRCLKRFIAREIYQVLTAPSTTHITAKQLTTAA

SEQ ID NO: 279165 - protein, 342 aa, unidentified
MNESQAYHFIGLDIHKRTVAFCEKTLTGKTVARGTIRARHSDLVEFAQSRGKPWVGGMEATLFSGWVYDVLVGHCVELHVGHPLRLKALSKNKNDRIDAELLANLLRADLFPTCHMPSPEVRELRRVMRFRNFLVVQATRMKNKAAGLLMETGAQYDGKKLHGKKYFSELLAGLDEIPPSVRELLRMTRTSLDVFTSAQGYLLRALKRHAALSGRVELLKSIGGVGDIVALTWALEIDDPNRFSSIKKAQSYCGLCSAQHESAGKQWRAPLSKERNPHLQRVLIEAAKLAPSKLGSLERVRDAAIERGYNKNRATLAVARKLVGYLMAVDKSGSIFVAPQPG

SEQ ID NO: 279166 - protein, 310 aa, unidentified
MPIPHAFIGCDVGKSSIVVFDGRCNRVSTIANQPEAVAAFAAGLDPTCLVICEATGGHEALLLDAVSRAGGAAHRADARKVKAFIRSHGTLGKSDAIDARALTRYGQERHATLPRWQPADAARQRLHALVMARRDMVAARTAWNNRQLAPGATAAMAFTAPIVACLDAQLQAIDAAIEALIAASQPLAQTVRCLRGIAGIGAKTAAALVALMPELGRLGRRQAAALAGLAPHPNQSGQTDRYRRTRGGRPEVKQALFMAALSAARHHPALRSFHQRLIARGKKPIVALVAVMRKLIVLCNARLRPACAVP

SEQ ID NO: 279167 - protein, 438 aa, unidentified
MNRKRSKSRVDRTLPMMHPNAAAIDVGATRHMAAVRADRAPEPVRCFGTFSTDLHRLVDWFTECGVETVVMESTSVYWIPIFELLDARGFSVFLVNARDAKHVPGRKTDVSDAQWLQRLHSYGLLRASFRPKGQIAELRAYVRQRERLLEYAASHIQHMQKGSTGLRIIRAILAGERDPEVLACLRHYSCHSSAETIAKALTGSYRTEHLFALEQALALYDAYHEKASACDVRIEAVLKELSIHRGRDIGSVPPASRRRHRTDQANALAFDVRAALFALLGKDITRIDGLGPYLSLKLIAECGDDLSSWPSAKHFTSWLGLAPSNKVSGGKMLSSRTRRSGGRAAALLRLAAVTVGRTDTALGAFYRRLSSRIGKAKAVTATARKVAVLFLQRRASRNGIRRPRSLVLRDTLPHASSQQSASACQGIRLCSPAPRAKS

SEQ ID NO: 279168 - protein, 339 aa, unidentified
MQVTTIGIDLAKNIFQVHGITENDEVAFNRPLRRAQVLPFFARLDPCLVGMEACCTSHYWARELTRLGHEVRLIPPMYVKPYVKRGKSDAIDAEAICEAVTRPTMRFVEVKSVEQQASLSLHRARNLMVRQRTQLVNALRSMLAEFGVYIAKGLARIISFSQGVLAGTQLELPEIAQDVVHNLCGQLDVLHGQMHWYETRLRLEAKRDPRIKLLQTIPGVGPVTASAIAASIGSGHQFQNGREFAAWLGLTPTNRSSGGKERLGRITKMGDQYLRQLLVVGMTSLVRQTKSHPERANKWLTSLLERKPARLATVAMANKTARIVWAVLTKNEPYIPRTA

SEQ ID NO: 279169 - protein, 340 aa, unidentified
MGEITTIGLDVAKHVFQVHGVDAEGAAVLRKQLRRGQVLIFFSRLARCVVGLEACATAHYWARELAALGHEVRLMPAQYVKAYVKRNKNDAADAEAICEAVVRPTMRFVATKTAEQQAALLLHRGRERLVRQRTALVNALRAHLAEFGVIAPQGLRNVGRLIAIVRDEGDARLPDLARQVLQVLAEQIEQLEAAVAALEKQLMTWHKSNPVSQRLATIPGIGPIIATAIAATVAEPSEFRSGREFAAWLGLVPRQNSTGGKHRLGGISKRGNQYLRRLLINGASANLLRSKATNADPWVIGLRRRRPSLVVAVALANKTARIAWAVMHRQEDYQREAAAA

SEQ ID NO: 279170 - protein, 340 aa, unidentified
MPLYGGIDLHANNSVVVLLNDQDQVIYEKRLPNHLPAILEPLRLHPGEIEGVVVESTYNWYWLVDGLMEAGYRVHLANPAAIQQYSGLKYSNDHSDARWLAHLLRLGILPQGYIYPKAERAVRDLLRKRAHLVRQHTANVLSMQNILARNTGARFSLTRIHELTQQELQRLLTEEAQVLAVTSSLAVLDCLQHQIKILEQSVHKRLRHTPSYEQLLTVAGIGPILAQTIALETGAISRFPSVGHYASYCRCVDSNKLSNGKRKGTGNVKNGHPYLAWAYMEAAQFALRFQPAAQRFYQRKLAKSRNNTVLARKALAHKLARACYYMMRDLVPFEATKAFG

SEQ ID NO: 279171 - protein, 489 aa, unidentified
MAHSSTPVQSTQKRRSPKNPPAPPQATSEPQISSADPKAAPGRFVGLDVHKKQITYCILDRDGATIREGEIVLTRERLADFASRVLQPGDHVALESTTNCWAVVDVLQQHGLHVVVSNPMATKAIAQSKIKTDKVDAKVLAQLLRCDFLPTVWQPDTATRMRRQLSGRRASLVGQRTQLQNRIHSVLAMRLIIPPAGLALFGTHGLAWLKTLSKDSIDADGLMMIESDLRLLEPVQMEIDKFDQRLADLAWEDERVKLLMTIPGVSIVVGQAVVAAFGDITRFKSGDAAASYLGLTPSTRQSATSVYHGPITKHGNSTARYMLIQAAQQYSRQAGPLGHFFQRIKRRKCHNVAVVATARKLAVIAWRLLSTGEPYRYAQPAATATKLANLRIAATGEKRRGGSPRGVKAAAKLPGGSKTIRSLDDTYQNEGLPTRSPLPPGELRHLANTNTLQFAEKLRGSQVIPRKPKSRGQTHKNTGWQPEISQSEK

SEQ ID NO: 279172 - protein, 406 aa, unidentified
MQGPVITVDVSKGSCHYQPYVSNGHPMRKPKVLHDTVEGFQSLSDLIDTMKDRYECETIPVIFEATGVYHRCLQKYLDDHQIPYYIISPLMSASYRKTTPNSNKTDDLDCSHIAKAYYGECNLFPYDKPSKSFHNLRELNRYYECELNHLRMRKNTFRKYLDIVYPRLDKCFKGHSSLYDEIPMEVIKQYPHPSLLLKHKEETIVKKIEKKTSHNASFIQNIVHEMYECSMHCYSGADVTDVESMILPELVDDLQSQEERCDEILKQLVSEAQKTPYFTSIVSIVGIGDNLAARIIAELGDMSRFSCRRAITAYAGLNPKIRQSGDMDGIHLAISKKGNKHLRCLMYLAVSCNYRLKKCDVLYEFNQKKRQQSFSPLKPKAATIATAHKLLLIIYALCTNGTVYHS

SEQ ID NO: 279173 - protein, 392 aa, unidentified
MIYIGIDVAKNKHDCCIIDSDGAVYNDSLRISNSREGFKLLYSSILSILPDRNISNVKIGLESTGHYSINLQNFLYAKGFSLSILNPLATNLFRKAQTLRKTKTDKTDALVIAKMLFSDDTKSYSPVSYQIQELKSLTRHRYRLIGYRSKLKVSINRLIDIIFPELPNLFWSIHQSSSYALLSVLTSPKEIAACHLTRLTNILSTASRGKYGKDKAISLKECAANSIGTSSRALSFELQQTIRLIQSVQVEIDALELQIKEVVIEINSPLISIPGISYTLAAIILSEIGDIERFSSPCKLLAFAGLDPSTYQSGKYNASHTPMVKRGSSYLRFAILMASRTVSMRDAAFSAYLSKKRSEGKHYYVAMSHVAKKLIRVIFHLLKTNTAFVPQM

SEQ ID NO: 279174 - protein, 337 aa, unidentified
MEYFVGLDVSMAQTHVCVMNRDGSVILEAKVPSTPADIAAALAQAPVYGRIVFETGRMAPMLYHGLSKLGLPVVCIESRQAHQALKSLATHKTDRNDARGLAHLARTGFFKPVHVKSLSAHAVRSLIIARKKLVGQRVTLENQIRGLAVVFGVRLPRALTAAFISQALQASEGIPGLSAAMRGLVAARAAVLDAVVAVDADIRRMVKASDACRRLMSIPGVGQLTALAFTAAVDDPGRFRRSRDIGAYLGLVPRRYQSGEVDYTGGISKCGDRRVRTLLYEAANVMLTRYKGPLKLKDWAFAIAKRSTMRKARIALARRLAIIMHAMLRHGAEFKPA

SEQ ID NO: 279175 - protein, 399 aa, unidentified
MKKEKQKTGVVKMGSGLPVFNPYAAGIDIGDTLHCVAINDGNGSHEVKTTSAFTCDLHEIVDYCKTNGVTTAALESTGVYWLALYLLLEEAGIEPYLVNAKHAKNVTGRKKDDTDSIWLQKLHTCGLLQKSFQPDNEIRMLRDYTRQRKNLILLGSDSIRRMQKALELMNIKIHTVISDILGKTGMKMVKAIIAGERDPQILCTLCDPRIKASHEEIIKSLQGIWKEEYLFMLEQAVENYEFLQKQIKRCEEKIQQQLLKQVAIINEGDITCLEGTLKKKLKAKKNQFDFAISPYLIAIAGVDLCKIPGISDVTALEFISEVGVDMSKWESAKHFAAWLNLTPNTKISGGKIISSKMMKKNNKAGQYLRQAASCLSTNKTPIGDYYRRMRARLGGRGAA

SEQ ID NO: 279176 - protein, 334 aa, unidentified
MKKRYFLGNDIAKETFDFCLLNSAKVCLWQGQFPNSDAGFKALLEGLKARGFKLKQIHFALEATGVYGRALMATLHAAGLAVSELNPAQVKFFGISYNKRTKNDSLDAKLIALYCLERRPMATRPLRPVEQQLKMLVHEREARVNEQTRERNRGQTDQAQPGSLPPILLRQRQQRLAQLQTQIAQLDSAINALLDSDPKLVHQASLLTTIPGIARCTAAKVLAQLAGKEFSSARQLAAYAGLTPAECRSGTTFYGKTRLCKIGNSFLRKALYMPAAVARRWCKPLAKWADLLQARHLRPLAIRGALMHKLLHLIFGILKHQQPFNPNLLPCPKQ

SEQ ID NO: 279177 - protein, 350 aa, unidentified
MMIIGCDFHTRYQTIAMLDEATGELTERRLDHQSGEAEAFYRNLQGPVRVGIEATGPIRWFERLLTELGHELWIGDSAKIRASEVRKQKTDERDALLILDLLLTKRFPKIWVPTPAERDLRQLLWHRHKLVCLRTMLGNQLHALALSEGLCRKKKLFTKKGRGELAGLALGPWASRRRAELLQLLEQLAAPLAELDRAVLEEAQRRADAVLLMTHPGIGPVTSLAFVLAIGPITRFPRSKKIASYLGLNPSEESSGGRRRLGAISKQGNTMVRWLLIEAVHPAVRKDPELRQDYQRLKFRRGHAVAKVAIARKLAVRMYWMLRRGAVYAQLVRRQGSPGATLVDASSSSG

SEQ ID NO: 279178 - protein, 350 aa, unidentified
MSKQTNAIAISTIGVDTGKNTLHLVGLDRQGMIVLREKLARSRIGTRLANVPSCLIGIEAGMATHYVARELLALGHDVRQVPPAYAKPFRQGHKSDFRDAYAIAEAVQRPSTRCVPVKTDDQLDLQALHRVRSRLVGQRTAVINQIRSFLLERGIAVRQGLRFLRQRLPEILAKRVDVLSPRMIRIVEDLSGDWRRLDERIEHVTDEIEVLAHESESCRQLMTVPGIGPLIASAMVAAIANGAAFAKGRDFAAWLGLVPKQMSTGDRTILGRISKRGNRYLRTLFMQGARVILLRPASWAKHSFGPWLMAGVKRLHHNVLAAALANKLARIAWSVLAQRRNYETRAIVVA

SEQ ID NO: 279179 - protein, 338 aa, unidentified
MKVYAGIDLHSSNNYVGIINEHDQRLYQKRLPNRLNSILKALSPFKKSLDGIVVESTYNWYWLVDGLQEAGYKVHLANPSAIKQYEGLKHTDDKWDSFWLAHLKRLNILPEGYIYPKEERPVRDLLRRRLLFVRHRTSLILSIQSAMTRNLNLKMSAREINRLGETEAARMFDDPFNGLFAMSSTSLIHLLDKRIKEIEDRVKSYVELKPEFKYLLTIPGIGKILGLTIMLEVGDIRRFPSVGDYASYCRCVRSERISNKKKKGEGNRKNGNKYLSWAYVEAAHFANRFSPRVYRFYQRKLSNRNGVVAIKAVSNKLARASYYILRDQVPYDEEKLFR

SEQ ID NO: 279180 - protein, 347 aa, unidentified
MRFYNTQHPFYCGIDLHARAMYVCILNQAGETLLHRNMKTTPDAFLKAIAPYRPQIVVAVECMFTWYWLADLCADEDIPFVLGHALYMKAIHGGKAKNDRIDSQKIAVLLRGGMLPQAYVYPAEMRATRDLLRRRMHLAHKRGEFLAHVQNTNSQYNLPAIGKNLAYQANRDGVAERFADPAVQKSIEVDLALVSHYDTLLRDVELTILKTAKQHDPNTLYLLQTVPGIGKILSLVLLYEIHHIERFPRVQDFASYCRLIKCAKESNGKRSGTSGSKIGNAHLKWAFSEAAVLFLRDNPEGQKFLSRLEKKHGKGKALSILAHKLARAIYYMLKRKVAFDMKRFLND

SEQ ID NO: 279181 - protein, 319 aa, unidentified
MKTTKCTATEINGTHVGIDIGKDTLDICIYESGQYWQESNTEIGIRRLIKRLSKTSITRLLVEATGGYERALVEVAIEHSVPVIIVQPIQVRQFAKAQGVFAKTDRIDARLIAEYGVRLQPEVKALPGDKVRRVKDLLARKRQLNEMRTRELNRAHRAQKITAASHRRLLKLLDKEIVEVNVKLAKEVVGISEWQRTHDIISSVPGLGDGVAFTLLGELPELGQLTHRQIAALCGLAPFNRDSGRLKGKRRIRGGRAPIRTVLYMAMLSAIRYNPIIKGFYQKLVAKGKHKKVAIIACMRKMMVILNAMIRDDREWLMN

SEQ ID NO: 279182 - protein, 353 aa, unidentified
MRFYTKQHQFYCGIDLHVKKMYVCVIDQGGEIVFHRNMVTDPDIFLMAMAPYRADLVVAAECMFAWYWLADLCEDNGIPFVLGHALYMRAIHGGKSKNDRIDSQKISALLRGGLIPEAYVYPRKMRATRDLMRRRNHFMRKRAELFVHTQNTAGQYNLPDPLGRIARPQNRAGVVERFDLPCVQKSIAANLEMIAAYDTVLTELERDIVNSANAHDPVKFALLKTIPGVGKIIALNLLYEIENIGRFPRVQDFVSYCRLVKCTKESNGKKTGSSGQKIGNAHLRWSFSEAAQLFLKGNELAQKHLNKITNKHGKGKALSILAHKLGRAVYYMLKNQEAFDMKNFCAAGQGRVF

SEQ ID NO: 279183 - protein, 337 aa, unidentified
MRRFENVVGIDVSKSTLSISFYDGSTHKYYETSNSVRSFTKDFLKKVKGVDWSKVLFMMESTGVYHLKLATHLSRELGYEVSVANPMSIKKYSDMNLRKAKTDKSDSKLIAEYGLEYGYKWRFKPKDELYYEIDSRLKAIEDFQSQINRLNNQIEGFSQLPYEQEEVISCYKDVISAYKSKIKKLEQELEVLLKSRYREEYELVMSIPGVGMKLASIVLGKLECFRNFKRAKEVVSYIGLCPSIRESGTSVRGRGHISRRGNAYIRKILFVCSLSAIRYNKFCSNLYRRLLSSGKAKKLAIIAVANKLIRQIFGVLKNGRPYDPEYLKNLTEVTENG

SEQ ID NO: 279184 - protein, 364 aa, unidentified
MKLVKDIANRIIRYIGMDVHKDSTTAVVLDAQGHVVMQVTLRTEGSVLVDFLRGLSGTLHLTFEEGTYSAWLYALLSPCVAKLIVCNPRQNALLKQGNKSDGIDARKLAELLRLGSLTAGYHGSPGMRTLKELAASYEALVSDSRRVMSRLKSLYRSRGIRCGGTQVYSPRHRARWLEQLGEPGARQRAKLLYQELDLLLELRPQARRALLAESRKHPAQKILRTIPGLGPIRVARLLALIQTPHRFRNKRKLWGYGGLGLLTRGSAQYRLQQGKLVVSLKGVTVRGLNPAHNAQLKDIFKGAALAACQRPGPLREAYERCLREGMDEHLARLTIARKIATLVLTLWKRGERFDAQRLRREQAA

SEQ ID NO: 279185 - protein, 383 aa, unidentified
MTQSSNLFVGMDVHKESIDIALAEGDGQQEVRHYGSIGGDLPALDQAVRKLQSAGKTLHFVYEAGPCGYVIYRHLAGKGLDCVVVAPSMIPKRSGDRVKTDRRDAEMLARLHRAGELSAVYVPHPEDEAIRDLTRAREAAKEAQTRARHQLKAFLLRSGMPYAGKTSWTPAHVRWLASLKLAHPVQQIVFQDYVDAVTAASERLGRIEGYLRDAVAGWRLNPLVQALQALRGVQLVVAATLAAEIGQIDRFGNPRPLMAYLGLVPSEYSTGTTTRRGPITKCGNLHARRVLIEAAWAYRMPARITPIIAKRQDGLSEAIRGIAWKAQVRLCKRYRTLRARGKEQNKVITAIARELVGFVWAIAREVPVVEPQPGLSTGGALRA

SEQ ID NO: 279186 - protein, 324 aa, unidentified
MEKITTAGIDLAKRVFALHGVDGAGRVGLRKTVRREQLMQTVAALPPCLIGMEACSGAHEWARRFQELGHTVRLMAPVFVAPYRKSGKNDGNDAEAICEAVSRPNMRFVPVKSAEQQAILALHRVRQGWIEERTATINRLRAVLTEFGVVLPNRAQYVRRGAMVAAEGLPALARRALEDLRSHLGTLDERIAAYDRELQAQARQSEAAQRLMQIRGIGPITAVAIVATVGNARDFRSGRQFAAWLGLTPRQHSSGGKQRLGHISRRGDAYLRCLLVQGHARCCSPPRATVIACRVGSYRCRLDAAITRRSSPPPPRTRASPGRY

SEQ ID NO: 279187 - protein, 347 aa, unidentified
MKFYTTLHKYYCGIDLHARILYVCILDQQGNKLVHQKIGADPLALLRLLEPYIGDVVVGVECMHCWYWVSDFCQNHEIDFVLGHALYMKAIHGGKAKNDKIDSYKIASLLKGGNFPLAYNYPKEMRATRDLLRRRTGVVRHGASLKAHVVNTDSQYNLPSRHLNLKNVSARETLKKCYDEEVVQRTIALDMVLLDCYAKELAKVECFIEKQAKQHHGAYLYIIRSFPGIGQILGLTILYEIGHITRFKSVQNFASYSRLVKCKAESAGKTYGTSGNKIGNGHLKWAFSEAAVLYLRGNDNAKNYLDKLQRRMSKGKALSALAHKIGRCVYFMLRDKTVFDEKKFLKG

SEQ ID NO: 279188 - protein, 355 aa, unidentified
MSPEKYIGMDVHQATISVAVMDAGGKLIMECLLETKAATIVEFIRGLHGTLSLTFEEGTSAAWLHDLLKPHVSRLVVCDPRKNALLKDGNESDRIDARKLAELLRGNQLHPVYHGEHGVRTLKELGRSYLTITQDVTRVMNRIKALYRSWAIPCAGATVYAPRHRAEWLSKITEPGVRVRAERLYQELDLLQPVRLEARHELLAESHKHSGVRLLRQIPSIGPIRSALLVALLQTPHRFRTKRQLWAYSGFAVETHDSGEYRSVRGKLQRNRERMTVRGLNDNHNRDLKNLFKSAAVSASTRPGPLRDFYVDRVEKGIRPTMARLTLARKIAAISLTIWKKGVEFDAKQLQRQAA

SEQ ID NO: 279189 - protein, 431 aa, unidentified
MKKSPQGQPVLPCGRAVVGIDIGKAKHAATALSPQGEVIAQLASFPNTRQGVDQLEQEVLRKAGGPGKVLVGMEATGHYWMCQYHELTRRGYACVVFNPLQTNARSRARIRKTRNDKIDSKTIARLVLSGEAKATRVPDAKIAELRLLVRHRRRLLQAAGDMERYAHTLADRIFPEYAGVFCRPFLPSAQKLIRQIGLAPAKLVKNAEQVRELLRIAGRKQIAAEKIEQLLKAAQDSIGIRQAEDVIEGQLRAIFDYLDTVRQQIAEIDKQLDERAQELESPLYSLGLTSSMVATIHAESDPISDFTTPDQYVAYTGLDLSRHESGDTIEWRGKISKRGSPLLRCTLYLAAFVVCRRHDYFARIYRKHRAKGKKHTNALVIVARRLARVIWRLLTDDRGFTKRAPKPVSPSDKPGNAAKSTQTRKAAKASA

SEQ ID NO: 279190 - protein, 378 aa, unidentified
MKRILKIGMDVHTTNYTLCAMEPIIGEDDRVFATIKVTLDYKNILLFIENLKTKLGLNDEYDIQCGYEAGCLGYSLYNQLTAAGVKCVILAPTTMLTPQGVRIKTDMRDAYMIAQCLSYGGYHVVYIPTETDDSVKEYLRMRNDHKLALKKIKQQINAFCIRHGCCYDGTKWTLAHLKWLKKLEITNELYRETLDEYMASYEEQETKIERYDKRIEEIAEQTKYHDKVKKLECFLGIKTHTALSLIVETGDFERFAKGNQYAAYLGLAPGENSSSDSIHRLGITKAGNSHLRQLLIEASGGICKGAVGHKSKELRARQNGNTAEVIAYADKANTRLRSRYYKFIRHGKKRNVAVAAIARELACFVWGMMTDNIEMKVA

SEQ ID NO: 279191 - protein, 345 aa, unidentified
MNTTRVAVDLAKSVFQVAVSHAPGRVAEEHRLSRARFREFFLHQPPCHVLMEACGSAHHWGRELQALGHQVSLLPAAHVARYRLGNKTDRTDTRALLEAGRNEKITPVPVKSVEQQAITALHRLRSGYLTSRTARINAVRGLLAELGIPIPKGARAFLPQAHRALDHELIPDFLRDSLFQALEEIRELEAKAVSLRGQLQRLGEQISTIQLLLTIPGIGILSATALLVTVGDIHRFRSGRCLANYLGLTPRESSSGLTRRLSRISKRGDPYTRTLLVHGARAALLAAHRVREPDQLQAWAIRTAAARGHNVATVALANRIARIAWRVWRDQRPFQRHPRVQEANA

SEQ ID NO: 279192 - protein, 325 aa, unidentified
MSTSVDVFVGIDVAKDQLDVAVRPSGESWTVAHDEAGLSALVTRLRALAPSLIVLEATGGLEVALASALATAPLPVAVVNPRQVRDFAKSTGTLAKTDRLDAQCLAHFADAVRPQARALPDAQAHELHALLQRRRQLVDMLTAEKNRLQTAASRIRPQIQVHIEWLQRQIGQSDDELRALIRSSPLWRETEDLLRSAPGVGPVLATTLVAALPELGTLTRQQIAALVGVAPLNRDSGTLRGRRTVWGGRAQVRAVLYMSTLVAVRHNPVLAAFYQRLRAAGKVRRSHRVYAQAADDPERDAQAPDSLGSGWGSAHLTHKTVATLA

SEQ ID NO: 279193 - protein, 345 aa, unidentified
MEHFVGLDVSQEMTHLCAIDGQGKTVWQGRCLSTPEEIAGTIKSKAPDVVRIGLESGPLSTWHWHALKAMGLPVVCLDARHAQATMSGQVNKTDKNDAYGLAQIVKVGWYREVGVKSLDSHAIRSMLGARAQLVGMRVEVTNQIRGILKTFGIVLSRRTGEPFEGLVNEACGDGESMLNHTVRSLLCVYGGLKEQIRHMDRELMDCARKSVICQQLMTIPGVGVLTALAFVTAIDDPAKFAKSRSVGAYFGLTPRCYQSGEIDQNRGISKCGDSLVRTYLFEAAGTLLTRVEKWSALKAWGLRLAKRNGLKKAKIAVARKLAVIMHRMWVDGAVFRWSADTAEAA

SEQ ID NO: 279194 - protein, 326 aa, unidentified
MTLSHLTDNTFVGIDVGGAGLDVAWHRGDSAHYANRPDAIATLVERLRTGPEVTRIVLEPTGGYEKPLVKALRQAQLPVEVIHTTRFNAYRALVGVKAKSDTSDARLLASYAAAPDEIRGRKAGHVELPEDAIREALSELAGRRDQLKHMIHAETCRLGTVRLSELRQAITAHLEALRAEDKQVHRMMLELVRQRIDLRRDQRLLKTIKGIGVKSALGLLASVPELGRIDNKAAAALIGVAPFVRKSGTMSAPARIHGGRAAVRSILYMAAVTASRHNPVLRPFYERLIANGKPPKLALIAVLRRLVVFANAVLRSGQPWRGASAT

SEQ ID NO: 279195 - protein, 327 aa, unidentified
MSTSEVAYRWLGIDVSKDTLDVYDPNQPSSTRYENDSEGVGQLWQALQDRSDWAVVCEASGGYETLMATTLAAHGCRVSVVNPRQVRDFAKASGILAKTDAIDARVIARFGGLLQPPATVFASEAAQQLQDWVRRRAHLVEILSGEKNRRQQFKGRNKAVLTDDVEAHIEWLQDRIAQLDQKIEQLSQQQSQWREDKALLTSVKGIGPVIATTLLADLPELGQLSSKQIAALVGLAPFNRDSGRYQGKRTTWGGRATVRSALYLATLVAVRHNSPLRTLYQHFLDQGKEKKVALIACARKLLTCLNAMLKSRTPWQDELVTARYTPT

SEQ ID NO: 279196 - protein, 526 aa, unidentified
MRATTRRRHSSRLRRNRGHIGKPRGILSPRVQAVGPEHFGIVAVDCAKARSKWMLSDYYGRILVPPTIVEHHRAAFDETLVMLRQAIADHEIKDLVVAVERTGRYHLPVLRVFTGAGYDSRVVHPSISCYFREADSYDNKTDDTDLEGIFRAAISGFGLQDQPWNATYSALQFWSRRRRDLVGKTTLLRCQILEYLEACLPGYSRCFDDIFKSKIALLVPRRFATPQAIAEAGLAGLTQLAQLGRVQVHRRTLLRILGWAQNAPVPDGSAPLYRELVCSLNDDRITKEKQIVSSERELVSHLVQTPYIRLLALPGINVVLAGEFAAEAGPIVHYATARVITGRAGLYPRRYQSDEVDHASGTLARRGNRRLRSVLMMAADTLLRCNEHFGVLGAKWADQGKDPHDIHVRAAGRFARIAFQMVSGTNGFEHPACQRAPAVLSKLIEFHNVHDIESNITRTNLQCAATQLPRAEQARERVLLGAELDAARGSRGRGPKQLREILPAVLEHLGGPIAKLIQSITSGESS

SEQ ID NO: 279197 - protein, 394 aa, unidentified
MRWIGLDCHATSITVAMLDEGSQKARHRRFDNTEAAWTAFCRDEVDATTHLVLESSGGAWPIYDRLSSAGAAEILVAHPLRVKAIAAARVKSDRVDARTLAELGRAGLIPLVWVPSRQERTLRTLVRRRVSVARVATAQKNQVCAALRRQGIRAAKPRLFTGEGQRFLAQLALPQGEDAIVAGAQDLLQRCDVQQTALEAEIAAIVRAGDPGFRADVERLMSVPGVDLLTAVATRARLGDVRRFRNGRFAAAYVGLTPRVRQSGATQRTGAITKQGDRVLRALLCQAAWAAVRSRGRFRWRFEHLCARKGPKIAIVAIARRLLMLLFTLLRTQTPYHAARPSNVRQKEKRLARLPRGYWDAIRQTRPHDMGRRTRSAEPPSHLLHDHPVLAMQA

SEQ ID NO: 279198 - protein, 348 aa, unidentified
MTLVGCDLHSRKQQVAALDTTTGEVLEQELTHDGDAVEQFYRALRPPVTIGIETTGYTQWFHALMHRLGHTVLVGEAGKIRAMVVRKTKTDRRDARHLLDLLKHDRFPSVWIPDPPTRDLRALVAHRVRLVRMRTMVKNGLQAIALNHRLALRSALWTQRGLAQLRALALPPHTTRRREDSLELLAWITSRIDQLDAQIEGVVHAHPQARRLLTHPGVGPLTALTTVLVLGPIARFPDSKHVVSYVGLAPTINASADKQHLGKITKQGNALLRWVLGQAAPLAARADDDLRRRYFAVLQRRGRPKAKVALARKLLVRLYVMLRDQIDYEEFRRRGRAAPARHTALAVR

SEQ ID NO: 279199 - protein, 307 aa, unidentified
MGDVIGIDVAKDKLDIYSLNTNASWCVGNTTSEHEALVLRLADAQLIVLEATGGYEQDVANELKRAGLPVAIVNPKRIRDFARSTGALAKTDKLDAKVLALYGAVLKPAVKPANDPASQRLKYLNAHRQDIVKLITAQNNRSKQAKDPFIRDSIQAIQAHLEAELAHVDQEIKACIQTNTALQEKAKVLDAVKGAGPVLQATLLGDLPELGHLDRKQIASLVGLAPFNCDSGTLRGRRKVWGGRAHIRRILYMGANNARQYNPQIKSFYERLIAEGKPYKVAMTACMRKLLTILNAKMRDHLQTVTA

SEQ ID NO: 279200 - protein, 351 aa, unidentified
MHQYHVGIDLHKTVLQACVLDAQGDRAQEHRLRIPDLAAGEAALEWLSPYMAQGHLAVEALGCNRWFVNACRARGWDVIVVNAAKLALKREGRKTDRRDAAEIARRLYLGDLHRDARTYYPTEAEYGRRKLLRVRHGQVEKRTHAMAEIRSILNAYKLTPPAGSLRSLQAIAWLRTVEMPTPDLRVALDVLVEDLECVQRRVQALNQALKERFAKDRSAQVLGSDLPAVGAQTVLTIQAELGDAHRFRRARAVASYAGLAPRVTASADTAHHGKMTKHGNAHLRWILGQWAVRLLVHNEVVQAWARPKYRRVHKNKLRVALARKLLIGVWWMLTTGEAFSLERCLGLKRGA

SEQ ID NO: 279201 - protein, 416 aa, unidentified
MNAVGIDVSSRKSTVAVLRPLGEVVCLPFDVTHDIAGLASLVEKLKALDGETRVVMEHTGRYYEAVEKALHEAGLFVCAVNPLLIKEYGANSLRRVKTDKADAIKIARYALDNWADLRDFTPMDAIRYDLKTLNRQFQLASKQRTASANNLIALLEQSFPGIRKCFDSPVRSDGTQKWVDFAHSFWHVDCVRKQPFAAFCERYRKWCKRHAYLFKLSNAEEVYALAKRAVVLTPKAKVVKVLVQEAANQLISISRSVEVYRAEMDRLAAMLPEYPVVMAMYGVGKSYGPQLMAEIGDVRRFERKQALVAFAGIDPMPNQSGDKNVRSNKSSKRGSPYLRKTLFNVIRTYLQCAPQDEPVFQFLNRKRAEGKPFYVYMLAAANKFLRRYYAKLRDYFASLDTLQPVAPIPTILKATL

SEQ ID NO: 279202 - protein, 387 aa, unidentified
MPKQIDSSRCVVALEQDATLIAVVEMGQSSWLVAGVVPGLERNPLKKLGADRDALLQLLHRWRKEAARAGRTIKRIALAYEAGRDGFWLARWLRAQSVEAYVIHPSSVPVSREHRRAKTDRLDTELLKRAFLGWLRGEPKHCSMAAIPTLEDEDARRPSRERETLVGERTRIFNRLKANLARLGIRGFRPNLARSSSQLEALRTPEGAPVPTNTMAELRRDMDRLQFVKRQIKEIEKTRAQRLAKTPSEQRQAMVRLLMRVVGVGVETADMLVQEVFSREIRDRKALARYAGLTGAPDESGQKRRERGLAKAGNARVRRAMIELAWGHLMHQKGSSLTAWFWRRTSDARGGTRKRMIVALARKLLITLWRLVTTGEMPAGLRLRPAE

SEQ ID NO: 279203 - protein, 369 aa, unidentified
MTSVGMDLGKKQSELCVLDERDTVTERGRVRTQREALTKRFANVPPCRIAIESCRDTGWVFDHLTALGHEVVVVDTTRARALGIGQGRRKTDRRDAEALARAIARGVVPRAHVLSAEGRQLRDVLHARDQLVRVRGRLVTMLRGQFQGRGWATPRCATAAFATRLRCSGLPGVDAPEVQALLAVLRSVTTEIEQLERHLAALAARHDAVARLSTVPGVKLIVGLTVIAALDDATRFKDAHQVQAYLGLVPSEYSTGGKRRTGGITRCGNALARRMLVQAARSLLRTRRAQRDPLVVWAQTVAARRGQKRAVIGVARRLAGILWAMWVDGTCYDPQGLARQSFAGLSRRARRAQHDAALMAGVTRSMPQA

SEQ ID NO: 279204 - protein, 399 aa, unidentified
MLKIVYPICCGMDVHKSFVVACIATTNDHGVTNYKSKRFSTFTGDLRRCADWLSENNCKDVCMESTGKYWIPIYNILEHTCNIVLAHPKYVKAIRGKKTDKRDAKWIADIFKHDLVSGSFIPPADIRQLRDLVRYHWKLTNFNVGEKNRAQNCLTVSNIKLDDVFSDVFGKAASAITTRLLESNEPFDVKPYLTKNIKKPIEQIQAAVDGEMCAEQAEKLRIIRSHMDSLELCKLNLESLILSTAEKYIPQLNLVMTAPGIQSFAAIGIISEIGVDMSVFPTSKHLCSWAGLTPQNNESAGKKKTTRISRAGAYIKPLLVQCALCAIRTKQFPEVRNRYLALKKRRGHKKAIIAIARMLLTAIYNILKWNEVYNSELYRKADRPPDCNQALNFLVSSQR

SEQ ID NO: 279205 - protein, 419 aa, unidentified
MKNIKPKTTKAVNQKVLIATIDGGKDTHYGYYRCPDGSEGKSLPFRNNGQGFQEFWERIASAARMHGLEEVIVGFESTGPYMEPLVQFLRSKKIVRLVQVNPMHTKRLKELPGNSPLKTDRKDPTVIADIIELGHALTVVIPEGPAAELRRLTQGRERTIESRTRLFNQLQSLLVISFPEFLQVMKDVKTASAQHLLRHYPTAQNIVTLGEPALAALLRKVSRGKLREDRARALFEAANESVGVREGRSSMLLEIGLMLDTIATYDHFIDNVETEMVRHLDQIPYSRVILSLKGIGSVTAAGLIGEVGDFTKFGTISEVMKLAGLDLYEVSSGKHRGKLSISKRGRPLIRKPLYLAALSTVRKGGVMHEWYQRALGRGMIKTKALVAVSRKLLGIIFALVRDHSVYVENYLRPVLQEAA

SEQ ID NO: 279206 - protein, 336 aa, unidentified
METVCAVVGIDVSKKKLDIALLVNGKTKAKVVENSADGYKSLLEWLSKAKVAKETLHVCMEATGIYYEPVALALHDAGVSVSVVNPACIKGFGHSENIRNKNDTADAGLIARYCAAMKPAPWVPSPLEQRQLRAWSLRVQALKDIRQQEENRLEANTFTGMTDVAEHVKQHIAWLSAEINKLEDDIDDHIDRHPGLKHDAELITSIPGIGTTTVARILGQLGDIRRFDSAKAFAAFLGVTPKQRSSGTSIKGRTMISRAGSMSMRAALYMPSLVACRHNPLLRCFAERLLATGMAKKAVIGAVMHKMTHLIYGVIRTGKPFDPNYLTNGLAIQDGI

SEQ ID NO: 279207 - protein, 326 aa, unidentified
MTHKLGIDISKAKFDVALLKADGKYRSKVFSNDATGFKSLLQWLDTHVPTGKAEVHVCMEATGSYHEALALFLSDQGVAVSVVNPLLVKRFIEVDRVRNKTDEGDAKCLARFCQMTQPELWEAPSVGVRTLQALVLRLDTLQEMRQGELNRLEIAHASVRQSMRDVIAGLERSIEAVREQIRQTIDDDPDLKQRQGLLASIPGLGDKTIPQLLAYIGRPERFKSVKALIAYAALAPLIRQSGTSLNQHKGTHPQGHRALKSALYYPAMVAGKYNPLIAAFWQRLKAQNKPGKVIVVACMHKLLAIAYGVLRSKKPFNADYLKPIVT

SEQ ID NO: 279208 - protein, 392 aa, unidentified
MLYVGIDVSKSKHDCFVTNENGEALTDVFTIQNSRVGFHELYQTIKSLQPRPSLANTKVGLEASGHYGDNIVAFLRKVGLSPIILNPLRVNLYRKGQTLRKTKTDKVDAQFIAKLLITENFESQYDASYHSKELKMLTRYRRRIVKIRSMYKTSYKRLLNIVFPEIEGFVSDTLGITILKLLLKLPNTKAIAHCHLTHLSKLAQTYSHGRYDKVWAQELKKLAKNSIGSNSPASMLELRHTIQRIISITEEIEMIEKEIKTLVIDSETPIITIPGISYTLAAIIIGEIGDIRRFDTSDKLQAFAGLDPSAYQSGQFTGNKNRMVKRGSTHLRWALIYAAHNVCLNDKNFGAYLNRKRAEGKHYNNAMGHVAKKLIRVIFQLMSTGEVYIAKA

SEQ ID NO: 279209 - protein, 389 aa, unidentified
MIYLGIDVSKFKHNCYLADEENFDEGCHFEIKNSRDDFECLLKKLLNFDKDKIRIGLESTGHYHLNLSRFLLDLNFNIHFFNPYQTSLYRKADSFRNTKTDKVDAFFIAKLLRATDSNPTHNELYHNYELKSLTRYKSSLKNDRVKLKNTIVGHIDLVFPELSEVCKDVFCKYTLEILKEFPSADKIAKANLTRLSTIIKKASNRNYSKEKAIEIREAARRSIGINSPAVSFRLVQDIKALEFLINQINEVNEQIKPLLDCLNSPIMSIPGVGIEIGPSLISEIGNIENFESPSKLLAYAGLDPSINQSGTMHSNYSSMSKRGSSYLRQALFLAAFLICQNDETFRTYYEKKKSEGKHHYVALTHVARKLTRVIFHLLKTNQKFVSQTT

SEQ ID NO: 279210 - protein, 351 aa, unidentified
MKTKDTTESKLFIGIDVHKRSWKIKTATDLFDGISLTIPPTGYALKKYVDRHYTGFEVYCCYESGCCGFSHDRLFKSFGWHSKVVNPADVHRPSKAQFQKTDKIDARSLCKELKDGRLSGIHVPDVEREQLRCLFRRRNELVKQMRKVKTRLLMQLLYLGIEIPKEYDNSHWSHNFRNWIRSLSFDYTTMDYCLSTRLSSFEFVDKQIREVSTALRAYCRKHYKKDYYLLRSVPGVGGIVACGIICELGDLRRFKNFKQLASYVGLIPCMRQSGDTHTTAGLTPRANRLMRSYLVEATWQSLRYDPVMQGYYRSHSGKDVKRILVKVARKLLSRIHAVIRTEIPYQVGVVS

SEQ ID NO: 279211 - protein, 341 aa, unidentified
MCDNTGLDVSLKETAISVRRDGQRVWRGKCASDPGAIAAVLRRRAPEAKRVVFETGPLSVWFFHALSAEGLPAICIDARHAKAALDMAPNKTDANDADGLAHLAEIGFYRKVRVKGYDSMLVRTLVAARRRLVRVSTELSNQIRGLMKTFGLIVPGAKGGRFEAEVRRLLAGHRGLEHVLLPLLEAWITVRGRAAELGRQLLDLARRSEACQRLMSIPGIGAITATSFITGIEDPENFRKSRSVGAWLGLTTRRYQSGEVDYDGHISRRGDAHLRGLLYEAATVVLTRTSADSALRTWGLKLRERIGFKRAAIAVARKLAVIMHAMLKSAQTFQRQAEPMV

SEQ ID NO: 279212 - protein, 387 aa, unidentified
MPEKLCSNYDHRVSGLEKLPAFQSQRKEVGQYPKPLPREAELASASLTKRRHLILKECTIMTAPVLGIDIAKLKFNVCLINKDGKLRHKLFPNTSAGFEQLQQWLLRQGVQCVHACLEATGTYGDSLALFLHQAGHTLSVVNPAAIKAFAGSRLSRTKTDRVDAELIARFCLAQAPPAWTPLPAEVRDLQALVRRLESLIEMRVMEENRLSSGIAVKAVQESIEELIAYLCEQIKRTEESIRNHINNHPTLKRQSELLDSIPGIAQTTAALLLSEMTDIKQYRSARQVAAYAGLVPRERQSGSSVRGRTRLSKIGNARLRRALYFPAITAIRCSEFFQDWAKGLQERGKSKMSVICAVMRKLIHLAYGVLKTGQPFDPQWAQKEKSA

SEQ ID NO: 279213 - protein, 436 aa, unidentified
MNPHGVSDQLSLEKLSSGCLRVARVRQKPATPCVEIVKHKTINLKRSNIMIKKRGRVVGLDVHPDSFAGAVVEGSDPASAQVLRTSSRVPLEQLEQWALRHTRTEDTLVLEASGNAFAVAQRLRAMGRKGEILDSHSAGKVGKVYCANDRVDAVKIARIYLSALSPIVWQPDAKTLERREVFSAYQAIVKESTRAKQQLRSMLNEHCVRLEKGFRLCHPNAITRLLALREWTPARRMLLQQLHGTLVAARARRTLLRRHMAQEIVAEEALLRLTRLCGINLITLYGVVAAVGDVRRFAHSKKLVAYLGLNPSVSQSGNFEGSGALKRHGRGALRALLIQSGKKLLEVNNPLQKWGLAVASRRGRNKAAVAVARKLCVALWHVLMGHVIGALERLDTLETKLSKFAAEIGPAALHGFGYNNKAEFVEKKLYVLRSYP

SEQ ID NO: 279214 - protein, 468 aa, unidentified
MGLRDAIGIDPDSKGFICAFVKLSGAQVTTKGYMCTDSDLGAFLRWVKGQGNVIVAIEGANGFSRPLEKALRKAGIIFYSFKPADTNTFRKAVLGQNKDNRKDAESVARYAMALEAQAKLERYRRVWFVDAELQLLTRHYERKSQTMTAETNRLWKLLRLASPDLYLALRGSHPEVCLSENILKSQGILTLLSEKPQFGEWKHLTEKQMLRVMGGGKYKGREKLIEQLHALAGSFAPVSPAMELLMRSNAQQIKRLKAEQAEIIKMLEVLTRKNAAVQILKQIRGIATRTAATMIAEIIDIRRFPREDSLACYSGLGMKEHSTGDSFRMVHMQLFNHRLKDAFMTAARSFVFYNPESHLAGYHRNLIKRGMSPMEATKRVARALVRVIYRKLYTIVIQQTNTSEADRIKEEEGEMASGLIRSDQSHKSNITPSPSLTSKGRGRKKVKRLSAHTPRNRSRRKAVLKIIS

SEQ ID NO: 279215 - protein, 359 aa, unidentified
MKKYIGCDLHKKFSVFVAMDEKGRLEPPVKVSNDLLELRAYLRTLPTGAPVAVEATGGWYWFVDELEAAGLDARLVNPLEAKKRMPGTKKTDPRDAGGLAMLLRNGTLPEVWIPSAQLRDLRGLLRTRLSLRRHTTTLKNRIHGAIRRYGQYEPGEPTNLFTGKGRVQLSVYVGALPEQTRLSTRHEWQLVDEVEAHIQALETRIRLGIGQLGWVRLLKTLPGVGDILSATIFLEIGDISRFPSPAHLASYAGLTPTVEASGGKIRLGRTSPVANHYLKWAFVEAANCIVMRKHLYPDTHVIELYERLRRAKNHGKAAVAVARHLAEASWWMLTKKQTYRRPAPASRTSSDTGSARKSF

SEQ ID NO: 279216 - protein, 338 aa, unidentified
MKVYVGMDLHATNTYVGMVDEENEVLHKQRFRNELPLILAGLDPFRKDIQGVAVESTFNWYWLVDGLMAEGYRVHLANVTAIKQYEGLKQIDDKRSAFWLANLLRLGILPTGYIYPKEERPTRDLLRKRLHLVRHRTSHILSVKNILARNLGLRMKSEDVKKLEDPEVKRFFPDKEMQTAVLASVGLIRHLEVEISGIERMITKKLKIRKEFAKLMTIPGIGKILTLTIMLEVGDIRRFPTVGDYSSYCRCVKSIRTSAGKIIGYGNRKNGNKYLSWAYIEAAQAARRFHETVRSYYEKKMAKTNRIVAIKALSHKLTRASYYVMRDQVDYDPARLFR

SEQ ID NO: 279217 - protein, 345 aa, unidentified
MQQITTIGLDLAKQVFQVHGAEADGSPVVSRKLRRADVLGFFKKLSPCLVGMEACGGAHFWAREIAKLGHDVRLIPPSYVKPFVKRGKTDAADAEAICEAVIRKTMRFVPVKSADQQAAAMVLKTRELLVRQRRQVINALRAHLSELGIIAGTGPAKTATLIEIVRDEEDARLPPAARFALSELANQIEWTRKRIDKLERAIVIEAKRDEDMRRLVTIPGVGVIIAASIKALVPDPNGFKSGRHFAAWLGLTPRSHSSGGRERLGRISKMGNSTLRSLLILGATSVLKHARHRTDASTWLAAILARRPFKVVATALANKMARIIWALLTKGGTYKSGLAIGTANA

SEQ ID NO: 279218 - protein, 409 aa, unidentified
MTVMIGVDPHKGSHTAVAVDHGERSLAELRVRSGPKQLERLLKWAERFPERSWAIENATGLGYLLAQQLVVAGERVLDVQPKLAARVRLLATESTNKNDPHDALSVAIAALRSPTPKEVGVEDHAAVMKLWARRHRNLSSSRTQIACRLHAVLCDLVAGGVPDEIYAEKAALLLADVEPDAAVAAARVELAHELLEDLRRVDHQLARSKKRLEQVVAASGTTVIGIFGVGPVVAAMVVGVTGDIARFPTRDRFAAFNGTAPIEVSSGGRRVWRLSRRGNRTLNHAIHMAGVTQLRFAHSPGRSYYDRKIVEGKTPKEALRALKRRISDAVWAAMVADARRAAAATTTASKAGPGGQPGNDSVASAAGSHPETPALRPSHSRTRPKATTTTSRPSHTSSRSATTTARRTA

SEQ ID NO: 279219 - protein, 382 aa, unidentified
MEKAITSVRRFVGLDVHAETIAAAIAEKDQTARDVGTIPNREESIRKLAKKLTEGGAWAACYEAGPTGYALYWQLTKLGIPCVVIAPTLVPTKAGDRVKTDRRDAQRLASSFRAGELTPVWVPDAEHEALRDLVRAREAAKQDQLRARHRLGKYLLRHGKRPPQQMRAWTENYLQWIKGKVSFDQRSQQVTLEDYLNEVDHAGTRLVRLEKAIDEAVEQAPENMRELIRALQALRGVAKVGAVTIVAEVGTLTRFEHPRQLMGYSGAVSSENSSGGKIRRGAITKTGNAHLRRVIVEAAWSQRHKPVLSLAMRKRQEGVSAEVQELASKARHRLHHRYMHLLGKGKTKQEVVTAVAREMLGFIWAIGVCVERAQAQKGKDVA

SEQ ID NO: 279220 - protein, 428 aa, unidentified
MEGFDCNRIRDFRQFKKEIRGSKEYLIVGIDIAKEDHNAFMGSATGKTLLKRLVFQNDAEGFEKLKIQAEAIRVQNGLSKVVFGLEPTACYHKPLAEYLINDRQKLVYVSGEAVKKNRVLLDGRWDKHDAKDGANVADLISQGKCLFYDHPPLPLRELRSLLSLKIRLKKQEHGLRVRIRNHLLAQFFPELDRFFANGGPYLLSLVKWCLEPRAIAIMDFKEFSRIVAPGLVRGDILERLKKIWAIAPISIGCEAGPALQFEGKMMVELLIEIRKKLKALDEKIEEICLLFPEYPLLLSIPGFGPDVSAKVLAALGDPFRFDNLNQVIRIAGYDLNANRSGKTSDSAVPVISKKGKAGLRYALYQAALVAATRNKEFIQYFTEKIRGREKERGIKTKMRVKLAAKMLVIAWTLMKKKEAFNPEYLSIS

SEQ ID NO: 279221 - protein, 420 aa, unidentified
MKSFVPVAGVDVSKRFSDLCVLSPDNNVLLRQKIYHDMVSMKLAEKKLHEIELECGARPVVVMESTSHYHLILFQFFTDAGFEVVVVNPIQSGALKNINVRKVKNDRVDAYRIAMLYRLKVLRPSQIPTSSLRGLRLLTRQRSELKGDVARFKNRMTAYLDQIFPGYGEVFSDVGGSASRAVLHMCPTPEKLLNADGSLLAKVICEAGNKGPKFGAEKAAKLIEAAGSAQVIGVRSASNASLIKNVLDIIEGLLAAIQRIEREIKGLVTQDTRLDEDVKLLCSIPGIGFSSAVVIAAEMGNISLFRKPKQLAAYFGLDPGERQSGTFKGRKNKLSKRGSPQVRAALHMAAVSSVSRNRDGTYRNPVLAEYYERKCAEKPCKVARVAVMRKLSNIIYAVLRDRRPFELRTPQEHMALLAAA

SEQ ID NO: 279222 - protein, 374 aa, unidentified
MNGCTPPASQHKKIKGWFEVNSLGIDVGKKKCRAALKDERGDIIREFFFSNNNEGISALIQSASHYGKCTAVVESTGNMWIRIHDTLEENGIDTILANPYKTKIIAEAKIKSDKLDARILADLLRADLVYESYVPTKEFREKRSLVRHRISLVRNRTILENKVHSLLDKYDYKSDLTDIFGKSGIIWLKTLDVSNIDRLIMNTTLAAIENINLQIDTVSKELAKYGWDSYDVKILLSMTGIDVFSAMLIVVEIVDVRRFCTPWKLISYAGLAPSTRESSGKTKTGRISKQGSPWLRWILVQCAMTAVRYDQRLKSFYERLKSRKGSAKAIVATAKEILVIIWYMLTRRELYRYMNKKRYEQKLSRLKKIKESAV

SEQ ID NO: 279223 - protein, 381 aa, unidentified
MTDSGTPQIAAFIGIDWADEKHRWALQVAGPPGPRTPVEQGEVAHTPEALEAWICALGARYPGRSLAIALEQSRGALLFALSKYAHVVLYPIHPNTLDHYRKSFYPSGAKSDPGDAALILELLVKHPERLRRFQPDTVETRTLQFLVEARREAVDEKTRCLNRLTSQLKAQLQADLAAALPATHDAAVIEAGVLTAQRVARQLQLLRDSIAQLDRRLAELTQAHPDRAIFQSLPGAGPVMVPRLIAAFGTQRERYATAAQMQCYAGIAPVTERSGKHNWVHWRWACPKFLRQTFHEWAWLSTRTSAWARAFYQRQREKGKSHHAAVRALAFKWLRVVFRCWKDAKPYDQTRYSQALQKRAKPVEIPVKKTSGLTSIKDLLA

SEQ ID NO: 279224 - protein, 352 aa, unidentified
MTRITTIGLDLAKKVFQVHGVDAEGKIVVARKLRRKEVLAFFGKLPPCLVGMEACGSAHYWAREITKLGHTVKLMPPRYVKPYVKRGKTDPGDAAAICEAVARPTMSFVPIKGVEQQGLSMMHSARSQLVGQRTQLINAARGHLSELGIVAERGLLGFAELAAIVRDESDRRLPVTARAALIVLVRQIEMISTEIAALDSIVRKENKASELGPRLETIPSVGPVIASAFRARVTDAKLFKNGRHLSAWIGIVPENDSTGGKVKQKGLSKKGDRYLRSLLVNGAMAVVQQTQKRPDKHPWVAKLLGRMSAKQAAIAIANKTARIAWAIMVHGGVYEAGHRAPRYRAQACAAAG

SEQ ID NO: 279225 - protein, 334 aa, unidentified
MEEAPRSSSNLALSLGIDVGKSNLELALRSEDEIVARTTVPNNPEGHNILMDWLSEQGASSEETCVCMEASGDFEKAVARRLYQEAYRVSVVNPRRIKGYASSQLQRTKTDAADAALIARFGQREEPRPWEPPEAAESRLQELTRARQALHKEKTRAQNRLDDADDEAVRRAHQNLLDEIERQIEDLEEEIEEHIEENPEINDQCSLLETIPGVGLQTAAIVVSELGSPERFESARQAAAYAGLVPRHRESGTSVRGSPRMSKVGNGRLRRAMYFPAMTALRFNSAVKAFGDRLKERGKETMVVIGAAMRKLLHICYGVLKSGRPFDPSLHPGT

SEQ ID NO: 279226 - protein, 463 aa, unidentified
MAKKNTTSRKSKSKARKSVLERINPNAAGIDIGANFHFVAIPEDRAEENIRKFGPFTSDLHRLADWLTEHHIETVVMESTGVYWIPVFQILEQRGFEVKLVNAAHVKNLPGRKSDVSDCQWLQQLHTFGLLNGSFRPKDEVCVLRTFLRLRDTLVKDCSSHVLRLQKALTEMNVQIHRVLSDITGYTGRAIIRAILAGERNSLTLAQMKHPQVKASTEQIVKALEGDYRPEHLFALQTAVELYDVYQLKITECENKIEQQLEQFETKLDFEQVLEQSGALKVRSAKVRLELQRQAYLTSVCGVDLTRLPGLSTLAVEVIISETGLDMSCWKSEKHFCSWLKVCPDNRISGGKVLNSKSRKTKNRAAGMFRLAAQGAMQSKTAIGAFIRRIRARLGAPTAINAGANKLARLFYRMLKFGAAYVEQGQTYYEQRYKDRLLHNLSKRAKELGFQLTPYEPATVSVS

SEQ ID NO: 279227 - protein, 307 aa, unidentified
MTITTIGIDLVKNVFAVHGVDQNGKAVLIKSRVTRTALPGLIAGLPPCVIGMEACSGAHYWARLFRQYGHEPRLMAAKFVSPYRMAGKSGKNDAADAQAICEAVCRPHMRFVPVKDESQQAMQCLHRTRQGFIEEKTATYNRLRGLISEFGVIAPQSTDALRHMVSAQKDSLPLQVQQCVDDLLEHVARIEANIAEYDRILFRMAKTDHRSQRLMELKGVGPTTACALVASIGNAHDFKNGRQLAAWLGLTPSQYSSGGKSKLGRITKVGDSYLRTLLVQGARSVLSGAEKRTDSFIRWVCSLVERR

SEQ ID NO: 279228 - protein, 338 aa, unidentified
MAIVHVGIDLAKNVFAVHGVDEHGKAALVRPAVPRAKLHELIAALPPCTIAMEACSGGHHWARLFMAHGHTVRLIAPKFVAPYRMSGARGKNDAADAAAICEAVQRPNMRFVPVKSIDQQVRLMVHRARQGYVEARTACINRLRGLLSELGIVLPLKAATVRREAGAALEDLPGWANTVVGDLLSELHHLDERIALYDQHLQVIAREDERARQLMRLSGVGPTTATAVLAMIGNGHEFKCGRQFAAWLGLVPGQYSSGGKTRLGRITKAGDAYLRTMLILGARAVLAAAKSKTDAISRWAIALEQRRGYWKAVVAIAAKNARMCWAMLARGEAFKMPA

SEQ ID NO: 279229 - protein, 310 aa, unidentified
MAQHVGIDTSKAWLDVAVLESGERFQVSNDKAGWAKLVARLKGRKIAAVGIEASGGYERGPIRAMLKAGLPVRRINPFRLRRFADALGVKAKNDKLDAAVIARFVATLPTRPVHIDPLVEQLAELVAARHQLSDDLTRAHNQAEQVRDPLVRRLDRRRTTQLKAHIALIEKHIAKLVAADPSLAHKDRLLRSVKGVGAVFSHTLLAFMPELGQLTRAQAGSLLGAAPFDHDSGRLKGQRCIWGGRQNVRDTAFMAALSASLHNPALRAFHQRLRAAGKPPKVALVAVMRKLITILNAILRDNAEWQNYPA

SEQ ID NO: 279230 - protein, 491 aa, unidentified
MANGKKSTFERLTNGRLNRKQRREWMRKLSAEDPGLEIVNRNVAGIDVGNESHFVAVPVGRDAQPVQEFGSWTADLERMADWLKACGIETVVMQSTGVYWIPLFDVLEARDFKICLANARHTKNLPGRKSDVQESQWLQKLHTYGLLRNSFRPPDEIRALRSLWRLRDRHVKEAARTVQHMQKSMVTMNIQLSNAISDISGVTGQAIIRAILAGERNAEKLAKLRDKRIKATPAEVERSLEGNWREDMLFELKQAVDTYDFIQKQMAECDQRLQKLMAELPAREVEAAGVAAEAAGEPAGKNGKPARKNKKKSHGSKKNVPRFDLHTELERVCGVDLTSIDGIDIMTAQTVVAELGTDFSRWKEETHFASWLGLSPCRDISGGKVLKQGSLKVKNRVAAALRTAASTLLFSDSYLGARFRSLRTRRGAPKAIKAMARYLACLIHRMFTRGQAWVDRGAREFENKRTQRELAALQYKAAAHGFKLVSLKASA

SEQ ID NO: 279231 - protein, 446 aa, unidentified
MNKKAILFLELNRFGKLVKIQVKERSIAVKDIKTEKGKKINKKSMIVALDVAQEKHVVYIRCSGGREEKPFVVFNRREEYEQMWERISQTKEAYGLEEIVVGFESTGPYAEPLVHYLMKKEVKLVQVNPMHTKRVKEIRGNSPNKTDEKDPQVIADIIELGNYLTVVIPEGISAELRRLTQARERAVGRRTMLVNQVHGLVSVIFPEFLMVMKDIKTKTAHYLLKHCPRPQEVVGLGNERLEETLRKISRGRMGKERAEALYEAAVNTVGVREGQGSIVFEIKQLVAGIEETERVIEELEEKMREYLKEIPYSRCMLSIQGVGEVTVAGLIGEVGDFTKYKTIAEITKLAGLDLFEVSSGKHKGERHISKRGRPLMRKLLFYAAINVVRKGRIMHERYERYMQRGMPKIKALTAIARKLLGVLFALVRDQSEYVKNYEEMQLKEAA

SEQ ID NO: 279232 - protein, 351 aa, unidentified
MIIIGVDYHPSDQYIAFVDTETGECGERQLNHSDREAEKFYRELAQRGVSVRVGMEATGYSRWFERLLAELGIEVWIGDAAEIKTKRVRKQKTDREDARLLLRLMRENNFPRIWVPSPENRDLRQLLWHRHRLVQMRTRIMNQLQALAMNEGQRRKKKLWNEQGRAQLEKLPLATWASRRRKDLLELLDRMNPTIEELTAAIEQEAKKWPEVLRLMTHPGVGPLTALAFVLIIGTPERFKCGKQIGSYVGLIPCEDSSAGHQRLGHITKQGSSLLRFLLGEAAQAAARWDSDWRRRYIHLAMRRQRNIAKVAMARRLAVRMYWMWRNGWEYAEWVKFGSHAGQLGTRHGVN

SEQ ID NO: 279233 - protein, 343 aa, unidentified
MQSISTIGLDIAKSVFQVHGAEAAGQVVLRRQLKRRHVLAFFEKLPSCLVGIEACASSHHWSRELQAMGHTVRLMPPAYVKPYVKRQKNDTTDAEAICEAVTRPNMRFVPTKTVEQQSCLMLHRARHLFIRQQTAVINSIRAYLAEFGIVAPVGRRGVEQLLEVVADTADRRLPEVARACLAALASQLRALKAQILEFDRRIIAWHRSNATSKRLDAIPGVGPALATALVASIADPVAFRSGRDFSAWVGLVPKQNSSGGKDKLGSISKQGDRYLRSLFTAGALAVIRYAKIHGTGHRPWLTGLLARRPTKIAAIALANKLARMAWAMMARNERYREPAALAA

SEQ ID NO: 279234 - protein, 461 aa, unidentified
MKKRPQESKQRKKKKKVSIDQGLQLVNPNAAGIDLGAKEHWVAVGADRAAEPVRRFGTFTDDLEALARWLKECRVTRVAMEATGVYWVPVFQVLERHGFEVLLVNARQIKNVSGRKSDVADCQWIQRLHSYGLLGGSFRPADAYCVARSYLRYRDELVAARSTQTQHMQKALLQMNLQLKQVLSDTSGLSGLAIIEAIVKGERDPAKLAGLAHRRVQSSQSQIMKALAGDYRAEHLFVLQSALELYQTYDAKITRCDEQLARQLEALPDRVDSQAKPLPPKAANKKIDEELRSGLYRKFGVDLTAVEGIGPQVALTVLTEVGPDLSRFKTEKHFTSWLGLCPDNRISGGKVLSCRTRRVVNRLSDVLRLAATALAFSESALGAFHRRMKAKLGAAEGVTATAHKLARLIYRLVKHGEAYVKQGMDEYEKKYRERRIKYLKKIAAANGFQLVRMQALPTVVS

SEQ ID NO: 279235 - protein, 349 aa, unidentified
MNFYTNTHPYYCGIDLHTRLLYVCIIDNENNILVHEKIDDSPDKLLALLKPYLGNIVVGVECMHCWYWVSDFCEEHNIDFILGHALYMKAIHAGKTKNDKIDALKIAKLMRGGNFPLAHAYSKEHRSIRDALRRRTHIMRMSAQLKAHVSSTISQYNLPALESRLNLQNSPDREKMHHFFPDEAVQKSMDLNLNIIETMVSELYKIEHYVKTQAQTHRATDLHILKSFPGIGKILALTILYEVGDIKRFSSVQKFASYSRLVKCKAESAGKTHGTQGNKIGNAHLKWAFSEAAVLYLKGNDNAKRYLAKLQKRMSKAKALSALAHKIGRCTYFMLKNQQVFDEERFLNG

SEQ ID NO: 279236 - protein, 371 aa, unidentified
MDESSKTLFVGLDVHKDTIAVAYAPDDRGAEVVVWGTTGTRQCDVDKLIRKLQAKGARLVFVYEAGPCGYWLYRYLTRKGLTCHVVAPSLVPRKAGDRVKTDRRDAATLARLMRSGDLTGIYVPSIEDEAIRDLSRGREDAMRDLKATKSRLKAFLLRHDIRYEGRATWNAAHLRWLATVVCPTAVQQIVFQEYVRAVTEQQERLHRLETELQSAVKQWRLYPVVEAIQALRGIDLTGAVIFLAEVGDLTRFDNPRKLMAYLGLTPSEYSSGGRRRQGRITKTGNGHARRALVEGAWAYRYPAKVSRHLQLRAERTSATVQAISWKAQVRLCKRYRQLSARGKHVNQVVVAIAREMAAFAWAIARTLPRPA

SEQ ID NO: 279237 - protein, 438 aa, unidentified
MAKQKFKLLNEYAAGIDIGSREIFIALPLGEVKSFGTFTSDFHSAVEYLKSNKIKTVAMESTGVYWVTLYDMIEQAGIDACLVKSTMVKNVPGRKTDVSDCQWIQQLHSYGLLRASFIPDDQTRMLRSYVRLRKTNIRLASDHIRRAQKALDLMNIKLHFVICQINGVSGLRIIKAILKGERDPEKLVELCDRQILKHKRQLVINSLRGNYRKEHLFALKQAIEAYEFYQQKTYECDKEIEQLLEKINKGKPKPTNLKKPKPIRHNKPKIENLHLHLMKMTGGNDPSQITGLTDSTLLQVIAETGTDMSPWKTDKHFTSWLGLAPNTHQSGTSFKKRKIRNSSNAGQIFRMAAQTLVLSKHNAIGAFYRRIQYKKGKLTAMKAAARKLAVSYYNVMTKGVEYVEYGIQQYEQKIKEQRIKSLKRQASVYGYILSPQLE

SEQ ID NO: 279238 - protein, 337 aa, unidentified
MGRELFVGIDVAKAHLDVAFNDESGCTRYTNDDAGISKLVEHLKSRQVALVVLEATGGYQRQALSELLAAGLPGVAVNPRQVRDFAKALGKLEKTDEIDAKVLALFAASIRPASRPVVDDTTQEFQALLARRRQLMEMLVAEKNRLHQHATKTVRRSIEAHIDWLKKQVRDTDKDLEDRLRDSPAWNPRVEVLESEPGVGRITSMTLLSELPELGTLNRKQIAKLSGLAPLNRRDAVSPGSQDQRIARALKVLHRPTGTVHLIEPAGEVEHRCIHLGIAALQTGKAPVGIVRGMAHPLEIPRRDTLELGQLEHGPVPASGGSVLLPASRGLLVGLRP

SEQ ID NO: 279239 - protein, 339 aa, unidentified
MAIVCGLDIHRSQVTYDWVDVDTGEGRRGKLAPANRETFRGWLEQFAGHDVDVVVEGCTGWRFIVEECRAAGVTPHVADPAEASVRIHGVKRRAKTDKVDAKGLRELGVQGRVPESWIPPAQVLEIRTAVRLYHDLMTERAAWLHRIHATLFHQGAVQQSQLLRGDRDRLHDSDLLSPAGKDAVRSILRVVEVLDDEINRIRQQLQRFATKQPGCKELQKEYGIGKLTSVVIWSEIGDCRRFSSSDGAVRHSGLDVTVYSSNGKRSAPHLSRQGQPLLRWALFEAGRCGGRASSPDHDYWQAAARRVGKKRAAISVGRKLTRRCHHRLRALGDDAFAEI

SEQ ID NO: 279240 - protein, 346 aa, unidentified
MEENTSIAVDLAKNVFEIAVSHQPGRVTERHRVSRSRLAHFFATRPPATVILEACGSAHHWARLFESFGHRVVLLPAQYVRPYVRRNKTDRADAAGLLEAARCAELRPVPVKTVEQQALLALHRVRSGWMATRTARLNTLRGLLRELGVTIPVGARQVLPKIATLIEDADSDVPNFLRQTLATLCAEIRDLQRHIHELDAQLAALGKALPPVARLQTIRGIGPLTSTALVAVVGDVSRFRSGRQLASYLGLTPRERSSGDRRQLGRISKRGDSYLRMLLIHGARAVLWAAKSAQQPDRLQTWALRVEQLRGHNKAAVALANKLARVAWAVWRHQRDYQPAATTRAA

SEQ ID NO: 279241 - protein, 388 aa, unidentified
MTQAPGALPTPTVLDYERTLILAIELSNTSWVLAAQIPGLPGVKAKRSIEPTPEALMAAIENYRTRAVKAGRNVERVVAIYEAGWSGFWLARWLAQYGIETHVIQPSSVPVDRRARRAKSDGIDAELLLRTLLAWLRGEPRVCSMVPIPAEADEDARRRVRERAELVAERVGLVNRIGAVLATLGVGEYNPLRRDRRQRLDELRTALGGSLPTHARAKIVRMLDRLELLLIQITELEKSRDAVLEDENPDKAASMIQQLAKLRGVGVQSATVLVREGFVREFANGKALGSYAGLTSTPYSSGGTEREQGIGKAGNVRLRTLMVELAWLWQRYQPDSAQVSWFRERVSGTGRRMRKVMVVALARKLLIALWRFATQGVVPEGAVMKPAT

SEQ ID NO: 279242 - protein, 419 aa, unidentified
MEILYTNCAGLDVHKKTVKVCVLTHASNGQTHKEFRTYFTTTEELLKLGDWLKEQGCTHIAFEATGVYWKPVFNLLEGSFEVLVVNAQHIKAVPGRKTDVKDAEWIADLLQHGLLKASFIPSGPQRELRDLTRYRVRLTEEKAREVNRVQKTLEDTNLKLGDVVSDIMGKASRLILQAIADGEPDPGRLAALAVGRVRATQEQLEAALRGTVTAHHRFLLCEHLTQIHHLEQAIERVTAEITRCFTPPSPPEEETSSRKEAEAAPEMVSDSASPQEPPSSPQAALNWSVAVVLLCSIPGIGERAAIGILAEIGINMQQFPTAGHMASWAGVCPGKHESAGKRLSGKTRKGNPWLRCLLVQAAHSASHQKQCYLGSAISSHCQTTRVEASGDSRRSQYSGHYLSSPEQPDHLSGERRKLL

SEQ ID NO: 279243 - protein, 378 aa, unidentified
MSSETTIHVAIELSVSSWLVATRPPGAEKSRLHHIEGGNTTVLLALIAELRTRASTKLGKPAEVACCFEAGRDGFWLHRVLTMHGIAAYVLEPASMLVNRRARRAKTDRLDAEGMLRVLAAWLSGDRQVCSMVRVPTPEEEDAKRPHRERQHLVQERLRIENRIEALLFTQGILKRPSLRSWARDVAELRTGDGRPLPPLLRAELDRLQRRLVLALELIREVEAERAEALAATADDATTKKIAALQRIRGIGPNFATVLVREVLYRSFANRRQLASYVGIAPVPYQSGGMDRDRSISRAGNPRARTTLIQLAWLWLRYQPGSALATWFRERVGLLHGRTRRIAIVAMARKLLIALWRYVEIGVMPDGVEIGTKADATA

SEQ ID NO: 279244 - protein, 356 aa, unidentified
MNPTTSTEIIVGVDTHKDIHAAVAINGVGARLGTRTIPVSQKGYQELEAWATSLGPVRAFGVEGTGSYGAGLTRSLQASGYTVIEVNRPNRQLRHQHGKSDPLDAESAARAVLSGQAGAQPKTGTSAVEMIRHLKVARDTAVKCRTQAMVTLKTIIVNAPTALRQQLDRLTTKMALIRHLAALRPGALTSTTASAKAALRAIARRWLALDAEIKAHDVHLDALTAVCAPTMIEAHGISTGTVAQMLVLVGDNPERIRSEAAFAKLCGACPIPASSGRTNRHRLNRGGNRQANAALYRVVIVRMRSHQPTLDYVRRRTAEGKSKMEIIRCLKRFVAREIFGYLCGARRPSAPSHIAT

SEQ ID NO: 279245 - protein, 348 aa, unidentified
MTIIGGFDLHRGQITFDYMDTETGEVSTGQIRPATRAALRGWLDKRFCGRNDVMLAVEGCTGWRFVVEEMQRAGVEAHLAEPADTAGKRGPKKRAKTDKADARLLRELLCKQDLPESWIPPQHLLEVRTLGRLYLSLAAQRRAWLQRIHAQVYHQGVAPIVGLLTCEGRDQLAAAELSAAGRQSVQTALSMIEALDQQIEPLRAQLKSLSDRLPGARALKAHYGIGPLCAVIIWAELGDCRRFSSSDQAVRLSGLDVSVWSSDRKRAPGHLARQGPPALRWALFEAAMCAARPGSPDYDYYKAVSDRLSSKRGALSVARKLARWCHHTLRELGEQAMAPPDEPKAQAA

SEQ ID NO: 279246 - protein, 437 aa, unidentified
MQIIYSRCCGIDVHKDSVTACVLVYSESPEPEVRKKEFATHFKALGNLRFWLFAQKVTHVALESTGVYWKPVWEALEGHFQLILANPYQVKNIPGQKTDARDSQWLAQLLAHGLIRPSFVPPRETRNLRDLTRYRVKLTEERNRIHNRIHKVLEDACIKLDTVASDILGASGRAIIQGIIAGQEHPDWLADKAKGTLRAKQPELRLALRGRITDHHRLMLGELIDDLEFVESKIERLEKAIAPQVDVEKLARLCTIPGVDLITAWTLLSELGSDMQVFESPKHAASWAGLCPGNHESGGKRLSNRTRKGNRWLRRALCQAAWAASRKKNCYLAAFFYRKAGKHGIRKAIVATAHHLLVIAFCILRDHTEYREMGGDYFDRLHPDRTRNRLVRRLQRLGHDVVLTPRAETPPALPRPKRKIGRPCKCAERAIPCKHMP

SEQ ID NO: 279247 - protein, 399 aa, unidentified
MQYYLGIDIGKYHHQAILCDPEAKPVGPPLRFETTQEGFHTLFSYLKTHTQKEDFSVIHVGFEATGIYWLTLYEQLMKQNIRVSVLNPMQVKAYRNEGIRGAKTDRLDALLIVKVLRFGDYRESDIPDGDLFALRQLTRLRSDLVEMTSKIKLKIIGILDQVFPEYKKVFPDIFGNSSKALLQEALVPEAIAAIPTKKLAQLLRKASRGRYGVSKAENVKRAAEETIGIKLGIDAFSISLDILVTQIIHLEKQIERLNAEIEKRMAPRGETLTTIPGIGNVQEAAIIAEIGDFERFRNDKDGAEKLVAIAGIDPKVKESGKYKGQAKMSKRGSSYLRKTIRQSAFIASLGKGKDPMFTRIYEKKISEGKPFEVALSHVENKMLHVIYSLLKSKKEYVPN

SEQ ID NO: 279248 - protein, 427 aa, unidentified
MEEVTDEPLYRDRVCGIDIGKAGMAATIRVPSDANPARRAQETRSFGTTKREVLALADWLRCWQVPAVVMEATGDYWKPVFYRLEAEGFECVLADAKQVKHLPGRPKRDPSDSRWLAACFERGAITSCFVATPEFRIIREHTRYRRDLTAERTREKQRAEKLLESAAIKLSSVVTDLHGVTGRDIMDHLIAGERNPKVLAQLARARARRKISELEAALEGAEFFTPQLAALLARMLARIDQLNASIGELTAVVETLLEPYEEQLQQAESMPGWGRRSAQDAVAGTGVDMTRFRTGGHLASWAGRTPLDNQSGSRSGRAKSKKGNRYLAAITGETAVAAGKTQTREGARYRRIARRRGKPKAGVALGNTQLKVYHALLSSPGTRYQDLGVDYYDNRASTRRQVRALHKRASELGYTLVPDLTGCPEIA

SEQ ID NO: 279249 - protein, 351 aa, unidentified
MLLIGVDYHPSFQTIAFFDEETGECGGQELNHSDGQAERFYRGLQQRGIRVRVGMEATGYSRWFERLLAELGIEIWMGDPAEIKAKRVKKRKTDRNDALLLLRLLRENNFPQIWVPSPENRDLRQLLWHRHRLVQMRTRIMNQLQALAMNEGYRWKKKLFNEQGRAQLEKLALAPWASRRRQELLELLDRMNPTIQELTAAVEQEARKRPEVLRLMTHPGVGPLTALAYVLIIGTPARFQRGKQIGTYVGMIPCEDSSGGKQRLGHISKQGNSLLRFLLVEAAQAAARSHPDWRRRYIHLAIRRHKSIAKVAMGRRLAIRLYWMWRNGCEYSPSLEFGSYAGQLGTGHGVK

SEQ ID NO: 279250 - protein, 343 aa, unidentified
MKIIGCDFHPSFQQIAMVDTETGEQEEKRLTPSEAVLFYSQLQGQRVLIGMEASGNTLWLERLLAGLGHQMLLGDASKIRAMEVRKQKTDRRDAELLLKLLLEDRFPEVWVPSLEMRDVRQLLLHRHKLVGMRRQVKNQLQHLALNQGVQQKRKLWSQAGRQLLQQLPLGGWTGRRRNDLLGWLDELDQEIAELDRAVEQEASQHVVARLLQTHPGIGPVTSLAFVLTLGRIERFQHSRQVVSYLGLNPAENSSGGRQRLGGISKQGNPMLRSLLVEAGQSASRGDKELQRAYQRLKQRKHSAVAKVMVARKLAVRLYWMWRTQQPYSATRMQGSPSHPVAAV

SEQ ID NO: 279251 - protein, 322 aa, unidentified
MNTNDFSPVGIDVSKETLDVFVGETIIHTENNDKGFKRIVSQLPSNSWCVMESTSTYGYRLVDYLVKHGFRVSVVNPLSIKRFAQMNLSRTKTDKADAKLIAEYAKIAELPVYEPVSDTMNELRQLETVLEQLIKQRTALQNQIEALEQLPRPSKVAIKALKDAINAIDQQIEAIKQRMHKDAQIECPQAYEKALSVKGIGKRTATLLVAITNGFTLFENSRQLSAYIGTCPRIVNSGTSIKGKTHISKIGLANVRATLYMCAHAAVKFNFACKALYERLIAKGKAKKVALMAVVNKLIHQVFACVSKNEFFINNYKISFGF

SEQ ID NO: 279252 - protein, 334 aa, unidentified
MKGSSNRGWLALDVGAKKHAWASRINDQYAHGSVTNDPAQLRAFLKRCLKKTTHLQVLVEATGVYYLDVAIIAYELGAQVMVINPRAAHHFAKALHQRSKTDKLDAQMLLECLMRMPFQAWEPPPKAWRQLRSYGRFLVQLTETGTADRNRLHALLHTPDSPAFLRTELKRKIRTNDQRIERVRAQAIALIQADDYLRVRFQSLRTIKGVADTAAVSLLSELVTVPPTLSSRACASHAGLDVRLFESGTSVHKAARISKHGNKYLRRALYHPAMSAATHDPGARAFKERLIGRGKKKMQANVAIMRKMLTAAWAIMKDPQPYDSSRLYADLDKA

SEQ ID NO: 279253 - protein, 437 aa, unidentified
MTSHCRFCIYKISGGVLLAFKIFRFNCCGLDVHKTWIFACVGITDANGRTEYKEKRFSSFSRGLRDLAAWLASYNCTDVCMESAGKYWIPVFNVLEKTCNVILAHPKYTKPQKGNKTDRKDAKWICDLFMCDMIKPSFIPPAEIRHLRDLVRYRLKLTNMLTGEKNRAQNCLTVSNLKLDDVFSDVFGKSSRSITEYILAHPGETFDVSPFVDKRCKTPIEEIQAAVDGTVSPEQAIKLRQCLNHVDELEKHKAEMEREILRVSDPYLDALKLIRTVPGLDKNPFTAIQILSEIGGDMSVFPTDQHLVSWAGCCPRNDQSNFKIKSTRISRAGSYLKPVLVQVANALIKSKKHPEITDRYHRIKSHRGHKKAIIAICRMLLTAIWHILTDLKPYTAEGYLAPKPVKKDKILTTSQALNLLKLRGYVIKDDDLPVTAS

SEQ ID NO: 279254 - protein, 483 aa, unidentified
MLYRNIGVDLGVTAKHKAQVLDEQGKKVVPNFSFSTSKDDLDALCQQALSGTNQGTKLRFICEPTEMSWFPFAIYAKTNNHDIVRVKSHKAHDLRKYFSRHKKNDKLDASVLAVMPMIDEKATEQIYLSDAKTFSLERRNRQKEKITNEIAAIKNRLSSLYHWVMPGLLDCFGDSFDSRAREFYRHFSNPFRAKESGIDGIRQILEPAGRQKMKPDLPEKLYSIACRSCELYAKASCYVDFTEIQDEVHIELQLLEAQEEALAQIKDRVESLYEKVHPSKNIESLKGISENLGPSFIGIIGNPDRFSSQSKLRCFAGMIPKQDDSGETNKKGLPMTQEGPSRFRRDLFLATDVARQWDPQLAKIYYEEMVNKGHCHTQAICATIPNLLNRILCVLKENRTYQLRNIEGNPISATQARQIIKEQFTVPEEIRQRTRSKINKNKKEERIRNLFKRQSSEMTPQNSHNIPPKDMLQKFEKYFNNAS

SEQ ID NO: 279255 - protein, 404 aa, unidentified
MIFVGVDWAEAHHDVCVLDEAGAVLAKRRIAEGLDGVSQLHALLADHAEDPGQIVVGIETDRGLLVGALVAAGYQLYAINPLAASRYRERHVTSRAKSDPGDAKVLADLVRTDRHNHRPVAGDSDLSSALQVLARLQQNLIWSRQRLVNQLRSSLREFYPAALAAFGTELAHPIALSVLEAAPTPAIGRTLSLSKLTAILRRAGRERNVEATAVEIQAQLRAPQLAATPFVNAAYGKSVAATVRILRELNAQLASVEAELAPTFEKHPDAEIYRSLPGLGVVLGARVLSEFGDDRTRYAHPKARKNYAGTSPITKTSGTRHVVLARLARNRRLADACHQWAFCSLTASPGARHYYRALRLRGKTHHQALRALANRLVGILHGCLHHRQPYSEGVAWPRPFTVAA

SEQ ID NO: 279256 - protein, 367 aa, unidentified
MKKISTAAAKQTKSFHDHNLTIGLDLGDRSSWYCVLDETGSVLLEQRLSTTPKAMREVFGGMPRCRIALETGMHSPWVSRLLGELGHEVIVAHARNVRLIGESRKKDDRMDARSLARLARIDPQLLAPVKHRSAKAQADLTVIRARAGLVRSRTALINTARGLVKSYGERLRGCNPRNVNPEKAQELSPELQAALAPLLAAVEALSERIGEYNERIEQLAQQSYPQVARLEQVKGVGTLIALTYLLTLEDPQRFRKSRDVGCYVGLQPGRRNSGQSEPQLHISKEGDPYLRTLLVQGAHHILGPFGADSDLRRWGLKLAERGGKNGKKRAVIAVARKLAVLLHRLWVSGEVYEPLRNSSQMMMPAAA

SEQ ID NO: 279257 - protein, 397 aa, unidentified
MLSLRDYLILFYLFEFEQNVRNAAKRDIQNIQPGDKTKGDFSLLFLELFIKKLFGMRKIVKQIAAIDVAQKELVACLGRMYDDWSPQLYANKTFANTKTGMEALEHWAKKQIDPAVPVRFVMEATGVYHEALAYFLDERGYELSIVLPNKISNYVRTLDIKTITDKTSSQAIAMFGLERKLDNWKKPKDIYRKLRQLTRERDQLIQERTIVKNQLHAEQAEAYPNKSSVKRIKNRIDMLNKQEKEIRGEVTALIAQDEEMKKIIVIICSLPGVGLLTAAIVLAEASGFDLIRNRRQLASYAGFDVKEKQSGTSIKGKPRISKRGNKYLRKAMHLPALAAIRHNERFKAIFVRLVSKHGIKMKAAVAIQRRLLEMTYTLYKTNKLFDKNYLMRKVEVA

SEQ ID NO: 279258 - protein, 324 aa, unidentified
MIDAILGIDVSKNTLDVSISSCTKVRTKSFANSSDGWHHLLDWLVAQKIQRVHACLESTGRYSLGIACSLYEAGHVVSIINPAQIRDFVRTKLGRNKTDGIDASRIREYCELFKPSPWAPPSEAHRRLGELQTIRAGIIAGLTEWKNRKNSGIVDTEAQALADATILHFTSQLGAVDKAIALTIDNDSDLRSKRDLLLSINGVGDTLAGVVLAELPGPDVLRSSGEVVAYAGLNPRQHQSGTSVDRATRISKIGNAVLRAALYMPALSAMRYNPAIVALVTRLKSRGRLKPKQIVVAAMRKLLVLCFGVLKTGKPFDPAIAMGC

SEQ ID NO: 279259 - protein, 361 aa, unidentified
MFTERTSVGLDVHARSVVAAAVDGLTGEVFRARLTPGNEEVINWVRSLPGPSAVVYEAGPTGFGLARAFTTTGIRCEIVAPSKIQRPSGDRVKTDARDAMHLAKLLRLDEVVSVAVPSLEREAARDLVRAREDVRGDLMRARHRVSKLLLRQGIVYYGGRAWTGTHLVWLRAQHFDSPGLQLAFDAEHEAVLQAEARRNRLDAAIEVMAADSEFTPVVHRLGCLRGVSTLTAFGLAVEVGDWDRLTGSSIGAYLGLVPTESSSGQSRSQGSITKTGNTHARQLLVEAAWHHRKRYRTPGATMAARWELAPAAARARGHAGNQRLHQRWLHFSDRKKRPVVANVAIARELAGWCWSLAVMDD

SEQ ID NO: 279260 - protein, 328 aa, unidentified
MSSDPTQFVGIDIGSKVHEVCVVDHGKIDKRTLKSAPVDHARFIKTLDPARCRVVMEATGVYYLDLAIDLVEAGIAVMVLNPRTAHHFMKALGKRSSTDAISAQALAEYAERMPFKAWTPPPPLWLEFRAIARQINRLKKEETKIKSRVHALKATRTCSPLILRDEQAGLLALGQRIERLLKAATEAIARNDELKRFLDHLSVAKGFRETSIIPILGELLLLPRTMNGKQCACHAGLDVRLKRSGTSVESKPRLSKAGNAYLRAPLFMPMLSVIQHEPLAKAHFERLVARGKTPKQAIGALMRKYLTGFWSVIRYDQPFDTSKLFAPQ

SEQ ID NO: 279261 - protein, 416 aa, unidentified
MNAAGIDVSSRKSTVAVLRPFGEVVRLPFDVAHNTEGLASLAEQLKALDGETRVVLEHTGRYYEPVAKALHEAGLYVSAVNPLLIKEYGANSLRRVKTDKADAVKIARYALDNWADLRDYTPMDTIRYDLKTLNRQFQLASKQRTASANNLIALLEQSFPGIRKCFDSPVRSDGTQKWVDFIHTFWHVECVRKQSLNAFSERYRKWCKRHGYIFKQGNAVEVYSLAKNAVVLVPKSEVTKVLVQEAANQLTSISRSVETYRAEMERLASTLPEYPVVMAMYGVGKSFGPQLMAEIGDVRRFERKQSLVAFAGIDPMPNQSGDKNVRSNKSSKRGSPYLRKTLFNIMGIYLKCSPQDEPVYQFLDHKRSEGKPFYVYMTAASNKFLRRYYAQVRDYLSTLDDLPPVDMDSTGLKTSD

SEQ ID NO: 279262 - protein, 406 aa, unidentified
MSAEKLPPVHFFGLDIHKHYLVAIGVDPDGSQVYGPRRVVWADLESWRSKTLAPQDAVVIEMTTNTWQVYDELQPFVHSVTVVHPPHVRLVTQPQVMNDKIAAFNLALLLAKGMLTGVWIPPLEVRERRALLAQRSKMTRLSTQAKNRLHAVLHRHHLLPCEGDLFHPDRRNWWLALPLSPIEKVRVFSDLETLAFARSQVDNLEACVRQIAAQDSRLPWLVQLPGISVLNALSILAAIGDIDRFPDAKHLVGYAGLGSRVHDSGQSTRTGKITKTGRRDLRAALVEAAQVAANTHPHWQAELARLEPRLGRNKAIVAIARKLLIAVWHTLSEQVADRHAEPARVARKLLQVAYTLGKENRPKDLSAAALVRQQLDQLHIAQEVTHIPWGSKKRPIPLPPSALPPD

SEQ ID NO: 279263 - protein, 416 aa, unidentified
MDRVVIGMDPHKASVTIEARDDREVLRARGRFATDGDSYRQMLRVARQWPARVWAVEGANGIGRPVAQRLLADGERVLDVPAKLAARVRVFDTGQGRKTDATDAHAIVLVALRNKGLRELRVDPALEVLRLLCDRRDELSRARVQALGRLHRLFLQLLPGGAPTRKSTARYTALLAGVRPVDPVALTRRRMAAAEVADLQRLDAELKDLTAELKAHVLAAGSHLMDIHGVGPAGAARILADVGDVHRFAGRARFASWTGTAPIDASSGEHVRHRLSRAGNRRLNHVLHIAAVVQLRNDTPGRAYFRRKRAAGKTGLEAIRCLKRRLSDAVYRQLAADARTHEPDAGPGGHCGASLQSSAADLTPRVGTSDQPQPGPAPTTLPAPGTAEKNTGPGAAAARADAPEASTCSAPPDERR

SEQ ID NO: 279264 - protein, 343 aa, unidentified
MDHFAGLDVSVKETSVCIVDDTGRIVREVKVASEPECLLAVLTNPAYHFKRIGLEAGPLSQWLFSALAEAGLPVICVETRHMRAVLKAQINKTDRNDARGMAQMMRAGLYRPVHVKTLRSQKLRMLLTHRKLLQAKAIAIENDLRATLRNFGLKVGVVGTVKFEARIKELVESIPDLAELVEPLLVVRRTLREQIGILHRRLLAIVRDDDVCRRLMSVPGVGPVVALTYRATVDIPIRFRNSKAVGAVFGLTPSRHQSGESDRTGGISRCGDEMMRVMLYEAAQIMLVRSVKWSWLKAWAVKIARRRGLKKAIVALARRLAVIMHRIWVDGTEFQWTREEAAA

SEQ ID NO: 279265 - protein, 347 aa, unidentified
MRFYNQPHRFYCGVDLHARTMYLCILDQAGTVVLHKEVPADPDAFLEAIAPFRDGLVVACECLFCWYWLADLCQAENLAFVLGHALYMKAIHGGKSKDDKIDSKKIAQLLRGGNLPMAYAYPRGLRETRDLLRRRMYLVHKRAEVVAHVVNTNSQYNLPPFGKKLIYARNRQALKIAERFVDASVHQNVELDLRLLDSLDELIGDVELYLDRTVKVDDADAFYRLRSIPGVGKILALVLFYEIHDIRRFAGEGEFLSYARLVRPQKTSAGKVTGGGGGKIGNAHLKWAFSEAACLGIPCPGARLQSRTPLPQAQRLSAVRPFDRHEKLHPGQGRTGRSSRRKTMRIT

SEQ ID NO: 279266 - protein, 394 aa, unidentified
MKLVGIDVGKNSHHFCVMDKETGELNVTPSSFSNNKEGFDFLINSLKPYSKKSILLGMEDTGHYHVALLKFLLSNGYTVALINPKTTDLTRKMEGGITKNDKLDTITICDVLDTPERKKQYRITKVDRFDLYEQRQLTRHHHNLKEELNLYCNRLQKSIDLVFPEFNTLFSSKYGVVYMNLLKTFGSAEAIASTDIRTIRKCFEIKGRGGRISLTAEKLKECAKNSIGISSEVETIQIKHLVRQITLIKEQIAEIDKKIEEFSITNNSPILSIPGISHFSGTSILAELGDIGNYSKPSQIIKFAGVAPYHYESSQYNAQHTGITKKGSKYLRKTLYQIILTVINNNPVFKKYYLLKISQGKGHRCAQGHCIRKLLRIIYHLLETGQSFDPALLR

SEQ ID NO: 279267 - protein, 385 aa, unidentified
MANQNDLSRSLVALEQNNTIIAVIEMSLNYWLIAGIVPGVHRHPLKKLNVDEKALLQLLRQWRDEAAKAGHVITRMAVAFEAGRDGFWLARWLRARGVEAHVIHPTSVAVPREHRRAKTDRLDTELLKRAFLGWLRGEPEHCRMAAIPSLQEEDAKRPTRERENLVGERTRIINRMKACLVRFGIRNFKPTLSKAPERLNELYTPEGDLLPPNTLAELRRDMARLRFIIGQINEIEAARLQRLEQAPVEGPTAMVRLVARVIGVGIETADMLVHEILSRDLRDRRAVARYAGLTGAPDESGSKRREKGLAKAGNARVRRGMIQLAWRFLLHQKDSALTQWYRARTASAGGKRKTMIVALARKLLIALWRLVTTGEVPTGVVLRAA

SEQ ID NO: 279268 - protein, 337 aa, unidentified
MAIVRIGLDIAKLVFQVHGVDGHGKAVLKKTLSRSEMLGYFTKLAPCLIGIEACAGAHYWARELAKLGHDVRLMASQFVAPYRKSGKNDANDADAICEAVGRPNMRFVPVKTEEAQAILTLHRARDLLVAERVALSNQIRGLLGEFGIAVAGGMARLRRVMLEIGTGNRSLPLLAKETIGELYERLLVLDQRAEEYERKISVLARQNEVASRLMQIEGVGPITATALVASVGDAKVFRNGREFAAWLGLTPRQHSSGGKSRLGGITKRGDVRLRTLLIHGTRSAMRSMPGKTDRKSRWVVELQKRSCNNVAAVALAAKHARIMWAMLARGTEYKVAA

SEQ ID NO: 279269 - protein, 354 aa, unidentified
MNNIKYIGIDVHQATSVFAIMNQQGKALGEGFFETKQQTITDFLKSQRGTLCVTFEEGTYANWLYDVIQPHVAKLVVCDPRKNKLDGNKTDKIDARRLADLLRMNALKPVYHGQHSTRPLKELARSYVTLQQDSTRAMNRVKAIYRARGIQCRGTSLYQPKNRKEWLGKLNEDGARHRAELLLKQLEFLQKFRLEAQKSLVRESRKHKESKILRTIPGLGNIRVALILAFVMTPHRFRNKRQFWTYTGFSVVRRGSAEYEITEGIVKRTKKKPLPRGLNRNCNHVLKNVFKGAALTAAYRGAFQDLFKQRVDSGAAPNLVLLTLARKIASITLALWKKGERFDIERHRLSEQKT

SEQ ID NO: 279270 - protein, 416 aa, unidentified
MSGTHNPVVGQDRPAYAVFCGVDVGKSDHHACALDPSGARLYDKPLPNDEAALLGVLGRLSEHGPVLVVVDQPAAIGALTIAAARSLGIDVGYLPGLAMRRIADLYPGEGKTDERDAFIIADAARTMPHTLRRVGTDDQTLAELTVLAGYDDDLASQSTRLANRLHDCLLHIHPALERLLAKQLDRPGVLALLAAAPTPDTLRTLGPEDIAEALRAGGSPRLARTLPAKILATLNTQTLVVPGTAAFGRVITGVAAQLRDLHAERRALGRDLEALLEAHPLAGVLRSMPGVGLRTALKILTIVGDGSAFPTAAHLASYAGLSPVTRKSGSSIKGETRSYRGNHALKSALFLSAFASLSDPASRAYYDRKRAEGKKHNAALTCLARRRVDVLYAMLRDHTPYQPPITHQPTPTATAA

SEQ ID NO: 279271 - protein, 406 aa, unidentified
MSAVMIGIDPHKGSHTAVALDGVEAKLGEIRVSSSVTQVERLLEWAKGWPERTWAIEGAKGLGRLLAEQLVTAGERVVDVQPKLAARVRLLNTGAVNKNDPNDARSVAVAALRSPSLKEIGPESHAAVMKIWARRHRDLSRTRNRIACRLHAVLCELVPGGFAKEISAVQAARVLENIEAHGASAAARMELAGELLEDLRRIDGQLRDAKRRLAKIVKESKTTLTEIYGVGPIVAATVIGDVAEISRFSSKDRFAAYNGTAPIEASSGNNKVHRLSRRGNRRMNHAIHMAAVTQISHRGTEGRAYYDRKISEGMAHKSALRALKRRISDALYGRMIADARSAAAAIEEGPGGQLGNDSISSVAGSHPQTPTLRSGHSRARSNPRSLRSAANIGNPPRRAKATRRAS

SEQ ID NO: 279272 - protein, 387 aa, unidentified
MSQTIAALIPAAVDYERTLVLAIELSNKSWVLAAQVPGLPHAKASRTVNPEAEALLAAIAGYRARAAATGRSIERMIAVYEAGWSGFWLARWLMRHGVEVHVIQPSSVPIDRRMRRAKSDGIDAELLLRTLLAWLRGEPRVCSMVPVPDEADEDARRCVRERSELISERVGLTNRIGAILATLGVSDYNPLLRNRKCRLAELRTGLGEPLPRNAHAKIERLLARLELVLAQIAELERERDAVVETEASDKASKMIQQLTSLRGIGVQSATVLVREAFVRRFANGKALGSYAGLASSPFNSGGIEREQGIGKAGNRRVRTVMVELAWLWTRYQTDAAQVCWFRERVGPTGRRVRKIMVVALARKLLIALWRFVTDGVVPEGAVLKPAA

SEQ ID NO: 279273 - protein, 420 aa, unidentified
MKSLSDAEFTAFVGLDWADVKHDICFQAAGCEDREFDCFAHQVTAIELWAQSMHQRFGGLIAVALEISKGPIVYALQKYDFIVLFPINPSTLAKYREAFKPSRAKDDPTDAELALDLLVRHRERFKPLQPHSEQMRTLQYLVEQRRRLVDDKVRYTNRLGNALKQYYPQALDWFEDRDTVLFCDFIVRWPTLMQVKRARKTSLVAFFRTHNVRFPKLIEKRICAIKAAVPLTQDGAVITAHKLQAQVLVEQLRVTLQAIRRFDQEIAAIAPTLPDYAMFHALPGAGSTLAPRLLVAFGEQRDRFTGASECQKYFAVAPVTERSGNKTWVHWRWQGPTFLRQTLVEWAAQTISKSFWAGAYYRQQREKGSSHHAAVRALAFKWVRILYRCWQTRTPYDESKYLEALRHRGSPLLRQLGETT

SEQ ID NO: 279274 - protein, 375 aa, unidentified
MAPPARPEIVIGLDVGKSAHWACVVAREGELLASGPIPNRENAIDGLYAQYPGALVVVDQVRNIGALALSRARAAGMPSAYLPGLAAHEAARLFGGDAKTDERDAEVIARTALGVPDSLSGVPGRGEALEAARALSSQRDHVVACATRDKNRLRAVLLESCPALEAAVDLSDRRWLELLAGFGGAWGIARSGAEGPQAEAAGEAAAASTAPPPALVEAENRQVRFLAARISEALDEAGALEAETAALLEGDETYACLLTVPGIGPRTAAQLAVSVDIGRFPDHDHLASYCGIAPRVRSSGTSVRSVRASRRGDARLKSLLIFSCNSLVRSSGRYGEYYRACRARGMGHGRALKAVARKRLRAIYAVMRDRVPYRK

SEQ ID NO: 279275 - protein, 411 aa, unidentified
MKFIGLDWKDKGYTTRIINKEGADLSGSFEVEKNREGFSEFIYKVRKYCDGDSNILFGIERERDPIVEYLLTLGYKVYLVCPNMMKSLRKRYSSTGKYNDDFDSYIIADTVRTDRNRLTQIEPRDENIRKIEFLLRNREKAVNDKTRLTNRLTCYLKEYFPAFLDLFNDITCPTALSFLKAYPTYYNIKELSREEIRTFLKEHHYHKESGILRIYKAIKKGQVKIDATVIQERSRSAILLIKRIELLNEEIKEYENDLKETTETDKDAEIFRSLPGSGDTLSPGLMVIFGKKRSRYENAEEINSLSGIVPFTKQSGNWETHLFRFGCNHFYRNIITRLAYCSLTKSEWAKGYYNEKKAEGKSHYHALRCLARIWIKVAFALWKKREKYNEDKHMAAVQRHKIRNRLARKSA

SEQ ID NO: 279276 - protein, 353 aa, unidentified
MSGFILGVDLATARFELALADPHFQILQRKTLKRAQFGKFCRELPPSLIVMEACSSAHYWARNLQSWGHQVRLLPALYVHAYVRRSKTDAADAAALIEATRCSEIRPVPVKTVEQQHLLQLHRLREQYKRTRNARVNLLRSAFREFGVPLPTGLKHSIRALSDLVHLAPNEMPKELTDIYGRVLEDIEQLQKKLKAVDAALSHLTRTDPVVRGLVTICGVGPIIATAIRASVGEIERFPTGRHFACWLGLTAREYSTGEHRRLGRISRRGDGYLRALLVNGARSALLAANRFHASGDRPLDRLRTWALDIQHRRGMNLATIALANKLARIIWATWRYERSFDGNWQSSAPNSE

SEQ ID NO: 279277 - protein, 343 aa, unidentified
MYIGLDVHKKLSYYSMVDGKGSEMKRGRFPTTCEGLDEFASKLPEGAKVAIEASTSGIFAYEYLDEGGIEVHLAHPVYVKPFAKKHVKTDKVDARVLAQLLRMDYLPESYVPGKEIRDQRVMIRHHASLVRLRTSIKNRVHALLAIEGIQTSKFSDLFGKRGMEFLKGVKLRQVRREALDNYLEVLKALEERIEGMEAILKERAKITDEAKWLMSIPGIGYHNALLILSELGEIERFSNPRSMVSYSGLAPKVEQSGDYTRYGHINKHSNGFLRWAFIQSARAAVRSSKPNRFQRIYNKIKARRGEKVAIVATARHLAESVYWVLTRKEYYKENRAIRASSFS

SEQ ID NO: 279278 - protein, 389 aa, unidentified
MDASGRRLAKARLPEGVAGMTKLHAMIAEQFDEAAEEAEVVIGIETDRGLWVQALVAAGYTVLAVNPLQAARYRERLSVSGAKSDAADAHMLADMVRTDSHQLRPVAGDSAEAEAIKVVTRAHKTLIWERTRHAQRLRHALRDYFPAALQAFEDLAAADTLELLAKAPDPASAAKLTISQISAALKRARRRGVADKAAAIQAALRTAHLGQPAAVTAAYAATVGSAVAVLTVLGEQIKALQGQVEDHFGRHPAAEIVLSQPGLGPVLGARVLAEFGDAEGRYVSAKARKNYAGTSPITRASGKKKVVLARYVHNDRLVDALDSQAFTALQASPGARAYYDRLRARDVCHHAALRQVANRLVGILHGCLKTSTLYDEATAWSHHTKPLAA

SEQ ID NO: 279279 - protein, 309 aa, unidentified
MDAKYVGIDVSKDRLDVHVRPTGEAFAVARDGEGLADLITRLKPLAPRLVVVEATGGFEMTVSAAIAGAALPLVVINPAQVRHYAQALGRRAKTDAVDAEIIARFAEATRPEPRPLPDEATQALADLVTRRRQIIAMMVAERQRAGRLPKRLKRSCERVVRLLEKELAALDQDIDDTVRGSPAWREKEDLLASVPSVGDITARTLIAELPELGTLDRRKIGSLVGIVPFTRQSGRWQGKAFIGGGRPKVRAALFIATMSAVRHNPIIRAFRERLLAKGKPKMVVMVACMRKLLTILNAILRDQTPWQNA

SEQ ID NO: 279280 - protein, 348 aa, unidentified
MKEASTVYVGCDVGDRTSEVCILDHDGAVLERRNVRTTRRGLTGCLGRIGPATVAIEAGTHSRWIEETLMAAGHRVIVANPRQVQLIWKRGKKTDKADALLLARLARVDLSLLAPVHHRSRTSQVDLAAIRSRDILVRTRTRLFNHVRGTLKPFGVEPVRCSPAAFPDRVADEIPAELAPALEPILKVLRELNQQISAHDRQIDALATANPVAAQLATVDGVGALTALTFRLTVEDPAKFKKSRVVAAFLGLTPAKDQSGQSDPQRHISKAGDPLTRRLLVQCAHHLLGHTGADCDIRRWGLRLAERGGKDGRKRAIVAVARKLAVVMHRIWVTGQPYRPFREVSAAA

SEQ ID NO: 279281 - protein, 333 aa, unidentified
MNEHAVGIDVSKKKLDICVVSANKTKTKVLKNTPAGHGELERWLRQRDLPKTTPVVLEATGPYSERVATMLADAGWAVSVENPARITGFAQSELSRNKTDKADAKLIARFAQKAELQLWQPPSLAVRELRALVDRLQALIDMRQQELNRLEAIDQGSVTSVGDMVREHIDWLNSEIKNVQSEIDDHIDGNPELKHDAELMESIPGIGKRASAQFLAYIGDVRRFKSAKALAAFIGVTPRQKQSGTSLNGRSSLSRAGHTAARKALFMPGMVAKHHNPVIIAMAQRLEQRGLTPKAIVGASMRKLVHLIYGVLKSGQPFKAEIPMAGLEIQEGI

SEQ ID NO: 279282 - protein, 424 aa, unidentified
MAYRIAGIDVHKRMLAVVVADVEVEGEYEFERQLFGATPQQLRSLAEWLLEREVEEAVMESTAQYWKPVWAALEQYWKPPCRKKDGAGPMSGALHLAQARSNRGRRGRKRDFPDAERLVKRLVAQELNLSFVPDAEQRLWRTVTRRKYQLTRNRARLQNQLESLLEEAHIKLSSLVSDLLGVSARRMLQALADGETDPATLAAMANKQLRATSEQLCDALGACTELNLVYRRLLKMALEELRFIEQHIGQLDQEMATLLCQHQDAVQRLAEVPGLGVGSAQQIIAEVGATAASFPSEKHLSSWVGACPGDEESAGVSQSHRSPKGNRQMRRILNQCANAAVKVKGSIFQILYRRLVPRLGHNQTIGAIAHRICRLIWIILHRGLGYVEHGPAVQESSKRARTSRMIRQLRNLGYRVELLAQNPA

SEQ ID NO: 279283 - protein, 400 aa, unidentified
MRKPKQRQTKPRQSKQRKPNDLSRSLAALDLDRTLIAVIEMGASSWLVAGLVPGVERQPLKKLKTDEYALLALLERWRGEAVRSGYAITRIVVAYEAGRDGFWLARWLRAQGIEAHVIHAASVAVSREHRRAKTDRLDTEHLKRAFLGWLRGERDHCKMVAIPTVAEEDARRPGRERESLVGDATRIINRIKSALARLGIRTFNPTLKKAPVRLNDLRTPEGDPIPPNTLDEIKRDMERRHLICEQIRRIEQERVKRLEQAPDTGPHAMVHLLARVTGIGIETADTLVREVLTRNLRDRRAVARYGGLTGAPNQSGSFNREKGLARSGNPRVRRCMIGLAWRFVRLQKDSPLVKWFELRTANARGSRKTMIVALARKLLIALWGLVHEGVVPEGIVMRPA

SEQ ID NO: 279284 - protein, 292 aa, unidentified
MTKSNILFIGMDVHKESIEIAIADDGPQGEVRRYGRIGGSIDALKKTLRKLESTGKSLHFCYEAGPCGYELYRYLIDAGHVCIVVAPSLIPKKPGDKVKTDKRDAVQLVRLFRAGELTPVYVPNREDEAMRDLSRAREDAMIIQKSARQRLKSFLLRHNIRYQGRANWGEKHLRWLADEVRLPIPAQQVVFQEYVNTVTEAAYRMERLVAEIHHFVRTWRLYPVVQALMAMRGVRMIVAVTVIAELGDLTRFENPQQLMSYLGLTPCEYSSGEWQRGAVPSLKPATIMCDVF

SEQ ID NO: 279285 - protein, 418 aa, unidentified
MQHATKNALPAAGPGHRTAGLDWARDDHALAVVDASGQVVERFTVVHTAAGLRDLVRRLGKVGAREVAIERPDGPVVDALLGAGLTVVVISPNQLKNLRSRYGSAGNKDDRFDAFVLADTLRTDRARLRPLVPDSPATVALRAACRARKDLVGHRIALANQLRAHLQRAFPGAVGLFADIDSTINLRFLARFDCQERADWLSPKRIGAWLDSVGYCGRVAPATLHARLTAAPRGATGAEGAAQAHVTRAFLTALSTLVEQIKVLSEQIDEQLALHADAHIFTSLPRAGTVRAARLLAEVGDCRARFPTPESLACLAGVAPSTRQSGKHRAVGFRWAADKQLRDAVCDFAGDSVRANPWAADLYRRAIARGCDHPHAVRILARAWLFVIWHCWQNGTPYDPAQHRALQALLHPDHQKVA

SEQ ID NO: 279286 - protein, 351 aa, unidentified
MAKKIWAGLDVGVETTSVCIIDDQGEVLHEAVCPTVLKSVHAEIRPLRRRRFARVALEAGTGVNLARGLRTLGYSVDIYESRQLSKFLRVRCNKTDAGDASGIAEAGRVGASAVSKVYLKNLDCQALQSRLAIRRHLIRERVAAVNLLCRQLEVYGGRVQGSSRARRLRETVEAELKQLFGKESSPLVAELRLLLDRCEDMVFHQRALDDELERLALDNEVCRRFMAIPGIGPICALTFYAAVGEPGRFARSANIGAYFGLAPTIHQSGLTNRRGRISRMGSAAMRSLLVQASMTFMRLSSADSDLRAWASGIEARRGAARARVALARKLAIVMLSMWKTGETYRPRRATA

SEQ ID NO: 279287 - protein, 345 aa, unidentified
MTIQTIGIDLGKTVFYLVGMDCRGEIVVKKRLSRPQLVRYTSNIPACLIGMESCGGAHYLGSLLTAQGHRVRLMPGQFVRPFVKSNKNDYVDAEAIAEAVQRPTMRFVPIKTTDQLDLQAVHRVRDRLISRRTSVINQLRAFLLERGITFRQGRALLRRQMPALLAQTEEILSPCMQRLLLQLWQEWRELEAQIETTTEEIERIADQDVACQRLLDVPGVGPLVATALVAAVGNGSAFARGRDFAAWLGLVPRQSSTGGKPRLLGISKRANPYLRRLFVHGARSVICHANRDDHPLAPWITSLESRAHRNVLIVALANKLARAAWAVLATGVPYRAAPHPAAVTR

SEQ ID NO: 279288 - protein, 325 aa, unidentified
MRQPESAVKPKTQVALDVSSQMLDVHVWVDKKAFSIPNTDEGFEQLSDVLFAYDVTMILMESTGGYEDNAACYLQLQGYDVVVINPRHARRFAQSMGKLAKTDRIDAAVLAHMAFMIDSGPERDRYIKPVTDEQRKQLSRMSSRRRQIVDLITTEKQRLTHSDAYTRASINVIVSLLRTELKRIESDITRYVKKNFSELATRLLAIPGVGMQAVTVLIADLAELGYVNRRRISALLGVAPFNHDSGKFKGQRCIRDGRQSVRNVLYMGTISATRFNPVIKTFYDRLIGRGKPKKVALIACMHKLVNIINAMMRTGKLFDMTLHGV

SEQ ID NO: 279289 - protein, 362 aa, unidentified
MTAASIVAHSYPFVVGVDTHARNHVYAIIDSSNGALLDTQSFPVTMAGISRAISWVGRRTEGNADTLWVIEGVATYGAILAGTVAAHGFPLTEAPRMSKKQNRGVGKTDALDAHRMAMASLPLQVNKLRHPRLHEGIRQGLRILVTARSSMTKDRTRSVNSLNALVRSNVLGIDARRKLTGIQIAEVRRWREREEELSLRIARSEAVRLAKHILDLDQQLMANEQQLDELVKASEAAPLLHETGFKAITAAKCFVAWSHEGRVRDEAAFSCLAGVNPIPASSGNTTRHRLNRGGDRSLNSALHLAAVTRMTHDEETRAYVEKRRADGKTDREIRRCIKRYLVRRIFKIFSASAMVEEVSVSA

SEQ ID NO: 279290 - protein, 375 aa, unidentified
MKEETAGHPGVVGGVDTHKDLHMAAVVDEHDRVLGSQCFATTRHGYKQMLIWMRSFGELLRVGVECTGTYGAGLLRYLQHAEVTVLEVTTPDRSDRRKRGKDDTLDAENAAHAAHAAFAGVRTVTPRTRDGMIESLRVLKVCRKTAIAARRVALQLIHNTVVCAPDELRESLRTMTRMQLIRTLAAWRPDLSDYRNLTSAYRITLKSLGRRYLELHDEIADLDVMIAALVNELAPDLVSRNSIGYESAAQLLLTVGDNSERLQSEAGFAALCGVSPVPASSGKVTRHRLNRGGDRAANSALHIIAIGRLRTDPRTKAYVDRRVSEGHSKLEAIRCLKRYIAREVYYVIRKRNRQIGQVQVASKRPVPDNRQAFVI

SEQ ID NO: 279291 - protein, 427 aa, unidentified
MLKILNIGIDISLKEAVISLLTWEGKYLGESFKIPNNLPGAGELENRLSSVLSTGTFEHVRFGMEATQNYGFHLAEKLASSDKLSAWKPLVYMINAKYIKDFKGAFPEKDKTDLIDSKFIAEYLRFGKLPHPFEANNRYLPLQRLVRCRYHLVKNIERETKFFLANLFLKFPGWVQRRPIKTLGKSAMDVLHEFYSLDEIVQMPLEELALFVAKAGKNRSPNPEKIAEEIKKAAHESYRLRADLANSVQFILETIIVNIRALKSSLKEVNRAIEKEMRGFSNPLLSVRGIGPVYAAGLLACIGNTKRFSTHNQIAKLAGLVWKRNQSGKFEAEERRLIRQADRYLRYYLVEAANSLRVYNEEYSRYYQKKYWEVNKHQHKRALVLTARKLVRLVFALLSKNQLYEPARAFQCAQPSLTLSCKSKSRR

SEQ ID NO: 279292 - protein, 334 aa, unidentified
MEEAPSGSSNLAFSLGIDVGKTNLELALRSGEGTVARTTVPNDPEGRETLVDWLSEQGAGPEETCVCMEASGDFEKAVARRLYQEDYRVSVVNPRRIKGYASSQLKRTKTDSADAALIARFGQRENPRPWEPASAAESRLQELTRARQALQKEKTRAQNRLEEAEDEAVRRAHRGLLEEIERQIEDLEEEIEEHVEEDPKLKDRCSLLDTIPGIGLQTAAIVASELGSPERFESARQAAAYAGLVPRHRKSGTSVRGNPRMSKVGNGRLRRAMYFPAMTALRFNEAIKAFGDRLKERGKEKMVIIGAAMRKLLHICYGVLKSGRAFDASLHPGT

SEQ ID NO: 279293 - protein, 451 aa, unidentified
MSKRKGSKVASLPMVEPNAAGVDIGATQIFAAVPPDRDAEPIRCFDTFTADLERLADWLEQCQIRTVAMESTGVYWIPLFQILQERKIEACLVNARHLKNVPGRKTDVEDCQWIQHLHSVGLLRGSFRPDQEICAIRSLWRHRDNLIQLATVHLQHMQKALDQMNLQIHHVISDLAGTTGLAIVDAILAGERDLTKLAKLRDWRIRASEETIIKSLVGDYREEHLFTLRQSLETYRHYQRLIQEVDVQVKQMMRRLPAKIDTGEKPLPKEKNPRKTPWRNEPPQLREDLYRAFGVDLTQIPGINTLTAQMLLTEIGPDLSRFPTVAAFCSWLRLCPEPKISGGKVLSSRTRPTKNRAALALRMASQGLHRSQTFLGDYFRRMKARLGTPKAMTAAAHKLARVVYHMITTHQEYDTTVFQELEHRLQDRKRMKLRAHARELGFDLVAREAVP

SEQ ID NO: 279294 - protein, 443 aa, unidentified
MTRKNQKRFEVVHPDCAAVDVGGSEHLAAVDPAKCADPVQRFSAFTDDLHAMADWFSSMGVKVVAMEATGVYWIPLFEILDRRGFEVYLVNSRATRQITGRKSDVLDCQWILQLMTHGLLRGAFRPSDEVCSLRSLVRQRANKVRDQAKSLNRMQKALVQMNIQLAQVISNIAGVTGMSILRAIVEGERSPDVLARLRDKRVKADEATVARSLRGNWRAEHLHALSQELAAYDFLEKQIGECDQAIADALDRLPVLQSDVTTPTKTLRSTHRSNEQQLALHQALNKVMGVDLTAIPTIGIDTALVLASELGADLSRFPTSQHFCSWLGLAPPTRISGGKPLPGKSAKVINRSAQALKQAASIARNDKSFIGASHRARLTRMDTCCAIKATAHQLARLIYAMLTKGQPYVEKGIEEFEERSRDRQLRALERKARKLGLQLVKAA

SEQ ID NO: 279295 - protein, 431 aa, unidentified
MKNRTNQRLEEITAGTLIVGVDVAKTLQWARFVDYRGVEIGKAMSFSNNRKGFESIVTRIEEQCKNKFHRYPIETVLVGMEPTGHYWKALANYLINAGYRVVGVNPYHTKKAKELDDNSPTKNDKKDAITIARLVKDGRFFDPYLPKEEYGELRGLTNARVSVMRRMGAVKNIITAILDEYFPEIKTVFKNPLKGKASRQILRSCPFPVFILAKGEAGVLAEIKKAVKKTVGMKKVLELIGAAKGSVGVQNGLNAAKMRLGWLLEELELAEKQLAEIEEAMEATLHETGCAAQILSIKGIGVVTAASFLGEVGDPLRFQNPRQIARYAGYNLVEDSSGNSKSGTCISKRGRKQLRSVLYQMAFTMVGKNEEMKMLYEYLTTRKVNPLKKKQALVVVSKKIITVIYSLLKKRETYNPAFVLGAVRQGKLMAA

SEQ ID NO: 279296 - protein, 442 aa, unidentified
MAMRKREDSPEVFPNAAGIDIGGSSHWVALPKGAAEEPVREFGTMTDDLHQMADWLLACGVDTVALESTGVFWIPVHEVLEQRGLTVWLVDARQMKYVPGRKSDVMDCQWLQKLMSLGLLRAAFRPCDEVCVVRAVARQREVLLTEQASWVLRMQKALVQMNLQLTEVLTDVMGLTGQAIVRAIVAGEHDPKVLARHRHGRVKASAAEIERALTGNWRDEHLFVLQQALAMFDSLAQRVVECDAKIEALLRPLGVHEVKLSGPGKRCGKNTPQFDARTALARWAGVDLTRINGLSVTTVMTILSEIGPDLSRFASVKHFCSWLGLCPGTKISGGKVLSARTRRSANRVRQALKLAAMSLSRNDSAIGAFYRRLCARMDKPRANTAVAHKLARMVYFMLTRGEAFVDQGQQRYEEQQRQRSIEALRRRATALGFQITPSAQTL

SEQ ID NO: 279297 - protein, 350 aa, unidentified
MSAAYEGKQIVGMDLHRRRSVLVRLTETGEHLETVRISNDPEYLRAVMARAGEAPDVVLEACYGWYWAADTLAELGATVHLAHPLGVKMFSLRRVKNDQRDAADLADLLRMGRLPEAWIAPPACRELRGWVRHRAKLVGLRSHLKCQIHAVLAGAGVQVSMSDLFGVAGRDLLASTRLAPESRARVDSALRVITALDFEIELFGKLVAGRLRADPGYRAIQAIPGVGPVLAAVFVAEIGDIARFARPEQLASWAGLTPKHHESDTTVHRGPITKQGSRLVRWAAVEAVQRVPAHTRLGRLRDQVGQRRGRNIGIVAAARELTELVFYGLRDHRIRALPRSPSVPSTTPAA

SEQ ID NO: 279298 - protein, 400 aa, unidentified
MRVVFGIDVSKASSEVAILVNGEKVHNYTMSNDAIGFSRLLGDLRTVHKPEIIFEATGVYSRRLQTFLDDNGYAYTRLNPLEAKKQLDSLRVRKTDQIDAEKLAQSQFVLNRKPTYVQEEVYQNLRDLSRFYQNLTEDIVRAKNRLHKVLQVTFPELENILSTPTGEQYWNLVITFPCKDFVLDLSKNELSKSIRQSTSKRISDKRVAYLAEKLTALANQSYCAVKKTSPILEEVHYYAKELLRLSEQRQAVLDQMVELAQPLPEYDILLSIPGIAETTATSIIGELGDIRRFQSANQINAFIGIDLRHYESGNFLAKEHITKRGNPYARKILFKCIHNIASANHTNPCHIADFYKKRKRQSQTTSTKLHTIASIHRLIRTMYYLIMHNKFYDYASTQNR

SEQ ID NO: 279299 - protein, 448 aa, unidentified
MKTLPIINPNAAAIDVGSEQLHVSIAGDEPVVFGTFTKEVYRLRDYFKAQGVTTVAMEATGVYWLYAYTVLEAAGLELVVVNGRHVRNLPGRKTDMADCQWLATLHAHGLLRGGFVPPAAIRRLQDYQRLRADHIVGAASQVQKMQQAMERMNIKFHDVISDLVSVSGLKVIRAILAGQRDPEALLGLCDAQIQKKKRDRVVESLQGTWAAEHLFGLGQALAAWEFYQKLLAECDQQIEAVLIKLAGPPPPQDPIRAAAGGGKKLGKNTPQIDQLHQLLVRLCGGRDVTAIAGIGDNLLLQLLAETGPDLKAWRTEKHFTAWLGLAPASRQSGKRKGSVKRQRNRAGRMFCAGARSLVQSVDKALGGFYRRLAARKGGLVALKATARKLAELYYRVLVYGLDYAEQGLRVYQEKYAQSQQRLLAKLAEKQGFRLVSVHLDALQPKINT

SEQ ID NO: 279300 - protein, 420 aa, unidentified
MDVLIECCAGIDIGKNEVVACVRTPGPGGRGRRKQTRTFTTFTGALEEMAGWFAEEGVTDIVMEATGPYWKPVWYVLEEHTFELRLVNAHHVKILPGRKSDVLDAEWLAELLEHGLLRASFVPPPAIRELRDLTRYRKRLIQSHTAEQQRIQKTLEDAGIKLDSVASDVLGVSGRAMLNALVAGERDPQVLAEMARGTLRRKIPALRQALRGRFRDHHALLIGLCLEHTDHLQAAIARLDERIDALIAEHTSEAGVPFARARDRLTTITGVGKRAAECILAEIGTDMSRFPSAGHLASWAGLAPGTNITGGKRGSGKTTNGDKWLTDILTQCAWAAARTRDNYLATQFWRLARRIGKKKAAVAVGHSILVICWHLLTNDCDYDDLGGDYFTRRANPDRQRDRLISQLHALGYRVTLDPVA

SEQ ID NO: 279301 - protein, 351 aa, unidentified
MPSKNDVAVIRAIGVDTGKNTLHMVGLDDKGAIVLREKVSRNRIAARLVNVPPCLIGIEAGMATHYMSRELLALGHQVKQVPPAYTKPFRQGHKNDFRDAQAVAEAVQRPSTRCVPIKTDDQLDLQALHRVRSRLIGERTAVINQIRGFLLEHGIPVRQGPRFLRQQLPQILATRTDVLSPRMVRIIGDIVDDWGYFDERIERVTDEIEGLARADVSCGQLMTVPGIGPIIASAMVAAIGNGTAFAKGRDFAAWLGLVPKQKSTGDRTILGRITKRGNRYLRMLFVQGARAILLHPTSWAKHSFGPWLTAAARRLHRNVLVIALANKLARIALTVLVQGRSYETRVEPAAA

SEQ ID NO: 279302 - protein, 424 aa, unidentified
MNDTQNKKIAQVTDKTLVVGVDVGSDKNYARAILVRGFEVSKKPFEFANTRDGFERFVNWSYHLAAENQLTKIFVALEPTGHYWFNLADYLRGYDVKLVLVAPQHVKHSKEMDDNIQMKNDRKDPLVIAKLVTEGRYMFPYIPEDNYAALRAAFNRRCDLVEALIRITNRMVRWFDIYFPEYREVYGKADALTGLMVLMRAPLPSDILALGVDGICRIWREAKIRGIGINRAKKLVAAAERSIGRKGCAAVRQELWQLLEEHDLLSRQLNDMMQIITDLLGKIPGAERLLNVPGAGVITVAGFLSEVGDISRFTDPKQIQKLAGLAVVENSSGKRKGLPGISRRGRKRLRWVLFQLARTMVKSNKEMKAYHQYYTTRKENPLKKMQSLMAIAGKITRIFFGMLKNGTEYDPAVVMKDLNKAAAA

SEQ ID NO: 279303 - protein, 383 aa, unidentified
MRPMTTRSDSRAVPPATPTPVLHCSLELGERQWKLAFTIGLGQRPRHRAIPAGDLTRLDREVAAARHRFGLADTARVVSCYEAGRDGFWIHRALVARGIANVVVDASSIEVNRRARRAKSDRLDNEKLNEMLVRYHLGERRVWHVVPVPSEADEDQRHLERERQTLIQERTRLRNRVQGLLATHGVTVALRGDVGAALGAVRRWDGTPLPAGLRARAHREWERLVAVTQAIGALEGGRATVIAGATATAACTRRLQQLRAIGPTIAWTLASEVFGWRQFHNRRQVGSLLGLTPTPAQSGNERRELGIAKSGNPQLRALAVEMAWLWLRYQPQSALSQWYRARYARGGPRLRRIGIVALARKLVIALWRYVAFDQVPEGAVMRG

SEQ ID NO: 279304 - protein, 462 aa, unidentified
MNRKKEPGKPAKGSAQKKLNWKALEIVHPDAAGIDVGGSEHWVAISPDRDPEPVRRFGCFTTDLREMARWLIDKGVRSVAMQSTGVYWMPIFEVLEQHGLEVFLVNAQHTKNVPGRKSDVAECQWLLKLHAFGLLNNSFQPSDEIRVARTLWRHRGDLVAEAGSSVQRMQKVLTEMNVQLSNVLSDLSGVSGMKIIKAILEGERDPQVLAAMVMPGVKATPEDITKSLEGNWREELLFVLRQHLELYRFYQEKITDCDRQLRKHVESLGSKVDPQMQPLGPRPKGKKIARNAPEFDLRSELYRISGIDWAQINGIDVLTAQTVIAEVGADLSAFPSEKQFTSWLGLCPTNEQSGGKILNRRTRKVVNRATVAFRNAARTLLRSQSYLGAQYRRLRTRLGAPKAITAMARKLACLFYRLIKHGHQYLDRGTEYYEARYREQQIRSLTKRAQRLGLQLVIPKIA

SEQ ID NO: 279305 - protein, 351 aa, unidentified
MRNVTIGMDLGDKNHVITILDEAGVIVKSCSLENVRASIVKFFRKYKGSTVAIEAGTHSPWISRELKALGCNVLVGNPRKLRSIWNSDDKTDVHDSEMLARIARFDSGLLYPITHRNEQAQADLELLKARDMLVKTRTSLINHVRGAVKSFGERLPKCSAESFHKQCRDFLPEDLKTVLQKVVETIEHITDRIKEFGRRIEEISREVYPETELLKAIGGVGPLTALAYVLILEEPGRFGKGRQVGKFLGLTPRLDQSGETDKQLRITKAGNRFLRRLLVGAAQYILGPFGPDCNLRRFGLRLMERGGKNAKKRAVVAVARKLAVLMHHLWRNGEIYDPFYKSHKVVMKNAA

SEQ ID NO: 279306 - protein, 340 aa, unidentified
MQISTIGLDIAKNVFQVHGIDAAEKVVVRKQLRRGQVLKFFASLQPCLVGMEACATAHQWARELTKLGHEVRLMPAKDVKAYVKRNKNDAADAEAICEAVRRPTMRFVRAKSAEQQGRLMQHRTRDLLLRQQTQVINALRAHLAELGIVAAQGREGLKQLLTIIADERDERLPIDARASLIVLAAQLQALHTMIGSIERRIVVQHRANEASKRLECIHGIGVIGASAITATVTDPSAFRSGRDFAAWIGLVPRQDSTGGKQKLGPISKQGDRYLRRILVVGAVSVLRRAKLNPEKYPWLTQLLARRPFKVVAIALANKMARIAWALLANGSHYRPRLATT

SEQ ID NO: 279307 - protein, 355 aa, unidentified
MDSTKYVGMDVHKDTMSIAVMNSAGKVVMESVLETKAVTILQFIQGLRGNLLVTLEEGTWAAWLYDLLKPHVTKVTVCNPRKNALLKSGNKSDRIDAQKLAELLRNGSLSAVYHGENGLRMLKELARSYLTVSKDLTRVMNRLKALYHSWGIACAGTQVYAPRHRLEWLSKITEVGVRGRAEFTYQQLDGLQALRQAVRRNFLAESRKHKATKLLREIPGIGPIRAALLVALLQTPDRFRTKRQLWAYSGLAIETHGSGQYCYLEGQLRRVKKPVALRGLNRNHHHDVKWIFKSAAVKASSPSGPLHEFHEALLAKGMKPSLARLTLERKIAAITLTVWKKGVRFDAEHLKLQAA

SEQ ID NO: 279308 - protein, 319 aa, unidentified
MAQTDLVVVGIDVAKDKVDACIRSLSLRQTFPSTPQGHRKLVAWLRKLQVTKAVMEASGGYERAWAKVLREASIEVRIVDPKRVRSFAQSAGRLAKNDVIDAEMIAWFTETFSDAPAQKHDAAREELQSLVKARLSLLDFRMRLVSQGEHAAPGLVQKAHAHILKSLASEIAKLEAAICAKIKSMPDFAERAEIIESVPGFAVTSSANLVAGMPELGQVSNEIAAALIGVAPYDDDSGKRRGERHIKGGRRWVRNAIYMPCVGAATLNNPVLKAYYQRLLAKGKEPKVAIIACMRKLIVILNTMIARRQKWEPGRYALS

SEQ ID NO: 279309 - protein, 378 aa, unidentified
MTANLQEQAYESERILYMALELSNSKWRLALSDGVHRRQKTIAAGDLLALDEELAKTKAKWGLESARVVSCYEAGRDGFWLHRELERRGIANLVIDAGSIEVSRRARRAKTDRLDAEALLAKLLRYWQGERRVWQVVRVPPLEWEDRRELERERGRLLKERTAHRNRLTSALVRHGLRVAIDGRFRSRLEQLCLSDGSPLPAHVKAALERELERLELVEAQLKALSAEFKAALQDDEALKPAQRLLALGGLGPIGAWTLVLELFGWRAIANRRELSSLCGLVPSPYNSGSMMREQGISKAGNRRVRALLIQLAWLWLRYQPESKHSRWFQERFGGGSRRQRRIGIVALARRLVIDLWRFVETGVVPEGARLKEAVSTN

SEQ ID NO: 279310 - protein, 344 aa, unidentified
MSKVITIGLDIAKNVFHAHGADERGATVFSRKLTRGKLLEFFAGQPACTVALEACGGAHHWARQLQALGHDVRLIPPAYVKPFVKRNKNDAVDAEAICEAAQRPGMRFVAVKSEEQQAAGLVFRTRDLVVRQRTQLINAIRGHLAEYGWVAPRGTASMTMLADLLEDGDMAGSLPKAARPMFKLMIDLLAELDEQIAVLDREIARRAKDDEAARRLMTIPGIGPIAATAIIALAPPIETFRKGRDFAAWLGLAPRQHSTGGKQRLGSITKMGERTIRRLLIIGASSVVLQASRRGAQSGSWLERMLARKPRMLVSVALANKMARMVWALLTRKEDYRAPAAVSA

SEQ ID NO: 279311 - protein, 355 aa, unidentified
MNQEKYIGMDVHQATISVAVMDSSGKLIMECILETKAATILEFIAGLRGTLAVTFEEGTSAAWLHDLLKPHVARVVVCDPRKNALLKDGSKSDRIDARKLAELLRGNQLHPVYHGEHGVRTLKELGRSYLTLTQDVSRVMTRIKALYRGWAIPCSGVTVYAPRYRAEWLAKIPHPGVRLRAERLYQQLDLLQPVRQEARRDLLSESRKHPAVKLLRQIPAIGPIRAALLVALLQTPHRFRTKRQLWAYSGFAVQTHDSGEYRYVRGKLQRNRERITVRGLNHNHNHDLKNLFKGAALSASTRPGPLCDFYVALVEKGMRPTMARLTLARKMAAITLTIWKKGVEFDAKQLNRQAA

SEQ ID NO: 279312 - protein, 422 aa, unidentified
MREQEAVVYSVYVGIDWANSKHDACVQQADPDTRKFEVITHSPEAIDAWVKSLHLRYGGTIAVALELSKGPIVSALQKYDFIDIFPINPSTLAKYREAFQPSKAKDDPTDAELAVDILLRHPEHFKLLKPQSAEMRALATMVEQRRRLVGERVRITNRLRSALKQYYPQVLEWFDHIDTPLFCEFVKRWPTLAQVKQARATTLRRFFHKHHMYREGVLENRLQAIKSARPLTLDTAIIVPYRMQVLVLIEQLELMFKAIGQFDDEIERLASEHPDYSLFKSLPGAGPSLAPRLLVAFGEQRDRFNSAAELQKYSGVAPVTERSGQKHWVHWRLQCPRFMRQTFVEWAGQTINKSYWAGEYYQQQREKGSTYQAAVRALAFKWIRILYRCWQTGVAYDESRYLKALERRGSPLLKRQTMLKSA

SEQ ID NO: 279313 - protein, 422 aa, unidentified
MSYCPVAGIDVSKKFSDMCILSPDNKIFAQEKIYHDETSINRANALLQKAERLFFSKPVIVMESTSHYHLILFQFFSEHGYDVIVVNPLQSNSMKDFSIRKRKTDRVDAFKLAMMYRTKTLRPSQIPQTATRALRQLCRHRAELLNDVSSYKNRLTALLDQTFPGYDKVFSDVGGVTSCAVLVRFPTPTILLVEEESELVEVIAAASKSGYSFAKKKAGLLISAAQKAQTLGIHSCADETLIVCTIQMLRTLSESVLQIETAIDNLLAQIKGMRNNVSLLQSIPGIGSHSAALLLGEIGDISLFKKPKQLAAYWVLDPTERQSGSFRGTKNKLSKRGFPYARAALHMGVVNSICKRGKDSAANPVLLSYYEKKCKNKPAKVAQAASMHKLVFIVFAVLRDQKPFELKTPEQHAVEQGFVKAA

SEQ ID NO: 279314 - protein, 414 aa, unidentified
MIVTEEPTAKRVCAGVDWAKDDHAVCVVGPEGEALQRFMIKHDRAGLKDMVRRLLPAGVDEVGLERPDGPIVDALLQAGLTVLVIPPGQVKNLRSRYGSAGNKDDRFDAYVLADVVRTDRRRLRPLELDTAATTALRTTVRARRDMVIHRVATANQLRAHLQIVFPAAAGLFEAIDSDVSLRFLERFNTQGQADWLSVKRLGSWLTSIGYTGGTDPAVIYARITAAPRGTTGPEADILAVSTRSYIAVLRTLNTQIRTLATSIAEQLDVHPDAKIFTSLPRSGSVRAARLLAEIGDARGRFPTASSRACLAGVAPSTRQSGKVKAVTFRWGANKELRDALCDFAGDSRRANPWAADLYDRARARKCDHPHAVRILARAWANIIWRCWQDNTAYDPAEHGGLQRILNQDQQPAAA

SEQ ID NO: 279315 - protein, 399 aa, unidentified
MDRNRTVAGLDVHKDSIYLCIMGHDGAIIFEKTYGVLTPDLRQMCQDMVERGVTEAAMESTAVYWVPVWNELCESMELKLVNPYFIKQLPGRKSDVKDAQWIAECLLKNLIRGSFVPEPIVQDMRKLNRRIFDLQEDITYYTNKLDAALHRCGFRLSNYVCKITGKSYRKAVASIAEGKTDPGTILKCIHGRVINKHGRETLLAAVTASFSQTDITVIRQYWELIAVYLRQSEECQSQLTALCESNFPTEYKRLQTIPGVKERAATAIIAETGVDMKMFATAAALVGWCGLKPRNDVSNGRYKSRKITHGNKYLRHILIEISWTASRTRNCFFSNFSYIQVTQKRKSKMKIQVAIARKILVAVWHMLSKEEDFIDIYLKRLEEQRLMEEKLKSLESKMA

SEQ ID NO: 279316 - protein, 334 aa, unidentified
MDTHADVHVAAALDSIGGLLGVQEFPATPGGYAGLLEWLGGFGAVCLVGIEGTGSYGAGLARHIAGAGVRVVEVDRSDRQDRRRRGKSDPLDAISAARAAQSGRARGAPRGRDGTVEAIRVLMVAKRTARSERTQTINQARSLVLTGPDDLRVRFAHHATAFLVAELAGLRPRPGATVGYATRIALRELGRRATFLDGQLGRLDELIVPLVTAHAPGLLALYGVGPDTAALLLIAAGDHPARLRSEAAWAHLCATAPIPASSGKTVRHRLNPGGDRQANHALWRIVITRMSSHPPTRAYVDRRSKEGLSKTEIIRCLKRYVAREVYPHLRPPAS

SEQ ID NO: 279317 - protein, 386 aa, unidentified
MQKLNDLSRSLTPLKPDGTLIAVIEMSLSSWLVAGIVPGIERQPLKKLEVDESTLLKLLIRWREEAKKSGHSIERIAVAFEAGRDGFWLARWLRARDIEAHIIHASSVAVSREHRRAKTDRLDTELLKRAFLGWLRGERDHCKMVAIPTIKDEDAKRPNRERESLVGEQSRIVNRMKAALVRLGIRGFNPKLKKAVERLDGLRTPEGEPIPPNTLAELRRDMARRRLVSDQIRQIEDTRLERLEQAPSDGPHAMVRLLARVIGVGIETADMLVQEVLSRNTRDRRAIARYAGLTGSPDESGRKRREKGLARSGNARVRRGMIQLAWRFLMFQKDSTLAQWFRARTENARSTRKTMIVALARKLLIGLWRLVREGVVPDGVVLRPVS

SEQ ID NO: 279318 - protein, 391 aa, unidentified
MERPMPQPNDLSRSLVTLEQDSTLIAVIEMGQSSWLVAGIVPGIERQPLKKLAADQDGLLQLLHRWRKEAAQAGHPIKRIAVAYEAGRDGFWLARWLRAREIEAYVIHPSSVPVSREHRRAKTDRLDTELLKRAFLGWLRGEPKHCSMAAIPTVEDEDARRPSRERESLVGECTRIVNRVKANLARLGIRGFRPRLAHAPKRLETLRTPEGTAVPANTLAELQRDMVHLRFVKQQIKEIETARAKRLEQASGGGRDAMVRLLARVVGIGIETADMLVQEVFSRKLRDRKAVARYAGLTGAPDESGQKRRERGLAKAGNARVRHAMIELAWGHLLHQKDSALAEWYQRRTVDARGGTRKTMIVALARKLLIALWRLVTTGEAPAGLLLRPAA

SEQ ID NO: 279319 - protein, 456 aa, unidentified
MAGSKQKRRKSAGQLSTVYPLAAGIDVGATAHVVAVPPDRDARPVRTFRTFSGDLHRLAQWLKEVGITTIAMESTGVYWVPVFEILEVHGFVVLLVNARDVKNVPGRKTDVNDAQWLQQLHQHGLLRGSFRPRDGVVRLRAYLRHRERLVEYAAAHIQHMQKALMQMNVQLQHVVTDITGVTGMRIIRAIVSGTHAPEKLAEYRDVRCAASPRTIAAALTGNYRLEHIFALRQAVELYDFHQAKIAECDVEIEAVLRRLNQEREIPEKPLPEVRHAKGRNEPRFDVRPALYILLGADLTQIHGFGPYTVLRLVAECGDDMSKWPSTKHFASWLSLAPGNKISGGRLLSSKTRRSSNRAAALLRIAAVNIGRTQTALGAFYRRLAARTGKAKAVTATARKLAILFYKALRFGLTYQDPGTSYYEQRYRQRVLHNLQRRAQSLGLTLVAKTVTTEAVS

SEQ ID NO: 279320 - protein, 346 aa, unidentified
MKYFAGLDVSLEETAICVVDEAGAMVREARVPSEPEALVAFFQGSGLVLERIGLEACSLSAWLHESLVAAGLPAVCIETRRAKAAMGAMPNKTDRNDARGLAQIIRTGWYRAVHVKSPACRSWRALLTARRLLLNKMRDLENGLRAVLREAGLKLGTPTRKEFAARVRELTAADPVLSVLAEPLLTIIAAMTRELAQLTKRVLEIVRDEPVCRRLMGVPGVGPLTALTFRATIDQPERFRHSRDVGAHLGLTPKRYQSGETDVQGAISRCGDELARTALYEAAHSLLVRSRRWSALRAWGMQVAKRRGMARARIAVARKLATILHRMWADGTEFRWGKEGTMPAAA

SEQ ID NO: 279321 - protein, 320 aa, unidentified
METSPVVGIDVALARLDVVVEGQVQTFPFPNDLGGRRRLVRQLQPLQPCLVVLEASGGYEQPVMDALWAAQLPLARVNPRMVRKFAEASGQRAKPDGAPFGPDAQLLVRFGRVMEVTAQAPPSPARQELAQLQAHRTDLVQLRVAAMNRRKQTPHPDLQASLERVIAGMRVEERAVEAAMATLIAADPALCQQAQLLGSVPGIGAGTVRLLLGALPELGDASGKELAALVGVAPFNHDSGRKRGQRAIGGGRAAVRTGLYMAVRSAKRHNPVLRAFYERLVADGKPVRVAEVACMRKLLGILHAMLRDGTCWQPLEPAMR

SEQ ID NO: 279322 - protein, 328 aa, unidentified
MMNIIIGIDVSKAKIDCAWLRDLETGKVKTKVLKNNAAGFQSLINWAEVNTQHPLSSIRFVMEATGIYHEALAYALHATGAEVCVVNPAYIHNYAKSLGTRSKTDKKDSVTIARFGATHGLEVWQPEADEIRHLKALIARHEAIEKDLQRENNRLEKAEITQVSIEVISSINTVIKELTKEKDRIRKLIDEHIDQHPTLKQDAILLKSIPGVGPVIAQRMIALIHSRKFISAKQCSAFIGLNPVMRESGTSVRGRAHLSKMGDAKIRAKLYMAAVVAIQHNPDIKQQYERLLQNGKSKMAALGAAMRKLVQICFGVLKHQTPYQPQVI

SEQ ID NO: 279323 - protein, 392 aa, unidentified
MLFVGIDVAKSKHDCCIIDSDGVIITDSLRISNTKEGFDILYTTILSAIDSNDFSKVKIGLESTGHYSTNITNYLYSKGFSITVLNPLVTNAFRKAGTLRKTKTDKCDAKVIATMLFSDESKSYSPSSYQIQELKSLTRHRYRMVGYRSKLKLSVTRLIDIIFPELPDFVWSIHQASCYQLLLELPSPEAVSTCHLTHLTSVISKASRGKYDREKAIQLRELAAKSIGTSNRSLTFELQQTIRLIQSVQSEIDTLDKQIKLVADELNTPLVTIPGIAYTIAAIILAEIGDINNFSSPAKLLAFAGMEPSTYQSGKYNASKTPMVKRGSTYLRWAIMQAARLVSMRDAAFATYMAKKRSEGKHFSVAQSHVGKKLIRVIYSLLKNNTTYVSQM

SEQ ID NO: 279324 - protein, 399 aa, unidentified
MFVGIDWASESHDICVVDPAGKICGRATIAHSQEGFDELTKHLGRWAEQGEILVGIERPEGRLVDRILEAGHPIVLIPTFAMKDLRRRYGVGGAKSDPGDAYVIADVTRTDGHRLRRLEPLSEQTRALRSVVRARGDLVDQRVALGNQLRACLQAYWPGAAVIFADVCSEIALAFVERYPTPDAAARLGEVRLASFLKKAGYSGRRSAIELLERLRSAPEGIGGVEAEARADSVRAMLRVMRSLNRSIKDLDRAVVAHLGEHPDAEVFTSLPRSGRINAAQMLAEWGDCREAYPCPDAVSMLGGLCPVTHASGKHRDVAFRWACNKRLREAVTTFADNSRHASPWAADIYRRAIARGCDHPHAVRILARAWVRVIWRCWQDRRPYDPALHGAAVLLEAA

SEQ ID NO: 279325 - protein, 342 aa, unidentified
MSTIKTIGVDLAKNVFSIHGVDAYGKCVLRKTVKRNKILDTFAKLPPCLIGMEACSGAHHWARELLKLGHNPKIMASKFVIPYRQNEKNDANDAEAICEAVSRPKTRFVSIKSEEQQAVLCLHRIRQGLIKTRTATINQLRGLLSEFGIVMPQGRYSAQNTIGSVLEDAENGLPILARELLQDLSNKIQNLNLEVLHYDRRVSALVREMASAKALMDIPGVGEHSASAIVATVNDAKQFGSSRQFSAWIGLVPRQYSTGGHVHLGRISKRGEKHIRTLLIHGARAVIARCKEKTDRNSIWLNQLVERRGYKRAAVALAAKNARIIWALLTTGKEYKINYVNG

SEQ ID NO: 279326 - protein, 326 aa, unidentified
MEFSTNPNKNESMTANKKEIKFDQIIERGCGIDVHKSVIVATIKGTGIQEETNIYDAFTESIEKMRDWLLQNKITHIAMESTGVYWKPIYNILEGYFEILLVNARHIKNVPGRKTDKKDSKWIAKLLLSGLLQGSFIPPKDIRELRDLTRYKRKIIQQIASEKNRIQKILEDANIKLSSVVSDMSGATAVKIIDAMIEGEENIDNLVNMRHGKMLVSEKDLAAALKGKLTEHHKFMLQTIKSSIKEKEELIQKLDNRIEMHLKENELELDAELLTTIPGVGKDGAAYILAEIGANMEQFPSEQHLASWAGMSPGNNESAGKKKAAG

SEQ ID NO: 279327 - protein, 313 aa, unidentified
MKKTICGVDVSKAKLDVCIEPGHRFASFNNDTAGIAELAAFCREHAVTLVVMEASGGYERRAFVELWEKGISCALTNPRNVRRYAEAMGILEKTDRIDASVIASFAHAKNLAPTPLPSQAQQRLKALVTRLRQVTDDLTVQKQRRASMFDSTEMRSSIDEVIALLKRQSRSLEGEIASMIDDDPLWAKLAETWREVKGVAGRTVARLHAELPEIGLLSNKAIAKLAGLAPIANDSGKRKGKRSTRGGRAGVRSILFLVAAIAARYDHSLGEFRDRLLKAGKEKMVIRIALARKLLVRLNAKAREARAEYANAT

SEQ ID NO: 279328 - protein, 348 aa, unidentified
MNTIHYIGLDVHKKTISFCVKTAAGEIVEEGSLPAQRASLRQWAAARPQPWRGAMEATLFSGWIYDTLKPYGEQLEMAHPAKMKAISAGKKKSDRLDARTIADLVRCHLLPACYVAPPRIRELRRLLRYRSLVVSEAVRMKNKMAGLLMETGALYVKEKLHRKKYFASLLEELEEVPESVIDLLRLSRGALEMFESTQKRLVRELLADPELAERVERLMTIPAVGEITALTWALEVGDPQRFHSSSDAMSYCGLTAALKSSAGKQQRGPLSKQRNRWLQTTLVEAAKLAPRWNPQLAALQARELERGHRNRATLAVARKLVAYLLAVDKSGRPFQVRAPAEVPTQKAA

SEQ ID NO: 279329 - protein, 397 aa, unidentified
MKTKQQPSAQERNPAQKVQNTADFSGRDLYVGIDVHKQRWQVAVYHQGLVLSNISIESSSDLLVAHLRKLYPNASFHCAYETSPWGFTLCRNLWAAGMHCMVVNAADIPGTDKERRAKTDRVDARKLAMHLAAGLLQPIHVPSERLQKQRSLIRLRKKIWADLTRAKNRLKSELKFQGIDIPKQFDNPHWSHNFLQWIEQKANEDDDLKDTLLMMLEEVKLLRALLLKTEQKVRDLMRTDQFKHKSTLLRSIHGVGPLIAMLFLTEVGDVRRFRTFDQLNRFVGFCPDCHSSGEKNKDTGITSRRHNLLRSMLIEAAWQLIRRDPAMLEHYNNLKKRMKGQQAIIRIARKLLRRIRAVMLTEEMYTCNTVQKQAVISAIKRPILRNPVATAGGHRMQ

SEQ ID NO: 279330 - protein, 315 aa, unidentified
MELATDELFTLLDDGKTLKKKLKRHELLAFFANYPASIIGIEACGSSHHWARELTKLGHEVILLNARFVKNYVVGNKTDFNDAEAIHEAVLRPNKRVVAIKTVAQQDIQLVHNIRKDLVDQRTALVNQTRGLLSERGIVINQGIEQLREQLPLIIEDAENSLTDLSRELFAEQYEKIKTLDAEIKAQDQRINRLCNANDLSKRFLDVPGVGPLTATIVAADIGDGGKGYKSSRDYAASLGVVPKQHSSADKQHYLGISKRGNRYIRTLLIHGARAVLKNCGKKTDKLSLWLQALVARRGFNKVAVALANKNANKP

SEQ ID NO: 279331 - protein, 412 aa, unidentified
MQVVHARCAGLDVHKKSVYACVICCEADGKKRQEVRSFGAMTADLLKLSDWLREHEVTHVAMEATGVYWRPVWAVLEDQFELMLVNPYHIKVIPGRKTDAKDCEWIADLLQHGLVRGSFVPPTEIQDLRDLTRYRAELTQAQNRVANRIQKLLEQANIKLSSVASDALGVSGRQMIEAIIAGEEDPNHLAELARKQLRRKIPQLQLALAGRVRDHHRFLLQEFLDEWKALGERIARIEQEIDRRIAPFEDAVTLWQSIPGLDRVTVCNLIAEIGVNMDQFPSAQHLASWAGLCPGNNESAGKRMSGTTRDGNKWLRRTLCQFAWAVTRKKDCYLSAQFRRLAARRGVKRAVMAVAHTMLIIAYTMLKTGRSYHELGGNYLEQINKVQLQRYFVRRLQRLGLKVAVEPVIQTA

SEQ ID NO: 279332 - protein, 312 aa, unidentified
MDAIVVGIDVAKDRLDICVRPSGESFVVARNSAGIEDLAERLKKLAPRVVAIEATGGFETVVAAGLAAAGVPIIVVNPAQVRAFAQALGKRAKTDPIDAAVIAHFVEATKAEPRPLADETTRLLADLVARRRQIVEMMAAEGQRDSRLTNKRLKKSIARLRKALEKELAEIDSELDDHVRGSPVWAEKEDLLASVPGVGPVVARTLIAELPELGSLDRRKIAALVGLAPWTRQSGQWRGRSFIGGGRKSVRKVLFMAAMVAARHNPTLKTFRDTLVAIGKPKLVALIAVARKLLIILNAIVRDKRPWQPKSA

SEQ ID NO: 279333 - protein, 387 aa, unidentified
MAEDGMVLGKRRVADSVAGIGELHDLVGQYAEVEESVIVGIEIDRGLIVTSLLGAGYEVFAINPMASSRYRDRHAVSGAKSDTGDAKVLADLVRTDRHNHRPVSGDSELAEGIKLLARAHQSAIWGRQRQLNTLRSALREYYQGALTAFGTDLSHGDAIEVLQIAPTPELGRGLSRSKIASALRRGGRTRNIERRTEEIQSALRADYLEAPSTVASAYGIVTRSTLGLIASFTREIAQLEEALSEHFETHPDAKIVRSLPGLGTILGARVLGEFGDDRTRFSNAKSRKNYAGTSPVTKASGRSHVVLARFARNRRLGDALDRWAFCSLTTSPGARNYYDELRARGKTHRQALRQLANRWVGILHGCLEDGALYDEPTAWRHREHTAA

SEQ ID NO: 279334 - protein, 355 aa, unidentified
MSQEKYIGMDVHQATISVAVMDGDGKLIMECLLETKAATILEFIQGLRGTLFLTFEEGTSAAWLHDLLKPHVSRLVVCDPRKAALLKQGNKSDRIDARKLAELLRTNQLTPVYHGEHGIRTLKELGRSYLTVTKDLTRTMSRIKSLYRSWAIPCPGTTVYAPHHRLEWLVKIVQPGVRVRAEHLYEQLDTLQPIRQQARRELLLESHKHPAVKLLRQIPSIGPIRAALLVALLQTPHRFRTKRQLWAYSGFAVETHDSGEYRYVRGKVQRNRERITVRGLNDNHNRDLKNLFKGAAISASTRPGPLHDFYVARIAKGMRPTMARLTLARKIAAITLTMWKKGVSFDPQQLSRQAV

SEQ ID NO: 279335 - protein, 363 aa, unidentified
MYSINNTELSSLEETRCQFNGGKCAIKMGIDVHQDFYVVVEQLCGTNAKPPQRFHKLAFLHWAAKLKSQAREVHAVYEACGFGFSLQRQLSALGIVCRVVCPQKLDERNKRVKTDGLDAKALCLKLDRFVQGNRDALAVVRVPGEEEERARALHRQREQLVQVRKQLEAQGRSLLVNHGCAPVQQWWKKRAFAQLDVPHWIKELLANSQPILLALQEKIDQLTLHLQNAAIAEPPRGLGKMTSVIIDREIGDWCRFNNRRQIASYTGLCPGEYSSGQSRLQGCVTKHGNPRLRAALVELAWRMVRFQPNYRAVCKWKARLAKGALSTGAARKKAIVALARQLAVDLWRVRTGRLTHEQLGLEI

SEQ ID NO: 279336 - protein, 427 aa, unidentified
MLSETERLKAFRQMRSSIRNSEQYLIVGIDIAKEKHHAFFGTAAGKTMCKQLIFSNDISGFELLVARAEQLRLQHQLTQVVFGMEPTANYHKPLAEYLIQRDAMVAQVSGTAVTRNRELLDNRWDKHDRKDAANVADLVGAGKCQFYDNPSQAIYDLRELLSLRRRYRKLESGLRTRIRNNLLALYFPELDRRFSTHQQDCLTIISTCFSPAVIAAMPFEEFCQHIVRRVKGKRQEAFLVDIWNTAHSSIGRPVDESVQYMAERMVVQLYQIRSDIADLDRQIFKIASSLPEYQYVISIPGFGPFITAKFLAAINDPKRFSNEAQVIKLAGFDLCASRSGKPAGKAVPMISKKGNAELRFALVQAAIVATTRNTLFIRYLNQKLQGREQEKGILKKMRTKVASKLLVIAWTLMKQHEYFNGEHLKLT

SEQ ID NO: 279337 - protein, 334 aa, unidentified
MQNVALIGIDLGKHSFHIHCQDKSGNALLRKKFTRTKLMQFLATCPSSVVVMEACAGAHFMARRISDIGHEAKLISPQFVRPFVKSNKNDFIDAEAICEAASRPSMRFVQPRTETQQAMRALHRVRESLIRDKVKTTNQIHGFLLEFGISLPTGDAAIKRLSLVLAEHEVPEYLSRLLMKLHAHYLYLIEQITELESELNQSIKADATAQRIMTIPGVGPMTASLLSSQLGDGKQFSCSRDFAASTGLVPRQYSTSGKSTLLGISKRGNKNLRRLLVQCARSFMMRLEHQQGRLAEWVRKQLDNKHSNIVACALANKLARIAWAITALQKEYQA

SEQ ID NO: 279338 - protein, 356 aa, unidentified
MINATPSDVIIGVDTHKEVHAAVAISGSGAHLATTTVPATSKGYGALEAWAKSMGPVHSFGIEGTGSYGAGLSRFLRERGHAVFEVNRPNRQLRYQRGKSDAVDAESAARAVLAGQAAGRPKSGTGTVEMIRHLKIARDTAVKARTQAMQTLKVIIVGSPDVLREQLDQVSGKMTLVRRLAALRPGPLTSTLASAKASLRAIARRWLMLDTEIKQHDAHLDALTAARAPDLLEAHGMATGTAAEMLLLVGDNPERISSEAAFAKLCGACPIPASSGKTNRHRLNRGGNRQANAALYRVVIVRMRGHQPTLDYVRRRTAEGKSKSDIIRCLKRYVAREIFGYLCTKADLTNATANSP

SEQ ID NO: 279339 - protein, 340 aa, unidentified
MSEITTIGLDLAKHVFQVHGIDAQGTTVLRKRLRRGQVLAFFSRIPRCVVGLEACATAHYWARELGALGHEVRLMPAQYVKAYIKRNKHDAADAEAICEAVGRPTMRFVPVKTAEQQATALLHRGREQLVRQRTMLVNALRAHLAEFGIVAAQGLRNVGELIAIVRDDGDTRLPDVARQVLQVLANQIEQIETTVAALERQLLAWHKTNPVSQRLASIPGIGPIIATAIATTVADPKVFRSGREFAAWLGLVPRQNSTGGKIRLGGITKRGNRYLRRLLINGASANLLRSKATKADPWVIGLRRRRPPLVVAVALANKTARIAWAVMLREKEYQPRAVAA

SEQ ID NO: 279340 - protein, 350 aa, unidentified
MEITTVGLDLAKRVFQVHAIGGSGEVVVRKTLRRAQMIPYFAGLERCLVGIEACGTSHYWAREIGKLGHEVRLMPPAYVKPYVKRGKTDASDAEAICEAVRRPTMCYVAIKSPEQQAALGMHRTRDLFVKQRTQLVNMIRSLLAEFGIEIRQGIRQALMVAKRAAADDMPDIPPLAAKVIAGLAGQVLDLQARLREIEREMLVWHRSNDVARRLATIPGVGVVCATALAASVADPHQFRSGRQFAAWLGLTPLQHSSGGKERLGRISKMGDKYLRRLLIVGMTSLVRRAKYKPTTVDPRLADLLLRKPVRVVTLALANKTARVVWAIMTRGGTYRTPQPAGASVSQAAVA

SEQ ID NO: 279341 - protein, 346 aa, unidentified
MEHYVGLDVSLKLTAICIVDRTGKIEREGVVPSDPEAIAVFVKSHAPHVVRIGLETGATSTWLWTELRELGLPVICIDARHAKAALKMQINKSDRNDAVGIARIMQCGWYKEVRVKDLDSHAVKALLVSRALLVKIKRDLENQIRGLLKNLGLVIGRAKMNVFAVRTAELIDNRPALAAAVVPLVKAREAIERQIADLDRKVLLLARKNAQVRQFMTAPGIGPVTALCFLATIDDPTRFKRSRSVGAYLGLTTRRFASGEIDWTGRISKCGDKMLRSYLYEAANVLLTRVAKWSALKAWGVRVAKRCGLRKAKVAVARKLAVILHRMWIDGTEFKWSSKEASNQPA

SEQ ID NO: 279342 - protein, 348 aa, unidentified
MIIIGVDFHPEFQQIASMDTATGEFQEKRLAHPAEAEKFYRSLVGQKVRMGMEASGHARWFERLVAELQFELRIGDAAEIRSKRVRKQKTDRQDAQLILRLLLEDRFPQIWVPSWENRDLRQLLWHRHRMVQARTRIMNQLQAVALNEGLRCKKKLWRERGRQQLESFRLAPWATRRRRDLLELVDRLTPTIAELSHAIEQEVEKCPAAQRLRTHPGVGSLTALAFVLIIGEVNRFRCGKQVASYLGLVPLEESSGNRRRLGHITKQGSSMMRFLLVEAAQVTVRSLPEWRSKYLHLVLRRGRKIAKVAMARRLAVHLFWMMRKEWNYQQLKKLGSHAGEPVNRHGVQ

SEQ ID NO: 279343 - protein, 335 aa, unidentified
MQIYGIDLAKEKFDVSFLRQSAKSAVAAPVHKVVSNTESSIRTFLKSVPAGSILVAEHTGVYGERLLKMCTDMNVKIAYVGGHVIHTYKAGPDRGKTDELDCSLLREFGERFTDKLRLATFPTEAIYELQQLSRQRTMLVEERKRVATADKAEECRPYRSETVRRSMRNLMDMLDEEIRDIEKAMLDIIGKDEGLSNSYDIITSVNGVGLVTAVELIVKTKNFTTIKTAKQYAAYAGTAPYEKSSGKMNRGAHISKWGNRRSKTLLYICAESARRCNKEIKLYYERRTIVDKKAHHYVLNAIANKLLKLVFTLIAKNEKYDPCYIQHDPRTFNKK

SEQ ID NO: 279344 - protein, 390 aa, unidentified
MEARTVNNLLPAAPHHDAVGCLVAIELSKKSWIVAVNTPLADKISRHTLKPGDGKELLDLCERIRTRVARETKRRVEIVSCYEAGYDGFWLHRLLEAHGIRNYVIDPASLQVDRRARRAKTDHVDVERLLRSLMAYLRGEPKVWSVVCVPSVAEEDDRRLNRERGRLINERIQHVNRIKGLLAIHGIYDYQPLRRDRMLRLERLRTAADGQTLPPRLKAEILRELQRLELILGMIKTIEAERDAIASPKTEVEHTNAKKIQDLAKIKSIGPEFATTLIGEVLYRSFDNRKQLASYVGLTPAHFQSGAMCRDQGISKAGNGKARTVMIELAWLWLRHQPDSPLTVWFRERVGKLKGRIRRITIVAVARKLLIALWRYLETGLVPKGAILKA

SEQ ID NO: 279345 - protein, 306 aa, unidentified
MKVTLIGIDLAKNIFQVCGVNQAGKSVFNRSIKRAQLLTFLRTYPDATIAMEACSGSNYCGRELLSLGHDVKLIPPQHVKPFVKGNKNDRNDAFAICEAAQRPNMIFVQPRTLPQVDIIITHRIRERRIRIRTALTNQIRGLLSEYGIALPKGRNPLNLLLPELLEDASNQLTTIARQYIRELMEELRAINVAIGSLEKDIKLQARTHPDAKRLMGIRGVAEIIATAAVSFAGDGSGYHGARHFSANLGLVPKEFSSGGKQKLGGITKRGNSYLRRQLIQGAWSIIRYASKSNDRISVWALKVIER

SEQ ID NO: 279346 - protein, 410 aa, unidentified
MNLLYQRCCGLDVHKDTVVACLRLASDGKVTTEVRTFKTTTAALLQLSGWLAANNCTHVAMEATGVYWKPVWHILDDGEFVLVLANAAHVKNVPGRKTDVNDAMWLAELLAHGLIRSSFVPDTQTQEMRSLLRTRKQLIREQSSHMLRVQKTLEDANIKLDSVLSDLMGQSGRAMIEALIAGETNPAKLASLANRRVRATHEELREALRGRVTKNHRFLLRLHLNQIDALDAAVATIDAQVEGILGPFRTAVELVMSVPGIKNLSAQVIISEIGIDMSRFPSDQHLISWAGICPRNDESAGKRRSNRLRKGAPWLKTTLVQCAWAAVKKKDSYLQAQYYRIKARRGPKKAIMAVAASILTAVYHMLKDGTMYQDLGRDHFDHRSKDQQKNRLVKRLADLGYVVEIKPLAA

SEQ ID NO: 279347 - protein, 408 aa, unidentified
MNAVGIDVSKGKSMVAALRPMGEVALLPQEFLHTEVGLEQMAYAILALGENTRVIMEATGRYHEPVAAALHAYGIYVCVLNPLFIKQSGGGSIRKVKTDKADAMKIAKYGLDNWVDLREYTPMDTVRQQLKLCSRQYNLYMKTVVSLQNNLISLTDKTFPGVNELFSSPERADGHQKWVDFVMTFWHCDCICRVSEKAFTERYQKWCKRKGYHFSTEKALDLYAGSCGHFTTLPKNDNTKLLITTAAQQLLAGKMTLAALRAEMTRLAMQLPEYNTVRAMYGVGETTAAQLMAEIGDVRRFPRRSSIVGFAGVDPGVDDSGKHSAKSVPTTKRGSPHLRKTLYQIVCTYLRKAPANELVYQFLEKKRAEGKPYFVYMTAAQNKFLRIYYARVKECLAAFDAQQDTTQS

SEQ ID NO: 279348 - protein, 342 aa, unidentified
MDHYAGIDVSLECSSVCVVDASGKIVREGKVGSEPEALIAYFGSLRLSVVRIGLEAGPLSQWLYAAMKEAGLAVELLETRHVRTALETMPVKSDRNDARGIAQLIRLGWFRPVHCKSIGAQETRAVLTARKLVQSKLLDVENSVRGILRGFGLKVGKTTNRSFAGRVEDLVVHHASLHMIAAALLSVHAVLLRELKAFDKQVRSMARVDVKAKLLMSAPAVGPIVALTYASAIDDPGRFTSSRRVGAHFGLTPKKYQSGQTDYTGRISKIGDATVRTALYEAAHIMLIKPIKGCAPLKSWAMRIAKRAGMKKAKVALARKLAVILHRMLANATPFNAAMAAA

SEQ ID NO: 279349 - protein, 343 aa, unidentified
MQVNTIGVDLAKNVFQVHGVDNAGKVVISRQLRRKQVIDFFSKIPPCLVGMEACGTAHHWAREVSKLGHTVRLIPPSYVKGYVKRSKNDAADAAAICEAVTRPSMRFVPIKSADQQALLMLHRTRDLLIRQRTQLINALRAHLAEFGLVAETGREGLAQLAAIITDQSNREALPSAMKQALQAIVDQFAALELRIGTLDRTIHAHHRANDMSCRLETVPGIGVIGATAIASTVTDPSNFKSGRDFAAWIGLVPRQHSTGGKERLGGISKQGDRYLRRLLVIGATAVVRHARQYPQKHPWVMRLLAKKPAKLVAVAVANKMARIAWAIMAKGGHYRAPELAAAA

SEQ ID NO: 279350 - protein, 316 aa, unidentified
MQTNEVFVGVDVAKDTLVICIWGVLQRQLVPNEERAIKEWLKTLSPRAVVGMESTGRYHQELARLAHQAGLRVYVLNTKDVYFYAKALGARGKTDPGDAQVIARYVAEHHRSLHAWAPGTAAQLRVQELLQRRARIAVCRASVRQALTGLDELAPAVLQLEQQFEQLLRRIDREVQALVASESQLSQGSTMLQSICGIGPQSAALLAALLSRIEFANVDALVAYSGLDPRPCDSGTKSGRRRLSKRGSPNLRRQLYLAAMAATRSKAMGSIYQAIKAKGFKSTQALVILARKLLRIVWAVWKSGKPFDPTRLQSAA

SEQ ID NO: 279351 - protein, 415 aa, unidentified
MKKHNYRAKKVNDINWPQLRQQFTGQALVFAIDVAKEQQFALLSNTELSESVLIQWNQLEQTAGLINELKQLNALITVVMESTSTYGDAMRYQFRQAGFTIHQASAKRVHDAKEIYDGVPSLHDAKAAWLIAHLYQDGLTKPWHELGDKERELNAYRREYELHESQHKRNQNRLEAFLSRHWPEVLPLLALDSVTLESLLIDYGSPEQIAACAEQAAKDMHRWGKHCLSTEKIDAVIHSAASTLGQPCVEAERRYLQALAEELRHNRTQAKNAKLALEAVVKAEPELKEMGLTVGMVTTAILIGLHLDPRHFGCARSYLKALGLNLKEKSSGQDHGKLKLTKRGSALARKYLYFAALRLINSDPVISAWYQNKVDPRAKLKTVIALMRKLAKALWHVARGQRFDARKLVMTTVVN

SEQ ID NO: 279352 - protein, 356 aa, unidentified
MQAVIGVDPHKHVLSAVALDARGGRLGQWTGSTTRPDTQALRAWATQLAPDAVWAIDGSNALGRRLALALVDGGADVRDVCPTRTADRRRRRPSRGKSDAVDAEAIARELLAHPDLPHAFKTTAPGRPEPAREALAVVLRTRHQVVDHHRRLLNEADVLLGELPAHLGERLPGGSKVEPRLMAAARLHLTGDRVTDLRLRLLRAQAQQARALARERDALEREIVPLLKELGTSLPTLFGLGPLGAAELLVEAGDPRRFRSPDAFASYTGTAPIPASSAEARGQPIHHRLSRYGNRRLNSVLHIMAVTRLRADPETQAFIARTTTRGKSSRDALRIVKRRLARLVWLTMIHDLPAAS

SEQ ID NO: 279353 - protein, 318 aa, unidentified
MSSVAPAFVGIDVAKAELVIAIRPSGEHWAIANDGAGILTLVQRVRSHAPTLIVLEATGGYERAAVAALAAAQLPVVVTNPRQVRDFARATGQLAKTDRIDADILALFAERVRPAPRALPDDAAQALDALLTRRRQVLEMLIAERNRLEHAVPTVRRGITQHIRWLERQLDDVDRDLDDAIQASPVWRAKENLLRSTPGVGPILSRTLIGELPELGTLPRKQIAALVGVAPLARDSGTLKHKRLVWGGRAPVRAALFMAALVGTRCNPVLRAFYRRLLAAGKPKKVALTACMRKLLIILNAMMRTNTAWHHIDLSPTT

SEQ ID NO: 279354 - protein, 414 aa, unidentified
MGSGCKFCIGGMNVNCVGIDVSKGKSMIAVMRPLGELVIPPFEVGHTDVELCELSSRLRGLDGEIRVVMEATGNYHLPVANFLHDCGLYVSVVNAILVHSYGNNSLRRAKTDKKDAIKLANYGLDHWLALPRYIPEDEVRLMLKTTYRQYQQCAKVQTMLKNNLISLLDTAFPDGNRLFASPARVDGSEKWVDFIATFWHCECVCGLSEKAFVAKYQKWCKKHGYHFSQDKALDIYASACGHFSVMPKTDTAKLLVEQAVSQLRTASASLAALRNEMQSLAASLPEYPVVMEMFGVGPALGPQLMAEIGDVRRFYSKKALVAFAGIDAPPYQSGQMEVRSRSISKRGSSALRRTLFLVMSTILRRSPADEPVYQFMDKKRAEGKPYRVYMMASANKFLRIYYATVKQYLDSLEA

SEQ ID NO: 279355 - protein, 326 aa, unidentified
MNSVRMHIGVDVGKSSLDVCFPDGKKEHLNNNKPGRARIIHAAKKLGAIVCFEATGIYEEDLANECLAAEVRAARLDAWKTRQYAKSHGRIEKTDRLDSEMIRDFASSLEEGKLPFVKPRSAAHSLIKEYAKIRENLMKARVVVSSQLEFVRDKSARRNIIAIAERIEREIARLEDECGKAVDEDERMSSLSRRFLEVKGVGPCLVRAIFAECPDIGSFSKKGIAKFCGKAPIASKSCTVEKQSRMRRGRQGLRQAFHMAALSASKHNHVLRGTYRRLIANGKPKMVALGAVGRHLAILLNNIAKYPDFKIRHEPEDGKRKLHATC

SEQ ID NO: 279356 - protein, 428 aa, unidentified
MNVEELTRIREFRQIKEEIRGSDKYLVVGIDIGKEKHYAHYRTANGKTLHRRLVFWNSFSDIEMMMDHANAIKEGNGLEKVVYGMEPTSNYHKPLAEYLIKYGCNVVQVSGVSVARNRELLDGRWDKHDGKCSANVADLISQGKFQYYDYPSIEIRDLRNLLSLKRMLKKQEHRMKLRIRNNLIAQYFPEFDSQFAKGCSESIAVVKWCIRPKDINLMEHEEFEGLVAPRVRTRAQADRIKSIWLDANESIGCEAGEVLQYGARIMVEDLQNIKDSIKSLDKNIEQICLEFPEYHYLLTIPGFGPDVSSKMLGAIGNPLRFNNGKQVIKLVGYDLNASRSGKTSDSAVPVISKRGNTHLRYALYQAALVASTSNKYFKRYYANQLRGREREKGIGTKMKVKLAAKMLIIAWTLMKKKEPFDPAYLDMK

SEQ ID NO: 279357 - protein, 429 aa, unidentified
MNSTQNKKIDQVKETTMIVGIDVGSEKHYFRAFNWRGIELTRKPVAFSNSMEGFNSFYNTIVELMQKRELEEALVGIEPTGHYWFDLGQFMGEKNIKFVMVNPHHVHKTKELDDNSPSKNDRKDPRVIAGLVRDGRYFYSYMPTGVYAELRNASNRRFVLVEEQTRAKNRLQKWIAVYFPEYKGIYTHIDAKGGLLVLKQAPTPEEIVRLGVEGIIKIWKDAKLRGNGHKKAMLILNAAMKSIGLKSGLTEARMEIQDLIEDYELQTKRLERVNDLIKELCQQVRYADKLLEIKGIGITTVAGFIAEVGDITRFDSTKELQKLAGLELVSDSSGKHNGKTKISKRGRKRLRYLLFEAAISVVGKNEEFKEIHSYYTTREKNPLKKMQSLIAVACKLIRVFHVILTKGISYDASKTLKDIRHQGEQLKAA

SEQ ID NO: 279358 - protein, 329 aa, unidentified
MKVQHIVGADLSKKTIDLVCHLCGSHLQIENSPAGFKQMLKWFKQQKIDVSETMIVMEHTGLYSYCFEKYLHQHQLAFTKVNALVIKQSIGMVRGKNDKVDALRIARYGYEKRDKLTADPALSNQLERLQMLHSTRQRLVKHRAALICAIKEYRQIGISDKDIIVQSQLDVIKSFDKQIDKVEAEIEAVVTTEESLQKNYDLLQTIKGVGKEIAMATIVKTHNFTRFTNPRKFACFCGTAPFEHTSGSSIKGRTRVSHLADKHMKTLLEMGSRTAIQYDKELRAFYLRRLEIGKSKTSTLNIVRNKIIYRMFAVVKRQTAFIENYLQAA

SEQ ID NO: 279359 - protein, 318 aa, unidentified
MGSIAAEREGEIVIGVDPHPGSHTFSALNEFGKVVAELRIPNTAAGRKGLWTWASRFSCRRWAVEGPGNRFAKDLVDELLAAGEQLHAVSPGMTAEYRKRCRRGKNDEIDAGSAARVVLANGDVPVYLPAAYEMRLKELTRTYHRLVSQRRSTKMSLKDREYRDIQETMQRVVNALDSAINDLKAKIREMVKELAPELLKIQGVGPIVAGTLLAEAGRIERFANADKFAAYAGCAPIPWASGASETVRVNPGGNRRLNYAAHIVVMSRLRIDSRTKQYRDRKREEGKTQREVFRLLKTYVCRELFKALKSRYQLALAA

SEQ ID NO: 279360 - protein, 336 aa, unidentified
MEIIKHVIGIDVSKDTLEVGYGTLTLKQEQKITTPKTFDNNLKGFKELIYFAKKSKATSKAPLYFVMEATGVYYENLAYFLTEKHQKVIVVLPNKTKNFSKTLDIKSKTDSLDARMITQFGLERQMQPWQVPSPLMKALKALTREYNTIKRMGVQVKNHIHAEEYSHEPLKESLKRSKATLSVFQKQLKEIEKQLKELVEKDPDLNDKINKIDKIEGVGFMTVVSIIAETNGFALIENTRQLTSYAGLDVVHNESGLKKHKTSISKKGNRFLRQAVYMPALSACKHNPKLKQTYIRLVIKKNIKKVALIAVARKLLILIYTIFKKNVDYVPDYNPA

SEQ ID NO: 279361 - protein, 404 aa, unidentified
MWYAGIDWADTHHDALVIDEKGRQVGSLRVDHSPQGMSKLNAFLEQIIGTAPKEQMACIIETTHGLLIAHLLEVGWPVSPVNPRTVDRRRSASGVKTDTIDAYLLAKTGRADFADLHRLTPDSEKVAELKLLTRDQDALIQAQTRLVNQLTACLKAYYPVALELFTKVQQHTTLVFLQTYPTPQAAESASTDQITQVLKKAGHPNPLGVAPKIVDRLQQPHLQADAVITRTKSRLMLALVGQLLPLLAQIAQYDKEIATLFLTHEDHEIFESLPRAGQRLAPRLLAEIGDDRKRYQDASSLQALGGTSPVLYQSGIYSKAHRRLGCIKPLRNALHQFAWQTTQSEPWARDYYHRKRAEGKSHTVAIRALANVWVRIIFAMWIKRTCYEAMTFEQAQQQHARRAA

SEQ ID NO: 279362 - protein, 386 aa, unidentified
MIIIGVDPHKRMHVASAVEPATNRQVATLQIEASLAGYRRLLRWAGGFGERRWAVENTRGLGRHVAQWLLARGEVVEDAPSTATARVRELARGGRRKNDVIDAAAAASVAALQGDANPVLAEDITTVLALLDERRTNLTTQRTRLVNQLHAVFRDLLPGGAPTHLTATIASRLLAGIRPAGPVEAARKQLARDLISEIRQADQRLKVLTTQIAETVTATGSHLVEVDGVGPVIAGRLLARTRGVSRFATAATFANYAGVAPVEVSSAERVRHRLPRGGDRQLNLALHIVALTQTRMPGSAGRAYYDTKIAAGKTHNEAMRCLKRRLADHIWRLMIRDERQYAAGPGGQQGATVQSSAAGSTPTTSSSDKSLPEPATTDSTTGQTAA

SEQ ID NO: 279363 - protein, 349 aa, unidentified
MSKITRVGVDLAKRVLQVHAIDASGQRVTSRALPRDKFLTWCAQLAPGCMVAMEASSSAHHWARRLRTMGLDARIIAAHLVAPYRLQGKTGKNDANDAAAICEAAGRPHMNFVPIKTVAQQSLLCVHRLREGFKAERTACINRIRGLLAEFGLVFPQKPDALRQALPDTLEDASNELGGIARMALQRAQAQWAELDAHLAWCDEHIANHLKADEQAARAQQLMGVGPVGASAVVATVGDFKQFRNGPQFGAWLGLAPRQNSSGGKNNLGAITRRGDMYLRTLLIQGAKSVVWTAHKRDDPISRWVLALREKHGWQKAAVALANKNARILWAVMTKEQAFDARHVSVKPA

SEQ ID NO: 279364 - protein, 303 aa, unidentified
MCKEWLDIHLHPLGRDLRLVNGKAGLQALKRLLRGLQPALIAMEATGKFHRLAHRGLHESGFPVAIVDPYRARMFARACGHLAKTDRLDARFLAILAQMQQPAPTAPPDKLLETLGELVNARSAAAADLTAHKNRLKATDSDFLRKQLGKLVMALQRHIESLDKEIALRITDDPELCRRVEILTSVPGVGTVTAYSLIVGLSELGQCNAKQAAMLAGLAPIANDSGARQGQRSIRGGRKAPRNALYMAALSACRYNPDMKIFATRLKDRGKQAKVVLTAVMRKLVVLANTLLAENRCWTPNPP

SEQ ID NO: 279365 - protein, 432 aa, unidentified
MSQFLNDFVVGIDVSSEFSIVAMLAPTGELIRKPFRIDHNPVGFHKLLDILKKEEERLKRKPIYFVESTGIFHLPLFFFLKSNDLKGFVLNPLCVHSTKNFDLRKVKNDNKDSEAIARLAKYQDVKVSIMPEPQILVLRMMTREYYAVSDMLTMMKNRLCTDLYLLFPGFLNVFSGPFGKTALAVLKSYPSPSAIRDAETDVLTLLIAKTSRKGSEWASNKVALLRDCAQLASSMPSEFSMLDTKIKFHIDGIEHMQATLNGIESQVKLMIKSEEFPAQAKRNIELLDEIPGIGFFTAATLIAEIGDFSLFNSPKALTAFFGLDPSVNQSGKFNGDRNKISKRGTRIGRRILFTVAMASIRRTRNGKAINPVLRDFYASKCVSKKKKVALVAVMHKLLHYIFAVLRDQKPFEFRKPEDHQSWRGSKLQPAAA

SEQ ID NO: 279366 - protein, 361 aa, unidentified
MELHVGLDVSVDTTAICVVDDKGRKVVEASVASDAEAICITLRPHVTDIVRIGIEACSTGVWLARELRNEGLPITVVEARHMRSALSAMRNKTDRNDAHGIAQMMRMGWFRAVYVKPVEGQRLKTFLSNRRLLKRKLIDLQNHLRGALRVHGLKVGPVAAGKFDARVRELLEDHPDYMFQAMIESMLDVRAALLESFGKLHRILLMIVKHDPICRRFMTVPGVGPVSALSFKVTIDDPARFTRSRTVGAHLGLTPRKYQSGTSVDWGGRISKMGDVDTRGALCEAAAALLLRVQSYSALKAWGMRIAKRSGKMCAIVAVARKMAMILHRMWINGTDFDAKAGAKIIEKRRCDPRTGRLLPC

SEQ ID NO: 279367 - protein, 400 aa, unidentified
MLSIGIDVSKGKSTVCGMKPGGEIVYAPFEVQHTRERMSELVSLLRSSGEEVRAVLESTGSYHCPVVAALLENGIFVSVVNSLRMKRFCSQSIRKVKTDRIDAMQIALYGLAYWQELQPTKLPEDTYRELQLLARQYYQMTSMLIKAKVDFNALCDQVLPGMQELMSDHAGRHKLSDFVLRYRHTTHILEMGETRFRKDYCKWAEKKGYRNCERMAVLIFATAQNGIPVLPNAPSTQIVITEAIRVLHTVEASRDAILTQMQALAKTLPEYSLVREMPCIGDTLAPRLIAEIGDVRRFHSKRALIAYAGIDAPPYQSGKFCANNRHISKRGNRYLRKTGYEVMQSYVMHKPANDPIFTFIEKKRGEGKSGKLAMVAGLNKFLRVYYGKVTELYRSLPAIE

SEQ ID NO: 279368 - protein, 360 aa, unidentified
MIQDPKLSLKEAFMRFYTNQHKFYCGIDLHARTMYLCILNQEGKIVLHRDIKTSPDIFLKTIAPYREDIVVAVECIFTWYWIADLCNQENIPFVLGHALYMKAIHGGKAKNDKVDAYKIATLLRGGMMPMAYVYPSEMRATRDLLRRRNHLARKRAELIAHIQNTLHQYNLPEIGKNIGKKGNRIGVAQRFPDPGVQKSIELDLALIDNYDQLLHRTEHEISLIAKVHDADAYFRLRSIPGIGRILGLVILYEIHDIHRFPRVQDFVSYCRLVKCAKESAGKIIGSSGKKIGNAHLKWAFSEAAVLFLRRNPEAMKYRAKLERKHGKAKSLTILAHKIARAVYYILKRKEVFQPEAFFAK

SEQ ID NO: 279369 - protein, 416 aa, unidentified
MRYDNYDVYCGIDVGKFTHHAIALRPDGSRILSRELPQDETKLRELFGALGKFGSVLVVVDQPRNIGALPLAVARDCELDLAYLPGLRMRRIADLYPGSAKTDARDSYIIADAARTLPDTLLPVDASNEIVEGLRILTGFDADLAAEENRLINRLRSLLLSLHPALERAIGKHLHRPVGPGLLAKFGGPQGLSNARPAALRKAARHYAPRVGDAVVTTITEALAEQSVVVPGAAKADYVISTLAQQLLDVRNARADLSAQFENELDRHPHGEVVSSLPGVGPRTAATILVEIGDIRRFDKPGQLAVYAGIAPRTRRSGTSIRGEHHQSTGNMRLKRAMYLAAFASLRRPVSREYYERKRAEGKTHHAALICLARRRSNVLYAMLANNSVYDEPPPPPRLPCGHHVEPGADEQEHAA

SEQ ID NO: 279370 - protein, 418 aa, unidentified
MYYVGIDIAKQFHIACVLDESNKLLVKNLRIESEISDFSLLNSELINITSDKSKFLIGMEATGLLFENLYIFLQGLGYNVVLLNPYQTTRFREMQTMKYVKNDNIDSQMIAALLKSGQYSKGYVSEDIYQAIKSLYRHKATLMQEMKNAKRQVSTTLAVVFPEFEQIIKDPFSVSGMALLNKYPTARHYKGASGERILKLFRNIKGNNFNLQKANDLLDLAKLTIYQGNASDERAYVIHSNLRRISFLKDEIEACESQMFTLLNDINKTIETSKENEVYIADLVDNLRSIDGVADKTIFAILSECGDISRFHSGQAFIGFLGLYPTLHQSGNSTKYGKLAKRGAKLAKLALYQASIACVRHNDELKKIYLDKKSGGRAPKECVIIVARKLAMIIYSIYKNNTPYNPARVFNTQASLSH

SEQ ID NO: 279371 - protein, 374 aa, unidentified
MVDDTALYVGLDVSKEKIVVDLAEAGRNGEVRYYGEIANRADAVRKFVDKLAGRHERLCFCYEAGPTGYGLYRQLSGLGHECLVVAPSLIPTRPGLQIKTDRRDAVALAALLRAGELSSIWVPDETHEAMRDLCRARETAVSDLRRARQHLLSFLLRHGRIFEGRSHWTKAHRNWLATQRFDHRAQQIAMEEYIRAIEQIEERRERLTQQMLALLPDWSLNPVVEAIQALRGVAQISAVTLVSEIGDFRRFRNPRQFMAWLGLVPREHSTGASVVRGSITKAGNTWARRMLVEGAWTYRLPARVGQEILKRSEGLPEEIRAIAWKAQVRLCQRYRRMQAGGRPTNIVIVAIARELAAFVWAIATTIPITSTKAA

SEQ ID NO: 279372 - protein, 349 aa, unidentified
MKIVGCDFHPGYQQIAMLDKSTGEVTERRLSHSEQGAEAKKFYLGLAGPVRVGLEASGQSQWFERLLAERGHELWIGDAAKIRASTERKQKTDRRDANLLLELLEQERFPRIWVPTPAERDVRQLLLHRAKLVRVRTQVKNQLQALALNQGVQRKRKLWSAVGRKQLENLPLLPWASRRRAELLKLLDELERSVTALDGAVLQEAHARPAVRRLMTHPGVGPVTALAFALTLGPAERFRRGKQVASYFGLIPSEHSSGGKQRLGHISKQGSSFVRGLLVEAAQSAVRHEAQLRREYQRLAQRRCRALAKVAIARKLAVRLYWMLREEVDYAQLLQGSYAGQPESSRGRG

SEQ ID NO: 279373 - protein, 415 aa, unidentified
MLNSQINKIQTITSDTLIVGVDIAKNIQWAQFINFRGIEVSKHICFENNYSGFNSIMEKIEEIKSKNNFLSVIVGMEPTGHYWKTFVTFLHNNGVKVVQVNSYHTKKAKELDDNSQTKSDKKDALVIAKLIKDGRYSTIYFPEEEYANLRNLSNTRLEVSRLLNICKNRIHAFVDEYFPEFETVFKSFIKGKVALHILKRIPFPTDILGLTLKEIILIIREAAKKSVGKKKAEELIRAAEVSIGIKVGLEGARIRLNNLLEEYELYYNQLEKIEKEMEQELKKTGYKDILISIPGIGIISAASFIGEIGDPKRFSNPQQIIRLAGYNLVEDSSGKHKSKTMISKRGRKILRTILYKISLIVVCKNQEIKLLYKYLITRKENPLKKKQALIVILGKMVKIMYSLIKKRRSMIKKKY

SEQ ID NO: 279374 - protein, 342 aa, unidentified
MDYYAGIDVSLEASSICVVDASGKIVKEAKVSSEPEALIAWFKGLPFELARIGLEAGPLSQWLYAGLKQAGFAVELLETRHVRDAFKAMPVKTDRNDARGIAQLMRLGWFRPVHCKSAPAQETRALLTARKLVQGKLYDIEMSLRGILRGFGLKVGRTTKAGFASRIMELTEHHPALKAIAKALLAVHEVLLKELNGFEKQVRKLARGDDRVRLLMTAPGVGVIVGLTYVAAIDDPARFSSSKSVGPHFGLTPKKYQSGETDITGRISKTGDKGVRAVLYEAAHIILTMPVKGGALKSWAARLAKRAGPQKAKVALARKLAVILHRMLADGSPFNAAKAAAA

SEQ ID NO: 279375 - protein, 366 aa, unidentified
MYKELNSTGTLIQKTTMEAPHENIMYYIGLDVHKKTISYCVKDASGQVHQEGKVGATRNELDWWMKTLPQPWTVAMEATIFTGWIYDHLLPHAAKVKVAHPVMLRAIALAKKKNDRIDAGKIADCLRCDFLPECHMASTAIRDRRRSLRYRHLLVRQMVQMKNRISGLLLETGVSHNKQRLHKVGYFRELISKNEEIPESIRPLLRLSRETIVRCQKTEYALASSLQRDPLLAERVQRLKTVPGVGPITALTWALEIGDVSRFRSIKQAISYCGLCGEERSSADKSMRTPLSKQRNKHIQHVLVEAAKLAPRQSHELALIHEREQQKGNANRATLAVARKMVAYLLAVDRREQDFVPAEARNTAVA

SEQ ID NO: 279376 - protein, 392 aa, unidentified
MRISVGIDIAKEIHWVTAIDAEGVVQIDRKLLNTPTDLAALVDELAALRGPVRIGLDVIGGIAGLAAAMLAQAGFTLVHVPGIAVNRARQGTVGGENKSDPRDARTIADQVRTRSDLRPIEAATELDLEIRLLVGRRGDIVQAQTQRLSRMRDLLVGIFPGLEACLDLKTKGPLHLLSKFVTPGELREAGKKRLIRHLQAASGLPKVEDLADRVLAVAAEQAIAVPAERMTARLVRELATEALASRARLIELDHELEALLKRHPDAALIRSLPGMGAVLTAELIAEAGNFARFRSADALASAAGMAPVLRQSGRTRFLRRPNGGNKDLKRVFYQSAFCSLAHDDSRAFYQRKRREGKRHHQAVIALARRRVNVLWAVLQTRTPFQTGFKAAA

SEQ ID NO: 279377 - protein, 403 aa, unidentified
MQTLVERGCGLDVHQATVVACLLIVGKDGKVQKQMRTFGTTTRELLNLREWLLSQGCTHAAMESTGVYWKPVYAILEGGLEIVVANAQHVKKVPGRKTDVKDAEWIADLLCHGLLRSSFVPPKAIRELRDLTRYRRKLVESQAAERNRLLKLLESANIKLASVATDVFGTSGRLMLRALIAGKATAQEMAELAQRKLRSKIPQLQLALEGKLEGHHRFLLKLQLDRLERAEGDLAVLEQRIQEKLEPYAAQLALLREIPGVDWTLAAVIIAELGVDMSVFQSVSQLASWAGVCPGNNESAGKRKSSRIPKGNVYLKTALVEAAHAAARTKGTYLRDKFYRLKARRGYKRAVVAIGHKILVSVYHMVSQNVSYNDLGDLYLDKLNKNHLTRNLVHRLAPQQKAA

SEQ ID NO: 279378 - protein, 401 aa, unidentified
MDIEDIEVFVGIDVGKTHHWATALTKGGKKVFDKALPGDEARLRALYEKLAAHGHLLVVVDQPATIGALAVAVARDMGITVGYLPGLSMRRIADLTPGSAKTDAKDAAVIAGAARTMPHTLRAISTSDEDAAALSMLTGFDLDLARQVNQTANRIRGLYTQIHPALETILGPRLKHDAVLEVIAAWPTPTALRKAGRARIDAKLKKHGARRHAAWAGKIVSALGRQTVTVTGTEAAGTVLPHLARQLIALHSQRADVAARVETLVRAHPLHEVLTSMPGVGVGTAAVFLAETLGKTFDTGAQLASYAGLTPVTRRSGSSIRGERVCRTGNKRLKHAMFLSAFASLRDPVSRTYYQRKRDQGKRHNQALLALAHRRILTLHAMIRDGALYDPQPATKPPAAA

SEQ ID NO: 279379 - protein, 414 aa, unidentified
MSLKIVYPICCGIDVHKTFVVACIASTDDKGITTYKRHRFSTYTKGLKELLQWLLNSNCRDVCMESTGKYWIPVFNILEDSCSVTLAHPKYVKAIRGKKTDKKDAKWIADLFKHDLVAGSFMPPLPIRQLRDLMRYRFKLTNFMSSEKNRFQNCLTVSNIQLGNIVSDTFGKSSQNIIEKILENPLDTSFDIEPLIHGSMKKKLPEIELAIDGFITPEQAGKLKVIKQHYDNLEARKADLELIILNLAKSYSNEINLILTVPSFKNTFSAIAVVSEIGADMDVFPTAKHLCSWAGLTPTNNESAGKKKSVRISKAGCYIKPLLVQCATAVVKSDKHPEIRNRYLQLKKRRGHKKAIIAIARMLLTAIYHILKKKEPYNAELYKKADAAPTSKEITMEQAILLVRKQGYNIITTV

SEQ ID NO: 279380 - protein, 411 aa, unidentified
MDVLIERCAGLDVHRDTVVATVRYPGPGGARRSETRTFTTMTGQLEALADWLTAQRVTLVGMESTGIYWRPVYYVLEDHFPVWVINAEHLRNVPGRKTDVADSVWIAQLIEHGLVSPSFVPPRNVRLLRDVTRHGRRLTEERTRAIQRLEKVLQDAGIKLTSVASTILGKTGRAILAALLAGEEDPAVLAELAKGRLRPKIPVLREALTHRFRLEHHGALIAQMLAHIDFLESSILETHQRIEVLLRPVAATVELVMTIPGVGRRVAEVLIAEVGLDMTVFPTAGHLASWAGICPGNNSSGGKHRPGRTRHGSVWLRIALTEAAHVAARGKGTYLAAHHAQIRGRRGTQKAIGATRHDILIAYYHIVRDNVPYQDLGPDWNNRRRSTEQQTRRLVRQLERLGVNVTIESMS

SEQ ID NO: 279381 - protein, 353 aa, unidentified
MAHLAPPRVTVGVDTHLDVHVAHAADQLGRRLDTVQVPTTPAGYAELLAWARRLGEPVAWGVEGTGCYGAALARFLAAQGQVVVEVNRPDRQARRRHGRSDPVDAQAAARAVQAGEATVIPKASTGQVEMIRSLRVARSTAMRARTQTINALKALLVTAPAELREQLRGLSVSRLVGAAATLEPGPITSPQAAAMLALGTLARRYQALSGEINALTTQLDRLTRTAAPKLVALFGIGSDSAGALLVAAGDNPGRVRSDACFSMLCGSSPIQASSGKTIRHRLNRGGDRQANAALYRIVLVRLCYHRPTKDYMARRLTEGKTKKEVIRCLKRYVAREVFAVLNQTSQDTLTTTP

SEQ ID NO: 279382 - protein, 341 aa, unidentified
MKHLYLGIDWGKNFSQLFGFDQDGEVVIEERLKTLDLSAWRKKLRSLKDYSIHAAFEIGAHYDWLYDLLTEYCGEVAVIDPAQFAVICKSQRKTDKIDAQKIAEGLRRGDLPLVHVPDKQTRADRRLVAFTHWHSQQAASVKGKIRSLLLAQRLECPYSNITGMAALEWLNEQAPQMSDDAQLFLRLLLAEVELLRQQRQELDARVAIRVKRYKQVAVLDSIPGFGQLTILAVLSSIAGVARFSRPEQLSSYWGVCSSVYQSGTTLRLGSLTRRGNVHVRWLLSQALQHLHRKDARARKRYLKLKRKKPRGVARAAQVRWLTQIIWHLLKKDEPYRIKTAA

SEQ ID NO: 279383 - protein, 348 aa, unidentified
MTVYIGVDFHARQPTISYLTTEEGEIKRLQLDHAQPEEIRRFYGQFAGQRVVVGFESSGRAAWFEELLEELGCEIWIGHATAIRLFARRRQKNDRRDADLILDLLVRGDFPRIHRYSAESRAVLQQLRYRQRLVKLRTMLLNSLVFMAASRGVVLRRQLKTKRGLERLRQIDLPPALCEQRDELCQLLLDLKPKIDKVEKWLTAKAEADHRVRLLRTQYGIGPLTGLCLAHTLESPERFANPRKVTAYVGFDPVEDSSGERRRIGSISKQGSRLLRFLLVEAGQIAVGKDEELARVYKRVLVRRGHAKANVAVGRRLLVRAFIMLRDEIDYAEFQRRGVAARSSRGIA

SEQ ID NO: 279384 - protein, 342 aa, unidentified
MHFYCGIDLSARDSHLCVIDDHQSILLQQKVSNELPRLLDLLTPFRPNLQIVVESTFNWYWLVDGLTDLGFDVCLAHTLGLFMITAAKVKTDRRDAFTLAKLLRAGVIPKAYIYPAQTRPVRDLLRRRLHVVRLRAHEYGSLRQLLLREGILSSSRNEINQAEEEDLQEWFSHPLVVLNASQQLERIELLTRQIADLEQTILGLTKENGDYKRLLTIPGIGKILALTIHYEVGEISRFANERQFSSYCRVIPGVAQSGTVNRRGRGSKQGNHYLKNAFSQAAVAAVRNYPKIRRCYEKQLQRHRGGARKLVAYNVIAHKLAVAVYHLLKKEGEYREELLFGK

SEQ ID NO: 279385 - protein, 373 aa, unidentified
MNQNTLKNYTVEATPVASAKQIKDQKTPKAKRIAVGADVHLRGYQATRKVDNAAIGAVANLRSETELLLYVEKQCEQAEEVVVVYEAGPLGYGLYRKLEARGVKCLVCAPDSTQQKRKRRKNNQIDARTLTSNLFNYLNGNEAALQLVRVPTVEQEQARIASRQHDQLVEERKRLGAQGNALLLSQGFGSWKNWWRPKAFSRLEQLLPAWLFELLQSWVDLLRALDEKIQRAKAALSKGWSGPRPKGAGANSLVQLQSEVLDWELYANRRKIACLAGMVPSEWSTGDDQRRGSITKVGVPAIRRIITEMVWRIVQFQPQYPPVQKWQEVLRGTNGTLKKKAVVAIGRQLMVDLWRMETGRVTAEELNLVMIGA

SEQ ID NO: 279386 - protein, 420 aa, unidentified
MGYIGGGLQRSFVERVRGVEPERLLAVPIDVGKRAAAALVCDFWGEVIVAPFVFSLDERGFETFARAVASAGAERGASWTRVGLEQAGHYHQVLLARLLHDGLDVVLLNPAQVKENRAQDLLRSLKSDVRDLGAMAELLIRGKGHPAGTIDEAMAAQAALAAHRARRVRARTALKNQVHKGLDLVFPGLSGCFHDILDTKVGRLLVAEGMDPARVRRLGAERLRAFCLRRGVRVTRAKAAQVVQAAKVALGLPEGIARVHAAVLASDADLLGRLDSEIEQVERGLSEVLPRTPAAILTTIPRVGVVRASMYGAGIGDPTRFRTSAQVYRLSGMVPKLYESAGRRRGGTRISREGKVELREAIIELGRALRQGHPDFARYARELEARGKRPGVVACALGHRANRVAFAMIRDQVPFDPERW

SEQ ID NO: 279387 - protein, 337 aa, unidentified
MRKASTVKVFRDCLGIGIDVSKAELVVVGLTTGEPYIKRVNNQLTSVKAFVRALKKSGYRGKMICESTGHYHLQLALACHEIGMEIIVLNPLQSSKHSKANVRKTKTDPADGLMLASMCITEPNLPKPTQLTVSKALIRLKMGQLASIEKQLQKSQLSLNQYEETYAALGLELSELQLSLRQSFQALKRLRQQMEKELEELLVENMADRKSFARLCKFPGYSDVVAGLVGQLDRQVKGPNSWVAYVGMDISVQQSGTWKGRGKLTKRGNAYLRKRLYQAAWGACMNYDYVRAYYDELKARGRNHVEANCIISRKLLRIAYHVVVNEKEYDPRIAFSS

SEQ ID NO: 279388 - protein, 331 aa, unidentified
MQAILHNCCGMDVHKDSVVACILKTREPIIIERQREAVDKEIKVFGTFPDDLAQMRQWLEAEGCHHVAMESTGVYWQPIYEALEDAAGGEMEILVVNARHMKNVPGKKTDMKDAEWIASLLRSGLLAGSFIPPQEVREFRQLTRYRKNVVQDVNTQKNRIEKTLQQAGFKLSTFLSDVFGVSGRNLIRVLIKNGRLSSSDIDDGTKRISKEKKAEIKRAITGRLTDKQRSFLQLQITLLDGLLAHLESIEASISELSAKWDNDIERLSTIPGIGLTSATAIIGEIGSDVSKFPSAEHFCSWAGLAPGDNMSAGKKKYKDHFRQPIHQGYNL

SEQ ID NO: 279389 - protein, 331 aa, unidentified
MNYSHFVGLDVGKKTFDASLMSAAEKELSHKSFDNTPEGIQSLLDWIAGYHLSLSKLLFCAENMGSYVTELSVSSVSMGFSLALVCPLTIKKSIGLQRGKNDRIDAKRIANYAVLHYRKLELYKLPNKDLVRLRGWIIIRDNLVKQKVSSIKLLETFSQMAKLADVTESISFLEEQLKSIKEKILQVEEAMEQLIAASSSLCTNYLLLRSIKGIGIINAIVLLCVTNNFQRFDNPRKFACYCGVAPFEHTSGISIRGKTQTSPLANKEVKVYLTRAAITAISWDPQMKAYYKRKIAEGKHKASVINAVRAKIIARSFAVIRRQTPFVTLAV

SEQ ID NO: 279390 - protein, 394 aa, unidentified
MAFKIFRKNCCGLDVHKTWIYACMGITDTNGRTEYKQARFSSFTKGLQELADWLAKYDCNDVCMESTGKFWIPVFNILEKTCWVTLAYPKYTKPQKGNKTDHKDAKWICDLYMCDMVNPSFIPPPDIRQLRDLMRYRSKLTNIMTSEKNRALNCLTVSNLKLDDVFSDVFGKSSRSVIRYILEHPGETFQVAPFIDRRCKHPVEEIQAVIDGTISHQQAVKLRECLQHLDELEVHKTNVEKEILCLVQQYPYQLELLQTVLGFSGNIMTAIALISEIGADMSVFPSAKHLVSWAGCCPRNDQSSKKVKSTRISRAGVYLKPLLVQVAIQPFTANADKLSAAGALEIRCQICDGRFLSMWAALFIFLGCPLPPCPKNLHVHNGRIVILVSVAWIF

SEQ ID NO: 279391 - protein, 424 aa, unidentified
MTQNQSYAAFIGLDKSDKKINVSLQQCAKNKMERSIVKGGAEALHAWVAALCARFPGQAVAICLEQPASGLIHALMSYDFVVLFPINPMTLARYREAFTPSRAKDDPTDADFLCELVALHREQLKAWQPDDVCTRKLRHSTQARRRSVNMRTRLSNQLKALLKTYFPQALELCGDDLTTPMACALLQKWPSLQQLKRARLETIRRFYYAQNARRGDVIARRLALIAQALPLTDDPALIESSIVTVQALTLGLRAVHTAISRYDREIARTFAQHPDASLFAALPGSGTAYSARLLAAFGSRRELFESAQAMLNFSGIAPVLKRSGQATITHRRYARPLFVHQSFIEYANESIRHSLWARAFYQMHKGAQKSHWVIIRALAYKWIRILFRCWQQRMPYNELRYLKSLQKSRSPLLQCLAQPTTQAT

SEQ ID NO: 279392 - protein, 356 aa, unidentified
MDSVYYVGLDVHKKSISYCVKRIDGAIVSEGQVAARRAELTAWAGQLPGPWAGALEATLFTGWIYDFLRPFAVSLEVAHPAMLKAIAASKKKNDRVDARKIADLLRCNLLPRCYMAPSDLRELRRVLRYRNLMVAEAVRMKNKTAGLLMEVGAEYNKEKLHQKGYFHELLDNIKNVPESVMKLLKLTRGATEMFEAAQHRLVAGLGRQPQLRERVERLQSISGVGEILSLSWALEIGEPERFHSVKDAVSYCGLSSAQNSSAGKEHRGPISKQRNKHIQTVLIEAAKVAPQWNPTLAAVQKRERERGNANRATLAVARKLVAYLLAVDRSGKPFVAERPAAKPHQPADSAPAVAAA

SEQ ID NO: 279393 - protein, 440 aa, unidentified
MIRAQVAGIDIGSERHWVCARGLEGSGREVENFGATTAELVRMAEWLKERKIESVAMESTGVYWIAPHEVLEKDFEVLLVDTRQLARVPGRNKKTDPSDCEWIQRLHSCGLLNGSFRPQEQVCMLRTLVRDKAILVAESADWVRRMQKSLDQMNVRVHRAVSELSGVTGMAIVRAIAAGERDAQKLAQLRDRRCRQSEQEIAEQLSGHWREDHLFSLRQSLQMYDAIAERITAYEQEILRKLATMEIGEYPGGVVPPVKNLEKGKAIKKRGQEPKRQALYRMSGVDVTQIDAIGVETVEVVLSEYGPDLSRFPTEKQFVSHATLAPRVPKSGGKPLKHKKRNSASTRVAAALRMAALSLRHSATALGAYYRRLARRIGGDVAVFATARKLATLIYRLLRWGQPYVDEGAEAFEQRYRQQHIKGLALRAKELGYQLMPTTT

SEQ ID NO: 279394 - protein, 348 aa, unidentified
MPLYGGIDLHSNSNQSAILDEDRKRIMRRKLDNDPDLILRFWEPYKPDLAGIVVESTYNWYWLVDLLQDNGYRVHLANTAAIQKYSGLKHADDNHDAFWLAELLLLGILPEGYIFPKEVRALRDLLRKRLHFVRVRTALILSLQNIITRNCGTKVSSNHLKALKEDRAQGYLQDNEDLLLAGSASKAAIDALTRQIRRIEGAVVKKLNLQAPYTQLLTLPGVGQVVASTVTLETGPIERFSKVGCYASYCRKVDSRWTSNEKVKGHGNKKNGNKYLAWAFGEAAERARKFHKASREFYQQKLRQKKHPALAHGALAHKLARAAFYILRDNVPFNHEKMFGYPEEPLDN

SEQ ID NO: 279395 - protein, 343 aa, unidentified
MEHFAGLDVSVNETSVCIVDDTGRIVREVKVASEPETLLAVLKTGAYRFKRIGLEAGPLSQWLFSALAEAGLPAICVETRHMRAALQAQINKTDRNDARGIAQMMRAGLFRPVHVKTILSQKLRMLLTHRKLLQSKAIAIENDLRGTLRNFGLKVGMVGTVKFEGRIKELVADIPDLAGMVEPLLIVRRVLREQIAVLHRRLLAIARDDEVCRRLMTIPGVGPVVALTYRATVDVPARFRNSRAVGAVFGLTPARYQSGESDRTGAISKCGDGMMRVMLYEAAQILLVRTAKWSWLKAWAMQIARRRGMKKAIVALARRLAVIMHRIWVDGTEFSWSKNTVTA

SEQ ID NO: 279396 - protein, 419 aa, unidentified
MNKLYVGMDVSQDDVKVYILDQEGNEATQRFCVDNNPQGAETIVNNILKCCHSLSINKVFAGLESTSVYGWHLQFYLADHQGLKPFDPMIISFNSKIVNAFKKSLGELPKNDWIDAFTIAERLRFGRLPKSCPVDFRYLALQRLTRHRFHIVENIVREKNYYLSNLFLKFSGLCQNQVFSTNFSATATQLFDEFLTLDDIAARPLDELVDFIVEHGKELFTDPKATALALKEAVRKSYRINASVDNSLNFVIKSCLDNIQALEKQKKATEKAITQEISGFNNQYLCLTSVKGIGPTIAAGLISEIGGISRFEDDNALAKFSGLYWSEYQSADFTAEDTCLKRTGNEYLRYYFIQAADQLRKYLPEYSQYYARKYNEAKTHKHKRALVLTARKAVRLVFALLREEKLYKPPAPKGGIIEK

SEQ ID NO: 279397 - protein, 338 aa, unidentified
MKVKRQNVGIDVSKGTLATCMVFLNEDFEIKIKASKTFPNTAKGFSELLTWANRKKDSDVDLSFTMEPTGVYYEGLAYYLFEKKQCVHVVLPNRAKKYADSLQEKAKTDKLDAKALGRLGAERKLDKWHVGSPVYRKLKILTRERNALIKERTVFQNQLHALNHSADPFKKSVTRLKQIIRFINKQIKAIEKDCENIVNKYEMVKAKVDKVTTIPGVGFITAIVVIAETHGFALITSIKQLVSYAGLDIRIRESGKWKGKPKITKKGNVQIRKALYFPSYTSIKYSETSATFYKRLFERKGKSMIAATAVQRKLLGLIYTLWKNDTTYVENYQRSQAA

SEQ ID NO: 279398 - protein, 349 aa, unidentified
MSPDQGLPGKEPTMFIIGCDYHPRFQMIAVLEKATGEVKVLRLEHENGEAKKFYSSLPKGVLVGIEATGCTAWFERMVSECGHELWVGDPAEIRARMVRKQKTDERDALHLLDLLLTNRFPRVWVPSPEERDARQLLQHRQKLVGMRTSVKNQLHGLAMGQGLCRKQKLFSESGRKQLEALELGAWASRRREELLTLLDDLNPKIAELDKAVEAEAARRPEVVRLRAQKGVGPVVGLAFVLTLGTVERFRRSRQVVSYLGLNPLENSSGGHQRFGHITKQGNTMMRWLLVEAGQTAARLDAELGRVYKRLKLRRGANVAKVAIARRLAVKMYWILRQVPDPAPAGSHVR

SEQ ID NO: 279399 - protein, 402 aa, unidentified
MTYDYVIGMDACKYFHHACVLDIDGTQVLSKRINQNEQSLRALFSAFSAYDHKVLVVVDQPNNIGRLTVAVAQDIGIDVRYLPGLAMRQLSRIHAGNAKTDIRDAYIIAHTAKNLPESLRSVDRVEEAFLQLKVLNGIDEDLARSYTRLINQIRSALVGCYPQFEQALRGQIIHRKWVLHLLARYGGPTKIKRLGKAKAAAFARRYKARNPEPVLDAIFAAISEQTVTIAGAHYAEMGVAMSAKDALLKLEHRQQIEKEVIKLINDIPHTQFLLSMPGIGPKTAAQILMTAGDMSDFPSAGHLASYAGLSPRTNQSGTSIMSNSLNRAGNKKLKNALWQSSFASIRSHERSRQFYERKRREGKRHNAAVVALARRRLNVLYAMMRNHEHYHDPAPSQEDLAA

SEQ ID NO: 279400 - protein, 388 aa, unidentified
MNIVGIDISSNSAEYCVLCTTDILSSGTISLDKVGFNKLLSSPGINKDCIFIMESTGNYHSTLYNFLYNNSYTAFVVCPILVKRFIASQTLRKTKTDKLDAIFIAKYGVSNLIKLTKAKGQNILETRSKTIVKTRENYANDIAKYKTKLKQEIAVVFPEIAVFDVYNESILKFLIKFPCAYDILNAKKSTINKTIKEISNGKGRIASKFTSDTIIEIAKSSVGIAARADAVSEYASHLISLIQKDKELTEKLIKIEKEIHSKEIEILTSVPGIGLITAIHFMVYIEDISRFDSYQKLIAFVGSDPTIYQSGNEYKKGHISKHGNKSLRKYCYIITQSCIRHNNLFHAYYIKKKTEGFPHRKAMIATMNKIIRVLYTLLSNEKKFIYEK

SEQ ID NO: 279401 - protein, 349 aa, unidentified
MDKITSVGLDLAKQIIQVHAVDGAGRVVLRKAVRRERLLALLAQFPCCVMGMEACSGAHHWARELVKLGHQPKIMAAEFVRPFRKSLAAKNDANDAEAVCTAMRQPNMRFVAVKTVEQQGLLCLHRVRQGWMEERTALINRLRGLLAEFGVVVPQSATALPRALPTLIAAHEARLPAHAQRCVQELIDHLGALVARIAAFDREIGQHAHGNDAAQRVAALTGIGPITASAIVATLGNASDYRNGRQFAACLGIVPRQYSSGGKTRLGRITKRGDAYLRTLLIQGARSTMQAALRRPPTQRDRISAWIVQLAQRVGYHKALVAIANKHARVVWALLARGETFDRKHSGTH

SEQ ID NO: 279402 - protein, 343 aa, unidentified
MFWFELEQLPEPSGGQSPPEEFVSTRRSLAMITQKVHVVGADISKATIELGCLSLTTPSSIPNTPAGFKALLKIITKTTNPIHIVCEATGAYHKAFVSTLHQAQIKVSVVNPRFIRDFARAWGKLAKTDAIDALLLADFGRTMQPDPTVPPEEHMRLLDELVTRRTQLVEDRARERNRLSQTSRPEVAASLRLHLRHLDKQIKDLLSCIAEVVDKNHALKAKVFLLAQVHGIASLTASALLATLPELGSLSKNEVSALAGLAPFNRDSGAFRGKRSISGGRIGVRRALYMSALCASRGNPILKAFYQRLRAAGKPHKVALVAVMRKLLIYLNSLLKQQTLSPA

SEQ ID NO: 279403 - protein, 349 aa, unidentified
MIAFDAHKRYTLSLVEDREGRVLTEARIPHCRGMIKHFLRKFTPGSTVAVETIGNWYWIVDEIEEAGMKPALVHARKAKLMMGSYNKTDRLDAHGLNLLQRNGTLPEVWIPPADLRDKRDLGRTRMVFTNMRTKIKNRVHSVLAKYALHDFEDVSDIFGKRNQERLNQHINELPPQTKFTSQCLLNELASVQSKIDAIEKQMNEVYETTPEIELLMTIPGVGFLLAVVIANELGDVNRFAGPASLAVYAGTTPRVHSSGDKVRYGPLRPDVNHYLQWAYAEAANSICVNRKRRPGRHVNRLYTRIRSRRGHSKAIGAVMRHLAEATYYVLKKMEPYREPKSKAASPRKA

SEQ ID NO: 279404 - protein, 427 aa, unidentified
MKELTKVCGIDVHKMFLQVCILTRSGEASQHRFHNTPTGILALKNLVVAEGCEIVAMESTGVYWYRLYLELELDIRTIVANARQIKSIPGRKTDMNDARWIAELALHGLIRPSRIFPRRDREFRDLTRNRETLVRTRTTIKNRIHKILDNAGIRLNLALKDLFGKSGRHLLLGLAEQKDLETTLATIPSPRILRRADQLREILQGSPLSPIQLHLLTTQLHLLEEVEEKIAQLDELILASLGDSQMEAIAICTSVPGISITAATTILAELGDVQDFPTASHLVSWAGLAPSVYQSADSLVCGKITKQGSKSLRWILVQVAQAASRTTGTVFSNFFRRIAYRRGRNKAIVALARKILSILWHLLVNREHYIEPGLKRVRKLPARMTLPKISIDDAVATLLNAGYLVYSPENQKSTGKGVRAERATHPI

SEQ ID NO: 279405 - protein, 346 aa, unidentified
MIIVGCDFHPAWQQIAVFDSETGEITEHKLIHGDGEAEQFYRRLPIASRIGIEACGNSQWFVDLLQRLGHEVWIGDAAQIRASYVRKQKTDRRDAAHILRLLIEGRFPRLWTPSAEERDLRQLLVHRHKLVAIRTRVKGGLQHLALNRGLQKKSKLWTAAGQKALRELPLDTWAACRREDLLGLLASLDKQISKLDAAVERAAEEHPQARLLMTQPGVGPITSLAFVLTLGDVSRFQRGKQVASYLGLIPRERSSGGKQRLGAINKQGNSLMRTLLVESAQSVTRLDPGFRKQYLHRCHRMAKGVAKVAAARRLAVRLFWMLRTNTEYPEIVRIESSPTLAVVSES

SEQ ID NO: 279406 - protein, 426 aa, unidentified
MKSNTQNAKITAITEKTLVVGIDVGSETHFARAFSWRGYEFSGKPLEFSNTEEGFETFRTWIEELKEKKGMDKVIPGMEPTGHYWFNLGKYLQDNGMRPVHVNPHHVKKSKEMDDNDPSKNDRKDPKVIAGLVNEGRYFYPYIPDGIYAEIRALSGLQVLAQSEIIRLKNRIARWFSIYFPNYKDVYGNVGAVSGLMVLKVAPLPEDIVKLGVDGVNRIWRDAKVRGVGMKRAKTLVTAAEHSVGIREAQEAARIEFQILLSDFEMQTKREAELMEMIREKIAEVPYVDKLLEIRGVGLKTVVGFVAEVGDIKRFDDPKQLQKLAGYAIVKNQSGKHKGESHISYRGRKRLRYVLYEAAVSVVSHSPEFRSIHHYYTTRDKNPLKKMQSMIAVACKLIRIFYMILQTGATYDAAKMMGDIRRPAAA

SEQ ID NO: 279407 - protein, 324 aa, unidentified
MTQSVEKRNIEFIGIDIAKGKLDICLGNDNKKSSLTNSNSGFKRLKKLLPNPAECLIVLEPTGGYEKEVIVYLQKNSYRVVLANALKVRRYAEAMGFLAKNDPIDSYVIKSFGEDLYPKGKLAVLIPKSDEFRKLELLLNRSRQLVKLMTSEKNRIDKTTDVDIRKSIARMIRCFEKELKQIDRKLEKMSDKCQLLEQAKKYKQVKGIGKVCSNALVTYLPELGKFSHSKIAALVGVAPYCKDSGKHKGKNKIKGGRKILRSLLYMGTLSAINHNPVIKSFYDRLIGRGKHHNVAMVACIKKLLRILNAMAKNDTPWQENYGIK

SEQ ID NO: 279408 - protein, 407 aa, unidentified
MSNKPHNVVGIDISKGKSTIAVMRPFGEIVISPFEVKHTSSDLKVLADTLKRLDGETRVVMEYTGKYYQPVARYLYESGLYVSVVHAKIIHDFANNSIRRIKTDKADAVKIANYGLSNWEFLTPYTKEDDTRLVLKTLNRQYNHLMRQYVTSRNVLVSIADQTCPGLNEVFTNPRKADGRIKWAEVYKRFWHSEYITSFSHNKFISLYNGWCAQNGFRGSDEKASELYLLAKGSIPTLPKTDYTKKIVQQAASELITLSDAMASVHREMLSIAQTLPEYPAVLSINGIGETLGPQLMAEIGDVRRFSKRSNITAFAGVDAPPYQSGKFDSKSRRISKRGSCELRKQLFQVLRIIVQLNLYDDPVYQFVMRKKAEGKPYYVYMVAGCNKLLRIYYARVKEYLATENAV

SEQ ID NO: 279409 - protein, 485 aa, unidentified
MAKRKLSTFDRLRVGAALNRKERREVQQRLNSTDPGLEIVNRDAAGIDVGNESHYVAVPLGRDAQPVREFGSWTAALEEMAQWLIGCGIRTAVMQSTGVYWIAVHDVLQKHGLEVHLVDARGTKNVPGRKSDVQECQWLMKLHTYGLLRACFLPAPEIHAVRTVWRLRDQHVKDAGRCIQHMQKALIEMNVQLHIALSDISGLSGQAIIRSLLAGQRDPKALAALRDPRCQASEEEIVHSLQGNWKPDVLFELQQAVDAYDFYHQQMAKCDQQLKQYMAVLPVRKAEMPVPPAPSSPATHTSNSSHSYKPRKPKGNQPSFDLEAELERILGVNATTIDGIGVMTIQTVLAEVGPDLSAWKTEAHWASWLNLAPKRDISGGKVIRHVRQRQSNRVGNAFRMAAQSLLRSQSYLGARCRYLRARLGGLKGVKAMARVLACLYYRLLTKGQVWVDRGVEEFDRRSQQRELAALERKARKLGMQLVAAA

SEQ ID NO: 279410 - protein, 399 aa, unidentified
MTESSDYESVQVFIGVDVGKDTHHAVAVNRSGNRLFDKALPNDENKLRSLISDLKQHGQILLVVDQPATIGALPVAVARSEGILVGYLPGLAMRRIADLHAGETKTDARDAAIIAEAARTLPHALRTLKLADEQIAELSMLCGFDDDLAAQTTQASNRIRGLLTQIHPALERVLGPRLDHPAVLDLLQQYPSPEKLASLGEKKLATQLCKLAPRLGKRLAADITQALTEQTVVVPGTNAAAVVLPRLALQLITLRKQRDEVALEVEQRVLAHPLYPVLTSMPGVGVRTAARLLTEVACRAFASAAHLAAYAGLAPVTRRSGSSIRGEHPSRRGNKTLKRALFLSAFAALRDPISRAYYTRKMSQGKRHNQALIALARRRCDVLFAMMRDGTFYTPTASE

SEQ ID NO: 279411 - protein, 361 aa, unidentified
MKNPSQHLIAEVPHRQPRVEMTIGIDLGDVWSHYCTLNEDGEVVDRGRFRTTPKAIEKWFTDLPPARVAMEAGTHSIWISEQLQELGHEVIVANVRELRAISHSDRKSDQVDAEKLARYARLDPEILRPISHRTVEQQEALTLIRARDLMVRLRTAAVNAVRGLTKSCGYRMPASSTRCFAKRSLAVMPPGLAQALAPVLEQIAAMTMKIKQYDRQIQELGRAKYPETQALLKVHGVGHITALTFVLTLGSKERFKQSRDVGCYLGLRPRRSQSGDRDPQLGITKAGNVYLRSLLIECSNHILRPHGRDSSLRQWGLHLASRGGKQARNKAVVAVARKLAVLLHHIWTTQEPYMPFYEQAA

SEQ ID NO: 279412 - protein, 438 aa, unidentified
MSNKVIFNLDELFISVGIDVGADFSWMSIALPNQQFVGKPFKILHNSIDSLTTAVSKIKEAEELYSLESRIFLESTGIYHYPLFCYLRDKGFNCSVINPIITKNSTNINIRKVHNDRFDSKKAALVGLKPDLKVSLMPSDLALNCRNLCREYYDLMDNRSAYVNKLQGELRMAFPQYLGIFSKVTINTSLTLLETYTSPSAFLEADKQEIIDIIKSTARFGLTYAQNKYNAIIQAATDANQFGYIIDSNIKRIRLYISFIRKYDEEINSILESLHELVDANEDSDFVKQIHLIETFKGAGFLSAVSIMGEIGDFSAFSKPKQLFAYFGLDPSVKQSGKFEGTKVQMSKRGSAIARRVIHTLTLQSISISRNREAKNPVLREYYLKKCDSKPKLVAMGAVSHKVCNMIFAILRDNKPFKIIAPQEHIKQYNAAKCDMTA

SEQ ID NO: 279413 - protein, 341 aa, unidentified
MDQINTVGLDIAKQIFQAHGADSCGAVVFRKKLRRDQVLNFFAGLPPCTVAMEACPGAHHWGRQITKLGHEVKLIAPAYVKPFVKRQKNDAADAEAICEAAQRPTMRFVVVKSADAQAAAVLFRTRDLLVRQRTQAINALRGHLAEFGAIAAKGVPHLPKLIAIVEDPDADLPEAARMILAVLVGELRALDEHVAILDREIARRAKESPVARRLMSIPGIGAVTATALVALAPAASTFRRGRDFSAWLGLTPLQRSTGGKERLGRTSKMGERTLRRLLIIGASAVARWAARKGLPPHSWLGRLMTRKPPMLVRVALANKMARTVWALLAHGGVYRAPTAMA

SEQ ID NO: 279414 - protein, 406 aa, unidentified
MERVHERCAGLDVHKKTVVACRVAQQQREVRSFGTTTDELLALADWLRAAGVTHVAMESTGVYWKPIYNILESEFEVLVVNAQPMKHVPGRKTDINDAQWLAQWLEHGLLSASFVPEAPQRAVRELVRYRTHLVEERTRETNRLQKVLEDANFKLSAVASDVLGVSSRQMLSAIIEGNDAPQALAQLAKGQLRHKIADLEQALKGRVADHHRLLLRLLLDHIDDLNQRLTELDLEIGRLLVPFDTDNLLDRLDAIPGIDKTVARILISEIGIDMSRFPTADHLASWAGLAPHKKQSGGKTYPARVPPANRYLRPALVQAAKATQRTDSYLGEQYRRLARRRGSNTATIAVAHSILVIVYHMIKRGTAYFERGAEFFDQLKPDGTRKWLVRRLNQLGYQVSLEPLAS

SEQ ID NO: 279415 - protein, 347 aa, unidentified
MRFYTKQHKFYCGIDLHAKSMYACVINQEGEIVVHRDIRTNPEVFLKTIAPYREDIVIAVECIFTWYWLADLCARENIPFVLGHALYMKAIHGGKAKNDKIDAHKIAVLLRGGMMPMAYVYPSGMRSTRDLLRRRMHLTRKRAELLAHVQNTNYQYNLPDIGKKIAYKANREGVAERFPDEAVQKSIELDLKLLDFYDSLLLRLEHELSITAKAHDADSYFRIRSIPGIGRILGLVLLYEIHDISRFPRVQDFVSYCRLVKSAKESAGKRMGSSGKKIGNAHLKWAFSEAAVLFLRRNQQAVKYREKLAKKHGKGKSLTILAHKLARAVYYILKRKEVFHMETFFAN

SEQ ID NO: 279416 - protein, 323 aa, unidentified
MTETQAPPGTGPVVVGIDVAKATLEIWLEPASEGWTVANDAAGISELVEQVQARGATLVVLEATGGYEDDAWAALGAAQVPTAVVNPRNVREFAKASGRLAKTDRLDAQVLARFGVALRPEPRPLPEAQVQELHATVTRRRQLLDMLHAERNRRRTARGTVATQIQQHITWLERQLGQIEADLRRQVEASPLSQAKAQVLQSVPGIGPASTFTLLAELPELGTLSGRQAAALVGVAPFNRDSGTLRGKRSISGGRAPVRTVLYMATLSATRHNPLLRAAYLRLRAAGKPPKVARIACLRNLVVILNAMLTKGLPWNPHRAQIA

SEQ ID NO: 279417 - protein, 328 aa, unidentified
MREELGIGIGQKELSMALLQKGKVARRTFRNDAADFAAVTKWLGKHKVKDLHVCVEATGTMWEGIALYLHEAGYQVSVVNPARISAYSKSLMRRNKTDKLDAELIARFSATQQPEAWTPPPPAQRALRDLVRLLDDLQDVKTQQTNRLKSGVTSAAVLEHLHQHIAYIEEQVAEIAQQIKAVIDDDAQLSHDFALLISIKGVGFITAALFLAEGIGSYRSSRALTAHAGLNPKYHSSGSSVNRPPKLSTIGSARLRKALYLPALSALRWNPCVKALADRLKAKNRPKMVIVGAAMRKLLSLAFGVLKSGRPFDPNYATSHTQLVEATI

SEQ ID NO: 279418 - protein, 357 aa, unidentified
MKYIGCDFHPSFQQIAMLDRETGEWVERRLLHTEEARVFYEGLQGPVLVGIEASGNTHWFESLLARCQHELWIGDAGAIARQDGRKQKHDRRAAELILKLMVENRFPRIWVPTVAERDLRQLLIHRQHLVRMRTRVKNQLQHIALNQGWQKKRKLWSEAGLGLLRSLKLEPWTQQRRDTLLEMLEKLEEKIQPLDLAVGKEAEACEAARRLATHPGVGPVISLATVLTMGDVQRFADSRSWVSYLGLNPSEESSGQHRRLGAISKQGNPFLRYLLVEGAVSAARGDKSLARMYARLKAKKHHGVAKVAVARKLAVRLYWMARTQKSYPEVVRTQGSQSHSVAEVMAETLNRPPASHQ

SEQ ID NO: 279419 - protein, 359 aa, unidentified
MKYYVMKYYISTTQFNCGIDLHARQMYVCVLDRTGKKLLHTNIKNNDFEYFLKLVAPWRHDLTVCAECMFGWYWLADACQAAGLHFVLAHALYLKAIHGGKNKNDRLDSEKIAHLLRTNFIPPGYVYPADKRPLRALLRQRLLYVWNRSELLSRLQSHQLAYNRPTRRQTLYNREAWSEQLLAQEPDPVRRLALQNDLALIGHYDTQLAVLEKELLKLTKQTMNRDFTLLQTAPGIGDYLGLTILHEIGDLARFPTVKDFLSYCRLVKGTVASAGKLKGLRGAKLGNPYLRWAFGEAAVVAKRDPLLIGPLTQRLEARLGNKFKANTVLAIKLARAVYFMLKTKTVFDPDRLVAALSKN

SEQ ID NO: 279420 - protein, 421 aa, unidentified
MADVDKVTVVSSLDIHKRSVVGHVLNVFFDKNENKFVAESRAVKQVPRSLTGLGDLADFLREFNVHTVVMESSGPYGLMVYYFLESEGFDVWMVPARDNKSRGGKKTDIEDAKRLARNFVAGSIRAYKLPSDPKVRALRTYVRARKKLVDQLVALKNMIIKTFDEACIDIKSIFSSLGKGFLMFLEGYLKGDSLDKIIERWPRLGKKREMLEIIMKTRLSEASLASLSSYLIIAKTIMKEIEKLDARIESLLAEFSDEVRLLLTVPGVGFKSAAVILAEIGNIKRFASAKKLASYAGLVPMVYQSGDEIIYGKLRSECNRRLRWILYEAALNAVKVSPWLRSFYERLIARGKKKKQALIAVARKIAVGIWHILTKRVPWKEAVRKNVRMPKKRRVPKVTVREALRILREAGYIVIKAKGSL

SEQ ID NO: 279421 - protein, 309 aa, unidentified
MEHFVGIDVSKDRLDVHLRPSGEPFAVARDGAGLAALVERLQTLAPALVVIEATGGYETVVASALAAARLPLAVVNPRQIRDFARATGRLAKTDQLDAAAIAHFAEAVRPPVRPIADAQAQALGELVARRRQVIEMIVAERNRRRMATQPRVLRAIDRHVELLQAELSELEGDIDGAIRNSPAWQADADLLASVPGVGPATRRTLIAELPELGKLDRRKIAALFGVAPINRDSGTLRARRTIAGGRSAVRAAVYMATLVGSRVNPVIAAYYQKLRAAGKTAKQALTACMRKLIVILNAILRDRKPWQPA

SEQ ID NO: 279422 - protein, 408 aa, unidentified
MARYYLGVDWADQSHQLYVSDESGRKIRELEVQQTADGLAELGRWLEESRGQGIELWAAIEKPEGRVVDFLLDHGVVVYPVNPKALDRARDRFRMSPSKSDGFDAYVLAEFLRTDNAHLRALEPNSAEGQELKMLTRDHQRLGRQKTRLLNQIGITLKEYYPVPLEVFESLDTKIALDFLKAYPTPQALSKLTRRGWKRFAKRDHHLSEARCSELWDKLNKPQLAVPAHVVRAKAKLLAALVMQLEASVKAVDSYSQEVQSFFAAMPAAEIAKTLPGGKSGTTVASIWAELGDAPKRWNSFRHLQAEGGAVPVTKASGKSRMVQFRFACNKHLRQAMYWFSFNSLQRSEWAKKYYRNQRAKGHSKHESLRALGAKWLKIIFVMWRDHKPYDENYHLANIARQMMRQAA

SEQ ID NO: 279423 - protein, 516 aa, unidentified
MIPKVIQRRGRGCVKKPSPELVNNFAAAHNLGGEQVATPEPRLGCPHPARVRQRSPTPVAAPGPSAERTLPQEGSYIRSHPLRVPEPLSIPTKMKTDWTEQTYFAALDWAKAHHDVVVVDRFGGIAAGFQFPHTAEGWKEFDQQMQPFGKCPMAIETSSGPAVDQLLQRDYPVYPINPKAAQRYRERKYPSGTKTDRHDAWSMADALRTDGHGWVQLIAQDEATTTLRLICRDENVLIEQRTALVNQLQAALAEYYPLALESFDDWTRPFAWAFLRSFPTPQALTKAGKRRWEKFLHLQKLWRPGTASIRLEAWQKGQQLNASAAVAGAKALLALSLVNVLQSLQKQLDEYRQRIRAAFEQHPDHDIFGSLPGAKDKLAPRLLGEMGSQRQAFPDAQSLSCRAGTSPVSFQSGQLRKARIRWACNDFLRHTVHLWADLSRRTCLWAQIYYAAKRENGHSHASALRCLGKRWLKVLWRMWQDRTSYDESIHLKSLQEHGSFVAKLLTPPPSQSGSSL

SEQ ID NO: 279424 - protein, 387 aa, unidentified
MRSTPPKTSAQPRATIHGDIAMLCVSLELSRSTWVVTSLAPGSDKMSKHRIEGGDHCGLLDLLRRLQSKAAKRMGAPVRIVTIQEAGFDGFWIDRLLQAESIESHVVDAASVAVPRRRRRAKTDKIDGELLLRTLLAWLRGEPRVCSMVVPPSPDEEDRRWLSRERDILVEERTAHTNRIAGLLATQGIRGYRPLRRDCRARLEELETGDGRPLPQRLKAEIGRELDRLELVKQQIAEVEAARDALLVAEDNSPGKLLLQLRSIGPAFASVLWLEGLYRSFDNRRQLAAFSGLAPSPWRSGRINHEQGIAKSGNAKLRSTMIELSWLWLQYQPNSELSRWFRERVRGNNTRRYRKITIVAMARKLLIALWRYVTEGVVPQGAVMKAA

SEQ ID NO: 279425 - protein, 383 aa, unidentified
MSSMTADQDHIIYVAIELSRSTWLVAARLPRAEKPQLHRIAGGDTTALLTLLSSLRARMTSKLGAAIGVVCCFEAGRDGFWLHRLLTEHDITAYVLEPTSILVNRRARRAKTDRLDAEGMLRVLMAYLRGDRKACSMVRVPTPDEEDAKRPHREREHLVKERLRIENRIEALLFTQGLRERPSLRSWERDLAALRTGDGREMPRQLKAELDRLRRQLVFTLELIREVEAERDMAAEAEPREQAHRQIAALCRIRGIGSNFAAVLTREVFYRSFDNRRQLASYVGITPMPYQSGNIDRDRRIGRAGNPRARTTMIQLAWLWLRYQPGSDLAEWFREHVGALSGRTRRIAIVAMARKLLIALWRYVETGVVPAGVEIGTPSAVAA

SEQ ID NO: 279426 - protein, 365 aa, unidentified
MTGVGSRYRPRRDWKPAAALALKPRMSLVLQSLLPFPDSCQGRNPHQQGRGTKMVEHCYGGIDVSKDRLDVQVLPQGRCFSVDNTAAGWCQLIDRLRGLSIAALGIEPSGGYERGIIRALLAAGLSVRRINPNKLRQFARARGVLAKNDRLDARLIAEYVAIMPTRVVHRDPAAERLAAVVTMRRQLSDEHVAVENQSTHIEDAMLRRLNKRRLARLKADILLLDKRMAEIVASNANLARRYDLLTSMRGVGPTLAFTLIALLPELGQMSRKQIAALVGLAPYDFDSGRLKGHRCIYGGRMPVRNVLYMAALSAARYNPALKTLHNRLATANKKPKVVIVAVMRKMITILNAMLRDNIAWQPKSA

SEQ ID NO: 279427 - protein, 412 aa, unidentified
MEILYAICCGLDVHKDTVTACLRRREADGQVAQELRTYGTTTAELLALLDWLVEAGCTHVAMESTGVYWKPVFNLLEGSFEQLLVVNAQHVKALPGRKTDLKDAEWLAQLLQHGLLRGSFIPPAPIRELREYTRYRKQSIRGRADEANRIKKLLEVANLKLGSVATDVLGVSGRAMLAALVRGESEPTALADLAKGRLRKKRPQLIAALTGRITPAQRALLGQQLAHVEFLDRAIAALDAQIAALLRPYQEDAARLCTVTGIEQRTAEVILAELGVDMAVFPSDHHCASWAGLCPGNNESAGKHHSGKTRKGSPWLRAALIAAAWAASRTKSYLGAQYHRLARRRGKKKALVAVAHTILIIAYHILKDGTTYQDLGHGYFDTRDTARLQRRLIARLEALGLRVTVEPIPQAA

SEQ ID NO: 279428 - protein, 352 aa, unidentified
MGKIIRIGMDTSKSVFQLHAVDESEQPVLRRKLRRRDVVSFFAQLAPTRIGLEACGGSHYWARELCALGHTVMLIPPQYVKPYVDRGKNDAADAEAICEAMSRPKVARRAVAAKTVEQQAGQMLIGVRDGLLKRRTQVSNTIRGYASEFGLVAAKGLAQLEPLLKRIGEDRTLPDLARDIFAMLAGQYRHVSAQIAEIEVRLMAFHRASARSRRLAEVPTIGPVIAAALAAKVADPKVFRSGRDFAAWLGLTPKNHSTAGKTRLGVITRAGDEMLRSLLVCGATAVIQQVKRRKSGPTWLVALIERKPPKLAAVALANKTARIAWKMMITDEPYDPGRHGAPHVAALRAEAA

SEQ ID NO: 279429 - protein, 315 aa, unidentified
MSQITVEKFVGIDVSKDTLDVFIEPDGEMLHVTNDDKGIAQVVKHLTIVAPALIVMEATGGLEIRLASELAAKSLPVAVINPRQARDFAKATGQLAKTDQVDASVLAAFARAIRPATRAIKDADTRDLDDLVTRRRQLIGMRVQETLRLGTASKIQRKSLAAHIAWLDKRITDLDDDLSKRLRESQVWRTKDDLLQSIPGVGTVTSLTLLAKCPELGHLDRREIAALVGVAPLANDSGKHRGKRFVWGGRADVRAVLYMATVSAMTHNPAIKAFAQRLKQAGKLPKVVIVACMRKLLTIMNAMIKYDAPWNPKAA

SEQ ID NO: 279430 - protein, 330 aa, unidentified
MFQLGIDVSKKTLDLCLLREGVKGRIKTRKLKNNRDAANTVIAWLHKHNCAPEITHVVMESTGVYHEELSYGLYNLGIKVSLANPHRSREFARGMDIITKNDKVDAYVLACYGALKNPEAWLPPTEEIRHLSSLLRRRDTLVTDTTREKNRLEKANSTHTPSDVIESIERMLCYLNEEKIKLSFAIEQYIELHPDLKKDLALLTSIKSVGIQLGVNMLVILRSRKFRSAEQAAAFLGVIPVEKRSGTSVRGEAKLSKIGPPEIRAKLYLAALCGIRYNPTMKTLYERLCQRGKAKMCAIGALMRKLVHWCYGVLHTQLPFDAEYLSSETE

SEQ ID NO: 279431 - protein, 432 aa, unidentified
MSGRETVQPELKFVAFVGIDWADQKHVWCLQEVGSTKRESGELEHKPETVEAWVGELCRRFGRGPIAVAVEQVKGALVCMLRKYECLHLFPVPSTMSAAMRKALYPSGAKDDPRDADLLLDLLVQHRDRLRHLQPDNEETRRVQNLVEERRKLVEEKTAQVNRLIGYLKIYFPQMLEWFGRLDTKLVCDFLECWPSLEELKKVPPAELRKFFGQRQGRHHELTEDRIQGIVRAMPAIQDQAVIEAKVAMVQVIAKLLRSLLEGIANLDHKIAGAAGEHPDFFIFESLPGAGAALAPRLLAALGSQRERYGSADEVQKHSGIAPVTETSGKKKWVHFRWACAKFLRQSFHEWAGHSIAQSVWARAYYQQQRQRGNDHHAAVRALAFKWIRIVFRCWQDRVVYDENKYLAALARRGSPLSAVTTATPLCNPCES

SEQ ID NO: 279432 - protein, 454 aa, unidentified
MTVPTPARLRIDHLPAVFPNAAGLDIGSAEIVAALPPDRDVTPVLTFPTFTADLHQLVTWLLDHHIDTVAMESTGVYWIPIYEMLEAAAIRVYLVNARHFKIVPGRKSDYNDAQWLQKLHALGLLTGSFRPDDEMCVLRSFLRHRAQLIEHRSPHILHMQKALKLMNIQLPEVLSDMTGVTGMAILRAIVAGERRGDVLAKLRRPGCRRTEHDIIQALTGTWRDEHVFVLAQSLDLYDFYTTKITECDHRLDQQFSSMKPRFEIEGEPPAAPTSRTKKNSNSKNQPTYNVRAHLVRLLGIDLVDIIGVSESVAQTVISEIGTDMSRFPTSKHFCSWLGLAPHNDISGGKVLRSRVMKVHNRAGQALRQAAQSCSRSRSLFGAFYRARSARSSSEEAVVATAHKIARVIYHMLTCHEAFKPESIQAFDQQRQARDLKHLQKRAKALGFILQPLTP

SEQ ID NO: 279433 - protein, 380 aa, unidentified
MDNSMGTVRKNDQETNFIGMDLHLDNVVVVVAQNEIKDNTVRSKTVLSKKFKTVGQPNIDEHFKVLETYCQDKPHMAVVESTYNWYWLADEFEKRNWNLRLADPSTVSKAGFKYSDDYTDASYLAECVRNGSIRSTAIMPKDDRAVRDLARYRMTLVEDRGRLKTILVNMTTNHLSIKLNADKLLKEIDEAVEKAASASDEGAADEVLSDYYDNRQVRTKMRSLLRRIRFLTNEVEALDEELTELIKPNVYATSLQSIKGCGYVTSMLIGVEIGDIGRFRTHKDFVSYCRLAPTSKLSNGKSKGLGNAKNGNAYLSWALTELATFVVRYNPEAKRVYDRYFNRSRLRVKAIRSVAAKIARGIFMMLKNGEVFDMKRCFGG

SEQ ID NO: 279434 - protein, 460 aa, unidentified
MKDHGSAQASSADGRCPSEPLRIVHPHAAGIDIGSQKHYVAVPPDCDPEPVRCFGCLTPDLHAMAQWLKACGITTVAMESTGVYWIPVMQVLEEYAIEVYLVDARQAKNMPGRKTDVKDCQWLQQLHVHGMLTRAFRPADAICVLRSYWRHRKDLVEMASMQIQLMQKSLEQMNLQLHKVLSDITGVTGMKIVRAILAGERNPVVLAQMRHPLVKSSEDTISKALTGDWRAEHVFTLRQAVELYDVYQQKIQACDRQIESYMQSLDTRGDPKDLEPRGRGTRRKNQVHFDLRGQLHRVSGADLTSIDGIDAMTAQTVISECGIDMSRFATEKHYSSWLGLCPNHQITGGKIRRRRTRKVRNRAAQALRVAAQSLHKSKTALGAYYRRMRGRLGPAKAITATAHKLAILIYRMLKYGMKYVDQGQQAYENQYQQRTLQAIIKRAKQMGYAMVDLRSGEVVS

SEQ ID NO: 279435 - protein, 333 aa, unidentified
MNKITLIGLDTAKQTFHLVGVDAHGHYVWRKQASRRRLLSTLAQIECCEVVLEACGASHHWARSIQALGHAVRLIAPQHVKPYRRGQKNDYRDAEAIISAALSPGMRFVGVKRVEQQAEQALHRVRSRLMSHRNAAANALRGLLGEYGVVFGRGLKPLRDGARCFAETEEAHILGLVDLVNDVLEEIGVLQARMDHYEHLIEQRVEADETSRRLREELRGVGKLSASALRVKVADVRGYGNGRHFAAYLGLAPGHSGTGGQVHIGHLKRGHDRYLRQLLIHGARSALCHLGDKQDPQSRWLRGLLERRGFNIASVALAHKNARQAWAIMAREQ

SEQ ID NO: 279436 - protein, 350 aa, unidentified
MKKFIIGIDFSKETVDASIVQKEQPETLIAYKKFRNNLKGVDGLIAWAKSKVAQDGEIIFCGENTGTYSTLFSDELTDRGFIIWIEHGMNIVRGMGDVRGKDDKTDSLRIASYAARFYDKMKPYVRPKDETRVLKTLLAKRDRLKSFLKAEITNTKENPLMLQDSNIASSINEFFKRLEESLRKELKELERMILDVVMSSSEYAKNFNILTSMKGIGLINAVALIVYTDNFTKFNFNHRKIATYWGVVPFKNESGTSVRRGTHVSPKCNSWLKALLTEATLCAIRYNSRIKAYHDRLMVRGKAIGIVLNNCKNKMLKILVAMVRDSKIYSDMDVSKDPHTTTTTSSIVVC

SEQ ID NO: 279437 - protein, 325 aa, unidentified
MIVRTTASGDPLETVRISNDVDSLIKVMARAGVSPEVVLEATYGWYWAADTLADLGAVVHLAHPLGVKGFSYRRVKNDVRDATDLADLLRMGRLPEAWIAPPVTRELRELVRHRAKLVAIRSGCKCEIHAVLAKCGIQVLMSDLFADAGTALLERLDAPAPYLARVGSLRRLIDDLDVEIDLFARLIRGRLAADDGYRAVQTIPGIGPTLGAVFVAEIGDVHRFPGPTQLASWAGLTPKHHESDTHVHRGRITKQGSRLVRWAAIESVQALGPGTGAGRLKHRVGDRRGRNIGKTAAARQQLGYVYYALRDGHVRSLTRRPRVAA

SEQ ID NO: 279438 - protein, 418 aa, unidentified
MTRRDDSRIIRIVHPICCGLDVHKESVSACIIFPDDKGEEQYDVKVFGTFTDDLMRLRDWLAAHNCPVVAMESTGVYWRPVHNVLEDSVDVVLANARDMHNVSGRKTDIGDSKWIAGLLRHGLLKSSFIPPQDVRQWRDLTRLRKKYVHTVGDYRKRTHKLFESANIKIDSVVSDLFGVTGRNLMQLLVADRKLTLSDIQTCVRGKLKGKEAELFRSIQGFFTDHHRFVLKMILETIATLEAQIEALDLQIRCAMKEHEALLDRMKQAPGIADVASREILAEIGPTLDSFPKDTSLVAWCGLCPGNNESAGKRKSGRSPVRKHHLKTIMTEVAWAAIKKKDSYFKDKYYRLKARRGAKRAIVAIAHRILLGIYHVIKDGADFRDLGGDYLTLRNKSQKVSHLRKQALSLGFDLVPQAV

SEQ ID NO: 279439 - protein, 365 aa, unidentified
MQKITTVRRGARNVFKGQLTIGLDLGDRSSSYCVLDEAGEILLEQKLPTTPEAMKQTFGRMLRSRIAMETGTHSPWVSRVLTELGHEVIVAHAQKVRLIVKSRRKDDRLDARTLARLARIDPELLTPVQHRSAQAQLHLAEIRARAGLVSARTALVNAARGLVKSYGERLRKCGTQQVRREITVGLSPGLRGALEPLLREVESLNERIQEYDRRIEKMAKEMYPETALLKQVKGVGDLIALAYVLTLEDPHRFRKSRDAGCFVGLQPGRRNSGESEPQMHISKEGDEYLRTLLVQGAHYILGPFGEDSDLRRWGKKLATRGGKNAKKRAVVAVARKLAVLLHRLWVSGEVYEPLRNSQKAMTVAA

SEQ ID NO: 279440 - protein, 335 aa, unidentified
MDTYSYHIGVDVSKSKLDFVILERLSLKVLKHLQVENAEEGISKIFKYLEQNEICIENALFCSENTGIYTFPLTLGLALRKADLWIIHAMEIKLSKGLVRGKNDKTDAREIALYSIRHFEKLRLYRAPVQDIQKLRLLFAEREKTSKALLILNSTKENKDFSSATVFHPIEMLNLRIVNQLKIHRTEIELKMLETIDRNCALSKHYKLITSVPGIGKMTAIYLVITTGNFSQFENWRKYACYAGVAPFEHESGSSVKRNARIHRFGNRKIKTMLRMCALTCLRHDTQLREYYKKKKNEGKHHSLILNNIKCKLISRVFAVVKRNTPLVDVNGFAN

SEQ ID NO: 279441 - protein, 407 aa, unidentified
MRIKLSGSKQLPNIFKGCDSMIYVGIDIAKQKHFAAAMTADGEVLIPPFGFTNDAEGFKLFLSKIKSFKKENTLIGLESTAHYAENLICHLFDLGYHISVINPIQTSTLRKTNIRKTKTDKVDCLLIIKSMIVNKPRLYSKSDIDSLRLKSLCRFREKIKKAKAKLKIQLVAYVDIIFPELQYFFKSGIHTNTCYQLLKKHSSPDDIAALHLTYLANLLQKASHGHFGKEEAIALKGLAKSSVGTGNTAVSIQITQSIAQIELLEQQLADLDRAIESIMLEMDSVILTIPGIGFLNGAMILGEIGNISRFSNPSKLLAYAGLDPTVNQSGKFNAKSTKMSKRGSKLLRYALINAAWNVSLNNKTFNDYFNLKRSQGNNHYAALGHVAHKLVRIIFKLLKDNVTFNLD

SEQ ID NO: 279442 - protein, 398 aa, unidentified
MFTIWAGVDIGKEHHHCVALDARGERRLSRRVGNDEPELLDLIRDVLALADPGGVLWAVDTNHGGAALLIGLLLDQGQPMVYLTGLTVHRAAAGYRGQSKTDAKDAHVIADQARMRQDLGLLRPGDEVAVDLRILTSRRLDLVNDRTRQINRLREQLLGIFPALERALTRKGRGLVVLLTGYQTPGAIRRTGVRRLESWLKNRGIKSPYSLARTAVEAAEAQHTALPGEKLAADMVARIANGVLALDAEIAELDALIEARFHDHPYAKVIETLPGMGPRLGAEFLAATGGDLTAFGTSDRLAGFAGLAPVPRDSGRVRGNLHRPRRYHRGLLRACYLAAMASLRCCPVSQHYYQRKRREGKSHIQAVLALARRRLNVLWAMIRDNTSYEIRPPMPAAA

SEQ ID NO: 279443 - protein, 320 aa, unidentified
MRNAVGLDISKLTFDASAMVGNAEYSAKFDNDSKGLNQFSDRLKSLGCQNLHICMEATGNYYEEVADYFAQYYSVYVVNPLKISKYAESRFKRTKTDKQDAKLIAQYCRSAQESELVKRQKPTDEQYRLSRMTAAYAQIKSECAAMKNRYHAAKDEEAAKAYAEIIKAMNEQLEVLKEKIKEQTEKPKCKEGVKCLETIPGIGRMTAAVLFHHLTSSKFETSNKFAAFAGLSPQQKESGTSVRGKGKLTKFGNRKLRAVLFMPAMVAYRIRAFPDFIKRLEEKKKPKKVIIAALMRKLAVIAYHVHKKGGDYDPSRYKSA

SEQ ID NO: 279444 - protein, 416 aa, unidentified
MALARWVGRAIGLDVHRDFCVVAICEDGQVRSGGRVPSTPEGLATLAESLLASDRVALEVTGSCWEVARTLEPHVERVVVVSPDDTGITQARAKTDRLDARALATLLWRGELEAVWMPDERCRVLRRRLARRQQLIWARTRSKNEIHAVLARRLQGKPPCSDLFGVKGRVWLDGLTLPVEERESVDAGIRHIAFLDAEVAAVDRLIARQALDWPEIRRLMTVTGVNVICAASFMAAIGHANRFMTARKLVAYLGLDPKVRQSGDTPARSGRISKRGSASARWALVEAAWSVARQPGPLRAFYERTKARRGHGKAIVATARKLSILFWCLLTRGQDYAHQQPSLTRKKLRQLELTAGAARNTRASAGIASTRELMCTAERELAEQAERSYRRMVTDQKAGAPARKVGASATPERASI

SEQ ID NO: 279445 - protein, 418 aa, unidentified
MTKFSSNYSVYVGIDWANDKHDVCVQVANVSTRKFKVIKHSANEINDWITNLHKQYKGQIAVAVELSKGPIVYALQKFDFVTIHPINPTMLAQYRKAFSPSGAKDDPTDAELALDLMLNYPNKIKALKMESESVRKLMYLVEQRRRLVEDRRRFSNRLINTLKQYYPHLLDWFSHRGSGMFCDFITRWPNLQKLKRARADTLRKFFNSYRGRSSTRTEQRIQSISGAEPLTLDKAVIESHQLLAVALANQMLVAVEAIKVFDSEISKLFDTLPDAELYKSLPGTGPCLAPRLLVAMGENRSRFNSASEVQMYSGIAPVTERSGQKSWIHWRYQCPKFNRQSFIEWAAKSVHQYYWAGLYYQQQRGKGNTHQSSVRSLAFKWIRVLYRCWKTKEPYDESKYLKALRDRNSPLLFKEKAC

SEQ ID NO: 279446 - protein, 352 aa, unidentified
MDRYIGLDAHALSCTLAVIGPSGKRLKSVVVETNGQALVEAIRGISGRRHVCLEEGTQSAWLHELLSPHVEEVVVTVPPESRGSKDDERDAWKRADELRAGAIQTRVYKGPVRLAALRNAVRAHIFAVRDVVRVKNRLKSVFLSRGISIDSDVYDCERRPKLVTQLPTAHRQLAEWLGRELDTLEPLREEAEEWLSKESKSHPIIRKLNTAPGMGPLRTPVVVAVVADPHRFRTSRQFWSYCGLGIVMRSSSDWVRDKKGQWLRAEVRQTRGLTRKRNALLKAIFKGAATTVIGRLPESPLHMHYQRMLAAGTKPNLAKLTLARQIAAIVLSMWKHGEAYDPKRQAVVTDKT

SEQ ID NO: 279447 - protein, 382 aa, unidentified
MTGTEPQAWGTGLMDNITFVGLDVHKATVCIAVAEGGRGGDVRQLGVFENRPEILSKVVSRLSKGGRRLSFCYEAGPCGYGLHRLLTGYGHECVVVAPSLIPMKAGDRVKTDRRDALMLAKLHRAGELTAIWIPDAGHEAMRDLVRARATAVRVLVKARQHLQGFLLRHERIYRGARAWTLAYRRWLSTVHFEHPAQQIVLQDYIHAVQEAETRRERLTQQIEELLPNWSMAPVVAALQSMRGVALIVAVTVVAEVGDFRRFANPRQLMAYLGLVPSEHSSGRSVRRGGITKAGNALARRVLIEGAWTYRMSARVSRKLYDRLEPLPAAVRDIAWKAQLRLCARYRRLAAIGKPKVVVTTAIAREMVGFIWAIARLAQPALV

SEQ ID NO: 279448 - protein, 320 aa, unidentified
MAKIICGVDISSKVLDVFLNQSFHRFPNTVAGIADLLVLCQQHQVDLVAVEASGGYERRLYLQLWAAGLPVAICNARAVRDFAKSMGRLEKTDTLDAAVIAEYACAKKKLVAHPPQPGEHQPLRALVARLRQLTEVRASQLQQRLLVTDDEALATFTRLIGFLNSEIRQLEQRITQLIDADPLWQNLDRAFRSIKGVADRTVACLMAELPEIGTLSHKAVSKLVGLAPLADDSGKRRGPRSIRGGRSTVRHLLFIVASVVRRYHPDFAEFSQRLAAKGKAKKVILVALAHKLLIRLNAKARDARQLMEMASPALTTTLSS

SEQ ID NO: 279449 - protein, 423 aa, unidentified
MMKLKYSICCGLDVHKNVIVATIVTTNKDGISEYLQKSFSTINSDIQRFHNWLIENNCYHVCMESTGKYWIPIFNYLENDIDICLTHPKYVKAIKGKKTDKKDSKWITDLYKFDLVRCSFIPPKDFRQLRELARYRFKLVCMKSSEKNRIQNCMTISNVGIASVLSDPFGKTATEIMSYLLEHTADSMDEKAVRKLIKKGAKAKSDEIIEAIKGYNIETDQAKKLELAQGHLEYLDDMITQTEVELYVRIKPYYEFVEFVSTMPGMTELSSTIVLAETGVDMDIFDDAKHLCSWCGLSPANNESAGKKKSVRIAKAGDYLKPMMVQCALAAIKSKKQPYFAIKYGRIKKRRGHKKAIIAIARMMMVCIYHMVSEKKPFTPTDYEELMNPQNHVERVVLNENNVFAYLESLGYDSSKLVKRNDN

SEQ ID NO: 279450 - protein, 385 aa, unidentified
MVSLISSCGEVLISPYEINHNLNDFKNLDERIKKLNVFNDTAVIMESTGIYQMPVKRFFKENNYNLYVINPIYYKMYKQNLRKTKTDKEDCLKLAELFFMKDFKEYIEQDQFYLNLNAISRKYNTLIEAQTRLKNEFRNGVYEVFPEYEKLFKGSLIFSNTSLEFIKKYPHADIISNTRIDALANTMAKLNGRHENYYLKKAKLIKEYASNSYPSVSKDDEKVNNLIITIELLLSYIKQIENLKSKLISNAKRSYMFNLINSIDGIGEFTTSLIIAELRDISRFDNIKQLTAYCGLDPSIKQSGSSINIGGPISKSGNRYIRRILFVTVQNIIPIASRNFPDNDILLYYRKKRNEGKHHYVAVVDSTTKLLRKIFALVKQYQNNI

SEQ ID NO: 279451 - protein, 338 aa, unidentified
MKLYAGIDLHSSNNYISIIDEEDQRLFQKRLPNNLEIILPALEPFKESLEGVVVESTFNWYWLVDGLQDHGYKVHLANPAAIKQYEGMKVIDDKYDAFWLAHLKRLDLLPEGYIYPKEERQVRDLLRRRLLFVRHRTSHILSLKSSISRNLGVSMSVREIKKLECKDTEKLFDDAYLALAAKNSISLIRFLTGRVKEIEKEVLFHVKVRPEFRSLLTMPGIGKILGLTIMLEVGDIKRFPTVGDYSSYCRCVKSERSSNKKKKGEGNRKNGNKYLAWAYVEAANFAVRSYPEFQSFYNRKKSKRNGVVAIKALSNKLARGSYYVMRDKVPYEASKMFR

SEQ ID NO: 279452 - protein, 339 aa, unidentified
MYYVGVDVHKRQSSVEILDQNGAPYKRFEVRGSWTEVIGKIEKETPRPYAVAYEASCGYGYLHDALARRAARVEVAHPGKVRLIFNSKHKFDRIDAAKLGKLLFLGAIPQVHVPSAAVRAGRALVEFRQQLVARRVGAKNRLKALLRGLGIESPIKRLWTQAGIIWLKELALDPLDGFRRDVLVVELRRYHREIRRVDKKLMAMMDQDSRVDLLRTIPGVGFHTAAAFIIYIDQIERFSNVRQVGNYFGIVPRQDTSAGKTRLGHITKDGPATVRKLVCEASWMAIRKSPSLRQRYERIIKHSVDRKKIAITAVGHHLLRVMAAMLRTGEMWRETPVTS

SEQ ID NO: 279453 - protein, 340 aa, unidentified
MNVTTVGIDLAKNVFSVHGVGRDGNVLLRRSVGRADLLPMFAQMPPCLIGMEACSGAHHFARELRRLGHDARIMAPRFVAPYRKSGKNDGNDAEAICEAVARPNMRFVAVKSVEQQAILALHRVRKEVSDQRTALINQLRGMLCEFGMVLPRGRYSFRHKLPPVLEDTGNGIPELARRLFREVNERIGALDAQILAYDREIEALARHSEAAQRLMEMPGVGSITATAIVASVADMKVFKSGREFAAWLGLVPRQYSTGGKVRLGRITKQGDVYLRTLLIHGTRAVLAALGTKNDRLSLWIRSLIERRGYRKATVALAAKHARMIWAILAKGDAYRRPAAV

SEQ ID NO: 279454 - protein, 355 aa, unidentified
MKRTVYVGLDVHQSTIVAVVRDDTGRVIMRTVLATGEAALLAFLRGLGGDVDVALEAGTQAQWLHDLLAPVVRRVVVADRRGHPRHGSKGDFTDAAQLAEELRGGTLRAVYHGRADRAFVRDLARAYLTLLADSTRVMLRLKALFRARGITTRGKAVYQPAQRAAWLAQLPTPGARFRADVLYAQLETLREQRPAVQRAFLAEAKREPAWTLLRTIPAIGPVRAALLVATLQTPWRFRTKRQLWAYAGLAVVTRATAEYVPVDPGGAPVRRRRAPMTRGLNRNHNRQVKAVFKAAAITAARRPGPWQDGYQARVARGMRPELARLTLARTLAAVVLQVWKTGARYDPAKLTARPG

SEQ ID NO: 279455 - protein, 408 aa, unidentified
MSIVFGIDVSSRDSSVCVLQSGVTREYKVTNDTIGFKTLLIDLKEYAEHPQIILEATGIYSRRITRFLDEYDYDYVLLNPLKAKKEINQGLRRNKTDRNDAYHLALAQDRNQHQPNRKEPEAYHQLQSLSRAYEELTHDIVSSKNRLHKYLQLTFPELETIFNNSRGVNYWYLVELFPHCQDVRNLDVSTIAKQIKDFKGYGINRAQKLAIKLKHLADLAYPAVDQDDPERDEVVYYANRLLRLTADRERRSEAMIKLAKTLPNRDLEILMSIPGIAEITAVRILAELGDIRRFSNPNKINAFVGIDPGRYQSGEKDSSLRISKHGNAVARKILYRAIGQIDLAAKTSPCHIADYYERKKQFSQTKGFKKIAIASIHKLLRTVYILIITDQMYDYNVANNNQKDFCRN

SEQ ID NO: 279456 - protein, 400 aa, unidentified
MLSIGIDVSKGKSTVCGMKPGGEIVYTPFEVQHTREGMSELVSLLRSSGEEVRAVLESTGSYHCPVVAALLENGIFVSVVNSLRMKRFCSQSIRKVKTDRIDAMQIALYGLAYWQELQPTKLPEDTYRELQLLARQYYQMTSLLIKAKVDFNAICDQVLPGMQELMNDHAGRHKLSDFVLRYRHTTHILEMGETRFRKDYCKWAEKKGYRNCERMAALIFATAQNGIPVLPNAPSTQIVITEAIRVLHTVEASRDAILTQMQALAKTLPEYSLVREMPCIGDTLAPRLIAEIGDVRRFHSKRALIAYAGIDAPPYQSGKFCANNRHISKRGNRYLRKTGYEVMQSYVMHKPANDPIFTFIEKKRGEGKSGKLAMVAGLNKFLRVYYGKVTELYRSLPAIE

SEQ ID NO: 279457 - protein, 404 aa, unidentified
MKTYILRDSQTVEPQKSVRRPRPQTTSPAPAQGPLLFVGLDVHNDSIAVSLAPSDSTEVRRYGIIGGEHDDVLKLAKKLQAAHPESTLKFCYEAGPRGFALCRCLCAHGLDCILVCPSKVPRKPGDRVKTDRRDADQLARLYRAGELTGIYVPQPEDEAMRDLIRARFQVGKAQHRARQQLKMYLLRHNIRYGGKSSWTAAHLRYLSQIKMPFPVQQIVFQEMLEVITEATERLARYDREIERAVPNWRWEPVVRALMSLRGMALLHAATLVAELGDFRRFEHPSQLMAYLGLVPSEHTTGNDRQQGGITKMGNGPARRALVEAAWQYVAPARISPPLRKRQEGLPKALTDIAWKAQCRLHHRYQHLTRVGKKKSQVAVTALARELSGFVWAIGCRVEPRVVIP

SEQ ID NO: 279458 - protein, 355 aa, unidentified
MYGLKHQKEKRSMDHFAGLDVSVKETSVCIVDDTGRIVREVKVASEPEALLPVLTSDTYHFKRIGLEAGPLSQWLFSALAEAGLPVICVETRHMRAVLKAQINKTDRNDARGMAQMMRVGLYRPVHVKTLRSQKLRMLLTHRKLLQSKAIAIDNDLRGTLRNFGLKVGVVGTVKFEVRIKELVENLPDLAVLVEPLLIVRRVLREQLGILHRRLLTIVRDDDVCRRLMTVPGVGPVVALTYRATVDVPARFRHSKSVGAVFGLTCSKYQSGEINRTGAISKCGDEMMRMMLYEAAQVMLTRTNKWSWLKAWAMKIARHRGMKKAIVALARRLAVIMHRIWVDGTEFQWTREAAVA

SEQ ID NO: 279459 - protein, 343 aa, unidentified
MKQEMHVLGIDIAKHVFHAVGMDETGKVVFRKRVSRHDLMPFIAKLPLVLIGIEACGGAHDWARRFRAYGHEVKLMAPQFVKPYVKSNKNDSRDAEAIAEAVTRPTMRFVPAKDVDQQDIQALHRVRERLISERTALVNEVHGLMHEYGIVMPQGVSKFRQAVVGKLESEKDKLTPLSQEMFWKLVEEFAALEEQLAYYQKKLEALATTHPECQRLMTIPGIGPLSATALVAAVSDASAFKNGRQFAAWLGLVPRQHSTGGKERLLGISKRGDSYLRKLLVHGARTTIRWVGRKTDRRSQWIRQLVERRGKNRTAGAVANKNARIVWALLTSHQDYQLATGEG

SEQ ID NO: 279460 - protein, 350 aa, unidentified
MTMVGGLDVHRQQITFDYVDDDGLVHWGQIRPATRKTLRDWLAEHCPDGDADFALEGCTGWRYVCEELAAAGVVAHLGDPAEVAALRGRKKRAKTDRADARLMRTLLLQGRFPESWIPPAHVLEIRTLGRLYCTLMDERRAWQQRIHAQLFHQGCPPIKALLSAAGRQALASAELSPIGRQYVDAALRRIDDLTIEIDPLRTQLANFARRQAGCQALQHHYGIGWLCAAIIWAEIGDARRFSSSDQLVRFAGVDVTVYSSDGKSSPGHLSRQGSPELRWAAFEAGKSAARRGSPDYGYYRKLAAKHDGHNGKNPTLAVERKILRRCYHTLRGLGDAALALPVPQRQEAAA

SEQ ID NO: 279461 - protein, 428 aa, unidentified
MKNRNNQKLEAITPKTLIIGVDIAKQTQWARFVNYRGLEIGKALKFQNDRNGFETILASIDAICKNKRLEDVIVGMEPTGHYWKPLANYLIVHGVTVVMVNPYHTKRAKELDDNSQTKNDKKDALTIARLVRDGRYYKVYMPQDIFAELRVLANSRISLMKRYNAIKNTITAVMDEYFPEIKTVFKNPLKGKASLQILKSCPFPSLIIELGVDGVLAEIKKAVKKTVGRKKAEQLVETAKKSIGVGYGIVSAKLKLELMIEELELLTKQLAQIETAMDLALTDTGYGDIILSIPGIGVVTAASFLGEIGDPMRFDNPRQISKMAGYNLVENSSGQSKSGTGISKRGRKSLRSILYQMAIIMVAVNAEMKKLYEYLKTRQNNPLKKKQALVVISKKIITVIYNLVKKHTEYKAELVLGEFRKNQIKQAA

SEQ ID NO: 279462 - protein, 453 aa, unidentified
MQHQPRRRAPKPRHSPAALERLHPHAAGIDCGAAEHFVAVPPDRDATPVQSFPTFTGDLHRLADWLTACRITHVAMEATGVYWIPIFEILDARGFQVILVNARHVKNLPGRKSDVSDCQWIQYLHSVGLLKASFRPPDQICVVRSLWRHRESLVQMAAEHTMHMQKALTQMNLQLHHVLSDITGLSGMRILDAILSGERDPVKLAALCHGRVRSPRETVAKSLEGDYRAEHLFALRQSLVGFHFYQQLIRAVDQELEGAMRQLPRAEGAPEQMPPRTKKCFYQKAGNEPAFDLKAELFRISGVDLTDVPGISAITAHTILIEVGPDLSRFRNASAFASWLGLCPDKKVSGGKVLYTGSRKVKNRAAIALRLGAQCLYHAKNYLGEYYRKMKWRLGAPQALTATAHKLARIVFHMLLTKEPYNESVLVKWDRQANMRAELRLRTQAAAEPRTRP

SEQ ID NO: 279463 - protein, 400 aa, unidentified
MISVGIDVSKGKSTVCILKPYGEIVSKPFNITHTQKDLSELSSMLFRLNDEVKIVMEATGIYHLPVLTYLQEKGFFVSVVNPYLMKSYRNESLRKAKTDKIDSRIIANYGIDHWFKMKEFQTSGEIYEELKLLGQQYRHYMKLHLLSLAELTHLLDLTMPGIKNLLASWNETNRKDKRSDFVERFWHYDVITSMSEQEFTEEYILWAKEKKYVPSQEKAKVIYTLAQESIPTLPSETSSIKMLVTEAVRVLKEVDATLGLILSRMQEIAKTLPEYSVVREMGGVGNTLAPKLIAEIGDVRRFRNGKALVAFAGIDPPPYESGQFVGCNRKISKRGSASLRKVGYETMRSLKMRSRPEDPVYRYVVKKESEGKSKKSAKIAGLNKFLRIYYARVTELYKNI

SEQ ID NO: 279464 - protein, 370 aa, unidentified
MKYFINQQRNESVSNITVLGIDLAKSVFQLHGNDRHGKCILTKRLPRSKLLDSVAKLPTCTIAMEACGSAHYWSRQFEKFGHTVKLISPQFVKPYVKANKNDSADAQAIAEAAVRPEMRFVPKKSIQQQDTLLIHRAREQYIKSRTNYANQLRGHLNEYGIIIPKGIHHIRNQINFILEDAENELTPIARGLISELFDMFKLLDQKVILLEKKIDEHTKQDERCKRLMKIEGIGPITASAFVATVGDVSAFKNGRELAAYFGLVPKHVASGNKVKMLGISKRGDRYLRKLLVHGGRSALLASKNKHDYRSQWANKLKDRSCHNVAAVAIANKNTRIAWAVLAHQEEYKHFDMQSRYPQGPQLIEPLVQAQ

SEQ ID NO: 279465 - protein, 369 aa, unidentified
MDHHSVAYVGFDTSKTKHAVAVAEGGREGEVRYLGEIEAAPAAVERLLRKLARQYKSLHVCYEAGPTGYGLYRHIRALGQVCDVIAPSLVPIRPGDRVKTNRRDAVTLARLLRAGELTAVWVPDEVHEAVRDLVRAREAAARDLRHKRQQVLSFLLRHGRIFTGHRHWSRAHLRWLAGQAFRHPAQQVVFQDQVDAVADAQARLERLDRHLAELVPTWSMAPVVAACQAMRGVSFLVAVTFVAEIGDVRRFESPRQLMAFLGLVPCERSTGDTVRRGGLTLAGNRRVRRALVEGAWSYRHPARVTETIRVRLEGLPKAVREIAWKAQVRLSTRYRRLIAAGKRAPVAVAAIAREMAAFLWAIGRVVEPA

SEQ ID NO: 279466 - protein, 360 aa, unidentified
MTDNIALVDLTAKVVVGVDTHKHVHVAVAINMVGARVGSKSVDADRGGYAELVDWARSLGAVEAFGIEGTGSYGVGLASFVRRQAVRVVEVNHCDRRKRRNNGKSDTIDAETAARSVLSGIATAVPKTADGAAEMVRQIKIARDTAVKARSSAIITLKTLIVNAPGELREVLEPLTDRKLIDRCATLIAGELIDPTASVKHSLRALATRWLALSDEIGSHDAALDGITMTAVPTLREAFGIGPDSAAEMMIVAGDNPQRIRSEAAFAKLCGVCPIPASSGVTNRHRLFRGGHRQANAALYRIVIVRMRWHQPTIDYVERRTAQGLSKKDIIRCLKRFVAREIYTGLIADHKALTPRDLAA

SEQ ID NO: 279467 - protein, 461 aa, unidentified
MNDKEYSRREDFRQLKNEIRGSKEYLIVGIDIAKDRHHAFFGTATGNTLLKRLVFDNTQEGFEKLLVHAEAVKAEHTLEKTVFGLEPTADYHKPLGEFLIKGSHEVVLVSGVAVKRNRELLDGRWDKHDTKDAANVADLISQGKCLFYNYPSLPLRELRALMSLKRRLKKQEHGIKARIRNHLLAQYFPELDRYYGQSESNGLAVVRWCLNPSMLAAMDYAHFVQLVAPHTQSLAPQERLRSIWQTAGESIGCEAGDALGFEAEVMVEELEHIRALIRATDEKIEEICLQFPEYHSLLTIPGFGPDVSSKVLAAIGNPFRFTTGAQVLKMAGLDLSADRSGKGSESATPVLSKKGKADLRYALYQAALIASIRNTYFMRYYTHTLRVREKEKGIKTKMQVKLAAKLLIIVYPVKCEAYFTGAWTLMKRKEAFNTPEAYKSCVSHDRVTTLPMFGGRARVRT

SEQ ID NO: 279468 - protein, 278 aa, unidentified
MPYRISGIDVHKKMLAVVVSDVEIDGDYQFERRMFGSNPEQLRSLAAWLLEQEAEEVVMESTAQYWKPVWGALERYWKPICEKREGARRKSGTLHLAQAQSNRGRRGRKRDFVDAERLVKRLGARELVLSFVPDAEQRLWRTVTPRKYQLRCDRVRLQNQVESLLEEAHRAWIPRSRSFAEVGPSAAAFPSEKCLSSWVGACRGDGESAGVNYSNRSPKGNRHMRRLLNQAANAAARTKGSIFEIVYRRSVPSCIGASATTNGAQPSPNNRNKGARQE

SEQ ID NO: 279469 - protein, 334 aa, unidentified
MALELLAIDLGKRSFHLYGIDTNGEILSRKVSRTKLAEVVNNLAPKAIAMEACASAHYWARCWLAAGREVRLINPRFVKPFVKGSKNDAVDAEAIFEAAMRPTMRFVPVKSRDQQDLQSLHRARDRLICQRTALINHTRGLLAEYGVVLPQGPWRFTAQAPAAVAGAELSDLARSIFGELMDQLDELDRRVKKLDATMVALCRTNETCRRLAKLPGVGPVIATAIVAAVNDGRQFRSGREMAAWIGLVPRQYTTGGKPRLGGIGRRANHYLRRQLIHGARAVVSRLPQHDARRSTWLKALVARRGFNRTIVALANKTARIAWALLNRKEDYAIA

SEQ ID NO: 279470 - protein, 399 aa, unidentified
MEQVIIGVDPHKLSATIEVVDDQERLLGSGRFTTDQAGYAAMRKYAKSWPVRVWAVEGANGTGRPLSQRLLEAGERVVDVPAKLAARVRLFDTGHNRKTDARDAHSIAIVAVRTPGLRVLKVDGELEALRMLTDRREALTRRRVQTVDRLQALLAELLPGQAKRDITAGQAKAMLATVRPRDVAGKTRRRIAGEELTELIAVEAKIKKATAELKTIVLARGSQLMDIHGVGPVVAARILADVGDVARFADRNRFASWTGTAPLDASSGEQNRHRLSRAGNRRMNHMIHIAAITQIRLDTEGRAYYRRKRAEGKKPLEALRCLKRRISDAIYRQLLADAVQAEGADPGGHCGATLDSSAVDSHPHIDTSDQPLPGPADTTLRPAPHARKTSMPPALHATG

SEQ ID NO: 279471 - protein, 310 aa, unidentified
MEQTFVGIDVSKDRLDVHVRPSGEGFAVSRDGTGLEELVDRLRRLTPMLIAVEATGGFETIVAAAIGGARLPLVVVNPAQVRHFAQAVGQRAKTDPIDAEMIARFAEAVKPAARPVPDEAARLLGELVARRRQIIEMLVAERQREKRAGNMRVRKSLARHIKVLERELQELTDEIAGLIRGSPAWRETEDLLVSVPGVANKTSSSLLAEVPELGRLTRRRIASLVGVAPYTRQSGRWRGKSMIAGGRAAARGAVFMAALTASQHNPLLKAFYRRLLAAGKPKMVALIAVARKLLVILNAMIRDKKPWQYA

SEQ ID NO: 279472 - protein, 339 aa, unidentified
MFHFIGIDVSKATLQIYIPLKEENISIDNTNKSIGSLYSKLKKYYKKDYKDLVFIFEATGPYSLRLEHFCAEHNILIRLINPRQSANFAKALDNRSKSDIIDAKMLYQFHVLIRDEEIKVPIIDTLKERLGEMLSYYKLLKKQRNGFSNHLEALDAKEGSLYIRKQLSKEIKQLKVKEEDILKDMEQLIKSDEYLNERFTNLQTFKGIGSISAIALIHLFISYPQANRQEITALSGLDAIEISSGTSLQKPSRISKRGNTIYRSILFMPVLSTVIHNPYMKAFYDRLKANGKHSTLAQIAVMRKTMLIAHSLFKNNCKFDNDLYEKRVQWNPQDHDENT

SEQ ID NO: 279473 - protein, 334 aa, unidentified
MQNVALIGIDLGKHSFHIHCQDKSGNALLRKRFTRTKLMQFLVTCPSSVVVMEACAGAHFMARRISDIGHDVKLISPQFVRPFVKSNKNDFIDAEAICEAASRPSMRFVQPRTETQQAMRALHRVRESLIRDKVKTTNQIHAFLLEFGISLPTGDAVIKRLSLVLAEHEIPEYLSRLLMKLHAHYLYLIEQITELESELNQSIKADATAQRIMTIPGVGPITASLLSSQLGDGKQFSCSRDFAASTGLVPRQYSTGGKSTLLGISKRGDKNLRRLLVQCARSFMMRLEHQQGRLAEWVRKQLDNKHSNIVACALANKLARIAWAITVLQKEYQA

SEQ ID NO: 279474 - protein, 338 aa, unidentified
MRLYCGIDLHATNCWVAILDESLKVVRESKVPNDLGAVLAILEGHRDALEGVAVESTFNWYWLVDGLMDAGHQVHLVNTWAAQQYQGLKYSDDRHDARWLAHLLALGILPEGYIYPKEERPLRDLLRRRAFLVRKKSSLLLSMHGAFECRTGRRVKANDLAQWSAADIEAALGDPTISLGITCLQEPMQAIDEQIRSLEKVVLKRARLREEFALLQTVWGAGKVLALTIMYEVGAIARFASVGDFASYCRCVKTDRLSNGKRKGAGNRKNGNPYLSWAFSEVAHYAARYYEQAQRYFQRKRAATNGIIANRALAHKLARASYHVMRDQVPFDPHRLFA

SEQ ID NO: 279475 - protein, 418 aa, unidentified
MVVECCGGLDVHKDTVVACVRRPGPNGERVSVVRTFGTVTVELLALRDWLVAEGVTLVGMESTGVYWRAPFYVLEDVVECWLLNARHMRNVPGRKSDVADAEWIAQLIEHGLVRPSFVPPPPIRELRILTRHRKTQIEERGREAQRLDKVLQDAGVKLSSVATDILGKSGRDMLAALVAGTRDPDVLAELARGRLRTKIPALRLALEGRFGPTHAVVVGEILAHLDYLDEAIGRLSERIEEVIAPFGAAVDLLVTVPGIDQRLAEAIVAEIGVDMSRFPTAGHLASWAGMCPGQHESAGKHRSGRARHGDSWLQRHLAVAAMAAARSKGTYFAAQYARLARSRGKAKARKAVGHSLLVVIWHMLATGTIYTELGDDWFERRNSPERRARRHLADLRSLGWTITQTSTGDVMLRPPHAA

SEQ ID NO: 279476 - protein, 383 aa, unidentified
MKKTEETLQEKNITKKQLLHVAFELSNSNWKLGFSDGNKMRFKSTSARNLEQLEEEIEKAKSRFRLDNDVRIVSCYEAGRDGFWLHRYLLSHGVENVVVDSSSIEVNRRKRRAKTDRIDARKLLRMLMRYHGGERKLWSVVRVPSVEAEDGRQLGRELESLNKERTRHRNRIRGLLIREGLEVKNPSGKKFLEELDSLYTWDGKQLPNDFKAQIVREYERLRMVEEQMGNLRKEREARVRSADTLSMRKVAQLRTLYGIGVTSSWDFVMEMFGWREFRNRREVGAFAGLTPTPYDSGGSQCEQGISKAGRGRVRALNIQIAWGWLRFQPQSKLSLWYMERFAGGGSRMRRIGIVAVARRLLIDLWRYLEYGLVPEGARLRPVK

SEQ ID NO: 279477 - protein, 383 aa, unidentified
MSTIIGIDVSQKSSSFCILNDGETQVIHGSFSMDRNGFDSLLKATSHFESPSFFMESTGRYHIPLAHHLLQNGHSTTIVNPVLVKQFSNANTLRKTKTDKIDAQLVARYAQQVPKERKVNQRAMDDQRLSIARRREQVAEDVAKVKTQLKADLTVAWPELLAYNVFTQTMLRLLTQFPCAQAIQEATDERLALALKSPKGRAIGLSVEKLRQLANESIGIASYGPLVANSAHNLLFLEQSLNQLTETLVALVRETQDEEMEIITSIPGIGEITAAHFLAEIGSIERFERYQNLIAFCGTDPSIYESGNILKRGRITKRGNSSLRKYLYLMATGVIRCNPFFKAYYDKKREEGFPHRKAMVALMNKIIKTLFAMLKKKEMYIVP

SEQ ID NO: 279478 - protein, 348 aa, unidentified
MAYFAGLDVSVKETAVCVVDDVGKVVCEQKVPTEPDDIVTLLFSIGEHYGRIGIEAGPLSQWLVNELTTAGLPMVCVETRHMKALLTAQQINKSDRNDARGIAQMMRVGLFKPVHVKTQLAQEQRMLLTSRKLLQRKLLDVECDLRGTLRNFGLKVGVVSTGKFEARIRELVTGSPRLALIVEPLLTVRQVLRQQFIVLDKMLLDTVRHDPVCRRLMTAPGVGVVVALTYRATIDQPQRFVHSRAVGAHVGLTPRRHQSGEIDYDGSVSKSGDTMLRTMLYEAAQSLLIHPGKWSWLKAWGLRVAQRRGMRRAIVAVARRLAVVLHRMWVDGSEFRWGKQAATATVVA

SEQ ID NO: 279479 - protein, 413 aa, unidentified
MQTLVERGCGLDVHQATVVACLLIVRKDGKVQKQMRTFGTITRELLSLREWLLSEGCTHVAMESTGVYWKPVYAILEGGAGGLEIVVANAQHVKKVPGRKTDVKDAEWIADLLCHGLLRSSFVPPKPIRELRDLTRYRRKLVESQSAERNRLLKLLETANIKLASVATDVFGVSGRLMLQALVQATATTQQMADLAKGLLRKKIPELKLALEGKFEEHHRFLLGVQLRRLQAVEEDLRLLEQRIQEKLKPYSMQLALLQEIPGVDWTLAAVIISELGVDMSVFGNVSQLASWAGICPGNNESAGKRKSSRIPKGNVYLKTALVEAANAAAKAKGTYLRDKFYRLKARRGYKRAAVAVAHKILVAIYHMFSHQVCYHELGDLYLDKLNQHHVTRNLVRRLQRLGYSVTLEKKAA

SEQ ID NO: 279480 - protein, 359 aa, unidentified
MTTEPEIRSGYLVIGVDTHKHIHVAAVMDSVAGMLATLTIATDTGGFKQLLNWAESFGKVLVFGIEGTGSYGATLTTYLPRKGHKVLEAGRPDRRMRRMNGKSDTLDADNAAPAALSGLATATAKTADGAVEMIRQLKIVHDTAVRDRTGAMVRLKAMLVHGDDQLRASTNRMTQIKLARHLAGLRPRKLTIPEDALRHSLPTVARRWLALDAEVKDIAAMVENLVVTTCPEILERFGVGVDTAAEILIVAGDNPERIRSEAAFAKLAGISPVPTGSGMTSGKHRINHRGHRQLNAAIYRTVIVRMQFHEPTIAYVARRTAEGKSTRDIIRCLKRYVIREVYHLIKARPPAAEPASATT

SEQ ID NO: 279481 - protein, 311 aa, unidentified
MNTQDCFIGLDVSKDTLEVTVRPTEERKTFANQEDGLSLMIDFVKPFSPRLIVLEATGGLEKAAVCACAVAGLPVVVVNPRQVRDFAKAKGILAKTDKIDAGVIAQFAEAIRPEVRPLKTEEAQKLDALLSRRRQISQMITAEKNRLQSAPVWIQKDIQKHIEWLQKELDQFNQDLDRMVKESSIWRAQDEILQSVKGVGPILSVTLISQLPELGTLKGKKIAALVGVAPLNRDSGKFRGRRAIWGGRAEVRSVLLMATRIAIRFNPVIRAFFERLKKAGKIRKVAETACMRKLLTILNAMMKNNTRWQAA

SEQ ID NO: 279482 - protein, 398 aa, unidentified
MTRKNTLKSLPTDTEFRVVGLDLAKSDVSVAAIPVDNNTPSLVDQMTYADLLDWAGKISPTLFAMEPCNGYSLLCLQLENLGHEIKVISGSTVSMWINTHLSGQKTDLNDAIALARLAVSDAELTPIRHKSITEIRIQTVQAVRQQLMSQRSKSIVSFKALAQQWGIPCAAGHRNLKKLRESIEAKVDLITRPVANAMLFLLDAVKSLDRQIGQLNQTLQELVMSDERGRLLQSVLGVGTQISARVITVVGNVERFNSPRSLVAYVGVAPRNFITGHKNLTKKKHGNCPDLSHKGQGKISRRGDKLLRSLFIQGAACLYMQFCKDQLPECQLKRWILKQLASQKPYGKLMVSLAAKLIRIVWAVLTYREKFNIQKAGMTRSMWSEMALETPLNKEVPA

SEQ ID NO: 279483 - protein, 337 aa, unidentified
MSVLASLMESFFFAGVDVSLKTLDLCLLDSAGKLLLRRVFDNTRAGVRQLVALLKRQPRVVKVCLEPTSRYHELLAQKLYACERCIALLPNPRCVHDFAEAISRRAKTDRVDAETLATMARCLPLEPWAPPTAELSALNEIATRITQLTRNRTQEKNRLKLYLQCSTPQPVLRDLRSHIVLLKRRGEALEQQALRIIEANPVLTKRYRQLQSFCGIGQTSGIQLLAFLSMLPARLNKCQWVACAGLDPRPKDSGQSRKPRQISRRGSYKLRAALYMPALVASRFNPPLREYYKRQIAQGKKPLVALSALMAKLLHIIWAMWHNDQDYDPTRPGPKES

SEQ ID NO: 279484 - protein, 337 aa, unidentified
MRAAAGSVAAGDGGKRRANARQSVCAFRVLTQPALGEERRWGIEGGGGYGRGLAQHLVGLGEVIYDINPRLTAKERRRSRRVDKSDAFDAQAVAMVVHREEDTLPRVAAEDETVALDLLTAEREDAQAEATRLRNRLLHLDPEYHLHLPALTSIAGVRAAETYTTASGSLVQQERAAVVRRLAGRLRLVMEQVAELGRRIEALAQTRYAPLTRLCGVSLLTAGSLAGILGPGRRFASEAQLAAYAGVAPLETSSAGRVRHRLNRGGNRRLNAIVYRIALVQARSSPEARAYLARRVAEGKTKREAFRALKRYLIRAIWRLWRACLPPAGAEPADYAA

SEQ ID NO: 279485 - protein, 342 aa, unidentified
MKITTVGIDLAKNVFQIHGVDQRSKVVVRKRLRRQQVLTYFAQQRPCLIGMEACGGAHYWARKLQAQGHTVRLMAPQFVKPYVKANKTDAADAEAIREAVTRASMRFVPIKSSDQQAILSLPRARQAFVRARTAQANQIRGLLAEYGITLAQGISHVASRLPEIMEDAENELPGLFRALLQRLVVHLKELNHQVQELEAQINAWHRNNGASQKLAGIPGIGPLTASALSASIGDAKTFRNGRELAAWPGLVPRQHSSGGKPLLLGISKRGDAYLRTLMVHGARSVVRVAERKSTPTDRWSTDLLERRHTNVVAVARANKNARIVWALLAHDRDYRVDYVSVA

SEQ ID NO: 279486 - protein, 421 aa, unidentified
MRRLRAKRVKMVKEGTLIATVDIGVASNTGYCTTLDGRSTKSFRFDNTKEGFEKFWYMTVASKNRFGCNEVLVGYESTGPYAEPLVHYLAKKQVKIVQVNPMHTKKMKEVNDNSPLKTDDKDPRVIADIIRLGRALSIVVPEGDAASLRRLNNARERHVGEQTALLNQVQQLVYLIFPEFKTVLKNMKCKTAQYILRRYTTPERIGTLSKEVLGEEMRKRSMGKFGIKEAESLIGLARETVGIKEGVAGILLDIKHILMQLEAEGRFISEIEDEMGVTLERIPCSVRLLSIKGLGVVSVAGLIGEAGDFSKFRTQSEIMKLAGLDLYEISSGKRKGQRRISKRGRSLLRKILFYAAIQMIRKNGIMYDYYARLTGRGMERMRALIAVSRKLLRIIHAIVRDNRDYVGQYQAPERRVIKMAA

SEQ ID NO: 279487 - protein, 378 aa, unidentified
MAHPCSVQPPASATTNVTTNREDQKRTTSTDPDIYVTAGADTHRDTHMVAALDQRGAELGVREFTTDQAGQQAIFDWLETFGTTDRIGIEGTGTYGAGLCRFMQHHDIDVVEVTRGDRQERRSHGKSDPVDAVAAARAAQSGKAVAQPKSRTGSVEAIRALRLVRRSATRDRTGALNQMRALVVTAPDDIRDEFRGLTVRKLVAGASRLRPGDPTTAVGATKFALRELARRVKALDAQLASVNAVLGPLVAATAPSLVARHGIGTDTAATLLVTAGDNPERLRSEASFAHLCGSAPIDASSGLIKRKRLNPRGDRIANEALWRIVMVRMSTEPRTRAYVARRTLEGKSKREIMRCLKRYVAREVFQDLNNLVQPLDKQ

SEQ ID NO: 279488 - protein, 355 aa, unidentified
MKRSSKYVALDVHQATTVTSVREDGGRVIARTVLPTEAGAIVEYFRGMRGTIDVTFEEGTQAQWLHDLLVPIVHRVLVCDRRGQRQQGNKGDHQDADELSDLLRCGKLRAVYHGSGERATLKELARTYQNLVEDSTRVMLRLKALFRARGIKTPGTAVYRAAGRREWLGQLKELGVQFRAKALYAELAVLQELRPKAKAAMLTEARKDPAWKVLRTIPYLGPVRVALILATMQTPWRFRTKRHLWGYVGLAVVTRTSAEYEMDGPRARRRRRRLVMTRGLNRNHNRVLKDVFKGAATAASGRSGALQEWYQGLLTRGMREELARVTLARKLAAITLRLWKRGERYDPTQLTGQAQ

SEQ ID NO: 279489 - protein, 395 aa, unidentified
MFIVGIDIAKRSHEAIIIAEDGQVVRKAFSFRNNCTGYNLLLEQVRKLTLVKSQIVFAMESTAHYWLALYARLLKDGYTVMVLNPIQSHSLRELYIRKAKTDASDSLVIADLVRFGRCKASNVPQDKNLALRELCRSRAYLVDMAADLKRKLIALLDRIFPEYESLFDSVFSKASIAVLSKYSTPQKVKNANLRKLTDILMESSNGHFGEWKAHQLKEAACSSFGIDNSGGVYSTLLGMFLEQILSLTAQADSLEKQISVFFQEFNNPLTSIPGVGTVLAATILSEIGDITRFSSADKLLAYAGLDPSVKQSGEFKSNQNRMSKRGSPYLRRAIWLASTVAVHRDPMFQTYYEKKISEGLHYMNVIGHVSRKMTAVIFAVLRDGRPYQPILPTAG

SEQ ID NO: 279490 - protein, 370 aa, unidentified
MKKDTLFVGLDTDKKHIDVAVAEPLPRGEVRYWGRTANTPASVDRMVKKLGRGGRELVVCYEAGPCGYGLYRQLTGKRGVRCLVVAPSMTPQRPGDRVKTNRRDALKLAKLLRAEELTEVWVPDAAHEAMRDLVRARSSVVSALTRCRQHISSFLLRQGIPYAGKPWTNKHRAWLGTLKFEHAAHRLLLAELLLALDQAQARRDRLTDHIRELVPTWSLAWLVEALQALRGYDLINAAVMVAELGDPRRFAKPRQLMGFVGLNVSEASSGETVRRGRLTKTGNKRARKALIEAAWTYSRPAATTSKPAAARLPAAVQQIADKARHRLSRRYRHLLGRSKLKQVAIAAVARESLGFIWAITHAAAPLPAQS

SEQ ID NO: 279491 - protein, 405 aa, unidentified
MNHTCGIDWASDHHDVSIVNEHGMEVKQLRIEDTLEGYQELLGVLKTLGGDIPVAIACKEHLLISFLVGEGYTVYPINPKSAERYKDRYNVGGTKTDPVDAFALADILRTDRHKHHPLAYSSEEIRRLQLLCGEYDKLLKNKNILEGQLFEALSKYFPLALTLFGSNSCKILYRLVLGYPTYEKLKAASFDELSSFLIKNHYLFPKHIAKIYQKIQRSAYYHNDIFDGVLSVTAIGLSKVLLAITEQLAALKKKMSRITSSHILGPIFSSLPGGGPVMSAKLLALMGDNLELYSDPAQVQAYTGVAPIIKRSGKVSRMVFRFACNKAHRDTITWFAFCSMPHCSWAREFYDRKRQEGKRHYEACRLLAFKWLRIIFQLWKHRQRYNEEVHVGYLNKFKERRLKIA

SEQ ID NO: 279492 - protein, 384 aa, unidentified
MPQPNDLSRSLAILDQNRTVIAVIEMSQSSWLIGGIVPGIERHPLKKVNEEALLQLLQRWRDEAVKAGGTITRIAVAFEAGRDGFWLARWLRARDIEAYVIHPTSVAVSREHRRAKTDRLDTELLKRVFLGWLRGEPDHCSMAAIPTLDEEDARRPNRERENLIGERTRIVNRMQSCLARLGIRAFRPTLRKAADLLASLRTPEGELLPPNTLAEMRRDMAHLHFVVEQIKEIEVARRDRLQHAPEGQCSAMVRLLARVIGIGIETADMLVHEVLARNLRDRRAVARYAGLTGSPNESGSRRREKGLARAGNARVRRGMIQLAWRFLMFQKDSALAQWYRARTLDARRGTRKTMIVALARKLLVELWRLVTTGQLPVGVALRAA

SEQ ID NO: 279493 - protein, 416 aa, unidentified
MRVYIGIDWSENKHDIVFMNEAGVAIARLTITHTVEGFLELETACAALDVAPADCLVVLETAHNLLIDFLWSRQYSQVYVIPPSVVKANRGRQGQSGARTDADDAFLLADILRTDRGRLQPWHPDSLLTRQIRAQVSLIAHLTRDVVRSSNRLRAVLLRYYPAALHVFSSVQTQIALAFIQAYPTPQAAAALTFAGFQRFSAEQGYSRPARVRANFARLQGSYPQAAPDTVTVFQREALQLSRLLLHLVRDKSEAQRYLTTLFLQHPDAPIFDSLPGAGELLAPALLAKFGDDRQRFPSPASVQALAGTCPVTAASGKSRSVRFRRACDRAFRDMAQKWARASLSESVWANAYWQQVRPRCASSSHAYRCLANRWLSIAWTLWQKHELYDETYHLQQRALHSKNRGQAVVSILSSA

SEQ ID NO: 279494 - protein, 428 aa, unidentified
MKFKQSDAQNQRIERITTSHLVVGIDMAKETHVAQATNFRGIVLSNRHLAFKNTAEGFEKLKRWIESLQQKHRLKSFIVGMEPTGHYWYNLANWLVDLGIHVVLVNPATTKRNKENRDNCQSKSDPKDALVIADVVSRGYYYEYSRQSASFQRLRVMMSDREFWVTNSVRLQNRIVRWLDIRFPEYASVFKKWTGIRSLATLKEFPSPLDLRGLSTAEIITGWRKHMQRAGGCSGIQKAAELLSKANRSVGDVTSLREAKQDLVRLIEEYERIESHLEQIEKEVAMLLEDIPIAGQMRSVKGLGTIYIAAILSGAGDLAQYVHGRQLLRKAGLNLAESMSGKRKGEVILSKRGSAVLRKYMYLATLTLIGVNPIFRQLHENNLKVKHMSKQKSILKLLGKLARILIGMVHSGESFTPEKTVHTSVQAA

SEQ ID NO: 279495 - protein, 349 aa, unidentified
MNPTTILAIDLGKYNSVFCWYEPATKAATFRTVATTPDDLRREFARQPLASVVCEACSQAGWVHDLAEQLGLSITVASTTGAAWQWKHVKRKTDKDDALKLARLAAVGEIQAVPVPPRATRQWKSLIGLRKRLVAERVRGQNRIRGLLVCQGLTAPAGAKAWTTLGLAGIAQLARPLAECAPDDLWRGELHLLLERLRNLDTQTAGVETKLDALGASDTRVSLLQSIPGVGPRTAEVIAVHLGDAKRFRTADEVGAYAGLVPRQYQSGETDRRGRITRRGPKLLRAALVECAWCSLRYNPWARDTWLRLQTNGLSKKKAVVALARKLLVRCWAILRTGRPWRTPAVTAV

SEQ ID NO: 279496 - protein, 410 aa, unidentified
MERQVERCCGLDVHRDTVAACVRIGGGPGQRTQQHVQTFRTTAGDLVVLRDWLAAHEVTHVAMESTGVYWKPVYYALEADFTCLLVNAAHIKQLPGRKTDVKDCAWIAQLLEHGLLRGSFVPPAPIRELRDLTRYRKAVIQDRTRVVNRLHKTLEDAGIKLASVASDVLGISGRAMLEALVQGTTDPAMLAELARGRLRGKLPALRQALAGRFRGHHAFLIGQLLAHLDYLDEAIGILSGQVETVIAPFADALTRLDSIPGINQRTAEVIIAEIGVDMSAFPSAGHLASWAALCPGNNESAGKHKSGKMRKGNRWLRTALIEAAAGASRAKNSALQARFRRVLRHRGPKRAVVAVAHALLRAAYHVLADHAVYRELGADYYDRQHGQRVTRRAIQLLERQGYCVTLEPAA

SEQ ID NO: 279497 - protein, 344 aa, unidentified
MGEVSTIGLDIAKSVFQVHGVDVGGAVVIRKRISRSKMLEYFGDLPPCLIGIEACPSAHHWGRELQALGHTVRLIPPSYVKAYLKRSKNDANDAAAICEAVTRPSMRFVPIKTKEQQTALMLHRTRQLLVRQRTMLSNALRGHLAELGIVSAKGRNGTAELLKIIADGGDSRVPPAVRGILNVLARQYSVIGIEIASVDKGIMALHRGCEASRRLAEIPGIGPIGATALVAEIGDWMAFSSGRSLAAWIGLVPKQYTTGGKDKLGSITKQGNRYLRWLLVVGAMAVIRYARKHGTERRPWLARLMERRPTKVAAVALANKIARMAWAIMVRGERYKEPKLLLAA

SEQ ID NO: 279498 - protein, 341 aa, unidentified
MQAITVGLDIAKSVFQVHGVDADGQVVIRRQLKRRYVLAFFEKLAPCLIGIEACASSHHWSRQLRALGHTVRLMPPSYVKPYVKRQKNDATDAEAICEAVGRANMRFVPTKTPEQQSGLVLHRTRHLFIRQQTSVINAIRAHCAEFGIVAPVGRRGVEELLRVIANEKRVPELARACLLALGAQLRRIKEQILEFDRMITAWHRGCETSRRLDEIPGVGPALATAVVASIADPRAFRSGRDFSAWIGLVPKQSSSGGKPKLGSISKQGDRYLRGLFTAGALAVIRYAKIRGTGHRPWLTALLARRPIKVAAIALANKIARMVWAMMARGERYREPVALVAY

SEQ ID NO: 279499 - protein, 322 aa, unidentified
MQYIGIDVSKATFVVAYSSDKGGEIRTFNNTTAGIKQFIGTLPKDGSIHCVMEATGNYGALLLYMLNVAGITVSMENPLKIKNFAGAMLSTVKTDKIDARLIALYGEKMNPQPFKVQGEAILRLRQKRTVIRQLTKQITAMSNLRGSLACLPVPDKGAPHTVNETIKFLEKKRDRLQSELTDLVEVEFSRQLALLTIIRGIGITLATALIITTGGFTYFQNPKQVSRYLGICPTYEQSGTSVNIRGHINRNGDAYTRGLLYVAAWTASRLNAQCKETYTRLRQNGKPGKLAMIAVANKLVRQAFAVVAHDKKYVDGFVSNRP

SEQ ID NO: 279500 - protein, 354 aa, unidentified
MSQILNTAIAVIGIDIGKNSFHVVGLDARGAIVLRQKWSRGQVETRLANMPPCLIGMEACVGAHHLSRRLKLLGHDARLMPAKYVRPYNKGQKNDFRDAEAIAEAVQRPTMKFVATKTADQLDLQALHRVRARLVSQRTGVINQIRAFLLERGVAVRQGLRFLRAELAGILATRTDVLSPRMVRVIEDLAGDWHRLDERIEGLSSEIATLAHQDTACARLMTVPGIGPIISSAMVAAIGNGDVFSKGRDFGAWLGLVPKQMSTGDRTILGKISRRGNRYLRVLFVQAAWVVLIKPKSWERYGLKPWIEAAKKRLHHNVLAIALANKLARIAWAVLNKERNFEYVRRNAMASRPA

SEQ ID NO: 279501 - protein, 423 aa, unidentified
MQSLNTLFVGIDIALEKFDVTHMDMDSNILTNKKNRSFPNNPVGVSRFIDETLLIAKKHNFNSIKIGFEATNNYAFHLSFYLQNDKRLKNYNLKIYQLNPKLTKNARKSYSEIPKNDFFDSYVISERLKNGKLIPHNNRLDSNYLALRFITRERFRLVKKLVSTKLRFISILFIKASSFVQTKIFSNIFSATFINLISEFEMKNIIEMDMAQLVDFILKKSKNKIKWPEKVAERIKILAQECYSVDNVILDSVDKSLSILLEQINFYKNQLKNFDKLILEKITLFKKDYEILTSIKGIGLVFASGIISELGNIANFNNQAQVAKFCGIIWRIRQSGKFKSEETELAKTGNKYLRYYLIEAAQSLVKNNPDFLSYYNKKHAESSKHRHMRAIVMVARKLVRVIFSLLKNKKTYQSPKLIKLSRT

SEQ ID NO: 279502 - protein, 417 aa, unidentified
MRSIKAEKIKIINEKTLVVALDVGKKVHYGYFRTPKNQDIKPFPFYNSGRSFNKFWEKLCRFKEKHMLDEVVIGFESTGPYAEPIANYLRKKPVKLVQVNPMHTKRIKELTGNSPNKTDKKDPRVIADVISLGHSLTAVVPEGAAAQLRRLTHARERAMERRTAMNNQLQDLVFVIFPELGDIIKPSTKTGMYLIKNYPAPESIVSIGIETLCNIVRKISRGKFGIDRVEKLYNAAKESVGITEGKESILLEISHLVFNIEAENRYIESLEEQMIVYLDQIPHSHSILSIKGIGNITTAGLIGEVGDFKRFKTISEVMKLAGLDLFEVSSGKHKGKHRISKRGRALIRKLLFFAAINTVKSHGIMHAKYQKMLNNGTPKIKALIAISRNLFRIIFALARDNTKYAENYKIHEFKLAA

SEQ ID NO: 279503 - protein, 422 aa, unidentified
MRSVALDVHLDFCEVAIVEDGEVRSAGRIDTKPQQIELFASSLGPDDRVALEVTGNAWEIARIIEPHVAQVLVVSPSDTGIRQARAKTDRLDARTLARLLAAGSLDAVWMPDRKTWVMRRRLSRRGQLVHARTRSKNEIHAVLMRQLVGRPPVSDLFGVKGRKWLQGLELAPEERETVDGAMRQIEFLDTEIAEVERLIASDALSSAEIKRLMSVPGVNVIVAASFLAAIGDISRFQNPRKLVGYLGLDPRVRQSGLGPATHGHISKQGSVRARHALVEACWSAVRQPGPLHAFYERIRARRGHSVAIVAAARKLCCLFWCLLRREEDYAYAQPSLTKKKLRRLEITAGAPRYSANAAGIWSANDAVRQAERELARQAEVAYARTVRDWHATQAVKVGASATLGRASKEPSKGKAARQTTSP

SEQ ID NO: 279504 - protein, 340 aa, unidentified
MDTIGLDLHKRESQLCVLTEAGEIVERRIVTSRERFTVVLGGRPPARILLEASTESEWVARHLETLGHEVIIADPNFAPMYATRRRGVKTDRRDARTLAEACRLGAYRRAHRASDEQRHVRAELAVRDALIRTRTRTVALAKALIRRDGLRLPSGGPAHTEAKLAALPLPPALAAELAPLRALWAPVNTQIAAADARLAHVAAADPVVAQLMTTPGIGPVTAVAFVATLDVVTRFASAHQVEAYLGLTPREYSSGEQQRRGRISKTGNARMRYLLVEAAWRVLRTKDPAAAALRAWAEGIAQRRGRSIAAVALARRLAGVLYAMWRDGKDYRAPQPAAVV

SEQ ID NO: 279505 - protein, 420 aa, unidentified
MVYLERGYNLKELPWSKTVSNSFLFKEACMILVGVDVAKDKHDCYIMTSEGEVLFKSFTIANNMEGFNQLYEKILSVIDNFDNVKIGLEATGHYSYNILGYLLDKGLTPYVINPLHSNLYRKSLSLRKTKTDKVDSRIIASMLMSDVSLKPYSNTLYHNEELKSLTRYRFTKVQERAKLKISISRLVTILFPELEKLVPTLQMNSIYALLYEFPSAHAISKAHLTRLTNLLNTTSKGHYTKDKAVLIREAVKNSIGSNMPAKSLELKHTIKLIKELTSEINEIEEEIKIIMNKINSPILTIPGICLSTGAQILAEIGDFKNFSSPDKLLAFAGLSPSTYQSGNMYSSNAKMEKRGSKYLRFALFNAAIYVSYWEPTFSQYLKKKRVEGKHYYVAISHVVKKLVRVIFHLEKTNERYSTVV

SEQ ID NO: 279506 - protein, 343 aa, unidentified
MRKITTLGIDLAKDVFQLHGVDELGAVVLRRQVRRGQLLRTIAQLPPCLVGMEACASAHHWGRQLGRHGHTVRLMSPQFVKPYVKSQKNDPADAEAICEAVQRPSMRFVPLKSFEQQDFQTAHRARQGLMQERTAIINRMRGLLGEYGVILARKPATVRREVPDVLGDAKNDLTVVARELIAELFEHFRDLEQRIARIDAVIERLGSAHETVRRLQTVPGIGLLTATALVAAVGDARAFKNGRQMAAWVGLVPRQISSGGKARLVGITKRGDRYLRTLLIHGARVIATCAERQKRPAHQWLNAVRERRGKQRAYVAQANKNARVAWAVMTSGQSYRAPTTMAA

SEQ ID NO: 279507 - protein, 344 aa, unidentified
MSEVITIGLDIAKNVFHAHGADERGAMVFSRKLTGSKLLDFFAGQAPCVVALEACGGAHHWARELQAMGHEVRLIPPAYVKPFVKRNKNDAIDAEAICEAAQRPGMRFVAVKSEEQQAAGLVFRTRDLVVRQRTQLINAIRGHLAEFGWVAPRGTAHMTMLADLLEDEEMASTLPEAARPMFKLMIDLLAELGEQVAVLDREIARRAKEDEAVRRLMTIPGIGPVAATAIIALAPPIETFRKGRDFAAWLGHAPRQHSTGGKQRLDSISKIGERTIRRLLIIGGSSMVRQACRFGAPAGSWLERMLARKPRMLVSVALANKMARMVWALLTKKEDYRAPAAVAA

SEQ ID NO: 279508 - protein, 408 aa, unidentified
MKVLNRRCAGLDVHKDEVVACVRLAVRGKASHEVRRFATTTRGLLDLAEWLEASGVTDAAMEATGIYWKPVWHVLEERFQLVLANAAHVRNVPGRKSDVNDAAWIADLMAHGLIRASFVPPAPIQELRDLTRTRKQLGREIVQHTQRIEKVLEDANIKLSSLIADLLGASGRRLLKALIAGESDAVALAALGGSRLKCSRAELKEALEGRITPHHRFLVGQHLQMIEELEAAVAAFDARIEAALVPFHDAAERLTSLPGISDVAAQVILAEIGPDMSPFPTAGHLLSWAGLTPRLDESAGKRRSTRLKKGAPWLKPVLVQCAFAAARAKNTYLQAQFLRLKARRGPKKAAIAVAASILTAVYHMLRDGTFYNDLGPQHFARHDKTRAAMRLVRRIKDLGYDVEIKAAA

SEQ ID NO: 279509 - protein, 345 aa, unidentified
MLIIGCDYHPGFQQIAMVDTETGELGERRLTHREEAEQFYGALKERRVRVGMEASGHARWFERLLSDLRFELWIGDAAEIRTKRVRKQKTDRQDAQLLLRLMVEDRFPRIWVADAENRDLRQLLWHRHRLVQMRTRVMNQLHVVALNEGLRRKKALWRPAGRSELESLVLAPWASRRRQDLLDVFDQLTPKIQELSRALEEEVEKRPVTRRLMTHPGVGPLTALAFELVIGTPERFHCGKQIASYVGLVPSEESSGDRRRLGHISKQGNSLLRYLLVEAAQVTVRSQPQWRSKFFHIAMRRGRKIAMPRQLGVHLYWMWRRGRDYGEFEELGSHAGAPGNRHGVQ

SEQ ID NO: 279510 - protein, 343 aa, unidentified
MKLTRIGVDIAKQVFQLHGTDRSEQTVWRRRVPRERWLQALREVAAPGCEIGMEACGGAHHWARQLQAMGYHVKLIAPQFVKPYVKSNKNDANDAEAICEAMSRPGMRFVTLKSTRQQDIQALHRVRASLMEQRTAKGNQIRGLVAEYGLVAPRELSSLRRAMPCWLEDADNGLSACFRQLLDGLWRDLRGVDDRILELDHSLADLAQADPDARRLQKLRGVGPLVATALIAAVGDAKQFASGRQMAASLGLTPRQHSSGGKDRLLGISKRGDAYVRSLLVHGARSALRTAPAKDDRLSQWVVRLAKRAHPNVASVALANKTARLAWALLHHQCEYQPALAAA

SEQ ID NO: 279511 - protein, 429 aa, unidentified
MKIIYPRVCGIDVHKKFIVAVICISESVEPVYLKKRFSTFHNDLIRFRDWLIQNDCQNVCMESTGKYYIPVYNILESHISNIVVANPKWVRAVKGEKDDDKDAKWIADLFKLGIVKSSFIPQKDFRILRELTRYKYKLVNMRSSEKNRYQNALTSGNCKLDMVFTDVFGKSASNIIDLILSDNPYTDEDILSKVHKNCKASPDMILNSINGTDLTPVQKSRIELVNNHIKQLSSNIQRLDKLIDLMIEPYEDYISFLCQIPGVSRNSAITILSEIGVDINQFTSTRRLTSWAGLTPSSNQSAGKKKSVRISRAGVYLKPCLVEVAHATVKDTNHPYYANKFNKISKRRGKKRAYIAIARKILVAAYHMLLTGEIWNPADLAEVETPVEQRIKYVKNNLKSDIKQLLDIGLTVEELTLMIQQNANNIATQ

SEQ ID NO: 279512 - protein, 399 aa, unidentified
MLAVGIDISKSKSVAAILNQDGSMHTSPFEFHHTQPELDAFIKHILNSNQSATILMENTGHYHYPVLKAFREVGLPVCMVNAYQIKKFGDMDLRKAKTDKKDAVRIARYALEKSYSLVPYTSMEQKYEDLKFLARQYNQRMLTLKTNKVFLLNLLDETMPGITNILPLTTRTPETSLSVLFINRFKSYDRIKKMGKSRFLDAFEKIARKSRNRQTKTYGLAIYEAALRNITTRGENEYTLAAQDQCLELVCESQKAADSIIPKMQTLAETLPEYAVLRSMAGVGDRLGPLILAEIGDIRRFHSGKALNAYAGNDAPPYQSGTFESHNRHISKRGNAALRKYCFEVMQALKLTRPQNDPVYLFLLKKEQEGKPYNVAKMAGVNKFLRIYYARAMETLKQQ

SEQ ID NO: 279513 - protein, 376 aa, unidentified
MKQFNDIYVGLDVHKDTIAVAIARAARTKPHYFGEIPNTPAAITKMLHQLSPDGEVLNFCYEAGPCGYELYHQLTKLGQSCSVVAPSLIPRMPGVRIKTDRRDAMSLAKLHADGSLTAVWVPDKEQEGIRDLSRAREDFKQTQTKARQRLGAFLLRNGKIFTGKSKWTLAHWRWMETLTFETPMQHIVMQEYVQALKEASRRLLGMEQQILLAVRGWSLEPVLNSLLAMRGVNTIAAVTLLAELGDITRFDSPKQLMSYLGLVPSEYSSGGKRQQGSITKTGNGHVRRVLVEAAWNYRFPARKSRTIEMRAEKTSERVQAIAWEGQKRLCGRYQRLLSLGKLKQKVCTAVAREMVGFVWAIACEASGRVHASRATA

SEQ ID NO: 279514 - protein, 480 aa, unidentified
MARRLGTKRERLFCVLEFIEEKWNLPEGKTVGCWHSVGNVSRLREIQLCGAREIYVAVPTALTAEPVRHFTTFTEDLRALVAWLQSFAIKTVAMESTSVYWIPLAELLEEAKIEVCLVNPRHVKNVPGRKSDVMDCQWLQYLHSVGLLRAAFRPAAAVRGLRALWRQRDALVRQSSRHIQHMHKALDQMNLQVHHDLADITGETGRAIVEAILRGDRDPAALARHRDKRVKATEQILTKALTGDYRTEHLFYLKQAYEGYQFLQLQIVELDQEPERRLQELAPPADEQTDTPKPKKATGKYVPAYDASSLPARLHRVDLSAVPGLNALTVQPLWSELGGELSAFPTAKHFTSWLGLCPDNRISGGKLLSAGTKPRPTAWPKLCAWPRRGSITLKTNSVTTTGVCGPNSAVPLPSPRPPINSPVSSMPCSKPTCLTTPNSTPPRTHASASQSKGQGPRLPSRCLAIFNLKLLEREERTGSD

SEQ ID NO: 279515 - protein, 343 aa, unidentified
MDHFAGLDVSVKDTSICIVDDTGRITREVKVASEPGALLAVLMNASHRFKRIGLEAGPLSQWLFSALAEAGLPVICVETRHMRAVLKAQINKTDRNDARGIAQMMRVGLYRPVHVKTLRSQKLRMLLTHRKLLQSKAIAVENDLRATLRNFGLKMGMVGTARFEARIKELVENVADLVVLVEPLLVVRRVVREQIGILHRRLLAIVRDDEVCRRLMTVPGVGPVVALTYRATVDVPARFRKSKSVGAVFGLTCSRDQSGERDRPGAISRCGDEMMRAMLYEAAQAMLLRSAKWSWLKAWAIQIARRRGMKRAIVALARRLAVILHRIWVDGTEFRWTRETAVA

SEQ ID NO: 279516 - protein, 330 aa, unidentified
MQKKVRFLGLDVHAETIAVAVAEADGEVRSLGVIPNRGESIRKLVKRLGPAEHLRACYEAGPTGYVLYWQLTELGVECVVIAPTLVPVKAGDRVKTDRRDALKLARSHRAGDLTAVWVPDAASEALRDLVRARETAKQDQLRARHRLSKFLLRTGQRATAGVKAWTELYMAWVRQLRYEQWGQEATRLDYLHEVEHMGARVKRLEEAITEAVKLASPQVQEVVRGLQALRGIAEISAVTIVAELGQIARFETARQLMGYSGVVPRENSSGQRQQRGGITKTGNAHLRRIAIEAAWSYRLKPAVGPGLRKRQKDVPEPIKEIAWKAQLRLH

SEQ ID NO: 279517 - protein, 354 aa, unidentified
MLTSIRPPDYDIFVALDVDKKSYAISFKEYQDMKHYSLKMPAQPDHMFRYFEKQFPGKRLIYAYEAGPTGYALHDHVTARGQDCMMVHPGNVEKAPKDRVKTNRLDSLKILKQLHGGELKGIRVPSECYRQLRHLTMLRQQYAADQRRAKQRIEALLTFESVSVPLGSSTRWSLRHLQLLKELELEPVRKFRLNSLLEDLTYARGQLLKTHREIREFCRQNESIHQNIQLLRSIPGFGFVIPTYLLGRIGDPAHLRTVRELGAFAGVVPSEHSTGETIKKGPITHMGDSILRGLLVEAAWIAITKDTELRQFYERIRSKNKGERGARIAIVAVARKLAYRAHRVLKDQRPYVIH

SEQ ID NO: 279518 - protein, 441 aa, unidentified
MAMRTRNELTIQNPNAAGIDIGSSSHFVAVPADRSESAVREFGCYTQDLYEMAAWLLACGITIVALESTGVYWIPVYEVLEAYGIEVMLVNARNVKHVSGRKSDVLDCQWLQQLMSFGLLSAAFRPPSDVCALRAISRQRDTLLQEQARCVQRMQKSLTQMNLQLTNTITDITGQTGLAIIRAIVAGERNPQELAKLRNYRIHASEAEIAKSLEGTWKEEHIFCLAQALSLYDTYRTLIAEADAKLDALITPLRRQGVKAAEGKAKRGGKNAPGFDVRNALREWAGVDLTQIGGIDVCTALKVLVELGPDLSAFKSAKRFCSWLGLCPGTRISGGKRLSGASKRIPNRVARALKLAAQGLHHSQCALGAYYRRLAARLGKGKAITATAHKLARLIYAMLTHGSEYVEQSQAQYEAKFQERTLKYLQQRAKTLGFDLVPQAV

SEQ ID NO: 279519 - protein, 349 aa, unidentified
MLADELDYVVGVDTHRDEHVLAVVAGATGAVLARRALRANAGGYSAALRFAEEAAGGARAWAVEGTGSYGAGLARYLAERGENVLEASRTPRTERRLRGKDDALDAVRTARAALAGEELALPRNGKRREALRLLLVARRSAVDVRREALGQLRGIIVTAPDRLREELRVLPTGRLLERCSRLRRSSTAGADELATRLVLRSLARRIAAASREAAELEREILAHVRALAPALLDEPGVGPIVAAQLIVAWSHRGRLRSEAAFARLAGVAPLPASSGQTRRHRLSRGGDRQLNRALHTVVLHRRQHDPATKNYIAKRIAEGKSRRDATRLLKRYLARHLYRLLQNEEPLLA

SEQ ID NO: 279520 - protein, 344 aa, unidentified
MKKVVAGIDLHSNNVVIGIMDMDGKRVANQKVSCELKEVAKVLAPYEQRLEQIAVESTYNWYWLVDGLRALKYPVVLANPAGMQQYNGIKHADDTNDAFFLAELLRLNILPTGHIYDPELRPVRDLLRRRLMLVHHRTALMLSFKSLYTRTTGQELALGKLKDLEVQEAQELYEHPANQLIAGMQVKHIEQLTESIEKIEKVVLSCARELPCYSKLTTLPGVGRILGMTITMEVGEVKRFAGQGNFASYCRTVEAKRTSNRKKKGENNSKCGNKYLAWAFVEAANFARRYDEQCRRWHDRKAAKTSKVMATKALACKLAKAAWYLMAGEVGYDAKRMFGPATTK

SEQ ID NO: 279521 - protein, 461 aa, unidentified
MSKPNKKSSIAGKPATGPVFEPNAAGIDIGAREIFVAVPADRDPRPVRKFGTFTGDLRQMAEWLVQCGVTTAAMESTGVYWIPVHDRLEQHGIRPCLANPRNMKNVPGKRTDFHECQWIQYLHSMGLLQGAFRPDGNVCAVRSLMRHRGDLVEMASQHVQHMQKALTQMNVQIQHVISDITGLTGLAILDAIVAGERDPAVLAKLRDPRIKATEETILKSLEGNWRPEHVLALKQRLRLYRAHLEQIGECDREIEKLVAEFEPRVDPDDRPMPEDRKQKQRRRRKKSGNPDFNMRSEAYKLFGVDLTQIPGLMMLVMMLFSEVGRDMSRWPTAAHFVSWLGLCPDNDISGGKVLWRGVRRTKNRAGTLFRLAAHSLHHDQTPLGAYLRRMKAKLGPAAATTATAHKIAIIFYTMVKNQVEYDESLWAERDANRQKRIAAHLHKQAAKHGYKLVPLEENEAA

SEQ ID NO: 279522 - protein, 321 aa, unidentified
MRVETDEVEIIERVAALDVGKAEVVCCARVPGPGGRRLQEVRTTSTMTAALLALGDWLAGLGVTRVVMEATSDYWRAPFYLLEDRFETWLVNAKDVKHLPGRPKTDRLDAVWLCKVAERQMLHPSFVPPPAIRALRDLTRYRVDLLAARTAEKQRVEKLLEDALIKLSVVVSDPFGASGRAIMAALIAGERDPAVLADLARGSLRSKTARLTEALTGRFTEHHAFLLTQMLHRVDGITADIATVQARIEGQLGELAPAVARLDAIPGVGPVAAQMILAEIGTDMTRFPTPGHLVSWARFAPGVSESAGRPKGHAGSGHGNP

SEQ ID NO: 279523 - protein, 314 aa, unidentified
MAQISPCVGIDVSKARLDVAVFPDATSFAVDNTPAGWAELAARCTGLSVVTIGLEASGGFEQGIAHALQDRGFTVRLLNPFRVRSFAKALGKLAKNDQIDAAVIARFVATMPGRPLPPRSTVRQRLAAVLTMRQQLIERLVMVRNQARGLADPLLCRLSKRHITGLLADIRLLDRRLAEIVAGDAELTRQYRLLRSAPGVGPVLALTVLAELPELGTIDRWKIAALVGVVPYDFDSGTMKGKRCIWGGRTAVRNVLYMAALVASRCNPQLKAFREQLAHAGKPAKVALVAVMRKLLTMLNAMLRDGREWQPTSA

SEQ ID NO: 279524 - protein, 416 aa, unidentified
MDTMYERCCGLDIHKKTIEACFRSGKKKAQMSFGTTSAELRKLTMWLVENDCQSVAMESTGSYWKPIFNILELSGTDMEIIVVNARHMKNVPGRKTDVHDAEWIAELLQYGLLRPSFIPDREQRELRELSRYRKSLVGERAREINRLQKMLEGGNIKLTSVVSEVTGYSSRRLLDRLLRSDEPMTEEVISELVHTSLVGKSKELEIALDGLLSELQKELLIKVLDHIDDMSRRIADLDDFCRKQMDRYEDALDKLDEIPGIARRTAETILIETGLDMSRFPTAKHFARWAGLAPGNNESAGKRSSGRTTKGNPTLKSTLIQSAKVAARKKDSFFKARYQKIAARRGANRASVAVAHSMLIAIYHILKSGERFKDLGEDYYNQFNKEKKKKYYLKKLTKLGVNLKEATLSISIQAAT

SEQ ID NO: 279525 - protein, 404 aa, unidentified
MYYVGIDVAKEKHYVCILDDTNEFAVKPFWIYSDIVGLRELLKRLSGLSINNDDFIIGVESTGAFSENLYTYITDADYKVILLNSYQTAKYRDFSTMRKVKNDAIDAYVIAELLSSKKYKESYISNEDYHSLKVLGRLKHSLDEKIKTIKREISTVMATANPEITLVFKNIFTKTAIKIIKAYPTAVELQKATPKKLTKLFRHIKGNNFNDEKAKHLIELAKSSIYGGRANESRALMIRTNIKILELLSQEKQEIEAQINALIESGVSKELDVPIENLKSIPGVSDKTIAAILGECGDLRRFTSAKAFIGYLGLYPTQYQSGNSLSVGTLAKRGIPIAKHALYMAAVSSVLHNQELKKIFRDKVSAGKSKKEALIIISKKLATIMYSISKYNTPYDAKRVLISQ

SEQ ID NO: 279526 - protein, 388 aa, unidentified
MPQSNDLSRSLAAFDQDRTLIAVIEMSQSNWLVAGLVPGLERRPLKKLSPDEDALLKLVQRWRNEAAQAGREIKRIVVAYEAGRDGFWLARWLRRRGIEAYVIHPSSVAVSREHRRAKTDRLDTELLMRAVLGWLRGEKRHCSMAAIPTIEDEDAKRPSREHEKLVGHRTRLVNRMKAMLARFGIRTFKPTLRKAADRLDGLRTAEGTPLPENTRAELRRDMMRLRMVREQIKEIEQERLRKLTAAPAEKGPPTMVRFIARIIGIGIETADMLVSEILSRGLRDSKAVARYAGLTGAPDESGRRRREKGLAKAGNARVRRGMIQLAWRFLIFQKDSALAQWYRARTADAHGATRKRMIVALARKLLIALWRMATTGEIPEGISLRAAP

SEQ ID NO: 279527 - protein, 424 aa, unidentified
MSYRIAGIDVHKKMLAVVVSEVEVDGEYQFERVRYSSSPEHLRFLAEWLITQQVEEVVMESTAQYWKPVWEALERYWKPICQGREGAGPISGTLHLAQAQSNRGRRGRKKDFPDAERLVKRLVADELVLSFVPDTEQRLWRTVTRRKYQLTRNHVRLQNQLEGLLEECHIKLSSLVSDLLGASARRMLKALADGETNPVALAAMADKNLRATQAQLCDALGACAELRPIYRRLLKMFLEELQFIDQQISELDHELASLLSRHHDAVVHLAEIPGLGVDSAQQIIAEVGAGAATFPSAKQLSSWVGACPGDEESAEVSKSHRSPKGNRHMRRILNQAANAAAKSKGTIFEIVYRRLISRLGHNQTIGAIAHRLCRLIWVILHRGVRYEERGPSVSAKSRRHRTNRMIRELRNLGYRVEPSVTTAV

SEQ ID NO: 279528 - protein, 342 aa, unidentified
MSVIIGVDPHKATHTAVAIDRSEAELAQARVRATRTQIPQLLRWAEPLGERTWAIESASGLGYLLAQQLVAAGETVLDVPATLASRIRVLGTGRSDKNDPNDALSVAIAALRAPSLREVAPADHAQILRLLAKRNVDIGKHRTRVVCRLHNLLMELSPGGIAKELNASDAVALLERVRPATPVETARHDLAAELLADVQRLDEQLKHSHRRIRTAVAASQTSLTEIYGIGPIIACYLIGFTGDIGRFASRDAYAAYNGTAPVERSSGGRVVHRVSQRGNRRLNHALHLAAICQIRQSHSEGRVYFERKLAEGKTKKDAVRSLKRHISNAVYRQLIIDATRTR

SEQ ID NO: 279529 - protein, 356 aa, unidentified
MNKRSKLNFSGQAIYIGLDVHKKSWSVSVFSQQGEYKTFSQTPKPEALVQYLQHHFPGAQYHSVYEAGYCGFWIHDQLREKGIQNIVANPADIPTQDKERRNKRDRVDCRKLARGLRSGDIKGIYTPPRWKLEDRSLIRARLGMGRKQARCKNQIKSMLLFYGVEIPEQKEMGHWSRRFIRWIEEIRMERTSGDIALKIHLEELCHLRQIIAKLNRAILALARTDEYRSWICLLKTIPGISTLAAMILLVELYEITRFRSIDKLCSYVGLIPDTHGSGDKEHVGGVTDRHHSYLRWLLIEASWIAVRKDPAMMEAFNEYCKRMRKTKAIIKIARKLLNRIRYVLKNQAEYVTGVIE

SEQ ID NO: 279530 - protein, 343 aa, unidentified
MKLMRVGVDLAKNVFQVHGVDRNEKPVWRRRLSRKKWLNALLETVEPGCEIGMEASSGAHHWARQLQAQGFTVKLIAPQFVKPYVKSNKNDANDAEAVCEAMSRPSMRFVAVKSVEQQDIQAVHRIRSELLGQRKSKANQIRGLAGEYGLVAPLQLCHLRQAIPTWLEDPDNGLSERFRRLLNGLWKDLTGLDERVAELDAEIATIAEEDPVAQRLQQLRGVGPIIATALVAAVGDGRQFANGRQMSAALGLTPRQHSSGGKDRLLGISKRGDSYLRTLLIHGARSVIRTATQKEDRLSQWVTALVERRHPNVAAAALANKTARIAWAMLRNGTDYHPERVAC

SEQ ID NO: 279531 - protein, 312 aa, unidentified
MSQKENFIGIDVSKHQLDVAVIPSGDSISFANNEDGISFLLGFIKPFSPTLIVLEATGGLETSVVGALAADGLPVVVINPRQIRDFAKATGRLAKTDSIDAQVIACFGEAIRPEIRPLKTLEARKLDALNTRRRQIVEMLTAEKNRLGSAPQWIRKDIQNHITWLEKRLKKANSDLNKAIKKSPLWRENEGILQSMPGVGPVLSTSLLSDLPELGTLNRKQIAALVGVAPLNRDSGLFRGRRTIWGGRANVRAVLYMSTLAAVRCNPKIKAFYNRLSNAGKVHKAAMTACMRKLLTILNAMIKNRMYWCADF

SEQ ID NO: 279532 - protein, 388 aa, unidentified
MPAAETPVAYLGIDVGKSSHSACALDAGGGVAFRAELANRPDDIDRVLERAGSGALVVVDQKRNIGALVLARAHAHGNPCAYLPGYAEKQARGMFPGIAKTDAIDAEVIARTALGVPRALRPAPEEPEGTASLRILSSQREFASSARTRAKNRLRATLLEADPALEGAVDPSSRWQVSMLAEFGGAAGCSAAGWRRFSSAARRAGAPAAGARRLWEALLASSRSGRRLPAGEDVAVQILAREIASLDADIEELDSLVADSLAGDEVYECLLTVPGIGPKTAAALVTSIDISAFRGHDELASYCGVAPSDRRSGSSIRSTSPQHGGNRQLKNLLIFSCNSLIGTDNRFGRYYGECRARGMRHSKALKAVARKRLKVIYAIMRDAVPYAA

SEQ ID NO: 279533 - protein, 351 aa, unidentified
MLMIGVDYHPSVQQIAFTDTETGEFGERRLNHSDGEAEKFYRDLKQRGISVRVGIEATGYSRWFERLLVELGFEVWIGNAAEIKTQRVRKQKTDRADALLLLKLLLENRFPQIWVPSPENRDLRQLLWHRHRLVQMRTRIMNQLQAIAMNEGKRWKKRLWNEQGRAELEKFQLAPWASRRRQDLTELLDRLNPTIEELTTAVEQEAKKRPEVLRLMTHPGVGFLTALAFVLIIGTPERFECGKQIGSYVGLIPAEDSSAGRQRLGHISKQGSTLLRFLLVEAAQAAVRSDPDWKRRYIHLAMRRQKSIAKVAMGRKLAVRLYWMWRREWDYQQFRKFGSYAGELVTGHGVN

SEQ ID NO: 279534 - protein, 371 aa, unidentified
MGKNQHTKFVGMDVHQKSISIAIADDGPDGEVRLYGAIKNTQEAIDKLIRKLVSTGAELHFVYEAGPCGFGLYRHLTGNGFNCIVAAPSMVPKKSGVRIKNDTRDALALARLLRAGELSPIYVPDTEDEAMRDLTRARNDARIAARKAKQRLHSFLLRNEFIYHGKKKWTKAHYNWLAQLKMGHPAQQVAFQEYIEAVNECTERITRLDEQIVHAAEQWRWAPTVKALQALRGVSLLTAVNMVAEVGDFNRFHNPKELMAYLGLVPSEHSSGMRIRRGGITKTGNSHARRICVESAWSYRYQARVAQLQRKRHEGLPKDIVQIAWKAQLGLCTRYRRLMARGKATQIAIVAIARELVGFMWDIARRVPAVA

SEQ ID NO: 279535 - protein, 397 aa, unidentified
MSAVVGIDVGAYKHAAAVCRAGEREAERNVFRLSADRAGFDELDRWLERQGSVERVVLESSGHYYWPLASHLHRRGYGVAVVNPLQAKYFAKSRLQRSKSDPADARTLAALGMSEEPRVKDPLLGAEAKEAARFWGGLVKEQAQIRNKLLRLVEIGFPELKECFEDPLCDTALAVLREAPTARAAARKRVSTLAETTRPGGRRRLGENKARRLHELAKQTIAPPELDAQMAFEVGMLIQQFDLLDKQIEVAEQRVAEVLDSEVARRLQTIPGVGPALAATFIAEIGDIWRFDDFDQLASYAGVHPKELSSGTKGQNPETSWRMAKTGNAYLRSAAYKMAVVGTQHNPVIRAHYLRKRAQGKSAMNAIGHCMSKALAIVWGVWRSDRDFDPTLGGPKT

SEQ ID NO: 279536 - protein, 351 aa, unidentified
MDKITTVGLDLAKQVIAVHAVEARGQAVLRKVLRRDALLSWSAGLPPCVMAMEACGGAHHWARELTRQRHTVRIMAAEFVKPFRKGGKNDANDAEAICTAVRQANMRFVAIKSVEQQAALCVHRLRQGLVEERTALINRLRGLLTEFGIVAPLSPEKLRQELRRCLDEEKTHLPAAVRQLVADELAALDRLEQRIAAYAAQIAAQARDHPQARRLQGIAGVGPLTAAAVVATVGQPQEFRNGRQFAAWLGLVPKQHSTGGKTRLGRITRRGDAYLRTLLILGAKSALQAALRQPPEHRHRLQRWIVDVFGRIGYHKTLVAIANKHARIIWALLVKGEDFDVKRLTPAAVAA

SEQ ID NO: 279537 - protein, 348 aa, unidentified
MRFYTTQHAFYCGVDLHARTMYVCVLDQAGEVRFHRNLPCRADAFLQAIEPFREDLVVGVECVFCWYWLADLCAAEQIELVLGHAYYMKAVHGGKSKNDRIDSYKIAALLRGGTFPLAYVYPRRMRATRDLLRRRLHFVHKRAELLAHIQNTNTQYNLAPFDQRIDAPKNRGGLLEHFGEHEPVQMSIAADLALLDSYDQTIRELELFLGQEVRGHDASSFYLLRTIPGIGQILALTIVYEIHTIERFAGVGNFLSYARLVKGSHSSAGKRGKPAGGKMGSVHLKWAFSEAAALFLRANPKGKKLFDRLNKKHGRGKAMGVLAAKLGRAAYFMLKRKEPFDLNRFVAA

SEQ ID NO: 279538 - protein, 373 aa, unidentified
MTQAQIYIYGIDLGKNWFHLVAMDRMGHVLTKQKLTRSQLKQFISTTPPCRVAFEACPGSQYWGRLFQQAGFEPKIIPAQFVKPYLKSNKNDFNDATAIAEAGSRGTMRCVPLKSHEQLALQATHRVRQRFIVERTATVNQMRALLLEYGLTVPVGRKVFERSLPTILEDAENGLPDFIRALVLRLRERWQQLDIQIDDMSLMLGQASSASGLCQKISTVPGIGPIVSTALIAAIGNGSQFKKARDLSAWLGLVPRQYSTGGKSSLGGISKRGNSYLRQMVIQGAKALKIHMKRDKSSLGEWVARLEVGHHHCGTYRPGQQDNANLLESADIRHGLPTVSQHKFSCLTDRTHTRFCEPKTDDRSVHPTTLQPG

SEQ ID NO: 279539 - protein, 419 aa, unidentified
MELQEGIGVTGEYNKGEMKLNPVVGLDVAKGESEAQAFLDKDRPYGKSFSVKHIKEDLDLFVSYLKGIETKTGVRPAVILESTGHYHTPIIQCLEDNQFLYILVNPIISYQAKKTSLRKVKTDAVDAYHLCVLYYKEEFEPYKKRGLRLLNLRTLSRQYETVTNLYIQAKLQFHTILDQVFPEYRGVFGDLFSQVSLKILKEFPTSEDVLRSGEAKILERIVGMRIKRSEGWARERAAKLIASAERNPFQQGVYQSQLFSLDMYISILLQYQEHLSSIEAEIDVLAKEIEECKIIQSIPGIGGKIAATIISEIGEIDRFNHPKKLVAYAGIDPSVHSSGKFTATINHITKRGSSRLRHALYMAVLCGIRSSRNKKLKEYYDRKRNEGKPSKVAMIACVNKLLHWIYAILKRNEQFLDMA

SEQ ID NO: 279540 - protein, 339 aa, unidentified
MAILYVGIDLAKNVFAIHGVDEHGKPALVRPSVPRARLHQLVAALPPCTIGMEACSGAHHWARLFAKQGHTVRLMAPKFVAPYRMSGKRGKNDAADARAICEAVQRPNMRFVPVKSHDEQARLCVHRVRQGLVEQRTATINRIRGLLSEFGIVLAQKAATVRREAAAHLEDLPGWANTAVGDSLSELHRLDERITEYDRHVVHMAREDERSRALMQLSGIGCTTASALVSTIGNARDFKNGRQLAAWLGLVPGQYSSGGKTRLGGITKAGDGYLRTLLVLGAKAVLAAARNKHDRLSRWAMALEVRRGYWKAVIAIAAKNARMAWAVLAKGDEFKPLVA

SEQ ID NO: 279541 - protein, 354 aa, unidentified
MLYSGIDLHKRFSVISTMNNKGEIISQAKVKNQQDLLLQYFNKLDDSSHKAVIEATFAWGWLADLLEDNKIKVMLAHPQKTKAIASARIKTDKVDANILAHLLRSDMVAPAHYTDKDGRDQQELLRTRARLVHTKTSLKNKVHSILHKHNLNPEWDNKSFTDIFGKKGRAWMESKTNKLPPNSQFAFKQLLISIDNLAVQIKDFDKQIKTVWQQDGNAQILQKLPGIGYYGSLILSSEIGEIKRFSRPENLCSYAGLTPSVYQSGDKTRMGKIKKGNKYIRWVLIEAVPKTIKKDKRLLNFYLKICKKKGNKKAKVATARKMLAQIHLILRNKKTFIQEPGIPAFFSDQDPTKG

SEQ ID NO: 279542 - protein, 343 aa, unidentified
MQIRSVGIDLGKTTFHLVALDDNGTVLIRRKFTQRQLITFTANLQTSLIGMEACGGAHFLGRMLRAQGHDVKLIPAQFVKPFVKSNKNDFLDAEAIAEAVDRQNMRFVPIKTDDQLDLQALHRVRDRLIARRTSVINQLRAFLLERGLVFAKSPAKLRERMPEILENAEEDITPRMRNLLALLWNEWKDLESQLEEMNDEVERIASSDAACMRLRQLPGIGPLVATAIVAAIGNGAAFHKGREFAAWLGIVPRQYSTGGKARLYGISKRGNNYLRKILIHGARAVVLRSKRERIAMGAWMTALEARAPRNVLIVATANKLARIAWAVLSTGQDYRAVQDPVPA

SEQ ID NO: 279543 - protein, 453 aa, unidentified
MARKAEKEKTKDGLKLKIVNPNAAGIDIAYGEMQVCVPEDRDGENNRCFGSFTCDYEEIASWLKACGITTVAMESTGSYWVGLFFFLEEKGFDVLLANAKDVKNVSGKKTDEADAEWIMLMHSYGLLKPSFHPDAAARSIRELARHRDNMLRSASKEVQHMQKSLVLMNIKVDTVISDILGKSGKAIIEAILNGNHDPKSLVQLVDPRCKASKETIEKSLEGTWDVVHLFELKQSYDLYKYIHTQIADCEAEMDRLLGEYTDGCGTDMQGYTATKKRVAKKNAISFDAEKHAFSMWGVNVMEIPGMGLGALAVLMGELGRGFTEKFTSAKSFCKWCNLVPNNKISGGKLLSSKVPKQKNRVGQVFRQCANSVKSVKTGLGIYFRRQKSKGGHLQAIVATANKIARIFYTMVVSKNHYDESKVGLDEKQLLERKIILAQKTLDRLNRKLSVTQG

SEQ ID NO: 279544 - protein, 343 aa, unidentified
MQAITTIGLDIAKSVFQVHGVDANGQVVLRRQLKRRYVLAFFEKLAACLDGIEACASSHHWARQLQALGHNVRLMPPAYVKPYVKRQKNDATDAEAICEAVSRANMRFVPAKTSEQQSGLVLHRTRHLFIRQQTSVINAIRAHCAEFGIVAPVGRRGVEELLNVIANAKDEQVPAIARACVAALGAQLHRIKQQILEFDRMITAWHRCCETSRRLDEIPGVGPALATALVASVANPRAFRSGRDFSAWIGLVPKQNSSGGKPKLGSISKQGDRYLRGLFTAGALAVIRYAKIHGTRHRPWLTALLARRPTTVAAIALANKIARMAWAMMARGQHYIEPIALAA

SEQ ID NO: 279545 - protein, 477 aa, unidentified
MDHPERIHGRLPGEPEALAKTSNRTKPQEGHYISLMDSRAKGRQHKKELVKAMNSPSDQASGGWLENRGFGALDWASQKHSVVVVDPKGKVLEDFEIDHSALGWKKFRERMKPYGSIPFAIETSQGAAVEQLLEAGMQVYPLNPKSAQAYRQRKAPSGVKDDQLDAWSFADALRVDGQNWKPLRPEDFLIKELRLLCRDEVGLIEQRTAFINQLRHALAEYYPTALEAFEDLGAMSAWMFLQRFPTPQLLEKAGKRQWEKFLHSRHLWRNESGPRRMELFAKATEFCGSEPTANAKSMLALSLVKMLFALDNQLAEYRKRIEELFESHPDHDLFGSLPGAGPKLAPRLLGEIGDDRERFEGDAQNLQCLAGTAPVTKRSGKHRECHQRWACNKYLRHAVHLFSEHTIVRCAWAEIYYKAHRAKDHSHARALRCLGQRWLKIIHKMWMDRTPYNAELHHFNQVKHGSWVFQLKTVNCK

SEQ ID NO: 279546 - protein, 416 aa, unidentified
MKQNKTKKLGKVNGNTLIAAIDVGKKVNHGYFRAPDGQDFKPFAFYNLRDGFEMFWTKLVEFQKGHNLEEIVVGFESTGPYAEPMLHFLRKKKVMLVQTNPLHTKRLKELTGNSPNKTDEKDPKVIADVISLGHALTLVIPEGPAAELRRLSQARERAIKSRTSMSNQLQHLLFVIFPEFSWNMKTKSVLHLVENFSTPQSIVRMGIEALVAILRKTSRGSLGQERARQIFEAAHKSIGISEGGESIVREIRHLASNIRNENRFINGVEKEMKRYLEEIPYSHSILSIKGIGDVTAAGLIGEVGDFRKFSTIAEITKLAGLDLYEISSGRKKGQRRISKRGRSYLRKILFFAAINVVRSEGILHTQYQQMLGRGMAKTKALIAICRKLLHITFAIIRDNTVYVSNHQHLCHSKLAA

SEQ ID NO: 279547 - protein, 415 aa, unidentified
MSDPFRFFVGIDLGSASHQVCVVDASGQTLGERGVAHSGADMAALFQWLATLTQGADPQSIAAASEMPHGAMVEAFLERGYAVFAINPKQLDRFRDRFSVAGAKDDRRDAFVAAHALRTDRYAFRPLALGDPRLLRLRELGRAEESLQQDLRRAANQLWQLLQRYFPGLLTLVPAADEAWLWDLLEIAPLPEKAARLRPSTLHGILKKHRIRRVSAQQLAELLAQPALPLAPGASAAIAEQVLLLLPRLRLLRKQHTQLGRNIETLLEQLAGDESFKQHRDVQILRSVPGVGRIFTATVLAEAAEPLAQRDYRVFRTVSGVAPVTQQSGKTKLVSIRRACHPRLRHAVYHSAARYAQDDPRGQQHYARLRARGCSHARAVRGVADRFLALIFALLTHNQLYDPCRRALLDPAPTC

SEQ ID NO: 279548 - protein, 332 aa, unidentified
MTAVSTLGIDLAKNTFSVHGVDADGVVTVQRTVSRAKLAELVVRLPPCLIGMEACSGAHEWARRFSAAGHTVKLMAPKFVVPYRKSGKNDGNDAEAICEAVCRPNMRFVPIKSMQQQCDLSLHRVRQGFIEERTATLNRVRGLIAEFGYVLPLGTERLRREVRDLLERLPARVASCVRDLLEHAERLRSKTLEYEREIRGSVQHNELARRAHTRLGIGPITASALVATVGNGHDFRNGRQFSAWLGLVPRQYSTGGKTRLGHITKRGDPYLRTLLVMGARSVLQRAYREADPLSRWALALQQRRGYHRACVAIAAKNARVAWALLAKGVAAA

SEQ ID NO: 279549 - protein, 425 aa, unidentified
MICAAVERCAGIDVGKKWLSVCIMIGPLDGEPRVERQRFGVNVADLQQLRDWLSKEGVTHVVMESTGSYWKPVFNVLEDSVKVYLANPHEVKNRKGHKTDDKDGWWLAHLLRHAMIHPSFIPPRPLRELRDLARRRERLNGAGSAEKNRVQKVLEDANVKLGNVLTDVFGVSGQLMLDALLKGEAKPEEIAQFARKRAKKRIPEIIAALEGHQMSEHHRKMIRYSLSHMKFIEEQIEEIDRDIAAKIQEAGLDQQWQILQTVPGVQQRSAAKILAETGADMTQFPSQRNLSSWAGICPGNNRSAGKNRSNRPTGGNRWLRGALTECAWAAAAKKNCFLKEKFWRITTKSHGKKNSALLAVAHTILQLVYEVLRTGQPYRDRQAPALSGQQKDRLIRHHVRRLGKLGVRVYSLSAGAGSQKALSAN

SEQ ID NO: 279550 - protein, 367 aa, unidentified
MEKSSTVFVGMDVHKESIDITLAELGGEVRRLGQIGGDRGSLLKMVRRQQSKGRKLVFVYEAGPCGFWIYREITALGHACMVVSPALIPRRAGDHVKTDRRDSERLASLARAGELEAIHVPDIRDEAIRDLVRARDDAVIAQRRVRQQLKALLLRNDIRYVGRTSWTGAHRRWLSELKLPEPAQRIVFEEYVDAIVVATARIERLTRAIETEVAGWRFAPVVGALQAMRGIQFVHAVTLIAELGDLTRFASARQLMGYLGLVPREDSSGEHRHQGSITKAGNSYARRALIEAAWAYRHPARVTRIIATRQTGIPKAVCDIAWRAQLRLSAKYRRMNARHVNHNKIVVALARELSGFVWAIGQSVKPQ

SEQ ID NO: 279551 - protein, 341 aa, unidentified
MDHYAGIDVSLECSSVCVVDANGKIVREGKVSSEPATLISWLRSLGYELSRIGLEAGPLSQWLFAAMREAGLAVELLETRHVRDAFKAMPVKSDRNDARGIAQLMRLGWFRPVHCKSMGAQETRAVLTARKLVQSKLRDVENSLRGMLRGFGLKVGKTTELGFAGRIEELVVGHPHLEMITNALLAVHAVLRNEFQAFQKQVRKMARSDTRARLLMSTPAVGPIVALTYASAIDDPARFKSSKRVGAHFGLTPKKYQSGETDYTGRISKIGDGSVRTVLYEAAHIMLTKPLKGCSALKSWAMRIARRAGMSKAKVALARKLAVIMHRMLADGKPFNAVAAA

SEQ ID NO: 279552 - protein, 386 aa, unidentified
MPQLNDLSRSLVILEQDATLIAVIEMGQSSWLVAGIVPGVERSPLKKLAVDESALLKLLHRWREEAEQAGHRIKRIAVAFEAGRDGFWLARWLRARGIEAHVIHASSVAVSREHRRAKTDRLDTELLKRAFLGWLRGERDHCKMVAIPTLAQEDAKRPNRERESLVGEQSRIVNRMKAALARLGIRGFNPKLKKAVERLDGLRTPEGEPIPPNTLAELKHDMERRRLVRSQIRDIEGTRLERLEQAPGDGPHVMVRLLARVIGVGVETADMLVQEVLSRNLRDRRAVARYGGLTGSPDESGKKRREKGLARSGNARVRRGMIQLAWRFLMFQKDSALAHWFYARTKNAPQTRKTMIVALARKLLIALWRLVREGAIPEGVVLRPAL

SEQ ID NO: 279553 - protein, 318 aa, unidentified
MGSMDGNKSSTTIAGIDVGKRQLDVAVHGQAEQHRTANDAAGWEALAAWLAERGVRRVGLEATAGYERGVRARLEAAGLEVVVHQPLEVKLFARLKRRRAKTDRLDAALIAAATAQVDTVRAAQDPRLAELAERLTAYEQISDQAAQLKTFMEHVALPDLVASLGAQIQALSALKARLAREILARIKTWPDLLARWRLLQSLPGVGPLVAASLVVRMPELGALKRGQPASLLGVAPFDRQSGQWKGQSFIGGGRSRPRRMLYLAAIAAKRFDPGFKAFADRLLAAGKPPKVAIVAVMRKLIEAANLVLARQQPWLSLA

SEQ ID NO: 279554 - protein, 377 aa, unidentified
MSNVRFIGLDVHAETIAVAVAEPKGEVRSLGIIPNRPESIRRVMKKLESGGPLRVCYEAGPTGYVLYWQLTALGIPCEVVAPTLVPVKPGDRVKTDRRDALKLARSYRAGDLTPVWVPDAAQEALRDLVRAREAAKKDQLRARHRLSKFLLRQGRRPPTALKSWTQGHLTWVKSAVHFEHPAQEATLLDYVHEVDHVAARIERLERALDEAVKTAPAHLSAVIAALQALRGIALVSAVTIVAEVGELSRFSRPRQLMGYSGAVAREDSSGPRTRRGAITKTGNAHLRRIIIEAAWTYRHRPAVGATLRKRHATLDAAVIAIAWKAQHRLHARYRSLIARGKSPQNAVTAVGRELLGFIWAIGTTVERKPRDGRLVAA

SEQ ID NO: 279555 - protein, 387 aa, unidentified
MTARTVNNLPAAAHGETVRCLFAIELSKQSWVIGFNTPLSEKISRRTLSGCDWKGLLELIEEVRARVSREMGRAVAVMSCYEAGYDGFWLHRQLEAHGVRNYVIDPASLQVDRRARRVKTDRIDAERLLRSLMAHLRGEPKVWSVVRVPSVAEEDARRLHRERDRLVSERVQHVNRIKGLCALHGIYDYHPLRPQAMARLEQLCTAQGGELPPRLKSEIKRELHRLKLVVEMIATLEAERDAIVEDETSTHLNAEKIRNLHKLKSIGPEFAAVLVGEIFHRGFNNRRQLASYIGVTPSPFQSGSTAREGGISKAGNRKGRTTGIELAWLWLRYQPDSDLSIWFRARVGTMKGRIRRIAIVALARKLLVALWRYLETGLLPRGAVLKG

SEQ ID NO: 279556 - protein, 313 aa, unidentified
MSQIYVGIDVSKAQLDVAERPSGHCEQVAPTPPGIATLVARLSALGPTSVVLEATGGLEVELVSALAAAGLPVCGVNPRHVRDFAKATGHLAKTDTLDAQVLAHFAEMVRPTPRPLPDAATQALSALVTRRRQLIEMRTAEQNRLGTASWPIQSQIRKHLVWLDRQLTALEAELTKQIRSTPLWRDRDDLLQSVPGVGPVTSRTLLAELPELGRLSPKQLAALVGVAPLNWDSGQLRGRRRIWGGRSQVRRVLYLAAWIARTCNPTIRTFYLRLRAAGKPPKVALVACARKLLIILNAMVNQNRPWEADVQTA

SEQ ID NO: 279557 - protein, 337 aa, unidentified
MRIIRVGLDTSKQVFQVHGVDKADQPVLRRQVRRGEMEKVFAKLPATRIGLEACGASHHWARVLRGLGHEVVLMPPQYVKPYVKRGKNDAIDAEAICEAMSRPGMRFVAVKSAEDQAGLMLLSVRDLLVKQRTMLINAMRGHAAEFGVIAAKGPVKVRELLQRAHAPEAGVPALALELLSLLSTHLDALEARRKTIEAQLLARHQSDPVSQCLATQPGIGPIGAVSFALKVPDPKAFRSGRHFAAWLGLVPKENSSGGRRRLGTISRQGDATLRKLLVLGATAVIRFAKPGKASPWLINLLARKPKKLAAVALANKMARSLWAMMVSGEVYRRPQPV

SEQ ID NO: 279558 - protein, 331 aa, unidentified
MGNVTTVGIDLAKNVFSLHGVDASGAVVLRKTVSRARLMEVVAQHPACLIGLEACSGAHEWARRFQELGHTVKLMAPRFVAPYRKNGKNDGNDAEAICEAVSRPSMRFVPIKTLEQQAVLCLHRVRQGFVEERTATINRLRGLLAEFGFVIPQKAAEVRRRATEWLEQLPPRAACAIRDLREHLRVLDERVKEYERSIEAHARDHEQAKLVQQRLGIGPMSASAIVASVGDVREFKNGRQFAAWLGLVPRQHSTGGKQRLGHITGRGDPYLRTLLVMGARSVLQRASTQTDPLSRWALAVRVRRGYHRACIAVAAKNARVVWAMLHQHACA

SEQ ID NO: 279559 - protein, 412 aa, unidentified
MEIVFPRCCGLDVHKETVVACLRLQVPGEEVHKEIRTFSTMTDELLVLYDWLYAHGVTHVAMESTGVYWKPIFNLLESQFEVLLVNAAHIKAVPGRKTDVKDCEWIADLLAHGLLRGSFIPPVPIRDLRDLTRLRKSLIDDRTRIINRLQKLLESANIKLASVVTDVMGASARAMLSALLEGVIEPEALADLARGRLRQKLPELRRALEGRFRSHHRFLLEQLLSHIDFLDESIARISEEVVQRIVPFQRQVELLCTIPGISRRTAEVLISEIGTDMTRFPTAANLASWAGMCPGNHESAGKRYSGRTRKGNSWLRRALLEAAWAAARSKNCYLFSQYSRLVARRGKKKAAIAVAHSLLVIAYHVLKNQTPYRDLGVDFLDNLNLKRLQRYHVRRLENLGFKVTIEPLQEAA

SEQ ID NO: 279560 - protein, 364 aa, unidentified
MQIGGQLAMRNVITKREGITIGMDLGDKANRICVLDAEGNELEKVEISNTARAIDGYFGRYRGVLVALEAGTHSPWISRKLENMGHRVLVGNPRRLRAIWSSPNKSDMRDAEMLARIGRFDPKLMYPIHHRSEQAHSDLELVKSRDILVRVRSKLVNHVRGAVKATGVRIPKCSLECFHKRAAEHIPHILKTAIEPLLETIEKLNVRIKEYDRKIERLSKERYPETARLLQIKGVGPVTALAFVLTLEEHERFQRSRSVGAYLGLTPRRDQSGETDKQLRITKAGNTYLRQLLVNCVHYIMGPFGKECDLREYGMRIASRGGKNAKRRAVVAVARKLTILLHHLWVSGEEYIPLHKEAIKKLAA

SEQ ID NO: 279561 - protein, 365 aa, unidentified
MWEAPVKIQRTSVGLDVHARSVVACALDGDTGELFERRLTPDHGEIVAWLNDLPGPVAATYESGPTGFVLARSINAAGMRCSVAASSKLQRPVGDRVKTDTRDARHLARLLHLGEIVEVEIPSVEQESARDLYRAREDCRQDLMAARNRLSKLLLRRGIVYYGGTPWSRNHERWLRGQRFDDPALKMVYDTALDTVVAITDRRDRLDAAIVAMAADSSFTAVVTRLGCLRGVSTLTAFGLAVEIGDWHRLTGRTIGAYLGLVPTEYSSGATRTQGGLTRTGNTHARRLLIESAWHHRKPYRPGEVMRRRWNAASPAARTRGQTANRRLHARWLRFDERRKRPVVANAAIARELAGWCWSLAVMDD

SEQ ID NO: 279562 - protein, 385 aa, unidentified
MSSTDHPIRDLTTTHVQHAVIAVSLELSQVSWVVTALLPGSEKLSRYSLPAGDGARLLSLTERLRVKTAKQIGARPKTVIIQEAGFDGFWIHRLLQAHGIESHVVDAASIPVPRRRRRAKSDVIDGETLLRTLLAWLRGEPRVCSMVVPPTPEEEDRRRVVRERQTLHAELTRQTNRIRGLLASQGISEYRPRRRDRHKRLQELETGDGQPLPEQLMAEIRRALARIELLEAQIKEVERERTVLIERAAPDSPAPMLLRLRSIGPEFAALLPLEGLNRSYANRRQVASFGGLAPTPWKSGTIDRDQGISKAGNPRLRKAMIELAWLWLRYQPGSALSRWFRERVGDQRGRVRKIAIVALARKLLIALWRYVSQGVLPEGAVLKAA

SEQ ID NO: 279563 - protein, 417 aa, unidentified
MKKHNNSGKKSEPTSKRAKPRGPIRRDTKDVLAELVGKLKEKLDPKKLAATSAGEKHKRGELRPNLDRLTVGVDLGDKWSNYCILDLEGETLAEGQLRTTQEDLAEFFQALNAARVVCEVGTHSPWVQEVIGGCGHEVLVANPRKMDGSKRRKRKNDRIDANKLARLGRVDPQSLHPIRHRSREVRQDLAVLRARDALVAARTELINATRGLVKSMGTRLPKCSSPSFAGKVEGTVPAELHDALLPLVRMTAALSDCIQEYDEKIEKLGEKYGHTALLRQVKGVGPITSLAYVLTLENPDRFVKSRDVGPYLGLVPKQEDSGEIQPQLGISKTGDTMLRRLLVGSAHYILGPFGPDTDLRRYGLRLCERGGKNAKKRAAVAVARKLAVLLHCLWVSGEVYEPLRQGKSATIAPAVAA

SEQ ID NO: 279564 - protein, 394 aa, unidentified
MATLGIDIGAYEHAVAVCRDGATEAERRVLRISADRGGFSELDRLMASAGPIERVAMESSGHYWFAIASHLAHRGVPVAVVSPVASKYFAKRRLRRAKSDPADARTLAALAMVDRPRTRAPLAGQELREAARFAMTLVQEQARVCQRILRLVDIGFPELRSAYEDPGCASAIALLRLAPTARAAAAKRTTTLARARTAGGRVVGPKKAQQIQAAAKTTVAPPELDVQVGFEMELLISQHDFLEQQIAIADARLAELADGEVARRLRTIPGVGAATAAALVAEIGDIFRFDDFDQLVAFAGVHAAERSSGKKGADPETSWRMAKTGDAYLRAALYRIALVGTVHNPVIREHYRRKRAAGKSKMNALGHCMKKALAIVWGVWRSDHDFVVPEGIPS

SEQ ID NO: 279565 - protein, 415 aa, unidentified
MALKIVYKICCGIDVHKTFVVACIASTDSNGVTIYEHHRFSTYTKGLKDLLQWLLKHNCKDVCMESTGKYWIPVYNVLENDCTIVLAHPKYVKAIRGKKTDKKDAKWIADLFKHDLVAGSFMPPADIRQLRDLMRYRSKLTCFMSSEKNRLQNCLTVSNIQLGNVVSDTFGKSAQAILDKLLENPADTSFDLEPLVYKSLKKKLPELRDAIDGYITPEQAGKLKIIKAHYENLESRKAELEELILALAAPYQQELAILQTAPGIRSDFTAIGIISEIGTNMEAFPSAKHLCSWAGLTPTNNESAGKKKSVRVSKAGCYIKPLLVQCANAVVTSKKHPEIRNRYLRIKKRRGHKKAIIAIARMLLTALYHMLKNGENYNAELYRKSDLPSVDREITVEQAIIIARKQGYKIKSATA

SEQ ID NO: 279566 - protein, 353 aa, unidentified
MLIIGCDFHPGFQQVAIFDNQTGEEQERRLGHREEAEQFYRSLAGQTVRVGMEACGHYPWFERLLAELGFELWLGDAGEIRARVVRRQKTDRRDAEHVLRLMREDRFPRIWVPSLEERDVRQLLVHRHKQVQARTRVKNQLQAMALSQGVQKKRKLWTVAGRQELEKLELLPYAAERRKQLLRSLDGLEAEIEPLDRRVEEEVRQRPGAVKLQTHPGVGPVTALAMVLTLGPAERFASGKHVGSYFGLIPSEYSSGGQQKLGHISKQGSSFLRFLLVEAGQTAVRYDAELGRFYRRLAARKHRALAKVAVARKLAVRLYLMLREDWNYAQLCRAVVQASPSHPVVGGQNRTLE

SEQ ID NO: 279567 - protein, 353 aa, unidentified
MKKYIGCDAHARYSIFVSMDERGKAGPPVRVEHDELEMCRFLSTLPAGSPVALETSGNWYWLVRAMEEAGLDPRLAHALEVKKRMPGRNKTDGLDAKGLALLLRNDSLPEVWIPPAKLLDLRDLMRTRLSVRQQGSLLKCRIQAALRRYGVRDYSERADLFAGKSRAKLAASIARLPQETRIASLHEWELLDFLEAQIAALEERIRERIASVGWVRLLKTLPGIGMILGCTIYLEIGEVGRFATPEKLASYAGLVPTVHASGGKLWQGPTPRSANHFLKWAFVEAANVIVSHQKQWPQKHVVRLYQRLRAAKCHGKAATAVARHLAESSWWILSKKQPYREPAPVTMSSSENG

SEQ ID NO: 279568 - protein, 452 aa, unidentified
MLESDQLQPRELPIVTTSTRIKCHLYIRLHDLPTIAQEELFTVDAILERCAGLDVHQDNIVACFLSGPLDQRPSKEIESFGTTTKELLRLQDWLQDRECTHVAMESTGVYWKPVWNILENTCELTLANPTRIKNVPGKKTDYSDAEWIARLHRSGLIEKSFVPNEEIRDLRDLTRYRRKLLQNVTQEKNRVHKILQDANLKLTTYMSDVFGVSGRALLESIVNGEVLDAEQVRDMVKSTLKRKVPELIEALNGRLRLHHRKMIRRHLEHIAFLEREIQELEAEIEQLLAPYQREKELLETIPGIKQDAAASILAELGPDMSHFPSDAHLASWAGVCPANHESNGKKKRKKNQRGNKGLKSVLCQCSWAAIRVKDSRMSAVYARLVKRMGKQKAIMAVAHLLLRILYVVLRDKVPYQELGANYLGSREKSIEYWIRKINQMGYDVELHEMKSA

SEQ ID NO: 279569 - protein, 358 aa, unidentified
MVQSKGINFDGQNIYIGIDVHLKTWSVTILTQSGYKKKHSQKSSAKELFEHLKKHYPNGNYQAVYESGFSGFSTYYALQEYGISCMVIHAADVPTTQYENVMKSDPVDSEKLAKALKAGTLKGIYIRRKENLDNRSVVRIRKTLKQQLGGYKSRVKHLLYNNGVQLPDCFASPNTHWSKRFMSWLREDVALLSSSRIGLDLLLEQVDLFRQSLLKANRLLRDLAGSPLYAGRYSLLISIPGIGVNTAMCLLTEIDDISRFNNQRKFASYLGLIPTMHSSGEKSCNGEKTFRGNKKIGPMLVESSWIIIRHDSVMAAAYGEYCKRMKPQEAIIRIARKLSSRILNVLKKGKKYEYDRCC

SEQ ID NO: 279570 - protein, 531 aa, unidentified
MPQASGNRGRPVTGANQPDCQRGRGRYGCIIGDTRGDTPVIPFGRMFSTPSPCSRMLLSSMEEPPVKNKRRPGHVRLSPSVLERINPNAAGIDCGSSEHYVAVPPDRDPTPVQSFTTFTSDLLRLADWLTACGVTSVAMEATGVYWIPIYEILEARGFEVHLVNARHVKNVPGRKSDVSDCEWLRELNIVGLLRGSFRPSDALVALRAYLRHRHTLLETAGMHIQRMQKALLQMNLQLPVVVSDITGVTGLRILRDVVAGQRDPHRLAAHRDHRCHASTAEIVAALTGNYRPEHLFVLQQNLELFDTCQAQLAACDRAIEAHVQTVIASLATPSTALPAPRVTRTPRARDNAPRFDIRPSLHHLTGGVDLSQIDGVSPYTALRLLAEIGTDMSRWRTEKHFTSWLTLAPKNKISGGRLLSSRTQPSANRAAGILRLAAMSLGRTQTALGAFYRRVAARIGKPQAITATARKLAILVYRALKGDLVYQDPGADAYDTQQRTHALRRLRQRAATLGFALVNRETGELLSAGVS

SEQ ID NO: 279571 - protein, 346 aa, unidentified
MDDYAGIDVSVEASSICVVDASGKVVREGKAPSEPEALIGWFERLGLGLTRIGLEAGPLSQWLYAAMTAAGLKMELLETRHVRAAFKTMPVKTDRTDARGIAELMRVGWWRPVHCKSLSAQETRALLTARRLLKDKLHDLELSLRGLLRNFGLKVGKTRPRTYEARIRELADGHPVLQAIAEAMLAARRALMGQYAELDRRVRQTARLNSGARLLMTTPGVGSVVALSYVSAIDDPARFRSSRKVGCYFGLTQKRWQSGETDIEGRISKIGDEQVRSALYEAAHVILSQPVKPSGLKAWAKSVASRAGPKKAKVALARRLAVVLHRMLADQTPFNPNLGYPKAKAA

SEQ ID NO: 279572 - protein, 354 aa, unidentified
MKRTTKYVALDVHQATTLASVRTETGRVIARSILPTEAPAVVEFFRGMRGTVHVAFEEGTQAQWLHDLLVPLVHRVVVCDRHGEKRRGNKGDQVDADGLSARLWRGELRAVYHGSPHRATLKELTRTYRNLVEDATRVMLRLKALFRARAIPTPGTRVYQVRDRATWLAKLPERGVRFRAETLYAELDVLRALRPKAKGAMLAEARRDPAWSVLRGIPFLGPVRVALLLATMQTPWRFRTKRHLWAYAGLAVVTHSSADHEMQHGRPVRRRRAPLTRGLNPNHNRVLKDVFKGAATAATARVGPLQAFYRGMLARGMREELARVTLTRKLAALTLRLWKKGERYDPTQLTQQAH

SEQ ID NO: 279573 - protein, 349 aa, unidentified
MAMTIVEAPPGITGGVDTHLDTHVAAALDPLGRLVGTESFNADAAGYKALLAWLEEFGQVTKVGVEGTGSYGVGLSRFLRRKGVEVVEVNRPNRQTRRNQGKSDTLDAVEAARAAISGRASGAGKTKDGSVEAIRVLVVAKRSARQARVKAIVQMRHLGFTAPDQLHSRLKGLTVNALVTESAKLRATKSADPVTAATKASLSSLAHRIQALDRELAELDEKIESLLLAIAPDLMARFGVGPDTAASLVVAAGDNPERLHSEAAWAHLCGVSPVPADSGKNTGHLRRHAGGDRQANSALWRIAMVRIAHDPETREYFERRIKEGRTKRDIIRILQRYIAREVYRYLPRG

SEQ ID NO: 279574 - protein, 371 aa, unidentified
MKSILSVGMDVHKNSFSLCAYDGYTGEIVSESTFASDVKLVIKFIETLKSRYENDVEIKCGYEAGCLGYSLYKSLTARGVDCVILAPTTMQVSAKNKMVKNDRMDALNIAKNLASGSYKSVYIPDEEDVEIKEYIRMIHDFKKELKRVKQEICAFVLRHGYQYDGKSKWTIRYMNWIRELEMSEIQRETLNEYIAEMENLNDKINRFMNRIDEMYQSERYHEKVSKLRCFKGIETFAAMTIQVETADFERFPSAKAYASYTGLTTGEHSSGDKNNRIGITKQGNTVIRKTLVECAQSLVKGNVYAKKSQGLKSRQKGMDVNIIAYADKATERLKKKYQKLIERNVPRNKAIVAVARELACFIWGMETGNIH

SEQ ID NO: 279575 - protein, 345 aa, unidentified
MMVVLGTDAHKRNHTVVAADEAGVEIGSTTVGATPEGHLKLVRWAARWPERRWAIEDCRALSRRLEADLLRVGESVVRVPPKMMAGVRRSARTRGKSDPIDALAVARAALREPDLPVAQLDGPSRELRLLVDYRESLVKDRTAAQNRLRWRLHEIEPGYDPAPGSLNRYKTLTEIEQLLAAHNSMVAELGRREVTRIRELTREANQLERDITQRVTQLVPALLEVPGCGALTAAKLVGEAADINRFKSRDAYAMWAGVAPIPVWSANNQRFRLNRGGNRQTNAAIHRIAITQLRIHPDAQAFIKRRLETGSTKREALRLLKRKLANVVYRNLITDAQQPALDAAA

SEQ ID NO: 279576 - protein, 368 aa, unidentified
MKRKIYVGMDVHKETIRIACLTNNTKEIVKEQQIKHNEVQIKKFVNKLKSEWNEIHSCYEAGVTGYPLYRYLKSLGVNCILVAPGKIPRQSSDKIKTDKRDAIKLAKLLRSGELESIHVPSEEDEAVRDYLRSRDSLRLDLGRNRQRLMKFLLRKGITYSATKYWTVSHNKWLNNLQFNNEILQETFNDYYSRVRVQEENLKAMDKRIQEIAESEPYREKVGILRCFRGVDYLTAMFLLCEVCDFKRFKTAGSFMSFLGLVPGEYSSGSKRKQTGITKTGSPRLRRILTEAAWQHRFPGTGSKIVTARRSGQPALVVALAEKASLRLHKKFRNLQQRGKTTSGNDNGSFKRVIRISLGGDESGCIELE

SEQ ID NO: 279577 - protein, 410 aa, unidentified
MQSAPTTLPRTPDGGLTSGIDWASSDHAVAVVNTDGLEVDRFITEHNQAGLRAMTRRLRKLGVGEVAIERPDGPVVEALLGAGFTVVVISPNQVKNLRGRYGSAGNKDDRFDAFVLADTLRTDRARLRPLVPDSPQTVTLRQTCRARKDLVAHRVAVANQLRAHLQLVFPGAVGLFADIDSPISLRFLDRFDCQERADWLSPKRFEAWLASVGYCGRTDPAVLHARLVAAPRGAAGTTATVHITRAMTAVLRTLVEQIKALSEQIDEQLAGHVDAHIFTSLPRSGTVRAARLLAEIGDCRARFPTPESLACLAGVAPSTRQSGKVRAVGFRWACDKQLRDAVCDFAGDSRRGNPWAEHLYQQAIARKHDHPHAVRILARAWLFVIWHCWQDGVAYDPTKHRALQNLGLPA

SEQ ID NO: 279578 - protein, 341 aa, unidentified
MLYAGLDLSRQRLDVHVLDEDGRPVEVTAVRPDTDALRTLVATVGRHGQEVTAAIESMNGARFVHDTLELAGWDVEIADAIKVKGLAPLAAKTDKIDARVLAELARRDLVPAIWLPDPAVRAERERARFRLHLVRHRTALKNRIHATLIAFGHPVPVSDLFGVAGRELLASLAIPEPWATTLERSLRFVDELDAQIDECEAELRAMGADHPYVELLRTVPGIGWVLGYTIASEVGDIGRFASLKKLTGYTGLCPIVRQSGGRDDRGPLAKNEPKYLRWALIEAATHAARHAQYADRYERTKKRLGRQRGSKVALVEIARELSTATWHMLTKNEPFAPGRSP

SEQ ID NO: 279579 - protein, 348 aa, unidentified
MRILSIDMGRSKSVACDYVAETAEHEFESLSTDPAAFHDLIVKRNPDRVVIEIGPAAGWVKDLCDTLGKTLLVANTCDEPWQWRRLKSKTDRKDALKLSRMAAMNQFSPVHVPTPEVRQWRALIQYRQSLVSDATALRNRIRGILDQQAIKLPAGAKAFSEVGLQQWQQDHAQRLEQCPKTELWRGIVDTELARLQELDEHIAEVERKLAEIAQADERVQRVKEAPAVGERTAELVVAMLDQPQRFKRGKQVGNYAGFTPKKWQSGEMDRDGRISRGGCGLLRALLVQASWIGVARKVPWMLELYERVRRGSDKRKKKAIVAVARHLLVRLWAMLRDGTRWREPAAAA

SEQ ID NO: 279580 - protein, 398 aa, unidentified
MTESSDYESVQVFIGVDVGKDTHHAVAINRSGKRLFDKALPNDENKLRSLISDLKQHGQILLVVDQPATIGALPVAVARSEGVLVGYLPGLAMHRIADLHAGEAKTDARDAAIIAEAARTLPHALRTLKLADEQIAELSMLCGFDDDLAAQTTQASNRIRGLLTQIHPALERVLGPRLEHPAVLDLLQRYPSPEKLASLGEKKLAAQLCKLAPRLGKRLAADIAQALAEQTVVVPGTNAAAVVLPRLALQLITLRKQRDEVALEVEQRVLAHPLYPVLTSMPGVGVRTAARLLTEVACRAFASAAHLAAYAGLAPVTRRSGSSIRGEHPSRRGNKALKRALFLSAFAALRDPLSRAYYTRKMSQGKRHNQALIALARRRCDVLFAMMRDGTFYTPQGS

SEQ ID NO: 279581 - protein, 356 aa, unidentified
MSIIETGSRAANIIIGVDTHKSTHVAVAINEQGTRLSAISIPANSKGYMVLNSWSRSLGSVQTFGIEGTGSYGAGLSRYLMSLGLNVIEVTRPNRQLRYQHGKNDSLDAEGAARSVLSRQAIAVPKTQSGSVEMIRHLKIARDTAVKSRSVAMVTLKTLIINAPAELREGIDQIKGKIALIRHVAAFRPGQIISTTASAKVAMRSLARRWLMLNDEVVEHDKELKALIEAKAPSLLASHGIATLTIAEMLILVGDNPGRIRSEAALAKLCGVCPIPASSGKTHRFRLNRGGNRQANAALYRVAIVRMRNHEPTLAYVRKRTKDGKSKSEIIRCLKRYIVREIFTHLCRPETLKNPY

SEQ ID NO: 279582 - protein, 422 aa, unidentified
MAATRSSGVSRVVIGVDPHKRIDAVVVLDEAETVLARETIEHTSAGFRTLMALARRFPRRTWAIEGCNGVGKNLAQRLVAGGETVLDVSTRKSALVRVLATNSGRKTDDTDAYSIALVGLRTEDLPVVVRDERTEVLRLLSGRRRELVGLRTQAVCRLHRELVILIPGGASRRLTAAKARALLNGIRPADEVARLRKALARDQLADLVAIDKRVAAINAEIRAAVAASRSTLTHLVGIGPVNAAMVIGEVADVARFATRHHFAAYNGTAPAQWGSGGDTHDRVNLGGNRRLNHALHIAAITQARYPGPGRDFYLRKLAEAKTKKEAMRALKRRISDSVYRQLLADADDRDIVGTGPGGQMGAALSSSAADRSPVISTSDKPQPGPVSADDTLAPDHPDKRFPARSRRPRNAPTRSPRQAQSA

SEQ ID NO: 279583 - protein, 466 aa, unidentified
MQMLSNAACGLDVHKDKIDACVRINNGTADGEIVIKTFSTMRKALFELRDWLASLNCSKVLMESTGIFWMPIYWILDEVIGMDVGLGNSRDMKNVPGRPKTDKEDAKWISRLCMYGLVLKSFIVAKPFRSLREYSRYHKKLVYDRTRQINRIEKLLQMHGFKLSSVLSDINGASGLRILKMLAEKGELTVSDIQGLLHRQCKKTPEEVAYAINGSMKTSSCFLLKLQIKKLESCDKEIEEVFNCMVAMSKEHDWAIKIIASIPGLSTLSALYIIAEIGTDFLSFKSVKHLTAWAGLAPKDKESAGKRFSSKTGKANQYVKSLLIQCAWAATKSRKTRVANWFWCNRSRLGDKKAITAVARKLLCYIYAMLQSKTLYDKSLDVAATDTIKAKKLDAAQKIIGSQKRDGNSSKQSNMETNISCASVEIPKNEDYEINRIGSPKEISEKVPKKRGRPRKVAAPDEVVKN

SEQ ID NO: 279584 - protein, 341 aa, unidentified
MNHYAGIDVSLKDSSVCVADANGKIVRESTVASEPEALITWFSELGFAVTRIGLEAGPLSQWLYAAMQKAGLAVELLETRHVRDAFKAMPVKTDRKDAQGIAQLMRLGWFRPVHCKSIEAQETRAILSARKLVQSKLHDVEMSLRGTLRGFGLKVGKTTPNRFAARIKELVEGHPTLRIIATSLLAVHAALLREFRVFEKQVRIMARDDERARLLMSTPGVGVLVALTYVSAIDDPGRFTSSKRAGAHFGLTPKKYQSGETDITGRISKIGDKGVRTALYEAANIILTKPVKGSALKSWAARLAKRAGMKKAKVALARKLAVIMHRMLVDKTPFNPAAAAA

SEQ ID NO: 279585 - protein, 450 aa, unidentified
MSPLALDVVTKTGKTPVLGRMLSKYVGRKTSSIENDITKARNHSRQRGNIMRVVFGIDVSKASSEVAILVNGEKVHDYTIPNDAIGFNRLLGDLKTVHQPEIVFEATGVYSRRLQAFFEDNSYAYTRLNPLESKKQLDSLRVRKTDKIDAEKLATSQFILNRKPSYVQEALYQELRDLSRFYQNLTEDIVCAKNRLHKVLQVTFPELENILSAPTGEQYWNLVMTFPCNSFVLELDDAALRAIIRQSTSKRISEKRVTYLVDKLTKLANQSYCAVKKTSPMMEEVKYYAGELLRLSEYRQSVLEEMVTLAQPLPEYEILLSIPGIAETTATSIIGELGDIRRFHSANQINAFIGIDLRHYESGDFLAKEHITKRGNPYARKILFKCIHNIASASHTNPCHIADFYDKRKRQSQVTSTKPHTIASIHRLIRTMYYLITHNKLYDYTSTQNR

SEQ ID NO: 279586 - protein, 347 aa, unidentified
MRFYTRQHRHYCGVDLHARTMYVCVLDQEGKVLVSKDIASAPEPFLELIAPYRENLAVAAECMFTWYWLADLCAREGIVFVLGHALYMRAIHGGKAKNDRIDAHKIAALLRGGMMPQAYVYPQEMRATRDLMRRRNYLMRQRAELLSHITNTNHQYNLPALGVRPARPAERAGLAAHFTDVPVRKSVEVDLSIIEHFDRELPPLERYLESNAQAHDPVALAIVRTIHGMGKVLGLSILYEIHDIGRFSRVQQFLSYCRLVKPTKESGGKILGHSGRKIGNAHLKWAFSEAAVCFLRANKPAQALRARLMAKHGKGKSLAIIAAKIARAVYFMLRRSEAFDAERFFAH

SEQ ID NO: 279587 - protein, 322 aa, unidentified
MQNITLIGIDLGKHSFHIHCQDKFGKALLRKKFTRTKLMQFLATCPPSVVVMEACAGAHFMARRISDFGHETKLISPQFVRPFVKSNKNDFVDAEAICEAASRPSMRFVQPRTEPLQAMRALHRVRESLIRDKVKTTNQIHGFLLEFGISLPTGDAVIKRLSLVLAEHEIPEYLSRLLVRLHTHYLYLVEQIAELESELSQSINADDTAQRIMTIPGVGPITASLLSSQPGDGKQFSCSRDFAASTGLVPRQYSTGGKSTLLGISKRGDKNLRRLLVQCARSFMMRLERQHGKLAEWVREQLNKKHSNVVACALANKLARIA

SEQ ID NO: 279588 - protein, 348 aa, unidentified
MDIVKQAVGIDVSQNELVVCLGRMDSDFTPELYAHKVFNNTEHGFKTLLLWVKKHTLESIQLRFVMEATGVYHESFAYFLDEKGYDLSVVLPNKISNYIRSFNLKSKNDKSDSRAIAMFGLERKLDSWHRPKPIYREMKQLTRERDQVLHERTMVKNQLHAENVEAYPNKRSIARLKERIKLLNSQEKEIKTEIDNLVKSDNEIHKTVEIICTIPGIALTTASIILAETNGFELIKNKRQLVSYAGLDVRERQSGTSINGKARITKRGNKQLRKALYFPAWTAIRYDERFKLTFSRHVSKHGIKMKAGVVIQRKLLELVFALYKTRKPYDKDYLNEYEEGMESKVAVV

SEQ ID NO: 279589 - protein, 416 aa, unidentified
MPEGEGPVRYYLGVDWADQTHAVWVVDERGTKITARTVPHTAEGLSEWGRELDEWRAHGLELWAAIERPEGRVVDFLLDHGVLVYPVNPKALDRARDRFRQSAAKSDPFDARVLADFLRTDHPRLRPLQPSSDAAQELKLLTEDCQRQIRQQTRLVNQLTATLKAYYPRGLEVAELTTALAREFLQAYPTPAAVATLTERQWQRWARAHRLSEARTQELWAVLQRPQLPVPAHVVRAKARLMQALVTELGTVVAVVGEYRQAVEDFFAAMPAAQWIRTLPIGEHGVTAPTLWARLGDAPGRWESFQHLQAQAGSVPVTVKSGKQKVVHFRFACDKALRYVVDQVAFLSLRSSEWARAYYDAQRARGHSHREALRPLGAKWLKIIFVLWERQVPYDESYHLATMARQQLRQRSKKIA

SEQ ID NO: 279590 - protein, 400 aa, unidentified
MKYVLVLDVAKNKSMFMLSSNVGEVLLEPVEYTHNKSNFELIDSNINKLKIKDNLTVVMEATSIYHKAPERFFKENNYHVIVFNPLIGKEITNTIRKTKTDKLDCIKLTDLFWKGSIPDRNYTEDEIYTRLNELSRQYYHLDEGLNRHKNRYKELLHLCFPEFELCFKAGKIYELTALNFIKEFPHAYIIKEKRVDALAYNMANTNDRHLNYYRKKANTIKEYAQNSYPGVNENSKDVDNLKQLVEIIIEITEQKDNVKNQMIELAKQTKHFNNIISVFGIADLSASLIIAELKDITRFNNIKQINASCGLDPTIVQSGKSINYHGPISKRGNKYARKILFNCSRNIVTISAKCDKENPIYAYYKKKKQEGKHYYACLTACSTKLIRIIYALCMNNSTQN

SEQ ID NO: 279591 - protein, 306 aa, unidentified
MLCAGIDVSKPHLDLALVSTTAKPTRLRFPNTPEGRQALLAALAHHRPTWVALEPTGAYHLPLLQLLAEKGLQVALVNPYHLAAFRRATGERHKTDRQDALLLARYAQVCGESLRAYTLPPKALQELKALVGYREDLAQRERAILNQLEAARWAGSEEILVLLQRELACVEGLLGEVEARIQALLAALPEAEVLMGLPGVGPQVAAAVLALLPPHLWGKAKAAASYAGLIPEREESGKSVERSRLSRKGPPLLRRKLFMGALVAVRHDPEMGAFYHRLLSRGKRNERALVAVAHKLRFGAPTPNEP

SEQ ID NO: 279592 - protein, 344 aa, unidentified
MKISVFSVDLAKGKFQVHGFDALGERRLAKTLGRAGMQRLFSAQEEQGEVVMEACGSAHYWGRYLERLGYRVRLIAAQHVKPFVVGNKTDANDADAIYEASRRAGIRSVSIKSIAQQDALVVHAHRERLVKARTALVNQLRGELAERGVVFGKKTGVLRRGVVAVLEQEAGGEVTEYLQRWVSERLDEWRSLDERIKGCEREMQQCYRASPACVQIGAVEGIGVITATATVATVGDARQYESGRHFSAWLGLTPKERSSGQTRHLSGITKRGNSYLRKLFVHGARAAVRAAQRKTDARSRWINALVERRGHNKAVVALANKNARIVWALLSSGECYRTPMAAAA

SEQ ID NO: 279593 - protein, 333 aa, unidentified
MNVAGIDVGAKQLHVVVIKSDKVLDVQVFDNDITGFQQIHTLLTQQRVRRVVLEATGIYHLDLALALQQATSFEVMVLNPRAARHYAGARMARTKTDAVDAALLAGYAQHMPFQSWQAPRPQALALRACSRRLAALTRSRTQAKNQLHAFSRTRSTPGFIIDDVKLGIAQLNAQIAGLEAKTLQLISEEAALQQAFDLLLSVKGIGEKSAIQLLGELRVLPPELRDKQWVAMAGLDPRQHQSGTSVEKKARISKAGNRYLRMALYMPALCAAHRIPEVHAYYRHLIEDRGLKKIQALCAVMRKLLHAIHGMWRHNAVFDPARFYTPPPAKAEG

SEQ ID NO: 279594 - protein, 387 aa, unidentified
MPQPNDLSRSLVALDQNSTIIAVVELSQSSWLVGGVVPGIERQPRKKLEPSPERLLAVLHRWRDEAVRAGRTITRIALAFEAGRDGFWLARWLDVRGVEAHVIHPSSVAVSREHRRAKTDRLDTELLKRGFLGWLRGERGHCSMARVPTIAEEDAKRPNRERDCLVGERTRIVNRIKSTLARLGIRNFKPTLRKAAERLATVHTPEGMPLPPNTLAELQRDMARLGFVVSQIRQIEDARQKRLEQEPETGPDAMVRRLARIVGVGVETADMLVHEVLSRPMRDRRAVARYAGLTGSPDESGAQRREQGLARAGNARVRRSMVQLAWRFLRFQKESALALWYRVRTADRRMGTRKTMIVALARKLVIALWRFVTTGEPLEGVVLRPAS

SEQ ID NO: 279595 - protein, 445 aa, unidentified
MRDHSEAFIGIDTSKLRNAIAIAEGGRGGEVRYFGEIDSADAATRKLVSKLAVKYRSLTFCYEAGPTGYGLYRLIRSLGHECVVAAPSLIPKKPGVRVKTNRRDAVELAKLSRAGELTAVWVPDERHEAMRDLSRARQAAKKHLTSKRQQILSLMLRLGRHYPGKKTWGTAHMNWLTQQKLEHREQRIALEELLEGMRQEAERVERLEQAIREAVPEWSLAEVATALQAMRGIDLVAAVTVLAEIGDLSRFQSPRELMGYLGLVPSESSTGDKVKRGGITKAGNGRARRILVEAAWSYRHPARVSREKQPKVAAAPRRVREIAWKAQMRLCGRFRSLTRKGKLPSIVATAIARELSAFIWAINREVMAPGEGLEIRNVPIARSVTPCSPPSRRGLATADEVAGAPRRPALTAAARGVPATARVGTKKRAPRSNKETGSEAESAGL

SEQ ID NO: 279596 - protein, 413 aa, unidentified
MKGKVFLGVDAGCQEHEVFAMDEAGCQLWQERIVNDQSGCDRVLERMQAWKEEGYEVWVGAEGYGGYLSPLDVRIAAAGFPFVGFHPKQVKAFRSVDQVQPDKDDRLDAKLVALLLKWSNAKGELAATPERDEYLRALREAARAFETATRHKVTLQNRLVSKVREYWPELVVTDRVFESTDALGLLHFLTKYPTPQQAARAGISKVAAAMRTGGKAQRRDKAERIVEQARGLRDKLEVSDAVALVVQGMTEELIRAIESVRAWEKAMAKILKDHFFGAWLLEQTGISVRTAGCFLGEAGNLDRFPTEAKLARFAGNGAVRVQSGSSRPKHYDAHRYNHRLKRAIILMANYRAQYDPASRDYLEHRKRLGDTHWQAVKKLARHLLGFLWKAWQHLVNGETIPPLQAPKISAPGG

SEQ ID NO: 279597 - protein, 330 aa, unidentified
MRQIYGIDLVKEKFDVNFLGLNGEEKPVVVDNRFQAIVNFPERVPDNAILCCEYTGVYGELLCHLAITMGKAIARATGYEIKHSMGLQKGKTDKTDARRIREYAERFCDKLRFAQALSTELKELRELYNLRARLVKCRKMLLTSETGNKCADFQSLKAVQAANGVIENYNQAIETLESEMAEIIKSHEELQKNYKQVISVKGIGQVTACELIVKTENFKKIDSARKAASFAGICPFPNESGKMVKKSRVSKMSDKQFKTLLFMCSKVAVRSKPEYKLYFLRKKQEGKPYYLIINNVANKLLRTVFHLVKTEQKYILGHITEDPGKQKKVA

SEQ ID NO: 279598 - protein, 410 aa, unidentified
MQTLVERGCGLDVHQATVVACLLILGKDGKVHKQVRTFATTTRELVSLRAWLLAEGCTHVAMESTGVYWKPIYAILEGALEIVVANAQHVKKVPGRKTDVKDAEWLADLLCHGLLRSSFVPPKPIRELRDLVRYRRKLVQSQAAERNRLLKVLEGANIKLASVATDVFGVSGRLMLQALIEGRANPQEMAVLAKGKLRNKIPELELALEGHIEEHHRFLLDLQLQRLRAAEKDLATLEQRIQQKLEPYATQLELLDEIPGVDWAVAAVIIAELGVDMSVFQTVSQLVSWAGVCPGNNESAGKRKNSRITKGNVYLKSALVEAATAAARAKGTYLRDKFYRLKARRGYKRAVVAVAHKILVATYHMLSQNVSYNDLGDLYLDKLNKHHLTRNLVHRLERLGFQVTLELKAA

SEQ ID NO: 279599 - protein, 387 aa, unidentified
MPSTSATPIFWVGLDVHKDSVTAAVFRNRDAEPMRIDRLPNDAKRIRRYFERLSQAGTPRACYEASGAGYVLQRALTEWDVPCELAAPSLIPRRPGEHQKTDRRDAIKIARDFRDDRLVLIHISSETDERVRDLVRCRETFQREILRSRHYILKFLRRRGFIYREGTHWTTRHMNWIRQVLQPGTLAEDDRTVLAEYFALLEYKLLRRDELDRRIETLALTPRYKPVVDRIACFRGFKTHAAMVLATELGDLRRFDNPRKLMAYLGLVPSEHSSGDRRRQGAITKAGNTRCRHVLVQAAWCYRRRPTVGAPLKRRQQGQDPSVIAHAWKCQHRLYKVFHRLAAKKPKQVAATAVARELVGFLWAVLHEIDVAQLSHSAEIEPNVHAA

SEQ ID NO: 279600 - protein, 347 aa, unidentified
MYYVGVDLHKHQSWFYIIDPLGKRIDSKSISNSPESLKCYFKKIPKPFTLAVEATYNWYFFVDIAQEYAKNVYLANSYELKAFAKRHKKTDKIDARLIASVLRKGFLPVVTIADKQTRQRRELLRCRLSMTADRSRCIFRLKALLDKLGLDSSGDFTTYKRLNEIQQYELSSLYSTMVNNYCEQIKYITRRLYVLEKEITTLANTDKDILYLMTIPGLSYFSALLIKSEIIDVNRFKSFNRLCAYAGLAPRVSQSGNKTFHGPLNKNRRKNLQWILLENVYHYIKSTPEKLCKFEIAKKRKGHNTAKVIFARDMLKIIYYILKEHRPFYLYKSSQIQPVAAPALCGV

SEQ ID NO: 279601 - protein, 338 aa, unidentified
METYAGIDLHSSNNYIGIMDQDHKRLFGKRLPNRLDKILTVLEPFKADLKGVVVESTYNWYWLVDGLQEHGHRVHLANPSAIKQYEGIKHTDDKWDSFWLAHMKHLNILPEGYIYPKEQRAVRDLLRRRLFFVRHRTANILSLQSTITRNLGIRMSSNQIKKLDMDDACDLFDSSNLVFMAQNNISTIKHLAKIISGIEKQVKPQVQLRKEFEMLTTIPGIGLILGLTIMLEVGDVGRFFKVGNYASYCRCVDSKRLSNGKKKGENNKKNGNKYLAWAYVEAAHFAKRDIPKAQRFYQHKMAKANGAVATKALANKLARASFFIMRDQVPFDEDMLFR

SEQ ID NO: 279602 - protein, 405 aa, unidentified
MRRTDHRSAHPRTAAQGHDTSLFVALELSRSNWLIGSSTPGSDSIGKYQVAAGDTTALLGLLNRLKARAERYCHGTVRVVSIYEAGLDAFWVHRLLEANGVESHVVDPASIAVDRRSRRAKTDRIDVEKLLDTLMDWARGARRVCSMVRPPSPAEEDGRRLIREREALVIERTRHVNRIKGLLATQGIFGFEPMHRDRRKQVEQLRGWDGQPLPPRLKAELARELNRLELVISQVAAVEDERDRALQANQHLMAVHAMEGATANPASAASAGPLLLRLRSIGPEFASVLSLEGFYRNFANRREVAGYAGLAPSPWKSGGIDVEQGISKAGNARLRKTMIQLAWLWLRHQPGSALSQWFRERVGERRGKIRRITIVAVARKLLIALWRYVTLGLIPEGAELKALKV

SEQ ID NO: 279603 - protein, 340 aa, unidentified
MTITTVGIDLAKNVFAVHCVDQNGKTVLVKSRVTRAALPGLIAGLPPCVIGMEACSGAHYWARLFRQYGHEPRLMAAKFVSPYRMAGKSGKNDAADAQAICEAVRRPHMRFVPVKDESQQAMQCLHRTRQGFIEEKTATYNRLRGLISEFGVIAPQSTDALRHIVFEQKNSLPLQVQQCVDDLLEHVARIEDNIAEYDRILSRMAKTDHRSQRLMELKGVGPTTACALVASIGNAHDFKNGRQLAAWLGLTPSQYSSGGKSKLGRITKAGDSYLRTLLVQGARSVLIGAEKRTDLFSRWVCSLVERRGYWRAVVAIAAKNARLCWASLHYGDDFRLYPAS

SEQ ID NO: 279604 - protein, 312 aa, unidentified
MKHDTIGVDVSKDHLDAHRLADGATRRFANNKGGHKALIKWLTETPLCRVVFEPTGPYHRAVERALGIAGVPFVKVNPRQARRFAEATGKLAKTDRLDAAILARMGALLELEARPARSELLLELKELYVAREALVKDRTAAKNRGKALTLSLLKRQNAQRLEQIDRQIATVEAAILQIIEANVSLADRFAILTSIPGVSNITAFALLIAMPELGAMEAGQAANLAGLAPIARQSGRWTGRSFIRGGRADVRQALYMPALVAARFNPDMKAKYAHLIETGKPAKVALTAIMRKLIVLANALLKANRKWQPKCP

SEQ ID NO: 279605 - protein, 341 aa, unidentified
MEQYVGLDVSLEETSVCVLDQAGETLFEGISASNPEALDKILRKNAPHAVRITFETGSLANWLWHELNARGYPVICLDARHARAALSMRINKSDKNDAQGLAELARMGWYREIKVKSIESRNVRAKLIARAKLVDLRRDLENQIRGLLKSLGVVLGKSAGHTFSSKIMSCLGDAPNLRSLIMPLFSIHSALIEQIAQYDLELKDFSRSDPTIKRLMSVPGVGPVTALAFISTIDDPHRFKKASDVGAYLGLTPRRYQSGELDRTGRISKRGDSLMRTYLFEAANVLLKVVRRSSPLKSWGMKLAKRIGSKKAKVAIARKMAVILHCIWTDGTQFEWSRETQ

SEQ ID NO: 279606 - protein, 309 aa, unidentified
MKSIIYAGLDVAKPSFVLHLAGKIITLPNTKVGHRKLVLALSKHQNLQVICEASGGYERGIFDALCAANIPASVLNPRQIHHFAKSLGSRAKTDPLDAQLLSLYGQRMRPEPTAPRTQQERQLAELVRHRRSLLGALRAQQQSLEQVQYAPLRRELKTLLKQMEARLAKIETLIGERQKSDPELERKSQRLTQITGVGKLTAISLLAEMPELGTLRSKQAAALAGLAPYARESGAWKGCRSICGGRAEVRRILYMAALSAKRYHSTLSGFYQNLRAKGKPFKVAISAVMRKLLLLLNLALKFPNLVLVN

SEQ ID NO: 279607 - protein, 390 aa, unidentified
MPKFNDLSRSLVAFDQDSTLVAVIEMSSASWLVGGLVPGLSREPRKKLSPDPQALLRLLHQWCAEAAKAGHAIERICVAYEAGRDGVWLARWLRDQGIEAHVIHPTSIPVSREHRRAKSDRLDLALLQRGFLGWLRGERKHCSMVAIATREEEDGKRPLRERESLTAEATRLVNRMKSLLAVHGIRNFNVKLKKAGEKLSALKTAAGEALPPDALAELKRTFERLRLAKQQIAEIDARQERRLEEAPQAGLNPMILILARVFGVGQMTAEALVREVLYRPMRDRRAVARYAGLTGSPDESGKKRREQGLAKAGNGRVRRMLIQLAWRLLRHQPESALVKWYRERTADGRGDTRKVMIVALARKLLVAFWELVTTGKVPEGMKLHPAQLAG

SEQ ID NO: 279608 - protein, 472 aa, unidentified
MSKGSGSGMTRGDRRRNARRERLRALLPRDGAVAGIDLAEDKQALAVIDHDVRVLARKTVRVKAFGLGEALDWAVGQARVKGFDRVTVACEPTGPRWMQVQRLCAERGLPLVCIQPLISHIAREQQDYTTHKTDESDCVMIARLAVELHCYIPEELDETWAHLRHLGRRRQQLITAQTASGQRIMDFLSVAWPAVTETCAGPVESRTWLAALEVVTARCGADPGTLAAMGREGFTALTRGAVAGWGITRAHGPICARVFAALTDTEGAVTWSRRGLLRRVADELGDLKRTRVQLRQVEADMVAVLDELGLSRLADIPGLTAVGAAAILAETGDPRRYDSSSSLVKHAGMSPSDNASGAFSGQAHISRRGRPGLRLTVWRAVWPMLQYNPVMAAKYQAMTRAADAAAAGAGPRQGTAAQAAARARRAKARVACAASLLRWIYCMVVHDTSWDPAVASGAASRHDTARTQAEAA

SEQ ID NO: 279609 - protein, 333 aa, unidentified
MDHCAIDLGGKKSQVCLRSPDGRVLLEARYDTLSLPDFLRQLPHSRVILETAAEAFRIADAAKTAGHEVRVVPATLVRTLGVGARKTKTDRRDAQMLSEVSCRIDLPSVHIPSARSREWKTICGMHDALISSRTKLINNLRGWLRGQGLRLSSGSAETLAGRIAEIESLPEYVASQVAMLALLTEKIRTSEQRIEDLAKSDELCKRLMTVPGIGPSTAARFVAAIDDIRRFESAHKVEAYLGLAPGESSSSERQQRLSITKAGPSTVRWVLVQAAWSLQVRCRSVAARPLQLWTAEVAKRRGKRIATIALARKLAGILYALWRDGTTYELRPQ

SEQ ID NO: 279610 - protein, 372 aa, unidentified
MPNSEPKLIQLLTKLVSQYGPALLVVDQPATIGALPVAVAQTHDDVEVAYLPGLTMRRVADLHAGNAKTDAQDAYIIAETARTMPATLRAIAASDEQIAELAVLAGFDDDLLSETTATRNRLRGLLTQIHPGLERVIGPKLHHPGVLDALTRWPTPSALKTAGPGHVRRRITKYNPRLAATLTQDIFEALDAQTVIVPGTSAATTIVPMLASQLTELYTQRATVFQQMEALVEAHPLSAVLTSMPGVAVRTAARLLTEVVGKHFKTAGHLASYAGIAPTTRRSGTSIRGEFANRGGNKRLKSALFNSAFASLHHESSRRYYDKKRTEHKTHKQAVIALARRRLDTLYAMLRDGTFYQDPAPPVPVNNLSQAA

SEQ ID NO: 279611 - protein, 352 aa, unidentified
MMIIGVDYHPSFQTIAFFMEETGEYGEQELNHSDGQAEKFYRDVKQRGICVRVGMEATGYSRWFERLLAELGFEVWIGDPAEIKTKRVKKQKTDREDARLLLRLMRENNFPRIWVPSPENRDLRQLLWHRHRMVQMRTRIMNQLQALAMNEGYRWKKKLFSEQGRAQLEKLALAPWASRRRQELLELLDRMNPTIEELTAAVEQEARKRPDVLRLMTHPGVGPLTALAFVLIIGTWERFPCGKQIGNYVGMIPSEDSSAGKQRLGHISKQGSSLLRFLLVEAAQAAARINPDWRRRYTHLAMRRHKNIAKVAMGRRMAVRLYWMWRNGGGEYSQSLEFGSYAGQLGTGHGVN

SEQ ID NO: 279612 - protein, 440 aa, unidentified
MEKVTVFETVHEHAAGIDIGAAKIFVSPDGIEVRSFDTFTSGYHECIEYLHQKGKTEVAMEATGVYWMALYAMFESCGIKANLINPKETKQVKGRKTDVKDCRWIQKLFSAGILRSSFIPEGKYMEIRHLVRERLDIIDMGSTYVNKMQKYLELMNIKLKEVISQIHGVSGIKMIKAIIEGNRDKEYLLSLCDQRIRKNKPELILKALEANYNDTYLFILEQNMKAWEYHQEKMQIIDERIEKLLQDLCQEKQNVEVMSSPKSIRHHAPKITDLHQMMVKLHGVNISSISGLNDYTLLRLVGETGVDMNRFPTIKNFTSWCGLTPKNHQTGKVKKRVKGTCCNKAGQIFKECAQGLLNSKYIAIGSFMRKLKGRKDAAIAIKAGARKLAEAYYNAITKGIDYVEQGIKKYEQQLKLKEVSMLNRLAKKHKLQLVEIQPLE

SEQ ID NO: 279613 - protein, 340 aa, unidentified
MEKRYIGIDLHRNRFTSCIRLENGRTYLREWDLKDLARFVKELRAGDEVAVEITGNTRLFHDAVAPHVKRVVVVDTNQFRVISQSVKKTDPNDARLLSLYLSKDLLPEVRMKDKQLAQLASLTQTRDTLVKQRSALKNKVNNILSARGLNLAKEALSSEKKLAEVLELPFDEIVRIELRVVVEQIRSLNKSIAELEKTIGEEGSKLEGHKSLSSIKGIGKITGAILLSVIGDVNDFADEGRLASYFGIVPRVSNSNETERSGRIHKRGTKLGRTALVQSALIAAHYSPYLKRFYEQVKGRRGAGKAIIALARKFLGIIYRTLKNKWVFEDFPNFVLAEES

SEQ ID NO: 279614 - protein, 349 aa, unidentified
MTQAITETIGLDVGDRYSRYQVLGQADGEDAGGGRVPTTPSRLQQLFAAYPQARVVLEVGTHSRWISEIAEASCAEVLVANPRKLRFIYGNDRKSDQVDALALARVGRLDPNLLAPIRHRAESTQRDLATIRARAGLVQARTKLVNTLRGVIKSFGFRFPPMATERIGPQALEHVPGELRSQLGPLLVAIEALSGEIASYDAQIKELAASHPEAALLTQVHGVGALTALAFLLTIEDRDRFRSSRTVGAFFGLVPRRDQSGAVEKQLPISKAGDRMVRTLLVQCAHRILAKNGPDPDLRRAGERIASRGGATAKRRAVIAVARKLAVLMHALWRSGEVYRPLENHVPTA

SEQ ID NO: 279615 - protein, 414 aa, unidentified
MEVLHPRCAGIDVSKKDAKVCVRIQGSTRRKTSSTVTTWGSMTNQILALKDHLLGAKVTVVVMESTSDYVRPFYYLLEDDFEVMLVNARDVRSLPGRKTDVSHAAWLADLGAHGLVRASFVPPEPIRRLRDLTRTRTHITRERTREIQRLEKLLEDSGIKLSSVASDITGVSGRLMLQSLIDHQGNSDPAAIADLAKRRMRSKIPVLTEALNGHFTEHHAFMTRLFLDRIDAHTKDIELLSERIDGLMEPFLPARDLLESIPGFSQTVAEVFIAETGGEMRQFPTPEQLASWAGVSPGSNESAGRVKSTKTRPGNRYLKGALGVAALNQARSKSRKTYFSAKFRHLAPTRGPMKAIVAVERAMLVAAWHMLTNSEFYRDPGADYYTRRDPARTKARAVKQLEALGYTVTIQQAG

SEQ ID NO: 279616 - protein, 356 aa, unidentified
MLYSGVDLHRRLVVICTVDADGRVLARKTMKTHTELITNYFRQWPVDHRAVVECTTGWYWFCDLLRSIGVSVVLAHAKYLKAISYAKVKTDAADALTLAQLLRLGYIPEAHQLPAQYRAMRGLLRQRMAMEHKRTNIIQRIHSILAQFNITSLPLSPYQTGFADFLKECQLPDEYRLALSLYHLQCVQVTEHRKQLEHYSKTHLRPTPDLQLLMSIPGIGVLTGSIIAMETGDIHRFADAKHYCSYCRLVPGAKDSGGKHSHRSGSKDGNQYLKYAFTEAAIRAKTFYPQINHFAARLERRASKAIARTVVAKELAKITYYVLSRHQEFKTFKGIEIDKLRDWPRACKPVRLTGGA

SEQ ID NO: 279617 - protein, 423 aa, unidentified
MVLAESVDEDQIIARVAAVDVGRAELVCCVRVPGAGDAKRRLQEVSTHSTMTRALAELANHLVDLRIERVVMEATSDYWRPVFYLLEAHGLEPWLVNARDVKHLPGRPKTDVLDAVWLCKVAERQMLRPSFVPPRPIRLLRDVTRYRIDLVGVRTAEKNRVEKLLEDACIKLSVVASDIFGVSGRAMMAALIAGERDPRVLAGMARTRMRVKIPQLVEAFTGHFDDHHRFLLARMLARIDGIDADIAVLDTQIETLVAPFAQAVERLDEIPGIGPVAAAVIIAEIGLDMTRFPTAGHLCSWAKFSPGVKSSAGKNKGNGSTGHGNRYLARALGEAVVMAGRGDTFLGERYRRIARRRGKKKAIVAVARSMLVIIWHLLADPETRSTDLGANHFTRNVNTEIKKRNHIRELEALGYSVTLEPAA

SEQ ID NO: 279618 - protein, 392 aa, unidentified
MVVSVGIDVSKDKHDCFILSSEGEVLVDVFTIPNTMDGFNCLLQRIQDCTTPQGKMKVGLEATGHYSYNLLGFLLDNGLATYVLNPLRTNLYRKSLSLRKTKTDRVDARTIASMLLSDAGLKPYTDTAYHNEELKSLTRYRFDKVKERAKLKSSIARLVCILFPELEKLVPSLHIASVYALLEEFPGAKQVANTHLTRLKALLETASNGHYKRDMALEIRNAAKNSIGSQMPAKSLELQHTIRLIRELDREIDEIEEQIQSIMDELHSPITTIPGLGFRMAAMILAEVGDFTRFDSPDKLLAYAGMSPSTYQSGQLKNCYPHMEKRGSRYLRYALYNATKYVCHWDPTFADYLAKKRAEGKHYNIAISHAAKKLVRLIFAMEKSRQPYCSAA

SEQ ID NO: 279619 - protein, 414 aa, unidentified
MTETAYAMYVGIDWGTATHQVAVLDAQRGPLGERAVAHDGAALQAFTEWLMLLADGEPARVAVALEVPRGAVVDTLLERGFHVFALNPKQLDRFRDRYTVAGAKDDRRDAFVLATALATDRPAFRRLEPEDPLIVELREWSRAEDELREEWGRLANRLREQLHRFYPQALALCPAAAELWFWSLVGLAPTPAAARRLRRAAVVALLREHRIRRLTADQVLAALQTTPLRVAPGTVEAASAHAALLIPRLELVDRQRRDCARRIERLLDALATTGEHQGHRDVTILRSLPGVGRVVAATMLAEASRLLAARDYHGLRTQAGVAPVTRQSGKRLLVGMRYACNPRLRNALYYSGFISVRYDAHSRHHYQRLRGRGHSHGRALRGVVDRLLTVLMAMLAAQTTYDPARRRAALVLAR

SEQ ID NO: 279620 - protein, 402 aa, unidentified
MGLDVHAETITVAVAEGSSRGRGVGPIPNQPGSIRKAMKKLGRAKLLRVCYDAGPTGYALYSQLHKMGIACEVIAPTLVPVRAGDRIKTDKRDALKLAQAYRAGELTPIYVPDAEHQALRDLVRAREAAKKDQLRARHRLGKFLLRLGRRRDTQSNAWGQAHWRWLDSQVFDHAAQEETFVDYKNEVQHATERVARLYKAIDRAVEQAPPRMQELVLALQSLRGVAMLTAVTVVSEVGSFERFSSAQKFMAYLGLVPSEHSSGGSRHQGGITKTGNAHLRRVLGESALCGRLRPRRSPSLKRRQQGQSQAIVDMAWEAQKRLYRKHGRMRIRAKSHQVTVTAMSRELAGFVWAVGRQREAEMNTPGPPVERFKEAGKHPHGKEQSSKPACDRHGRAQLAPLV

SEQ ID NO: 279621 - protein, 386 aa, unidentified
MQKLNDLSRSLTRLDPDGTLIAVIEMSQSSWLVAGIVPGVERQPLKKLAVDESALLNLLNRWRMEAEKAGRKIERIAVAFEAGRDGFWLARWLRARGIEAYVIHASSVAVSREHRRAKTDRLDTELLKRAFLGWLRGERDHCKMVAIPTTKDEDAKRPNRERESLIGEQTRIVNRMKAALIRLGIRGFNPKLKRAAGRLEDLRTPEGEPIPPNTLAELRRDMERRQLVSDQIRQIEDARLERIEQAPGDGPHAMVRLLARVIGVGIETADMLVQEVLARNMRDRRAVARYAGLTGSPDESGTKRREKGLARSGNARVRRGMIQLAWRFLMFQKESALAQWFRARTETARGTRKTMIVALARKLLIALWRLVREGVVPDGVVLRPAQ

SEQ ID NO: 279622 - protein, 331 aa, unidentified
MSVHVGLDVGSRTTAMGWRDKGRAAGSWEIAQTPKGRKAAVKKLMALKPLSVVMEATGIYYLDLALELSAAGLPVSVINPKSSRNFARLMLQHSKTDAIDAQLLAEYGERMAPRLWVPPSPVQLELRAIGRHINRLICHCTRAKNELHALQATGTTSALLIEDEEEAIAMFGKRIERFRQAGRAIIANCPALRSQFDHMMAAPGMGEVSTFAVLAELTALPVTLKSPQVSRYAGLDVRLTQSGTSIDKPGRLSKGGNAYLRSAMFMPAMSAIRCDPHVKAFYEVLIGRGKRKMQAICAVMRKYLTGLWACIRTEEDFNTAKLFSEKHLLKA

SEQ ID NO: 279623 - protein, 341 aa, unidentified
MQITTIGLDIAKNMFQVHGIDAAEKVVVRKQLRRGQVTKFFEAVPPCLVGIEACATAHYWARELTKLGHQVRLMPAKDVKAYVKRNKNDAADAEAICEAVRRPTMRFVGVKSAEQQGRLMQHRTRDLLMRQRTQAINALRAHLAELGIVAAQGREGLKQLLAIIADEQDERLPVDARASLIVLAAQLEALQTMIGSIEKRIIAQHRASEESKRVATTPGIGILGASAIAATVTDPSAFRSGRDFAAWIGLVPRQDSTGGKQKLGPISKQGDRYLRRILVVGAHSVLRRAKKNPEKYPWLTQLLARRPFKVVAIALANKMARIAWALLASGADYRPARLAAA

SEQ ID NO: 279624 - protein, 408 aa, unidentified
MQVTFGIDVSKSTSTVCELIGESKNELTITNNRPGFIQLLHELTAFSKHPQIIFEATGVYSRTLQSFLEDYGYDYVILNPLKAKKEMDMGLRHNKTDKTDAYHLALIQRLYRHPVNQSESQTYKQLNALSRFYDQLTADLVMAKNRLHQALQSTFPEIENLFSSAKGKNYWQIVVRYPHCDLVRREDKKQLINWLMSLKGIAFKHALRTADKLIELAYQAYPVVSCSSIEVEQVQYYAHRLLNLSDQRENLIARMVKLAKSLPNHDLENLESIPGFAQTTAVRVLAELGDLRRFSNPNKINAFIGIDPGRYQSGEMDSNLSITKHGNAVARKLLYRAIGQIDNAAKTNPCHIADYYESKKLSSQTKGFKKIAIASIHKLIRTIYALITNDQPYDYNVATHNQKDFGRN

SEQ ID NO: 279625 - protein, 351 aa, unidentified
MLIIGCDFHTRYQQIAMAEESTGELLCERRLENESGEAAAFYRSLHKPVRVGIEATGPIHWFERLLTELGHELWIGNSARIRASEVRKQKTDERDARLILDLMLAKRFPKIWVPTPAERDLRQLLWHRHKLVCLRTMLGNQLHFLAMSQGLCRKKKLFTKKGRVELTGLALGPWTRRRREELLKLLDQLDPAIAELDGAVLEEAQRRDDAVLLMTHPGIGPVTSLAFVLAIGPVTRFPGSKKIASYLGLNPSEESSGGRQRLGAISKQGNTMVRWLLIEAVYPAVRKDLALRQDYQRLKFRRGHAVAKVAIARKLAVRMYWMLRSGADYAQLVRRQGSPGATLVDASPSLG

SEQ ID NO: 279626 - protein, 389 aa, unidentified
MKKNSIAKLQVKLKSGTNQIRPLVAKQRLTVGLDLGDRSSRYCILDEAGEKVSEDKLPTSKAELESTFGKMPRCRIALEVGTHSPWVSRVLAAMGHEVIVANPHNVKLITKSVKKNDRIDAEHLARLARVDPKLLSPIRHRGEEAQADLAVIRARAELVETRTALINCARGMAKPMGERLKQCDADQVKEGLADGLGAGLQEVIRPLLKCVEAMSKQIEVYDEKIKAIAKRYPEIELLTPVWGVGTLIALTYILTIEDAQRFEHSREVGPYLGLTRKRRDSGDNEPELGISKQGDALLRRYMVQSAQCVLRDGAPDTDLKVWGRAVQNAGRKTSQKKQKGSKRAKKKAVVAVARKLAVLLHRLWVTGEVYDPHYNRKAAAAAQRKNKAA

SEQ ID NO: 279627 - protein, 480 aa, unidentified
MNIKAKKAKVQPLSKKSVINVLSQDEIKKKVQVIEQELKASTWRELETKGKFEKNDKLSFISEEMLIVGCDIGSETHYIRAIDTRGKELSKGAFEFSNSSEGFASAKAWVLKLAAKNDKKQIVLGLEPTGHYWFAIAAWMVSNGISVVQVNPYAVKQSKEIEDNSQLKDDRKDPKIIANLVKDGNYGMPYLPEDIYADMRRLSMFRDQLTEDRIRNINRLHREMKIYFPEYMDAFGKIDGAFTLEILKVAPIPSDIVELDEEGLKSLWHEAKLRGRGYSRARVIVDYAKKSVGLTGGTDAGRESIKWFVEQIIQLDEQLAEIENVLHQKCMEIPHAENILEINGVGENILAGILAEMGDISSFDDVKEIQKLSGMGLVACSSGKHKGQTKISHRGRKRLRYWLFQAAKSAVAHAVEFKQLHAYYTTRSMNPLKKMQSLVVIACKILRVIYTILNTGMKYDPERMLRDIRYPQGNTVQAAA

SEQ ID NO: 279628 - protein, 315 aa, unidentified
MTHTNITTAGIDTSKAKLDVAVHNRTERWQVANALPGWRALAANLAKAGVTRVGIEATGGYERGVVGHLLAAGLTVMVLQPLQVKAFGRVHLRRAKNDALDAVLIAACTAALDPPKIAPDPRLAELAGYLTFLEQIEEDIRRFKTRLEHIDEPALRRIVNGDIAKLKLRRAAQIRDIAKRLRAHHDLAVRFDLVLSVPGIGERTALAIVIRMPELGRVSREEAAALAGLAPFDADSGQYRGQRKIAGGRGRLRRSLFAAALPAAFRWNKALVALYGRLIANGKVHNAALIACARKLLIYANTVVQRGTPWIEKAA

SEQ ID NO: 279629 - protein, 346 aa, unidentified
MMKILALDLSKFKSVGCMYVAESGAHSYRRVNTTPVAIHDLLVEEEPDRVVIEVSSVSGWVSDLVRALGIELQVVNTNGEAWRWRSVKQKHDQADALKLGRLSAMNQLDLVHVPAAEIRQWRAVIKYRQHLVGRRTDIKNHVRELLVREGVILPRGRKCWSQEGCAGLEEMTRSWEEVGISELWRGELQSEMQQLQVIQERIREVEAKLDTLAATDDRVSLLRTIPGVGPRLAEAMVALIDDPHRFKRGRDVGAYLGLVPRQYQSGEMNRLCRITKRGSKLLRSLLVEVSWVSLRYNPWLRSLYERMHRGSKTRKKIAIVAVARHLAIYCWAMLRDGTTWRQPCSN

SEQ ID NO: 279630 - protein, 341 aa, unidentified
MQVSTIGIDLAKNVFQVHGVDAIGKVTITKKLRRSQVLALFERFPRCLIGMEACATSHHWARELRALGHDVRLMPASYVKAYVKRNKNDAADAAAICEAVTRPSMRFVPVKTAEQQSALMLHRTRDLLVRQRTQLINAMRAHLAELGLVAARGREGVQSLIALVRDNVSQLPDLARSALQAILSQLDALGQQIANIERHLHAQHRVNEVSQRLETIPGIGVIGATAIAATVTDPKVFKSGREFAAWIGLVPRQNSSGGKERLGSISKQGDRYLRRLLVIGATAVIRQARTHPDEHPWLIQLLARRPAKVVAVALANKTARIAWAVLARGGTYRAPALAARV

SEQ ID NO: 279631 - protein, 447 aa, unidentified
MPLQEVAAYMKVLHERVAGLGVHKDMIKVAIRSPGAKPWTRRTEILTFGTFYGVLRAMARELRRRGVTHVVMEASGVYTEPVYYALCELDFTEVLVINPAHAKALKGHKTDARDCARLAELLECGLLQGSCIPPAELKEVRDLTRYRVKTVQARTSEIQRLGKALKSAGIKLGSVASGITGHGPTAMIEALIDGERRGPVMADLARGRARTAAKMADLSMALEGRFTGHHALMCRLHRDRIEVHDAAVADLDTRIKDKAAPWQRETGLLKTIPGVGDVVAWTWIAEIGPAPHQWFATSGKLASWVSLAPGNYISAGKRKRSRTGDAGTYIKPVLVQAAWAAVKGRGRLQDRYNRLVRRFGGPKNPGAKKKAIVAIAHTLLKIACSVLKTGTPYQDLGAGSCPRRESPAQRQAWLERQLQELHPGCIVTVTIAPPPGHAPEAALPPGP

SEQ ID NO: 279632 - protein, 352 aa, unidentified
MATYYIGADVHSNSIEMAIFNRKKIVQRYTIPASVSAVSEVLESLNGKKYMAIEEGPMSGWLYRNLRQQVDRFVVADPRRNKLISSDGDHDDRIDSAKLAILLAGGYLREVYHSDDDKRVELKHWVSLYHDRVRDAVRNINKIRARCRMHGMTIPRKVLRQPEHRAVWLRKLKNTALSNQLFMLWIGYDATAKQARMAKQRLINLSKRYPIIRLWKQLAGIGVIRAVTIFAYLDIPWRFKKKNKLWKYCGIGLQRTASGTDKKGKPKPARLQLPWAANRILKNAILGAALTAINQKQNSFKADYERMVLNGIIPSNARHTVARKMLTVMWGMWKRSCQFDLSEVSLPELTKQ

SEQ ID NO: 279633 - protein, 362 aa, unidentified
MCRVGEPVDNLLSFTLQRNIILIIQSKQIIQESKPLCAGIDVGAEELVVVIRKDGTSSKPQKFANSPSDRARLVQKMAKLPGVKVCLEATGVYHFDLSIALHDSGVALMVVNPKASHNFAKALMKNSKTDAVDAETLAQYAERMDFIAWTRPSNEKIAIRSFARRIDALTRQKAAAKNHFHALSASQENPKAVLRDVKLAISQLEKRIARLSKEALILIRKHSELERMFLLLTGIKGVAETSAIALMGEILLLPPGLSHREWVKFAGLDPCAFDSGKSVHKQARLSKTGNRHMRSALYMPALSAKQHDPHVKAYSQHLIDNGKKPLQAVCAVMRKLLHAIHGMLKHDKPFDNTRFYAIPALP

SEQ ID NO: 279634 - protein, 338 aa, unidentified
MSMVIGVDTHKQTHSAALLSELGVVESGLEVAASAAGYRQLLAWARSNSASRIWVVEGTGSYGAGLTTYLSEQNEVVYEGDHPKRSWRGPAGKSDQLDAIWVAKEALAHRRPSLPRARGERELLRVLLTARNGAVEAEKQGLNQLYALVVSAPEPLRQRLGNLRAAALVQACLRLRSSADQESAVTAATLRSVARRVSALATEAAGYERQIGKLVSVLAPQLLALKGVGPLSAAQFLVSWSHAGRLRDHNAFAKLAGVAPLPASSGRIQRHRLNRLGDRQLNRALHLVALTRSRCDLQTQAYIARRTSEGKSVREIRRCLKRYLARRVFKLLEHLDKT

SEQ ID NO: 279635 - protein, 347 aa, unidentified
MNFYHSTHRHYCGIDLHARSLYVCILDQQGEVLLHKEIKAQPEPLLALLDPFRDDLVIGVECMHCWYWIADLCEEHGIAFILGHALYMKAIHGGKTKNDRIDSFKIAMLMRGGNFPLAYVYPKEMRATRDLLRRRTRIVQHGAMLKAHVINTTSQYNLPPNRVNLKNLNARTQLHNTFEHPEVQRNVDLDLAILQFYHQELSKLEWHLEQQAKQHDPASLSVLRTIPGVGRILALTILYEIGDIQRFESVQKFASYARLIKCKAESAGKTYGTQGNKIGNAHLKWAFSEAAVLYLRGNEKAQRYLQTLQKRMNKAKALSALAHKLGRATYFMLKHRRVFDEQRFLTG

SEQ ID NO: 279636 - protein, 360 aa, unidentified
MALTIVETRAITGGVDTHADVHVAAALDPLGGLLGVQEFPATPAGYGLLLGWLGGFGSVCLVGIEGTGSYGAGLARHVTAAGVRVVEVDRSDRQDRRRQGKSDPLDAVSAARAAQSGRARGAPKGRDGTVEAVRALMVAKRSATGERTQTINQARALVLTGPDDLRARFARHTAAALVAGTASLRPRTGDVVGYAVRVALRELGRRAEFLDGQLDRLDKLIVPLVTAHAPRLLALRGIGPNTAALLLIAAGDHPERLRSEAAWAHLCAAAPIPASSGKTIRHRLNPGGDRQANHALWRIVFTRMGSDPATRAYVERRTEEGLSKKEIIRCLIGGLSVPRSGQPGRGSPVALGDGLVAEPL

SEQ ID NO: 279637 - protein, 338 aa, unidentified
MKCYAGVDLHSNNSYLGIIDKKEKKVLKKKMPNDLEEILRELKPYRKDLEGIVVESTFNWYWLVDGLMDNGYRVHLANPSAIKQYEGLKHSDDAQDAFHLAHLLKLGILPEGYIYPKEQRPVRDLLRKRLQLVQQKTSHILSFKNLVSRNLGFQMSSNDIKKVSEEDVKDMFKEEHLVLAGQANIATMQFLKERITEIEKAVLRQAKLKEEYRKLLTVSGIGKILALTIMLETGEIMRFPKVGNYVSYCRCVGSTRISNGKSKGEGNRKNGNKYLSWAYVEAANFAVRGYPYVRSYYQKKAAKTNNIVAIKAVSHKLARASYYVIKNQEVFDPKKAFS

SEQ ID NO: 279638 - protein, 352 aa, unidentified
MQHFIGCDLHTRNQVVAWIEEETGEIKKRWLEHEGQEEKEFYAQFPRGTVVGIEATFPAYWFERLMGELGHELWVGDAARIRASEVRYQKTDSRDAELLLDLLRTGRFPRIWVPSLEERDLRQLLVHRMKQVRARTQVKNQLHALAISQGVCRGRKLWSAKGRKELEGLALLPWAARRRKELLESLDRLDEQVRELDRAVEEAGRARAEVALLRTHPGVGMVVALAFVLTVGPIERFSNSRKLVSYWGLNPRENSSGGRQRLGSISKQGNTMMRWLLVEAAQTAARLDPQLRRIYQRLKKQKTSGVAKVAVARRLAVRLFWMLRTRNNYAQLVHMSGSPRSAVVPPPAEPTV

SEQ ID NO: 279639 - protein, 302 aa, unidentified
MQSTTKFVGLDVSKEKISVAIADASGEAPRYYGTIPHTPAALRKLIKELGAAETLSFCYEAGPTGYETYRWITSMGAHCVVIAPSLIPKRPGDQVKTDRRDAEQLARLYRAGELTPVYVPEREDEALRELVRAREAAKEDAHRARQRILKFLLRHQIEPPATIKRRWTKKYRVWLGQLTFPYESMHVAFSEMLHALDEIEQRMGRLEKALVEQAATGSKASLIQALQSLRGIGLLTAITLAAEIGTFARFRSPAQLMAYLGLVPREYSTGLSTRRGSMTKAGNGRLRRTLVESAWSYRHVLP

SEQ ID NO: 279640 - protein, 391 aa, unidentified
MIVVGIDVAKDKHDCFIVDSEGTVLFDVFTVPNTLDGFNILLDNIKSVTENFDKIKVGLEATGHYSYNLLGFLLNNGLPTYVLNPLHTNLYRKSLTLRKTKTDKVDARVIASMLMSCVDLKPYTSTLYQNDELKSMTRYRFDKVSERAKLKTSVSRLVTILFPELEALVPSLHMKSVYALLSEFPSAQHIANAHLTKLTNLLSEASKGRYGKDKAIQIRDAARRSIGSVMPAKSLELRHTIKLIGDLTEQIDEIEAEISKLVDTTGTTLMTIPGISYTMAAMILAEVGDFSNFSSPDKVLAFAGMSPSTYQSGQLTNCYAKMEKRGSKYLRYALYNAAKYVCTWDKTFKDYLAKKRAEGKHYNVALSHAVKKLVRLIFALEKSHLPYQPVV

SEQ ID NO: 279641 - protein, 448 aa, unidentified
MNQNQRESQPAVLSATIAPTVASSSSPPVREELPVGECAALVGLDWGDTRHAFALRVQATGQTETGSIEHSAEELHGFLEQLQTRFGGQRVAVAVEASKGAIVAALLEHASWLTIYPVHPATSRRFSQAFTPSGAKDDGPDAQTLLEILHGHRHKLRALLPHDPETRRLGELVELRRAFVDQRTQVSNQLTSLLKQYYPQALALTGAKRYAPLALDFLERWPELAQFQQARPQTVRAFFYAHQVRREETIAERLELLRAARPLTTDRIRCEMGMLQMKMLVAQLRLLQKQIAQIEALLATVFAAHPEASLFANLPGAGAAMAPRLSVLFGTDRTRWADAAQLQTYYGIAPVTERSGRQQWVHWRWSAPLFARQTLVEWARLSVRESTWAKAYYEAQLAKQKGHAVIMRALAFKWLRILWRCWQNRQPYDEARYLLALAQRRAQLLTAA

SEQ ID NO: 279642 - protein, 386 aa, unidentified
MLQTTLTTHTTLDYDKTLVLAIELSSKNWVLAAQVPGLPRTKAKRTIEPAPEELMTAINGYRARAAAAGRTVERIIAVYEAGWSGFWLARWLTSRGIETYVIQPSSVPVDRRARRAKSDGIDVELLLRTLLAWLRGEPRVCSMVPIPSAADEDARRAVRERKELVSERIGLVNRIGAVLATLGVHGYNPLRRDRRLRLDALRTGLGDTLPANARAKIVRMLDRLELLLEQIAELDRQRDAVLKDESPDRASAMIQQLTTLRGIGVQSATVLVREAFVRDFASGKALGSYAGLSPTPYNSGGVSREQGIGKAGNRRLRTVMVELAWLWQRYQPGSAHARWFRERAGATGARIRKVMVVALARKLLIALWRFVTQGVVPEGTTMKTAS

SEQ ID NO: 279643 - protein, 410 aa, unidentified
MELPIRSTRVTLWIGKEPRRRAAYEWEPAVKNVLWVGLDVHAKSIAVAVIGADGEVRYLGVIPNDPGSVGKLIKKLGKKPEQLRVCYEAGPTGYVLYWQLTKLGVHCEVVAPTLIPVKPGDRVKTDRRDAEKLVRCYRAGDLTAVWVPDAAHEALRDLVRAREAAKQDQLRARHRLGKFLLRQGRRAPEGTKAWTGKYLKWVKEQVHFEQPAQEATLLDYLHEVEHEGERIQRLEKSIEAAIETVPEKMRAVIQGLQSLRGIAQISAVSIVAELGEISRFAKARQLMGYSGAVSMEDSSGDEVRRGPISKAGNAHLRRIVVEAAWAYRHRPNIGPGLAARQQDSSEEVKEIAWKAQHRLHKRYSKLLAKGKTKQKVVTAVGRELLGFIWAIGVHVEQAVVAASAPRRRAA

SEQ ID NO: 279644 - protein, 424 aa, unidentified
MFGTAGRARKRWKLQRKFELFVGVDWGSEQHRVCIVSPTGEILDQRWVEHSGQSLAELVTWLRSKTTASPDNVAVAIELPRGSVVETLMEQGFAVFSINPKQLDRFRDRYSPAGAKDDRRDAFVLADSLRTDMRCFHTVRLDEPATIRLRELSRLDDDLRLEQNRVHNQLREQWHRFFPQLLQLSPAADEPWVWDLFQTVPLPGKAVKLPATRVQRILAKHRIRRIDVPQVQAILAATPLSVAPGAAEAASEHALLLLPRLRLLQQQRTAISKRIDTLLEELAKPDQTDSETIEHRDAEVLLSLPGVGRQIAATMLSEASQAIAERDYHGLRCYTGAAPVTRQSGKKKVVLMRQGCKERLRNALYHWSRVSVVYDPKSKIEYAAMRAKGHSHGRALRGIADHWLTVLLSMLRHHTLYDPQRRPA

SEQ ID NO: 279645 - protein, 411 aa, unidentified
MQYFIRKEGMPMLSIGIDVSKGKSTVCGMKPGGEIVYTPFEVQHTREGMSELVSLLRSSGEEVRAVLESTGSYHCPVVAALLENGIFVSVVNSLRMKRFCSQSIRKVKTDRIDAMQIALYGLAYWQELQPTKLPEDTYRELQLLARQYYQMTSLLIKAKVDFNAICDQVLPGMQELMNDHAGRHKLSDFVLRYHHTTHILEMGETRFRKDYCKWAEKKGYRNCERMAALIFATAQNGIPVLPNAPSTQIVITEAIRVLHTVEASRDAILTQMQALAKTLPEYSLVREMPCIGDTLAPRLIAEIGDVRRFHSKRALIAYAGIDAPPYQSGKFCANNRHISKRGNRYLRKTGYEVMQSYVMHKPANDPIFTFIEKKRGEGKSGKLAMVAGLNKFLRVYYGKVTELYRSLPTIE

SEQ ID NO: 279646 - protein, 337 aa, unidentified
MKRYLGVDLHRTQMTVCTRLESGEESVREWAIKDLPEFAEQLRAEDEIAVEATGTTGRFYDAVVGRVARLVVVNPHKFKIISESVSKTDGKDCRELALFLSKDLLPEVRMKPKKQRELTHMTETRDLLVKQRSALKGKINNLLAMQGINLKREALSSKVALERGMGLEVSAMVKLELRVLVEQIRALSASIGELEELIAEEGEQLAGHRNLTSIKGIGSLSATVLLTTIGSVGDFADENKLAAYLGLVPRVQNSNATERNGAITKMGNKLARTALVQCGLVAKRYSPYLNRFYQRIKERRGGGKAKIALARKMVKIVYDTLKNNWVFDDFPSFTLAA

SEQ ID NO: 279647 - protein, 388 aa, unidentified
MNVGADKSEPFTAIRTDLGAIFVSLELSRSSWLITSLSPGGGEKMSKHSVPGGDFAGLMERFAQLQEKARLRTGQSFRIIVIQEAGLDGFWIHRALQNEGIESHVVDAASIATSRRRRRAKTDKIDGETLVRVLLAYKRGEPRVCAMVKVPTPDEEDRRHLCRERKALTAERVRHVNRIKGLLFSQGISGYQPLRRDRRQRLEELQTGDGRAFPQHLKALVNRELDRLELLLKQIKTVEAARDALLAVGQTAKPAPAAMLLDIRGIGPEFAAILWSEGLFRHFENRRQIAAYAGLAPTPWQSGAVDREQGVSKAGNPRLRTTLIQLAWLWLRNQPRSALSVWFHERISRNGGRLRKTTIVALARKLLVALWKYVTAGVVIEGVTMKVA

SEQ ID NO: 279648 - protein, 390 aa, unidentified
MSQSFDASKSLTAFEQDSTLVAVIEMSQSKWLVAAVVPGIARQPLKKLDADAGALLKLLQRWREEARKAGREVKRIVCAYEAGRDGFWLARWLQARTIEAYVIHAASIAVSREHRRAKTDRIDTELLMRSFLGWLRGEKRHCNMVAIPTMTEEDARRPSRERESLVAEQTRTVNRVKAALALLGIGGFNPRLRKAAQKLETRRTVEGTPLPENVHAELRRDLQRLRLVHDQISTIESERLRRLAQAPAAATGPHAMVRLIARVLGVGIETADMLVNEVLARNLRDRRAVARYAGLTGAPDESGKRRREKGLARAGNGRVRRGMIQLAWRSLIFQKQSRLVRWFRARTADGRSTTRKTMIVALARKLLIALWRLVTTGEMTEGLKLRPAGT

SEQ ID NO: 279649 - protein, 402 aa, unidentified
MNAVGIDVSKGKSMVAIMRSFGEIVSAPFEIKHTASDIHSLVELINSVEGESRIVMEHTGRYYEVLAHQLSKANLFVSAINPKLIKDFDNDSLRKVKSDKADAVKIARYALDKWQNLKQYSVMDELRNQLKTMNRQFGFYMKHKTAMKNNLIGILDQTYPGVNTYFDSPARSDGSQKWIDFASTYWHVDCVRKMSLNAFISHYQSWCKRKKYNFSQSKAEEIYGKAKELVPVLPKDGITKLIIKQAVDQLNSASTTIESLRTLMNETASQLPEYPVVMAMKGVGTSLGPQLMAEIGDVSRFTHKGAITAFAGVDPGVNESGSYEQKSVPTSKRGSSDLRKTLFQVMDVLIKTHPQDDPVYQFIDKKRAQGKPYYVYMTAGANKFLRIYYGRVKKYLSSLPES

SEQ ID NO: 279650 - protein, 346 aa, unidentified
MEHYVGLDVSLKLTAICIVDRTGKIEREGVVASDPEAIAVFIKSHAPHVARIGLETGPTSTWLWTELNKMGLPVICIDARHAKAALKLQINKSDRNDAVDIARIMQCGWYKEVRVKDLDSHAIKALLVSRALLVKIKRDLENQIRGLLKNLGLVIGQAKMNVFSVRAAELAEARPELAAAVEPLLKAREAVGRQIADLDRKVMRLARNDAQVRRFMTAPGVGPITALCFLATIDDPTRFKRSRSVGAYAGLTTRRYASGEIDWTGRISKCGDKMLRSYLYEAANVLLTRVAKWSALKAWGVKVAKRSGLRKAKVAVARKLAVILHRMWIEGTEFNWSSKEAANQPA

SEQ ID NO: 279651 - protein, 347 aa, unidentified
MIEEYDGRQFVGMDLHRRRSVLVRTTESGEQLGWVRIANDPVTLASVMAECGESPQVVLEATYGWYWAADVLAGLGACVHLAHPLGVKGFTYRRVKNDVRDAADLADLLRMGRLPEAWIAPPATRELRELVRHRAKLVHARTSLRCQVHAVLAGQGVRVAVSDLFGVKGRQLLEQLELPEAFRYRVDSLLRLIEVFDREVDQAGQLTVARLRSDPGFVAVQTIPGVGPVLGAVFVAEIGDVHRFPGPGQLTSWAGLTPRHRESDTTVHRGRITKQGSRLVRWAAVEAVQHAPDGTRMKLVRDRIEARRGKTGRNIGTVAAARELLEMVFYALRDHHVRRLSPPAVAA

SEQ ID NO: 279652 - protein, 355 aa, unidentified
MNKIKTNFEGQTIYVGMDVHKDSWNLGIHLNDIFVKNVHQKPNPQLMVDYLHKNFPGAIYKAAYEAGKFGFWIQRQLASLGVDCLVVNPADIPKSQKDSLQKTDPRDARNISLRLQSGFLRGIHIPDEQQEADRVFFRHRKKIWKDLTRCKNRIKGLLAFTGIDIPEPYDNASWSHNFINWLKALDCKQSPRRRALDFQIRQMEFMRKELLSISNEIRKMMREQRYKTNYYLLRTIPGIGPLTAASILVEIGDVKRFDTFSHLNSFIGLLPMEHSSGQSENKMSLTVRKHRQLRSDLVESAWTAKRTDPAMALYFDHQIKRKDSKVVIIKIARKLLNRVRYVLLNQQPYEFGIVK

SEQ ID NO: 279653 - protein, 345 aa, unidentified
MTRFVGLDVSQKLTAICVVDETGCRLWRGQCATDPGQIERMVRGHAGEGAKIGVETGPMTPWLVHELRGRGLDVTCLDARHASAALKMQMNKTDQNDAEGLAQIMRTGWYRPVHVKSLDAHRARALLGARAQLVGMTTRLSNHIRGVLKTFGMLPGAMRGLPFDRRVEELLADRDDLAPIVRPMLVAWRQLREQIAAFDKAVRALAKADPTCRLLMSVPGIGVLSVLAYVSTIEDPARFARSRSVGAHIGLTPRQYQSGEVDRSGRISRCGDTLARTLLYEAAVVLLTRVKRASSLKDWAQAIAKRSGPGKARVALARKLSVILHSIWRSGEPFRWSEQEQVQAA

SEQ ID NO: 279654 - protein, 481 aa, unidentified
MPAKKAEAKNADGKSAGAAAEHGGDGAEVAEDRVQVVEYAAAIDVAKGFGMVCTRVPGSRPDRRRQKVWRVEATYAQVIGLMDHLRCEGIQRLVLESTSDYWRVWYYLAEAAGLEVWLVNARDVKHLPGRGKSDRLDCVWQCKLNERGMLRRSFVPPEAVRDLRALTRTRARLAQDQARHRARVEKILEDALLKISVVISDLFGASGRRFLDALVAGERSPAALAALGDTRLKATRQQLEDALTGRFRDIHAFEISTHLRLIDAINAEITRLDQAIEQQLAKVPRTAPCCVACGLAGGGHAPGCAGEGTPLLSLAARLDEITGIGECNARVIIAELGTDPSQFPTPGHAAAWARLTSRTMQSGETARPGRTGKGNRYIRGALGQAAMTAAKTDTRLGAMYRRIARKRGKQKAIVAVSRIICEIAWILICDPGARYEELGPDYYSPRSPARQTRDKIRDIERLNPGKKVILIDADPEACAVA

SEQ ID NO: 279655 - protein, 342 aa, unidentified
MDEYDVRQFVGIDLHRQRSVIVRQSESGDQLSAVRIVNDPVALRLELERAGTDPEVVLEATYGWYWAVDVLRDCGAQVHLAHPLGVKGFRYRRVKNDVRDAGDLADLLRMGRLPEAWIAPPQTRELRELVRYRAKLVAIRSGLKAQVHAVLAKAGVLIAVSDLFGVGGRQRLAKVPLGAAYAERVRSLLELIDVLDGHEARFAGLIAKRLCNHRGYQALQQVPGIGPVLAAVFVAEIGDVHRFTRPAHLCSWAGLTPKHRESDTVVHRGHITKQGSKLVRWAAVEAIQRYPTTSKIALDRTRIESRRGKNIAKIAAARKLLTLVYYGLRDGHIRALDRPRAA

SEQ ID NO: 279656 - protein, 359 aa, unidentified
MNGNKERPQVTAGLDLGDKYSYLCLLDTDGGEVIEEGRVRTTPEALRRRFASEGPMRVAIEAGTPSPWVSRLLEECGHEVLVANARKLRLIYANKQKTDEIDAENLARLARLDPKLLYPLKHRGEESQAHLALIRSREALIGCRTQLVNHVRGAVKSFGGRLPKCPARSFHNKAAEHIPEALWPALGPILEQIASLTQRIRDYDRKLEEISKESYPETELLRQVEGIGPLTALTFVLTLEDPYRFEKSRSVGAYLGLVPATSQSGDRDPQKRISKEGDEMLRRLLVGSAHYILGPFGSDSDLRRHGQKIASRGGKNAKKRAVVAVARKLSVLLHSLWVSGEVYDPLRNTHRRERREEAA

SEQ ID NO: 279657 - protein, 417 aa, unidentified
MNDKFLWFVGLDWAHEEHRICLLDGEGKQVAERDVSHDGASLSGLCDWLLERTGAQPGEIAVAIETPRGPVVEVLLERGFAVFAINPKQLDRFRDRFSVAGAKDDSRDALVLGHSLRTDPHAFRRLAVDDPLVIELREWSRIYDELKGEQNRLTNRVRQQLWRYYPQASELAEDIAAEWFLDLWQQVPTPAQAARVSEKAIARILKNHRIRRFDAAHVLRILRTPPLAVAAGTIEAATAHIGTIVARLRLINQQIREAERRLDELCAAIAAAAERAPGQICEQRDVAILRSCPGLGRINIATLLAEASEPLRARDYHALRVLSGVAPVTRRSGKSCIVIRRHACNDRLHKALYHWARVAIQHDPTSRRQYAALRQRGHSHARALRSVGDRLLSVLCTLLQRQVLFDPNYKTAQLAAA

SEQ ID NO: 279658 - protein, 370 aa, unidentified
MVNSAALCVGLDVHKDSIAVAYATSQRNDTPHFVGAIGTRQADIDKLLRRLHAKASQLLFAYEAGPCGYVLYRYLASKGLECQVVAPSLIPKRPGDKVKTDRRDAVELARLLRSGDLTSVYVPSVEHEAVRDVCRARDAARLTLKAAKLRPKSFLLRLGLHYTGRADWTAAHRRYLARVVCPTAAQQIVFQESIRAVDEQVDRLQRLERELLDLASHWQLWPVVNALHALRGVQWVVALTVVAELVDLTRFDNPRQLAAFVGLIPSEHSSGRQRRQGSITKTGNGRARRVLIEGAWAYRYPAKMSEAIQKRNESLPKVIRDIGWKAQVRLCKRYRRLTARGKHSNLAATAIARELLAFMWAIAKEVPIKS

SEQ ID NO: 279659 - protein, 333 aa, unidentified
MLPPNCGTATPYILRNTVGLDISKLTFDATAMVGKTEHSAKFDNDSKGLDQFSDRLKSLGCQNLHICMEATGNYYEEVADYFAQYYSVYVVNPLKISKYAESRFKRTKTDKQDAKLIAQYCRSAQESELVKRQKPTDEQYRLSRMTAAYAQIKSECAAMKNRHHAAKDEEAAKAYAEIIKAMNEQLEVLKEKIKEQTEKPNCKEGVKRLETIPAIGRMTAAVLFHHLTSSKFETSNKFAAFAGLSPQQKESGTSVRGKGKLTKFGNRKLRAVLFMPAMVAYRIRAFPDFIKRLEEKKKPKKVIIAALMRKLAVIAYHVHKKGGDYDPSRYKSA

SEQ ID NO: 279660 - protein, 347 aa, unidentified
MGYFAGLDVSLEETTICVVDDAGMIVREARAASEPEVLVAFFEACGMKMERVGLEACSLTAWLHAGLTEAGIPAICIEARQAKAAMGAMPNKTDRNDARGIAQIMRTGWYRAVHVKSPPCRAWRALLTARRMVLNKRRDVENGIRALLREVGLKVGTPSRKDFPARVRELAADDPVLLSLAESLLSVIAVMTREAERLTKQVIDEVRVEPTCRRLMTVPGVGPLTALAFRATIDQPCRFRKSRDVGAHLGLTPRRYQSGETDVQGRISRCGDELARTALYEAAHSLLIRSTKWSALRAWGMNLAKRRGMARARVAVARKLAVILHRMWVDGSEFRWGKQTAAPAVAA

SEQ ID NO: 279661 - protein, 399 aa, unidentified
MVWYVGIDWATEEHAVCVLDDGGRVKKALSAAHTAAGRGGCRELGALGDRAQVRVAIERPTGLLVDTLVDAGFVVVPLHPNAVKACRPRYSAAGGKDDPGDAYMIADILRTDGHRFRELQPLSDDTRALRAAVRARDDLVAERVGVANQLRALLESFWPGAAEIFADIDSPIALSFLARYPKPQSAAHLGEKRLARFLAEHRYSGRRPVAELLERLRAAPAGKAGVVECDVKADLVRAYVAVLGPLVAQLTTLTALVEHLVGQQPDGPVVTSFPRAGKVNAAQLLAELGDCRERFATEEQLAAEAGVAPVTHASGKHRGVAFRRACNKRLRQAVTCFADNSRHASPWAADVYRRARDRGHDHPHAVRILARAWLRVLWRCWRDGKPYDAALHGGAQRVA

SEQ ID NO: 279662 - protein, 348 aa, unidentified
MTVYIGVDFHARQQTISYLTTEDGEIQQLVLAHEEPAKVRAFYEQFASQQVVVGFESSGYAAWFEELLEELGCEIWIGHAADIRRFARRRQKNDRRDAALILDLLVAGDFPRIHRYSAASREVLQQLRYRQKLVKMRTMVVNGLLFMASSRGVTLRSQLQSKRGQARMRQLALPAPLAQQRDELCQLLLELSGKITTVQAWLESRAEQDVRVQRLRTQHGIGPLTGLCLAATLECPERFANGRKVTAYAGLDPTEDSSAERRRMGAISKQGSRLLRFYLVEAGQVAMRKDPDLARVYQRLLRRCGHAKAKVAVGRRLLVRAFIMLRDEIDYAEFQRRGVAARSSRGTA

SEQ ID NO: 279663 - protein, 348 aa, unidentified
MTTMVEDTRAITGGVDTHADLHVAAALDSVGGLLGVQEFPATAAGYAELLGWLRSFGNLALAGVEGTGSYGAGLARYLAAAGVRVVEVDRPDRQDRHRQGKSDPLDAVSAARAAQSGRASGAPRGRDGAVEAIRALMVAKRSARQERTQAVNQARALIMTGPEELRAGFARRSPAQLIEAIAALRPRPGDVPGYATRVALRELGRRAQFLDGQLDRLDKLIGPLVTARAPGLLALHGVGPDTAALLLVAAGDHPERLRSESSWAHLCGVAPIPASSGKTAGRYRLNRGGDRQANSALWRIVIVRLRSDEATRAYADRRGKEGLSKKEIIRCLKRYVAREVYRQLRAQS

SEQ ID NO: 279664 - protein, 412 aa, unidentified
MQTLVERGCGLDVHQATVVACLLHVMRDGRVQKQMRTFGTTTRELVSLCEWLRSEGCTHVAMESTGVYWKPVYAILEGAFQIVVANAQQVKKVPGRKTDVKDAEWIADLLSHGLLRSSFVPPKPIRELRDLTRYRRKLVESQAAERNRLLKLLESANIKLSSVATDVFGVSGRLMLKALVEGKASLAEMAELAKGKLRNKIPQLQLALEGKLEEHHRFLLQLQQDRLDAAERDLATLEQRIQQKLEPYAAQVALLQEIPGVDWTLAAVIIAELGIDMTVFQSVSQLASWAGVCPGNNESAGKRKSTRIPKGNVYLKTALVEAANAAARTKGTYLRDKFYRLKARRGYKRAAVAIAHKILVSIYHMFSQQVSYNDLGDLYLDKLNKNHLTRNLVHRLERLGYSVTLAPQQIAA

SEQ ID NO: 279665 - protein, 428 aa, unidentified
MKVLYERVAGIDVHKDMIKVAIRSPGEKPWTRKTEVLQFRTFYGVLRETARELRRRGVTHVVMEASGVYTGPVYYALAEQDFTTVAVINPAHARALRGHKTDAKDCARLAELFECGLLHGSYIPAPELKEVRDLTRYRIKTVQARTSEIQRLAKALESAGIKLGSVASDITGKSATAMIGALIDGERRGQVLADLAIGRMRTAGKLADLSMALTGRFSGHHAMLCRLHRDRIEVFDAAVAGLEEQIAAKTVPWQKELDLLKTIPGFGDAVAQAWLGEIGPAPHQWFASHEKLASWVSLCPGNNISAGKRKHGRTGDAGTYLKPLLIQAAWAAIRSQGRLQARYRRLARRFGGDSSPAAKKKAITAIAHTLLKIAYQVLKTGTPYQEPGADFYTRRESSAARQAYLERQLQKLHPGATITITISPPEAA

SEQ ID NO: 279666 - protein, 333 aa, unidentified
MDLCERIRTRVTRETKRRVEIVSCYEAGYDGFWLHRLLEAHGIRNYVIDPASLQVDRRARRAKTDHVDVERLLRSLMAYLRGEPKVWSVVCVPSVAEEDDRRLNRERGRLINERIQHVNRIKGLLAIHGIYDYQPLRRDRMLRLERLRTAADGQTLPPRLKAEILRELQRLELILGMIKTIEAERDAIASPKTEVEHTNAKKIQDLAKIKSIGPEFATTLIGEVLYRSFDNRKQLASYVGLTPAHFQSGAMCRDQGISKAGNGKARTVMIELAWLWLRHQPDSPLSVWFRERVGKLKGRIRRITIVAVARKLLIALWRYLETGLVPKGAILKA

SEQ ID NO: 279667 - protein, 335 aa, unidentified
MILVGVDVAKDKHDCYIMTSEGEVLFKSFTIANNMEGFNQLYEKILSVIDNFDNVKIGLEATGHYSYNILGYLLDKGLTPYVINPLHSNLYRKSLSLRKTKTDKVDSRIIASMLMSDVSLKPYSNTLYHNEELKSLTRYRFTKVQERAKLKISISRLVTILFPELEKLVPTLQMNSIYALLYEFPSAHAISKAHLTRLTNLLNTTSKGHYTKDKAVLIREAAKNSIGSNMPAKSLELKHTIKLIKELTSEINEIEEEIKIIMNKINSPILTIPGIGLSTGAQILAEIGDFKNFSSPDKLLAFAGLSPSTYQSGNMYSSNAKMEKRGSKYLRFALF

SEQ ID NO: 279668 - protein, 347 aa, unidentified
MAFIGVDLHSNSFTICRLKTDTEEEFESFQLSMDDVKRFCLGLDAEDSLAVEATSNSAGVCDQVRSCVGRLVVVNARRFELIRKSVNKTDRNDARARAYFLSKDMFPGTRLRTHAETELGALVQTRDVLVKQRTMLLNRIHAIFTRHGIKLKKEGLSSKRSLTDLSISQFTPVKQIELGVLRDQALRLTDTLKRLDKAIEKTAEQIDGYEEISSIKGIGARSAAILLAGIGNVDDFASADKLAAYFGSVPRVSQSDETDNRGKITKRGDRRVRTTLVQYTLIAIKYSGCLNAFYQRIKARRGAGQASIATPRKFLSIICDTLKNRRIFEDFTKVKIKENQCPAGHPS

SEQ ID NO: 279669 - protein, 450 aa, unidentified
MTKGSGVSRGDRNRNARLGRLRELVPLSNAIVGIDLADKKQMVVVCDHDSRVLARRTFRLKAWDLGSALDWARDRAVAKGFAGVTVSCEPTGHRWRVLGQLAADRSMPFVCVQPIQTSSARRSEDLTFDKTDEKDAVLIARLTAQLRCYVPEPVEETWGRLRHLGGRRERLLTDAVAQVQQIRDLLDCVWPAALEAAAQPFRSQTWAAAMWVVTYRDDGDLDRTRRLGPARFEQQVRREITRRGGQKPCLRIVGNLYSALVDPTGVLAHRRGGLERVQLVLADWAETQCKLTDTESRMVAVLDELELTALATSIHGLSRVGAAAILAETGDLHRFPTARSLVKHAGLAPRQKQSGTYTGKTKLGRQGRPRLRAAAWRAVWGTLQTNTVYATRYRHLTSRETNRLKPTQAQTVLAAAILRHLHAVITTGKAWDPVIAEHGSQPKQATTLAA

SEQ ID NO: 279670 - protein, 347 aa, unidentified
MKITRCGLDIAKRVFQVHGVDEEGRVRVRKTLTRKQVLEFFAQLPPCLVGMEACGSAHYWAREIAKLGHTVKLMAAHFVIAYRKKGKNDANDAEAICEAVGRPNMNFVAVKSEEQQAMLMVHRARSLTVANRTAQANQIRGLLGEFGVVVPQGVAALRKQLPGILEDAENGLPWLARETLAGLLEQLRELDQRVAQYDRQISSLAQHSEPAQRLMAIEGIGPITATAAVATVGDPRVFAHGRAFAASLGLTPRQHSTGGHTVLGPITKRGDRYLRTLLVHGARAQLRLVERNSDAKSAWAKRLKERRHVNVAAVALAAKHARIIWAMLARGTEYRPVQPPAALTAQP

SEQ ID NO: 279671 - protein, 412 aa, unidentified
MDLETLFVGIDVSKKENVVRFMEGGGDTLSLFSVPNNADGAAKLQERLRHKLLHTDFSKVTVGMESTSVYADHLAAFLRKDEFLRKWECRVFLVNAKNIANFKNSYPELPKTDNIDTLVIADYLRFNRLPKCVFLDEKYLALRNLTRARFQSAQNLSREKTRFLETLFQKFSALDSTKVFSDTFGTTSIAVICEFLTVDDIIYTPIAELTDFINKTGKGKFADPEAIANALQVAARSSYRIPKTINDSLNQLLAVRLVGIRSIEEQIKSLDKAIDSYMGAFQNVLISIPGIGKVYSAGIMAEIGDINRFSNHAPLAKYAGLAWSKHQSGGYEAANTKMIASGNKYLKYYLLEAANKVRMHDTELERFYLTKFREVPKHQHKRALALTARKLVRLIYSLLSNNRLYLPPTFQQ

SEQ ID NO: 279672 - protein, 351 aa, unidentified
MSQTPRTSITAVGIDIGKNSFHIVGQDDRGAIVLRQKWSRSQVEARFANMPPCLIGMEACVGAHHLSRKLKALGHDARLMPAKYVRPYSKGQKNDFRDAEAIAEAVQRPTMKFVATKTADQLDLQALHRVRERLVSQRTGTINQIRAFLLERGIAVRQGQRSLRAELPRILATPPDVLSPGMVRVIEGLAADWRWLDERIEGLSREIEELAKRDAGCERLMSIPGIGPIISSAMVAAIGTGDGFAKGRDFAAWLGLVPRQISTGDRTILGKISKRGNRYLRVLFVQAAWVVLVKVKPTRWEGHGLKHWIEAASKRLHHNVLAVALANKLARIAWSVLARGRAFEASKLQAA

SEQ ID NO: 279673 - protein, 307 aa, unidentified
MSKETLDANCLRGQRKQAKIFANSPDGWKLMLSWLKATGIKQARVCMEATGRHSLGVALALHDAGHVVSIVNPAQIRDFARTKLGRNKTDKVDAALIRDYAALFNPAPWTPPSPAMRRLCELQTIRAGIIGSRTEWKNRLASGLGDSTATGLAAMTIEHFTHQLETVDRAIGDTIDQDATLRGRRDLLLSINGVGETLAASLLAEMPEPGVLRRSGELVAYAGLNPSHHRSGTSIDRPTRISKIGNAALRSSLYMPALSAMRFNPAVAALVRFSWLRVSGTAKMPQIDQGVRHQLHTVVALLFELEA

SEQ ID NO: 279674 - protein, 465 aa, unidentified
MSKLRKPILPRPPKDQPAPPKPPKLDALAQINHHAAGLDIGDAEIYAAVPESASDPAVRVFRTFTTDLQALADWLTACQVDTVAMESTGVYWIPIYELLEERGFQVYLVNARQLKNVSGKKTDILDCQWIQQLHTYGLLQPSFRPPEDICALRAVIRHRGNLLRSCAAEIQHMQKALQQMNLKLTNVLSDITGLTGLAIIRDIVAGVRDPLKLAAHRDPHCRKSAAEIAASLTGAYKAEHLFVLKQALAAYDFYQAQLAACDTETERLYQGLAAQVDLAAQPVPPARRPHSRRGNEPRFDLRTALYRLAGVDLTTVDGLDVLTVQAVLTETGVDMTRWRTSKHFASWLSLCPENAKTGGKIIKRGTRPGANRAALALRLAARSLHHSDSALGAFYRRMCSKLGKPQAVTATAHKLARIIYAMLKSKQPYKDPGADHLEAQVQERKVKQLQRQAKELGYELTPVAA

SEQ ID NO: 279675 - protein, 392 aa, unidentified
MYIVGIDIGKKHHEASIVSPEGKQIGRSLRFATTHKGADSLMSFIFKNIGNSPCVFGMEATGHYWYPIYSFLKAKGYTIYVINPIQSDSLRKMYIRQTKNDSIDSFLIAEVIRFGQFGTTSMADENILAMRQLCRYRDSVISSRTEIKLRIGTIMEQIFPEYEKQFSSLWLSTSMGILEKYLTPENIENAPIDELFEIIKDKSHNRLTRAKAISIKDAAADTFGIKIAQDAFSFQLKQLIDRMNFHDKQIEALDIEIMKYYEQFDCYLHTIPGIGIIGAATILAEIGDISRFKNSSALVAFAGIDPTVRQSGEFNSTHNHMSKRGSPYLRHAIFLAATTCSFHNSPLNAYYKKKRDQGKHHLTATGAVARKLTTVIYAVLRDSKPYEPKKFC

SEQ ID NO: 279676 - protein, 385 aa, unidentified
MITYLLKFSNTGMGFLTFLRWTEELMNKTEMKKVIVGCEPTGCYWLTFQKFLQDHDVQLVTVNPFTVNRSMELDDNSPEKSDLKDPKTIALLVKDGRFSTSYLPSGVYAEIREASVCRDQIMKQHVRLSNQIQGWLQKFFPEYFECYADWDSTSGLMLLREAPLPQDILKIGAGGINQIWRDAKVRAAGIKRAQTLVEAAQNSVGLEAGEAARLEIWVLVNDYILKAEQLKRLDEYLEEKVKEVPNVEKLLAIKGVGMSTVIGFIAEVGDIGRFTDPKQIQKLAGLEIVKKSSGKKKGQPRISKRGRRKLRRTMYESARALMTWNPAFQDVFLYYRNRTKKPLGGMQAKIAVACKAIRIFYVVLKTGCDFDEEKFRKDIIRPEAA

SEQ ID NO: 279677 - protein, 451 aa, unidentified
MKKNKVKYSMKDLAALEQINLNAAGIDVGAAEIYVAVPPGRDEVSVRVFATYTADLAAAADWLSQCGITTVAMESTGVYWIPLYELLESRGFEVYLVNARHLKNVTGRKTDISDCQWHQQLHTYGLLAASFRPPEHICAVRALVRQREMLIRYRAAHIQHMQKALQQMNIQLTQVLSDITGVTGLQIIRAIVAGQHDPQQLAQYRQSQCQKSQEEIVKALEGNYRQEHLFVLGQALTLYDFYGQQLAECDQELAAMYQAFEPAEPATDPPDPKRGKRRKNQPFFDLAQELYRLTGVDLTQIDGLDALSVQTILSEVGTDMSPWPTVKHFTSWLRLAPNNRITGGKVKSRSSGKTDNRASTAFRVAAQSLARSDSALGAFYRRIKAKHGAPTAIVATAHKLARIFYFMLKRREPYRGGSSAEYEQEHKERSIRYLQRKAAKLGFQLVSLEAT

SEQ ID NO: 279678 - protein, 334 aa, unidentified
MKEVFIGIDVSKLNLDLCVLIGDKISQEVVISNTISEITKFFKSLLKKHPVSEILVCSEHSGHYTFPLCCVCADLKLDFWLANPYHLKHSLCLRRGKNDSVDARRIAEYCARFQDKAKLYSLPDAKIASLKILLRERDLYMSHKSTYQGQLTDQQNFMSGADFARKSERLQGLVAELDENISAIDKEIEKLIESDETLSNQKKLLCTVDGVSHKLATVMLVFTNSFSDFVDGRSFCCYAGLAPFEYISGSSIFSKMKVSHKANKYLKSLLHLGALSAAIVKKEGELREYYLRKVAEGKNKMSMLNAIRAKIVLRMFAVIKENRQYEKNYQHIIA

SEQ ID NO: 279679 - protein, 391 aa, unidentified
MIYIGIDAAKDKHDCHFVNSDGEVLLDNLRILNNLDGFNKLKQAIEQFSTGDNSQIKVGLESTGSYSANIISFLKQLNLSVTVLNPYNVANLRPATTLRKTKTDKSDARLIATATALCSPNQAYLDISYHIQTLKSLCRTRYRLIKTIQPIKNRFRRILHVIFPEFETLFNVSINSSYELLKKYPGPKAILHTRKSSLEKCLKDISLGRLTKKVDALIEIAKNSIGSYNEGDAFELQDTCDTILLLENKLANLESKVKDTMQIINSPITSIPGIGVTMGATILAEIGSIHKFDSPEKLQAFAGLAPMLYESGKYIARDTPMDKKGSVYLRNALYQVTKSSYVLNSFMRSYVDKKRAQGKHFYTAMSHGMKKMVRVIFAVLKKNSNFVEPII

SEQ ID NO: 279680 - protein, 481 aa, unidentified
MVTIGIDLSIVGKHRAAVQADSDESDGKLIRFSTDPTDLDRLVRRARQGVSEDEPVQVVMEPTGAAWLPIASYLSQRGIKVYLVGTQKVAALRRFYSRHAKSDRVDARLLARMPGIMPDTLYELRLASAELQMGQRWCKQQEGLSKLITAVKNRVRAWERTFWPGLEDEVGDLFSPWMVRWRQEWYDPWKLRAADPAELGTFLLSAGAQDEDVDRLVKGLKRVAQRTVGLYATPEGDHSPHVDYTAFQDQVLRELRLLKYYEAEHKEVRCKVQQAYRRVHPTRYLETIYGVGKDGAAVYAFFAFDVDRFEDQKAFRSWSGMVPASAQSGQSEQKGLRITCAGPSLVKKYLYINAEIARQWDPQIAAIYYDQMVHKGKHHCQSVCHCATHLLDRVRAVLRDNRPYELRDVDGRVVTWQQARAIITDRYHVTEDVRRRSRRGARKERIEAKLERKRKRGRRSHPAWQEASVSALPQSGLAPPT

SEQ ID NO: 279681 - protein, 346 aa, unidentified
MILIGCDFHPSWQQVCWLDTATGETDEEQLVHASGDAEKFYRRFTSPVRIGIEATGNCQWFLELLSRLGQEVWVGDAARIRACDPRQQKHDRRDARLLLQLLVEDRFPRIWTPSSQEKDLRQLLIHRYKLVRMRVQVKNELQHLAMNKGVTKGRGLWSKAGEKVLCALPLQPWASRRREDLFKLRSMLNEQIAALDEAVKKAAEENDRARLLMTQPGVGPITSMAFVLTLGDVSRFPRGKQVASYLGLIPREYSSGGHQRFGSISKQGNRFLRMLLVEAAQCVVRYDPEFRNEYLHRCHTKPRGVAKVAAARKLAVRLYWMLRTNTAYPEIARVGSSSRVALDGAS

SEQ ID NO: 279682 - protein, 411 aa, unidentified
MDLEVVVTHGAGLDVHKKVIVATVLTPTVKETRSFGTLTPDLLALADWLQSCGVTHVAMEATGVYWKPVVNLLEAYPFEAVMVVNPQHIKGMPGRKTDVQDSQWIAGLLRIGALKASYIPPRPQRELREIVRYRTSLQQARATEANRIQKVLEGANVKLGSVISDVLGVTGQRILAALADGMTDPAALADLADPRIRASRDTLIHALTGLVTAHQRLMLRVQLQHVAFLDRQIAALSEEIATRLANFDDALTRLQTIPGVERRTAEIIIAEIGTDLQRFPSAGHLVSWAGFSPGQHESAGKARPTRTRKGSKALRAALTQSGHAAGKTPTYLGAVYHRLAGRRGKQRAAVATGRHILIAVYAILRTPGAVYEDLGATYYDQRDRQALVRREIRRLEALGYRVMVEPTSAAS

SEQ ID NO: 279683 - protein, 349 aa, unidentified
MTKVSMIGLDLAKNVFQVHGIDAAGNVVVRRQLRRPQVEKFLATLPPGVVVGMEACGGAHHWGRVVRKLGHEARIMPAAYVKPYVKRNKNDGRDAEGVCEAMGRPTMRFVQVKSLESQAVLVLHRTRRLLVRQRTMSGNAFRSALAEFGIVAAQGLKGLHSLMELLADPASAVPEAARLPLRVLARHWETLNADICKLETEIVRAAKTDEVARRLMAIPGLGPIGATAILAAVPDIRMFKTGRDFAAWLGLTPRQFGTGGKHSSGGISKKGDRTLRTLLTLGATAHLRVERVRDTKDPWLQALMARRPFKVAAVAYAAKMARIIWAMLVTGEHYRTPDRRHSGSVQAAA

SEQ ID NO: 279684 - protein, 405 aa, unidentified
MSDIIALDVSKGHSYCVYYRNDSCVTEFNFQHNKLGFDRLCATVKCATNPTFYFEATGIYSRPIERFCRENKIPYALLNPLELHLKTENLRRVKTDDKDAHKIALSAFNNHYRLVQFQDEKYLKLRELSRFYEKVENSRKLYNLQLHNEIQQTFPEIEHFFAKKTSFLALNTINTFPHPDLISGLSRTKLKNALIGETNKFISKDNALKYADKLLRLAKNSSPAVHVDDIQVQEVQYYSRLLINLTIQKNKLKKQMIEMAKKLPDFEIISSMPGIGQMTAAMLLGEIGDFTRFDNANQLNAYVGIDLIRYQSGQYLRKDHINKRGNPKARELLFIAVRNMIKQQSAAPNHIVDYYYKLKKQPVPKKDKVATVACMNKTLKCLFSMIEHREKYAYAYTDSKSTEIN

SEQ ID NO: 279685 - protein, 374 aa, unidentified
MKQQKKSSDITIGLDLGDRRHRFCVLDKSGGLLEEGSVRNERVFLAQLSERYPGALAVVEAGCDSPWISRYLQEQGCRVLIANPRKLRTIYQHERKSDRRDAQMLARIGRLDPALLYPVRHGTAEAQQDLLCIKLRDSLVRARVAVINSVRFTLKSLGYTVRNPSSERFHKVAMEGLPAALCQMIAPSVAALEELTGRIKALEAQINSLAQSKYPPALQLQQIPGVGPITALYFVLKIEDPTRFQNVRDVGAYAGLCPKRDQSGRSDPQLRISKCGDAYLRRLLVSAAQYILGPFGPQSALRAYGLMLAEDGTARAKKRATVAVARKLAVLLLSLWKHQRPYQPFPLAGSRLNLQQTKEDRRFGTIALHRLEAL

SEQ ID NO: 279686 - protein, 410 aa, unidentified
MDVVLTHCAGLDVHQATVVATVRVPGATPGSRQMVTATFGTMTADLVALREWLQAYGVTQVALESTGVYWKPVYYVLEDGFTLLLINMRVLQRVPGRKTDVQDSEWLAQLLECGLLRSSFVPPPPIRELRDLTRYRVHQVQDRAREVNRLCKVLEDAGVKLSTVASDVMGASGRAMLDALVAGTTDPTVLADLARGKLRRKLPALQRALQGRFRAHHAFLLQQGLAKIDYLDEAIEQLTTEIEVRLGPFAATLTALDTIPGINRIGAVSLVAETGGDMQRFPDAAHLCSWGAMCPGQDESAGKRRSGKTRKGNRYLRAALIQAGLAASRARGTALQALYARVKRHRGHKKAVVAVGHQILEIAYYIMRDGVTYHELGPTLGNQRQKERAIKRHVRQLEALGVHVSIQDAA

SEQ ID NO: 279687 - protein, 314 aa, unidentified
MKKAVEIFVGIDISKAWLDIAVHEQAETFRTSNDDAGIASLVKRLKKLKASLIVLEPTGGFEMLVVAELTRAGLPAAVVNAKRVRDFARATGQLAKTDRLDAKVLAHFAAAVRPAVRSLRTEQEEQLTALLTRRRQVIDMLTVEKNRLVTVRAKMRTDIQSHIQWLSNSLKELDKEIEDFVEGMPAWKEKDALLQSVPGVGPVTSATMLGMLPELGLLNRQEIAALVGVAPVNKDSGKKHGRRRVYGGRADVRSVLYMAALAAKKFNPVIRKFYERLISQGKEKKVALTACMRKLLVILNAMMHSNQPWRAQPA

SEQ ID NO: 279688 - protein, 354 aa, unidentified
MDVGILYKGFSQSNHFNKLKYKVMRIKQTIGIDISKLTFDVRIHSNQMFHQFENTNKGFKKLIKWVNSNNSFLKEETIFVFEHTGIYSYLLSVFLTEQQLSFALVPGLEIKRSLGIARGKEDKIDATKIALYGYRLRDEIKLYDMPCQDIINLKRLLSLRDRMVKQRAGYKSSLKELSRVLTLKNNKVLLETQERIIKYLTKQIGVIEQNLDNIINSNDTLKKVFKLVTSVKCVGRQTALFIIAYTEAFTKFKTWRQFAAYCGTAPFPNSSGTSLTGNTQVSHLANKKVKSLLDLCAKVAIQYNPEMKAFYKRRVTEGKNKMSTINIIRNKLLSRIFAVVNRETPYVDFMKYAA

SEQ ID NO: 279689 - protein, 413 aa, unidentified
MSNEEAAVSARVFAARFCEEVYTVFVGVDIGKFRHQAAFLDYSGKDLCPTLAFDNTEDGFNAFFKTIESVGDGSIVIGMEATGHYWLNLYTAILSRDVEAHVINPIQTDAIRRMNIRKTKTDSVDCRYVAQVIRIGEYTDVAVQEADIAELRQLCRYRYGLVDSVTALKNQITGILDRIFPEYRTLFSDIFGATSMELLKRYTTPECILNVPANRLCELLKKYSRGAFGEDKATKIRDACKHSVGIGSHNPAFVFQLRQQLQLIEFSQSQIELVESRIEECYSRFPCFLHTINGVGKISAAVILSEIGDINNFDKPKKLVAFAGIDPSTFSSGNYTASISHMSKRGSPYLRRALWNAADSASRCNPVISEFYQQKRSEGKNHMTAVGACSRKLCYIVFGILNNNTPFDPNFST

SEQ ID NO: 279690 - protein, 373 aa, unidentified
MALMGIDLHANSFYVVRARPYKGKIIRTEKKYGLDDQSLELFRKSLGKDDYVLIEISTNSFWFRDLIQPYVKECYILNINAVKYSGNKTDKIDARRLLDILSYYVYIKGIDELPTVYVPRPEVRELRSLLATYKLNKKIQTQLKNRIHSLLKQQGVVISKEKLFTKSGWKAAMDLIKTDLHVHIDILYAQLTEANKMTQKVRDMIISLGLQTFPKEIDLLLSIPGFGVLTSIVLLSDIDTVSRFQNAKKFCAYLRTAPRIKESNATTYLGRVTKQSRSMTCSILTQSVLHFKTAGPHLSSFYIRVRQGKSAGKSRIALIRKMLVAAYFMLKRHERFRWVDKRLYDLKKTKTASELKKARARCEQYRKESQEAA

SEQ ID NO: 279691 - protein, 415 aa, unidentified
MSDPKRWYAGVDWGSQSHCVFLTDDEGRKLGQKFFKHSGEGLAEMADWLLTTSGAEMAGQVFVAIEVPHGPVVETLIERGFAVHAINPKQMDRFRDRFSMSGAKDDSRDAEVMASSLRTDPRCFRKLAAGDPIVVELREWSRIADELGFERIRLANRLRAQLWRYFPALLELEEDCGAEWLLDFLGIAPTPARAARLREVRVAQFLKERRIRRFDAAAILKAARATPPGLAPGTVEAASAHVASILPRLKLVNRQIKEADRKIGALIDSLAASEESEPGQEKQHDAAILASLPGVGRTVLATLLAEAWEPLQRRDYPALRSLAGVAPVTKRSGKSCIVVRRQARDNRLANALYHWARVAVQHDPRSRAKYAELRRRGHSHGRALRSVADRNLNVACAMLRTGALFDPALAAQKAA

SEQ ID NO: 279692 - protein, 405 aa, unidentified
MVTSIDRYDEVDVFVGLDVGKGEHHAVALDRTGKRLFDKALPNDERRLRAVLDPLKVHGTILLVVDQPATIGALPVAVAQACGALVGYLPGLAMRRIADLHPGEAKTDARDAAIIAETARTMPHTLRSIQVADEQVAELSMLCGFDDDLAGQIVQVSNRIRGLLTQIHPALERVIGPRLDHPAIMDLLQRYPSPATMKAAGEKRLGNRLLKNAPRKGRVWAGEIMAALGEQTVVVTGTDAAALVLPRLAQQLAALRRQRDEIAGEVEKIVDAHPLQPVLTSMPGVGVRTAARLLTEVTTKTFPTAGHLAAYAGLAPVTKRSGTSIRGEHPSRRGNKILKRTMFLSAFAALRDPESRAYYDRKIAQGKRHNQALIALARRRSDVLFAMLRDGTLYQPRPTEPALAA

SEQ ID NO: 279693 - protein, 342 aa, unidentified
MSKIITIGLDLAKNVFQLHGADASGRAVLRRKLRRGQVLELLGDLLSCTVAMEACGGAHHWGREIGKLGHQVRLIPPAYVKPFVRRQKNDAADAEAICEAAQRPNMRFVPVKSEETQGAAAVFRVRELLIRQRTQTINALRGHLTEFGEVVPQGAGSMRRLITVIEEPGSDLPEAARATLQVLVDVLRHLDERIAELDAEIARRARQDEVARRLMTIPGIGPLIATALATLAPPPEHFRRARDFAAWLGLTPRQHSTGGKQRLGATTKMGERSLRRLLIIGANSVVIKRHTNPMAQPGTWLGGLLARKPGMLVRVALANKLARIVWALMARGGVYRAPVVAA

SEQ ID NO: 279694 - protein, 319 aa, unidentified
MTCVCQRQIVKTATVPAEPVRLAESLLRWFPGATLSSASEAGFSGFVLHRALTTAGITNLVVNPASVAVAANDRVKTDRRDAKKLAIDLADGRLRGISIPTEAEELARLLPRPRAQIVEHRATIARQIKAKRHQFGLIPPASRRLMSSRYLWALPAELHARLTLLADQWRFAPRQLLEVRRLLRAQATAQAELETVYRSAPGIGEVVARTLATELGDMSRFVNERALCSYTGLTPSEYASGASIRRGHISRQGASRLRHVLVETAWRALPRDPILQAIFDRIAATRGKQRAIVAIARRLIGRIRACCRHGTTYAVGTAG

SEQ ID NO: 279695 - protein, 451 aa, unidentified
MSRRSDKPAGLPVIHDRAAGIDIGSRFHVVGVPPELCAEAVQTFQAFTGDIERMADWLVSIGIKTVAMESTGVYWVPVFELLQSRGIEVIVANAREARAVPGRKSDVNDAQWLQRLHACGLLRPSYRPERNIAALRSYLRLRERHLDYAGSHIQHMQKALTLMNLQLHHVVSDVTGVTGMKIIRAIVAGQRDPDVLATMRDVRCKANIETVRAALVGNYQPELVFELTQALALYDFYQLRLGECDAEIERALAELNADKTSPAEPMPKARHKTVQPNAVNFDTRPLLYQLTGVDLTQIHGIGPYLALRLVGECGTDLSKWPTAKHFTSWLTLAPGCKISGGKVLSAHTRKTTNRVSAHLRLAAVTVGRTNTALGAFYRRLAARVGKAKAVTATARKIAVLFYNAMRFGMSYQDPGADAYERRYRERVVKQLHRRAAEFGFTLQEAATQIVS

SEQ ID NO: 279696 - protein, 411 aa, unidentified
MDTPYCVGIDVALHAHRVAILGPDGEARGKSFSILASQEGCADLVRTLHARAAAPGHTLVGLEATGHFWENLEAFLSRAGYRVVVLNPLQTRRYRDVLRRKAKTDDIDAYVIAGLLRSEAAAACYVPDEQIQSLRELVRLRARLMRERQDYLRQLVAQLDVVFPEHRTGLGEATTTRARGLLTAFPTAWHLAHATPATLRRTAAAAGARGFALQDATALRDCARHSTYSGKAADARGHVVRTLIVQFERLTASIDDLDQTLQALLPPANPAGGPSDATLLQTLPGVGPYTAGTLLGELGSLTRFTDARALVAYVGFYPVIRESGEHAATPSLSPAGSRIARHALYLAAVNAVRRSTEWRRLYQRKIAQGKKPKQARIAVAVKWLHTAYAMLKHRAPYDPSRLVATLATMSP

SEQ ID NO: 279697 - protein, 345 aa, unidentified
MDKIITIGLDIAKQVFQVHGVDAAGGLVLSRQLRRGEVLKFFAKLPGCVVGLEACASAHYWAREIVALGHEVRLMPPTRVKAYGRRGRKNDRADAAACCEAVTRPSMCFVPIKTPDQQAALMLHRARQMLIEQRTRLGNAIRAHLGELGILARKGAGGLAALLQMLKTAQDERVPAAIRPILQPLVEQWRCAAAQIAGLDRQIAAWHASNEASRRLATIPQIGPIIASALLATAGDATRFKNGRQFAAWIGLVPSQNSTGGKERLGAITKAGDRYLRQLLVVAASGMIRRVRANPLLSPWLAQLLARKPAKQAAVALANKLARIAWALLATGQTYRTPTPAAAKP

SEQ ID NO: 279698 - protein, 337 aa, unidentified
MNRSHEFFLGIDVSKQKLDVALLRAGKIRSKVVDNSSAGHEQLARWLGTQGATAELTHVCLESTGPYGERISYRLADAGWWVSVVNPAQVKGFAQGELSRNKTDRSDAALLARFCERMRPVQWKAPSVEWRQLRAKVERLESLKAMRQQECNRLEAHSAGQSVELASSLEEHIDWLDKKIVELEKDINDHIDGHPHLKADAELMCSIPGIGELTTMKVLGYIGDVRRFQSAKALAAFIGVDPKRRESGSSVKGRSTVSRAGHAAARRALYMPGLVALQHNPALKVFGERLIANGLAKKAVITAVMRKLVHLIYAVVKSGQPFDPNYHRQGVAIQDGI

SEQ ID NO: 279699 - protein, 452 aa, unidentified
MAKRKQLRRRKRQSRPAPVIDPNAAGIDVGATEVYVAVPTARDSEPVRTFATFTRDFNELADWLDACGVKTVAMESTSVYWIPLYTVLEERGIEVCLVNARHLKRVPGRKSDVLDCEWLQYLHSVGLLTGSFHPPEAVSAVRTVLRHRTSLVRIAASHVQRMQKAMTQMNVQLHLVISDITGLTGLAILDAILAGERSPKVLAALRHRNIRAKEETIIKALEGTWRREHLFTLRQSLAAYRNYQTQIEQCDSELQDMLGSFESWSDPDAPPITDVHKDGPEPNGFDPRAEFHRIYGVDLTQIPGVGVQTTYTLFAECGRDFSAFPTAGCFASWLGLCPDNRITGGKVLSTRTRKVNNPASTALRMAAQSLHRSESCLGDSYRRMRYRLGPPKAITATAHKLARIIYHLVSTGQPYDDSVLAQDEIQTRTRKTRRLKSLAQALGYQLVPVPST

SEQ ID NO: 279700 - protein, 422 aa, unidentified
MLHDSEDTEEIIERVAALDIGKAELVACIRVPNPDKPGRRAQEITTYSTMTRSLLGLADRLLELGVTRVVMEATSDYWKPVFYLLEARGLDPWLVNAKDVKHLPGRPKTDKLDAVWLAKVAERQMLRPSFVPPPEIRLLRDLTRYRVDLVSARTAEKNRVEKLLEDAQIKLSVVASDIFGVSGREMMAALLAGERNPAALAQLARASMRRKIVLLEEAFVGRFTDHHAFLLRTMLARIDEASVDIAAVETRIEELIVPFVQAVERLDEITGVGVTAAHTMIAEIGLDMSRFPTAAHLCSWARFAPGVKESAGRKKGNGSTGHGNPYLARVLGEAAVGASRTDTFLGERYRRIARHRSKKKAIVAVGRSILVIVWHLLSDPDARYHDLGSDFYDNRIGPERKKRAHVRQLEALGYKVTLEPAA

SEQ ID NO: 279701 - protein, 384 aa, unidentified
MLLVGDDWAEEHHDVEVQDEAGRRLARARLPEGVGGVARLHELVGEHLAGDADPGQVAIGIETDRGGWVQALIAAGYVVYAINPRQVARYRERHGTSGAKSDAGDAHTLADMVRTDRHQLRAVAGDSEQAQAVKVVARAHQTLIWERHRHLLRLRTALREFFPAALDAFGDLTAPDALELLARAPDPASAARLSRAQITAALKRARRRQAEGKAAGIAAALRTVHLAQPPAVAAAYAATVRSLVTMIAAFNTEIAAMEEQVKVCFGQARDAEIYLSQPGLGPVLAARVLGEFGDDEHRYAGAKNRKNYASTSPITRASGKKKPCWPATSATTGSPMPCTSRPSAPSPPPPAPAPTTTSSAAAARAITPRCASWPTGSSASCTAA

SEQ ID NO: 279702 - protein, 401 aa, unidentified
MKTVLSVDVAKNKSMIMLMNSDGEILIDTKEIKHNLEEFEKVKEKIKEINPQNLTVFMESTGTYHLPVERYFKENGFNTLVINSLTTKNNYDTIRKTKTDKEDCYRLAKLFFVNEVEYHDLSKKDLYANLKAMTRQYFYLLQNNVSCKNRYKRLINICFPELEKIFKSTRIYDDTALNFIKEFPHAEIVKEKRIDALYNNLYKTNGRNLNFYKRLAETIKIASTNSYPGVNKEHEDTKNLSDMAKIVQNNNNIINELRDKMIETAKQSPYFKIINSFYGIGEILTAEILGELGDITRFDSPKEIIAFCGLDPTIKQSGKSINVKGAISKRGNKYARYILFNCSQMVVKLGASNYPEHPVYIYYQNKKAEGKHFYESLTACSTKILRMLYSMCKNNKQFLEN

SEQ ID NO: 279703 - protein, 347 aa, unidentified
MALFVGLDVSLRTVSICVVDERGKVVRQGKALSEPVALVKAITPYRKRIRLVGIEACPLSEWLYGALQECGFNVVCMETRHAQKFLSSRPNKTDKTDAHGLAEMLRLGHFRAVHVKSKQSQLLRTTLIARRVFVEHMLAIEQTIRGLLKVYGLKLGAVYRCTFAAKVAALLDDAPELKAAIEPLLTARNEMRRQAALIDRRLSQMARKDEVCKRLMTVPGVGPIVSLFYKATIDDPARFRNSKSVGAHLGLTSRIYQSGEMDRSGNISKCGDKMLRHALYEAANSHLRISRKWSSLRAWGVKLAQKVGMKKACVAVARKLAVIMHRMWVDGTDFEFGAASADGRSCV

SEQ ID NO: 279704 - protein, 340 aa, unidentified
MSIVFLGIDLAKNIFQLCGLNQAGKPVYTKRTGRKELLQTVANIPACLIGVEASTGAFYWQREFEKLGHKVKVISPQYVKPFVRGQKNDGNDAQAIAVALMQPTMQFVPPKSPEQQDIQALHRARQRIVNHRTATVCQIRGLLLDRGITIGAAVSRVRRAVPLILEDSENGLSVRMRRTIAELYDLFNDLGRRINFFDKEIDVVFRQSDACQRIAKVKGIGPKTATAVVAAIGRGTEFKNGRHFAAWLGLVPRQHSSGDKQVLMNMTKRGDKHLRTLFIHGARAVVRVATNNNDGCLHQWVNQLKERRGFNKTTVAVANKNARIIWSMLRNDTEYQSVGS

SEQ ID NO: 279705 - protein, 482 aa, unidentified
MKKKNIYVNQSQELLTLFEEAGNGAKVMCVPIDYAKKDHVVMFCNGHGHIFRKPFSIKNSPEGIEYLTEQVIRSCSHRRIDPKHVFFGGEDVGSYAENFVNTLRSGGWIVAGVNAHDAKEQRANLQASTDRLDLMGIASMLLNRRGNCSPAQSGIYRNLRTLVRHRRKLVVMSTEVKNRIHTVVDRLLPGFLNEKNSGILPFSKSSLFLMQDRFSPSQIRRRKRHKLIEILHRYGTATPESTAAKLQEYAARVLNTPDEYITTLQVSLAQHVKHFRCLQDSINHLKNEIAVWLAQTQGAFLTTLRGIGIVLAAGVSAETGNPHEQKPLNNLVSYSGIIPRVKQTGGPEGKTYTGKVAKRCNRILKDYVVQSANHLGLHGPEDLMADYKRREAAGQHADFGMGRRYLRMAMCLMRTSQIYMPQRLRNTEVKPEERAGYYLMIWPSLREKWNKADALEAAFEKDRPLGRWRSMVQELYEIKLKL

SEQ ID NO: 279706 - protein, 392 aa, unidentified
MRKANDMSRCLAAFNQDSTLVAAIELGSKSWLVAAIVRGIERHPLKKLKPNEGALLALLYRWCDEARTAGHPIKRVCVAFEAGRDGFWLARWLRSRKIEAYVIHPTSVPVSREHRRAKTDRLDTGRLMRAFIGWLRGETDHCSMCAIPTFEEEDDKRPNREHQHLVGERTRIINRLKSCMARLGIRDFNPASRKAPERIAKLRTPEGVPIPPNTLDELEHDMAHLRFIDDQIDEVEKARLARLRKEPNKKSHAMVLLLARVRGLGIETADMLTHEVFLRDLRDRRAVPRYAGLTGAPDESGERRQEKGLARTGNARARRGMIELAWRFLVYQKESALAKWYWTKTADRRKDIRKIMIVALARKLLIALWQMVTTGEIPEGVELHPQDYRLRA

SEQ ID NO: 279707 - protein, 408 aa, unidentified
MPRFVGIDWASQTHAVCVVDEQGAVVDRFEVSHDAKGLAELLRRLARLGSPGELPIAIERPSGLLVDTLIEAGYPVVPIHPNVVAAARSRYRAAASKSDRGDAYLLADLLRTDGHRFRVLQPLCDEAQALRALVRTRDDFVAERIALANQLRALLEGFWPGAAAIFADVDSPIALAFLARYPHPEAAAHLGEKRLAAFLARHRYSGRRPVHELLARLRSAAAGRAAEHTAEAKAEAVRALVAVLEPLVTQIARLTSAVEHAVATLATGRVLMSFPRAGKVCAGQITAELGDDPARFVSHDHLAAEAGIAPVTKSSGKHHAVVFRWACNHRLRRAITCFADNSRHQSPWAASVYQRARARGCDHQHATRILARAWVRVLYRCWTDGRPYDPALHRAAHELETEVKSRTG

SEQ ID NO: 279708 - protein, 416 aa, unidentified
MNAVGIDVSSRKSTVAVLRPLGEVVCLPFDVTHDIAGLASLAEKLKALDGETRVVMEHTGRYYEAVAKALHEAGLFVCAVNPLLIKEYGANSLRRVKTDKADAVKIARYALDNWADLRDFTPMDAIRYDLKTLNRQFQLASKQRTASANNLIALLEQSFPGIRKCFDSPVRSDGTQKWVDFAHSFWHVDCVRKQPFPAFCERYRKWCKRHAYLFKLSNAEEVYALAKRAVVLTPKSKVVKVLVQEAANQLISISRSVEVYRAEMDRLAAMLPEYPVVMAMYGVGKSYGPQLMAEIGDVRRFERKQALVAVAGIDPMPNQSGDKNVRSNKSSKRGSPYLRKTLFNVIRTYLQCAPQDEPVFQFLNRKRAEGKPFYVYMLAAANKFLRRYYAKLRDYFASLDTLQSVDPIPATLKASL

SEQ ID NO: 279709 - protein, 342 aa, unidentified
MTFISIDVHKASSTFVMLVPATGEIFHRRVGTTRERFAQVLAQVPRPWTVAIEATRQSPCVCVWLREWDADLHLVDPEKLSMLGKLRLAKTDLKDAELMLHALVHDYLPECYLAPEGVVERRALSRGHEVLRALSTQLRNHVRVALCHQGLECQSTNLTGKAAQKAVPQLLQELPEGAALVAGELWQLLLTVEQALHTVDQAIGQAVAKDPVAQELCQHPGLGPITVFGMMAEIGEITRFAKDKKLHSYAGWAPRTFQTGDFSSNGALPDRCNKRLRHWVGLAAQGAARSRMPSIAKATYERIKLRRNANVAKTVAAREIVSFVFHTWTRALAARAPAMAAA

SEQ ID NO: 279710 - protein, 359 aa, unidentified
MAKIVSNKQNWFNRITLTKDDRLYVGVDVHKKSYAVAVWLNNALAVDFVMPADNLQLAAMLEKTRIALKQVVYEAGPTGYSLARTLQQANLPVQVVAPSKTPRQSAPDSKTDRLDCRKLAEYAAKGLLRPITAPSVQQEADRQLCRLRELLTDKQRKVKLQIKSFLLQHGIDEPAGLASWSLSSLEALSRIRLSSQLRYCLDTLLANLHFLKIQLKQTEQQLRQVFAQKHLCTKIKILTTHPGVGPTIARQFATEIFNPKRFKDKTQIAKYIGLMPMVNQSGETFRQCPITKTGRPQLRSNLIEASWIWIRKDAYAYKTYIRLLHNTGHGNKAITAMARRLAIHLWRMSCDNRPYIQPA

SEQ ID NO: 279711 - protein, 358 aa, unidentified
MRIIGCDLHARQQTLAMLDTTTGEIANLTLTHEGNNVREFYCKLPRPVRVGIEASGSMQWFLNLMDELGIECQVGHPASVRAAEPRKQKHDRRDADLILKLMVENRFPSIWLPSKELLDLRALLLHRHPWVRMRTRVQNALQAIALANGLRRGPSLWNQAGQDQLASLPWAPHTAHRRSELQALYAKFAMEIEKLNQRVEKQAGERPTAVRLMTHPGVGPITALATDVFLGDATRFADGKALASYVGIIPREYSSGGRQRLGGLTKQGNPLLRFLWCEAAIHAVRKDPELKRFYCRKLFQKGLGKARVAAARKLGIRLWILLRDQIDYNEFCRRGQRRQKYGGACAGMPDRVMTQNSR

SEQ ID NO: 279712 - protein, 352 aa, unidentified
MMIIGCDFHPRFQQISFLLEETGECGQRRLMHTGEAEQYYRSLRGTKVRVGIEATGSYGWFRRLLSGLGHELLVGDATQIRASNPRKQKTDKRDAEHILGLLIQDRFPSIWQPPAENEQLRQLLLHRSRLVRLRTRVTNQLDGMAKNEGLLVPGGWSGKRRMAIEALPLPGWYGERRKDLLALLDRLEERIAPLNKAVSQAAANNAEACLLMTHPGVGPVVSLAYVLTIGNWQRFPRGKQVGSYLGLIPSEESSGDKRRLGHISKQGNTLLRWLLVEAASTAQRYDASWHRQYVRLSMTKHHGVAKVAIAHKLAVRLYWMLRSGEDYQHVRERGSHARQSECPGGRSRRPIE

SEQ ID NO: 279713 - protein, 347 aa, unidentified
MEYFVGLDVSLETVNVCIVNAAGDILLEKKIAAEPAAIVHLLKSFGSPFKRIGLEAGPTSSWLYGELRAAGYGAICLECRHVKAGLSAMRNKTDRNDARGIAQLVRLGWFRQVHVKSEEAQRTRMLLVNRQQLLTKALDIENSVRGPLKVFGLRVGVVARRGFEARVLELVADDPILLVVTEPMLRVRQALLEEFERLDRLCQQLARRDPVCRRLMTVPGVGVVVALTYRTGVDAPERFSKSRDVGAHFGLTPKRYSSGQTDYDGRISRCGDEMVRTALYQAANVLLHHGRWSSLRSWAMRIAKRGSVKGAKVALARRLAVVMHRMWTDGTDFRWSDTSRMTVPTAA

SEQ ID NO: 279714 - protein, 388 aa, unidentified
MTQAPGALPTPTVLDYERTLILAIELSNTSWVLAAQIPGLPGVKAKRSIEPTPEALMAAIEDYRTRAVKAGRNVERVVAIYEAGWSGFWLARWLAQYGIETHVIQASSVPVDRRARRAKSDGIDAELLLRTLLAWLRGEPRVCSMVPIPAEADEDARRRVRERAELVAERVGLVNRIGAVLATLGVGEYNPLRRDRRQRLDELRTALGGSLPTHARAKIVRMLDRLELLLIQITELEKSRDAVLEDENPDKAASMIQQLAKLRGVGVQSATVLVREGFVREFANGKALGSYAGLTSTPYSSGGTEREQGIGKAGNVRLRTLMVELAWLWQRYQPDSAQVSWFRERVSGTGRRMRKVMVVALARKLLIALWRFATQGVVPEGAVMKPAT

SEQ ID NO: 279715 - protein, 428 aa, unidentified
MKIKIIEGIDQLDNKALDVAFDVSGESLDYSSYCLTERGKELWEGALSNRAGSIKKELLELDALAREKGYPGIRVLCEATGVYHRKLLKVANKLGMKTALISGEAVNMTQVVQSNDYIKSDEKDPKTMLLVSKVGKPLKDRNLSGGWLVMRQLNLEYERNQCDGTRFKNRIRQGLFELFPDLGFKSQWIFESRASIAVAELYGFNPYRIIDAGRSGFTQKLRRRKLRKQTINRLWEYAKQSTIMLEDKGITDCLEDEIRELHAHLQNLLSKRLELRSRMVAELEKLHRKGSVNIDPHAAPVGPFMLARTFAETGPLSDFINSKKLLRYAGLNITCRSSGTFKGQDKIAKKGRARLRRCLQQASLKIVVKGGLYGEYFHAKKASGKSGNQAMVAVSRKLLKMLFGLERSGGVYNAERVFQNQLPLRQAA

SEQ ID NO: 279716 - protein, 345 aa, unidentified
MPIVGGLDIHRKQLTFDYLDTVTGEVQRGQVSPADRAHLRAWLRRFAGRDDVAFAMEGCTGWRYVAEELAAAGIAAHVAEPADTAFARGRKRHAKTDKTDARHLRQLLADGRLPECWIPPAQILECRALLEAYHDLRREHTAWVERIHAVFFHQGAPRLGEGALRTERSLAALRAAAAVHLSPAGQLQVATALDMLTAVEARMDTLRRQLREAARRLTGARVLADRLYGVGPLAALAMTCWLGGAGRFSSSRKAVRFAGLDVTVYSSDGKRSPGHLSRQGPEILRWVAYEAGKTHGRASAPGHDYYAAVKDRKDGKIAALSQARKLIRQACHILAELGDDALTAT

SEQ ID NO: 279717 - protein, 375 aa, unidentified
MTASLQMKEYESAVVLYMAMELSNKTWRLAFGDGSRMRQVSIEAGEIVALKEQVAKAKEKWGLAADVSVVSCYEAGRDGFWLHRQLAALGIENHVVDAASIEVSRRARRAKTDRLDAQALLEKLIRYARGERRVWRVVRVPPPEWEDLRQLSREREQLLSERTRHRNRLSSKLVAQGLRVPIGKAFLQRLEEVRLFNGRPLPAHLKAGLVREWERLQLVQEQVKALEGHMRALIEASGALNAVRALMLFRGVGWVGAWTLVVEILGWREIANRGELGGLSGLAPSPYNSGQSVREQGISKAGNRRVRKLNIQLAWLWLRDQPNSKHTLWFKERFGGGSKRQRRIGIVGLARRLLIDLWRFAESGVVPQGAQLKVG

SEQ ID NO: 279718 - protein, 345 aa, unidentified
MKITTVGIDLAKNVFQVHGIDERGKAVLRKQLRRAQVAIFFANLPPCVIGMEACASAHHWGRTLQRFGHTVRLMAPQFVKPYVKTNKNDVADAEAICEAVSRPNMRFVPIKSVGQQAILSVHRVRQGFVKARTAQANQIRGLLGEFGLVIPKGLINVAKQVPQILEDASNELPAPFRHLIDRLTEHLKELDRQVKQFEQEIIAWHRSSELSRKLEKIPGIGPLAASALVASIADARSFDNGRQVSAWLGLVPRQSSSGGKPTLLGMSKRGDAYLRTLLIHGARSAILAAKNKVDNTNGWLTNLLQRRHPNIAAVALANKNVRTVWAILAHGREFKPDYVPTRMAA

SEQ ID NO: 279719 - protein, 348 aa, unidentified
MSQSEQYVGLDVSLKETSICVIDDADKIVWRGQVGSTPEAIAPAVKQHAPHAVRIGLESGQLSSWLFHELKEAGLPVICVDARHAKAALSLKVNKTDANDALGLAQIMRVGWYREVTVKGLDCQAERALLVARTQIVSQITTLKNCVRGILKTFGRVLPKGLRSQFSDRVRAAIDGHPVLGAIIEPTLQVLEATRAQLLVYDKAVIQRARSDDTARLLMSAPGVGVVVALAYITGVEDPARFKRSSSVAAYFGMTPRRYQSGEVDHAGRISKCGDGMVRGLLFEAAKVLLSRSTRPSALKTWGEALSKRIGAKKATMAVARKLAVILHRMWTTGTTFQWNAEAASPAI

SEQ ID NO: 279720 - protein, 499 aa, unidentified
MPSTKVAAAPILGAMKRKNIFRNESQKLDAAFIEAGLPERVLLVPLDFAKITHYACFCDGRGTYVRKAFTVKNTQEGIDYLVDQIERTRVARSIKSKRHVIIGGEDSASYTHNFMDRLFELGYLTVRLDSKEVHRQAESVDSSTDKTAVRAIAKTMLNRDARQTGGSDLYAQLRGLTRQRRRIVHLSTAVKNRIHTHADCLFPGFLAKDSAVAAFSKASLELMSRNFSAAILARKSEKTLTRILSRQGVRGALEVAAKLKEQARNAICADDATVRLSAQLIESELSLFETLQSNLTGLDKEAARILLQLPEVFAVSIKGIGITLASSIFAEIGSLSHVQRCDQINAFAGIAPRVKQTGGPESPARIGGKRRNFNRILKDYTLQAGNHLYLHGPEELLHDAARRKLAGKAVDTAMARRFLRIARALAKSHCIYLPSHLRTGQTGTDAEAQGRAQYIIKTWPDFLLKWKRLGLHEEAFAPDTPLGDWRIIVQEIYEIDLPF

SEQ ID NO: 279721 - protein, 349 aa, unidentified
MTILTDIVDVVIGVDTHVDTHTAAAVAAGTGAVLGQITVTTTVDGYQDLVDFADEHSAVRVWAIEGTGGHGAGLARLLERREELVVELDRPERAQRRHGAKSDPLDAVRAAREALSRKDVGTPRSGGDRQALSVLLAARRSAVDASTVAQRQLFSLVIAAPEVLRDTLRGHKLPEMIRRAATVRLRKDWNTETTTTATVLKTLARRARTLQAEADDLEKQILAIVRRWRPDLLAQLGVGPIVAATVLCAWSHPGRIRSEAAFAMLAGVAPIPANSGQVTTRYRLNRHGDRQLNRALHTVVLSRQRYDDATKAYTARRTAEGKTSRETKRCLKRYIARDFYRLLEHHQTA

SEQ ID NO: 279722 - protein, 321 aa, unidentified
MTETTVSIFVGVDISKASLDFYLPYSKEAIRIENAIAPIDALCAKLKKKRKLMVVMEATGGYEHLLRSRLGKHGVPAAVVNPRQVRDFAKGIGIDAKTDPIDAIVISTFGSVVKPRPTAMKSDNDEKRSALVTRRSQLLELMNQEQNRIKQTWDDEAKQSIREMLEFMRKQLKIIDTRLAQMIANDKENARIIEILDSVAGVGPVMISTILAQLPELGKLNREEIAKLVGVAPINRDSGKSTGKRYIGGGRSYIRRVLYMSTLAAIRCNSKFKAVYKHLRTMGKERKVAIVACMRKMITTLNALIKNNELWQNERSVSAKS

SEQ ID NO: 279723 - protein, 343 aa, unidentified
MEQYVALDVSLQKIAVCVLNASGRVVIEAEVASEPGVLIAFIRTKAPHAVRIGLESGPTSPWLWHSLKSAGLPVVCMDARHAHAALSVRPTKSDRSDARGLAEMVRMGWYKQVQVKSLAAHERMALLGVRRRLVDMRVEIDGQIRGILKTFGLVVGRGNKNAFAQRARMLAQDHPVLSALIDKLIEVREVAVAKVAVLDKEIRSFVRADPTLRRFMTVPGVGPVTALAFRSTIDEPDRFKRARDVGPYLGLTPRRYQSGETDRQGKISKCGDRFTRTCLYEAASVLLTKVQRWSPLKAWGTRLARRIGSKKARVAIARKIAVILQCIWTDGTEFWWTKEAAQA

SEQ ID NO: 279724 - protein, 316 aa, unidentified
MGEPRFVGIDVSKAQLDVAIAPDDQVGEFANDQDGITELVKWVSSFSPELVVVEATGGLETGVVVAVHEAGCNVVIENPRKVRDFARATGQLAKTDKIDAVVLADFAMRVRPEPRPLPDEHSRRLSALLSRRRQLVSMIAAEKNRLARAHSDVAPRISMHIAWLEQERDETDKELHREIRNNPISQEKDKLLRSVPGVGPVLTKTLLIELPELGQLNRKQVAALVGVAPLNRDSGQHRGKRFCWGGRARVRTVLYMAALSAAQYNPTIRRFHQRLIAAGKPQKVALTACMRKLLIILNAMIRDMEPFSATRPTLPA

SEQ ID NO: 279725 - protein, 403 aa, unidentified
MSSAVSYLFRRMKGSTALVIIGVDPHKRTHTASVVETGTDKVLATLQIDASLAGYRRLLKWASGFEQRRWAVENARVLGRHLAQWLVAREEVVDDVPSTATARVRELSRGGRRKNDVIDAAAAASVAALRGDANPVVADDLTTVLALLDERRDNMVTQRTRLINQLHALLRDLLPGGAPTALTAVDASRLLTGVRPAGPIEAARKHLARDLVAEIRDTDQRLKTLTAQIADTLDAHGTRLRDVAGIGPVIAGRLLGRTRRAGRFRSASAFAGYAGVAPIEVASGDHTRHRLPRGGDRQLNLALHIVALTQVRMRESTGRAYYDTKVAAGKSHNEAMRCLKRQLADRVWRLMLADEHRLAAGPGGHSGATLTSSAAGSTPTTSSSDKSLPGPADRNSTTPSPAA

SEQ ID NO: 279726 - protein, 345 aa, unidentified
MEHYVGLDVSLKLTAICVVDQTGKIEREGMVVSNPEAIAAFIKSHAPHVARVGLETGATATWLWTELNKMGLPIICIDARHAKAALKMQINKSDRNDAVGIARIMQCGWYKEVRVKDLDSHAVKALLVSRALLVKIKRDLENQIRGLLKNLGLIIGRAKMNVFAGRAAELTDNRPELAAAVDPLLRARTAIEQQIADLDRKVMVIARNNVQARRLMTAPGVGPITALCFLATIDDPTRFKRSRSVGAYAGLTTRRYASGEIDWTGRISKCGDKMLRSYLYEAANVILTRVAKWSALKAWGIRVAKRTGLRKAKVAVARKLAVILHRMCIDGTEFKWAKEAANQPT

SEQ ID NO: 279727 - protein, 349 aa, unidentified
MAVPVGAGRGRCRQVTFDYLDTVTGQVRRGRIEPACRQVLRRWLERFAGRDDVTFAVEGCTGWQFVVEELQRAGITALLAEPAETADLRGPKRRAKTDKTDARHLRTLVAEDRVPASWIPPRQACELRALLQLYRDLREEHTAWTQRIHATLSHQGVPGLAGRLADPQVRARLAADGAGMGLSPAGVQAVQVALRRMDDLEAALAPVHAQIAAFARRQAGCKALAGELYGVGPLVAAIVWAFLGDARRFSSSAQAVRHTGLDVTVYSSDDKRTPGHLSHQGPPILRWALSGAGHQGSRTASPDHLYYAGVAERIDANRAALPVARKLARRSHHILRRLGDQAYAPVPGW

SEQ ID NO: 279728 - protein, 337 aa, unidentified
MKLYCGIDLHSNNHWLTLINEHDERLVEQRLANDLSVTLAVLAPYREALAAIAVESTFNWYWLVDGLMQAGYRVKLVNTSAVRQYEGLKHRDDCDDAFHLAQLRLGILPCGYIYPRSQRAVRDLLRHRCRLVRQRTMNVLAAKSCYARELNIKVSSAVMIGTKQQPWPVVTEPQIALVIDAHRVIIEALTQQIWRIETMVRQELKDAPAYRRLQTVNGIGPILAWTIGLEVGDIRRFTRVGQFASYCRCVQSCALSNGKKKGDGNRKNGNAYLSWAFHEAAHFAVRYLPQARHYYECKSRQRSRIVAIRAIAHKLARACYYILRDDVPFDADKLFSH

SEQ ID NO: 279729 - protein, 352 aa, unidentified
MDRYLGLDAHSESCTLGVLGPSGKRLQSLVVETNGRALVEAVRSIPGQLHLCMEEGELSAWLHELFEPHVAELVVTVPHATKGRPKDDLRDAWARAEEIRIGAVGTRVYKPPLHLTPLRNAVRAYGMAVQDLTRVKCRLKAVLRSRGIRADSGVYTPAKRERWLSQLPMVHRPLAEWLAEELDQLLPLRDKAEDWLLREAKTHPIIRKLETAPGMGPIRTAQLLAIAANPHRFRTSRQFWSYCGLGIMTRSSSDWKRDKTGGWVRAEVRQTRGLTRQRHPLLKSVFKGAATTVIRMPAHPLQVEYHQRLQAGIKPNLAKLTLARRIAAIVLSMWKHQEVYDPKRRKNVIEPS

SEQ ID NO: 279730 - protein, 373 aa, unidentified
MNESILYVGLDVHKDSIEIAFAEEKGEVRHYGKIKHDFKTLNKVIRRLISKKGPCELKFVYEAGPCGYDLFRYLTKQGLECMIVAPSMIPKRSGCRIKNDRRDALNLCRLFRAGELTPVYVPTEEDEAMRDLVRSRDDAKCAEKRAKQRLKAFLLRHGIKYSGRSQWSKAHMNWLADLKMNHPAQQIALQEYIDTVKESFQRVHRLTEQIRELVPNWNQAHLVKALQSLRGISLVNAATLVSEIGDFNRFQHPQQLMSYIGLVPSEHSSSDQTKRGGITKTGNRFVRKALIESSWAYQNPARVSRELLKRQEGLPKSVCDISWSAQLRLCSRFKKSLAKGKSKQNTATAIARELSGFVWAIAQEMDTATAKNV

SEQ ID NO: 279731 - protein, 362 aa, unidentified
MDKHKYVALDVDSANIVAGVYDRQGEALMQCCLRNNGQVISEFFKTMTGVVHVTFEEGTQAIWLYELIRPLVAEVIVCNPRENKLLKAGNKSDRIDVAKLGKLLRLGELRPVYQGPSAAQGLKQLVHGYQALVADTTRVKNRLKALYRGRGLSCKGELIYGREQRQQWLSQLETKEMQSRAASLYEELDCVLRLRAEAEKVMCRAARKHAAYKWISSAPGLGAIRTAQILATAITPHRFRGKRQFWPYCGLAVVTRSSSDYEWVDGGARRKRKPIQTRGLNQNYNRTMKAVFKGAAISALQQHPEFQEYYQRLCAQGTRPEMARLTVARKLAAIVLILWKKGELYDSKRLNQAAPGAGPAVN

SEQ ID NO: 279732 - protein, 341 aa, unidentified
MEKATTIGLDIAKHVFQLHGADAAGHVLFRKRITRVKLLGFLAAQTRCVVAMEACAGAHYWAREIAKLGHHVRLIAPAYVKPFIKRQKNDAADAEAICEAAQRPSMRFVPVKTEEQQANGIVFRARDLLVRQRTQCVNALRGHLMEYGYVFPKGITHVETLVALVEDLQSSLPDSVRIILKLLVDTFTALEAQIAALDAEINQRSKSDPTARRLMTIPGVGPIASTAITALVPAPEGFPAGRDFAAWLGLTPLQKSTGGKQKLGAVSKRGERTIRRLLIIGASAVVQQASRRGAPNGSWLAQMLARKPKMLVTVALANKMARVIWALLVKGGTYRAPAVAA

SEQ ID NO: 279733 - protein, 353 aa, unidentified
MEHYIGCDSHRRYSVFVSMDEKGQAGAPVRVEHDRAELREFLRRLPAGSQVALESTGGWYWLVDEIEGAGLRPQLAHAFEAKRRMPGRKKTDPFDARGLAMEMLNGTLPTVWIPGAELRDLRGLLRTRLALRIHRTGLKNRVHAALNRYGLKKPTDDGDLFAGRGRVRLSGYIQSLPEETREATLHEWLLVDEIRDHITALETRIQQRIGRLQAMKLLKSLPGVGEILGATLYLEIGESKRFPTAAHLASYAGLVPTVHASGGRTWHGPVPKSANLFLKWAFVEAANCVVAKPHCYRNTHVLGLYQRLKAGKGHNKAAVAVARHLAESSWWVLTKQQPYREPHRAPISSSTHG

SEQ ID NO: 279734 - protein, 319 aa, unidentified
MSKPSIVCAGIDTGKRKLDVALDGRRERLQVDNTPDGHRKVSEWLRQYRTMRVGIEASGGYEQAVVAQLRRDGFVVIVFQPAQVRAYARFHLQLAKNDKIDAALIAACTAAARKIHAPPDPRLAPFAEHQTLIEQITDDIARIKTRRESCRDPRIRGLWKQEIARLNGLIKAELKQLVAAIRQHPDLAERVDLIASVDGVGLRTAVAILVRMPEIGHLSREQAAALVGLAPYDRDSGDAVGARHIEGGRQRLRTSLYNAGFAAAFHWNDELKATYQRLTAAGKPHKVALVACARKLLIYVNTVVQRGTPWVSTKAIIAT

SEQ ID NO: 279735 - protein, 339 aa, unidentified
MNHYAGIDVSLECSSVCVVDASGKIICEAKVASEPEALISWLAVGVSLTRVGLEAGPLSQWLFAAMRQAGLAVELLETRHVRDAFKAMPVKTDRKDARGIAQLMRLGWFRPVHCKSMAAQEMRAMLTARKLVQAKLHDVEMSLRGILRGFGLKVGKTTPRRFEGRIKELVGGHPSLEVAAAALLAVRAVLWRAFNALEKRVRSMAREDARARLLTSVPGVGAIVALTFASAIDDPARFKSSKSVGAHFGLTPKKYQSGETDISGRISKIGDGGVRTAVYEAANVILTRPVKGCASLKSWAMKLAKRAGMAKAKVALARKLTVIMHRMLADGTTFANRPA

SEQ ID NO: 279736 - protein, 354 aa, unidentified
MRYSVSNYDLLFPMDVDATAIHLAVMNRQQLIQKKTLPYDPNNLFNYVRKHFPGQKGLFLYEAGPTGYGLYDSLKEKGEDCAIAVPSMIPKAPGQRVKTNRLDAYRLGVQARTDDLRFVEVPEKKYRDLRHLTRLRLHYSKRIVGTKNGLRGLYLFEGIRFPEGKWSRRLISDLRQIESRPTVEFKVKQLLLNLEFFRTQELKTKVEIRRFCREDKEINDCILYLMSLPGVGWIVSTYILGALGGYNHLTSVKNTSGFLGLGPRENSTGPRVRKGEITAVGDPNARKMIIQASWVGINKDGELRSHFDNVYSRHSEKIANQKAIVAVGRKMICRMHAVLRDQRFFENRLITKVA

SEQ ID NO: 279737 - protein, 406 aa, unidentified
MTNITETCEIYAGVDTHADTHHAAVIDQNGKHLADAQFPTTPAGYAALTAFILMYGTLIRVGIEGTGSYGAGLARHLTSLGHHVVEVIRPNRQLRRMNGKSDPIDAYAAAKTALTEAKQPTPKTGDGNAEQIRYLFTARRSAIKARTAAQVQLKSLLVTAPTSLRERFRNVTDATLITTLADFDIRPYPEHQGVVIALRALARRHRYITAEIRSLDQELTTLTEHTNPALIAAAGVGPVTAAQLLITAGDNPDRLHSEAAFAALCGASPIPASSGKTSRHRLNRGGDRHANSALHRIALVRMSHDPRTKAYVEKKRAEGKGTKEIIRCLKRAIAREIFTLLTKDVEVPRVDDLRPLRKALGITLQQAAEHFNVWTNKISRIERRLARDDEFAQQYREWLETTTPKS

SEQ ID NO: 279738 - protein, 444 aa, unidentified
MACSGMILIREVADAPVIMGISKPAGLKSPCGEVKIVNPLFVGIDVSSKNNVAYLMNPDGSKHSSFSVQNNLGGAKLLSERIVSALGSMQLSDVVIGLEATSIYGDSLVYALREDGSLGRFQRKIHVLNPKQVKKFKEAYPDLPKNDWVDAFVIADHLRFGRIAKEVYMDDYRYKALQTLTRARFEVIQNLTREKQRFANYLFLKCSGMAQDKDIPNTSATTIALMEHFETVDDLANADLNELTTFVTEAGHGRFADPAAAAKAVRAAARGSYRLPKTVNDTVNQAMAVSIASMRALKEQVKVLDKAIEQQFEIIPNTLTSIPGIGKVYSAGIIAEIGDIHRFDSQASVAKFAGLVWTQHQSGGFEAEHSQMIKSGNRYLRYYLLEAANSVRRCDSEFRRYYDLKFKEVNKYQHKRALALTARKLVRLVFRLLKDNRLYIPPEG

SEQ ID NO: 279739 - protein, 482 aa, unidentified
MKKKNIYVNQSQELLTLFEEAGNSAKIMCVPIDYAKKDHVVMFCNGYGDILRKPFSVKNTPEGVSYLTEQVTRSCHNRSINPKYVFFGGEDVGSYAENFASTLRSGGWLVAGVNAHDAKKQRANIQASTDRLDLMGIATMLLNRRCNCSPAQSGIYLNLRTLVRHRRRLVVMTTEVRNRIHAIVDRLFPGFLDEQKSGIAPFSKGSLWLMENRFSAQQIRRRKRSALIEALRRLGTPKPDCATTKLKEYAARVLNTSDEYVATLQLSLAQHVKHYRCLQENIEQLEKEIAVWLSQTQGAFLTTVRGIGIVLAAGVTAEIGNPNGQKPLNNLVSYAGIIPRIIQTGGPEGEIYTGKVAKRSNRILKDYLVQSASHLGLHGPEDLMSDHKRRDAAGQHADFGIARRYLRMAMALMRSSQIYLPSRLRKKDSKPEERTSYYLMTWPYLRDKWQKLDALKAGFAEDRPLGRWRNMVQGIYDIKLKL

SEQ ID NO: 279740 - protein, 360 aa, unidentified
MNNTIRIQEHTLKNQVIYVGLEDSKKSWKLCIRSLGKVVKEASIPADCSNLRAYFHRHFPECAISVIYEAGFSGFNLYDQIGADGWRCIVTPPNKVTQEKSQRLKNDRIDSRRLARVLETGDYHLCYVPDKELREDRQISRCYEQNLKDIRQTCNRFRRLLEYHGLDRLFTPGRWTPKKYRDAWDALESMDVSESLRIAIEESRMKMEYLWETKKRLLGHLKRLSRDQKYRENADLLVSVPGIGWLTAIRFMLEIGSIDRFPRKEQFSRYLGLVPSEYSSGETERKGHITKEGSRFIRSWLIECSWIAIKKDPALLDKFRRVLSHSGSSKIAIVAVARSLAIRIRSILVSKEAYMPGRVG

SEQ ID NO: 279741 - protein, 413 aa, unidentified
MLKIVYPVCCGMDVHKSFVYACIASTDSHGVTTYKSKRFSTFTNDLRFCASWLAENNCKDVCMESTGKYWIPIYNILEPTCNIVLAHPKYVKAIKGKKTDKKDAKWIAEIFKHDLVSGSFIPPADIRQLRDLVRYRWKLTNFKVGEKNRVQNCLTVSNIKLDDVFSDVFGKASTSIVNRLLENPAERITDVSSFRTKGMKATDAEVLAAVDGEICSEQAEKLRIIRSHMDSLELCRLNTESLILSVAEKYIPQINLISTVPGIQTFAAIGVLSEIGADMSVFPTSKHLCSWAGLTPQNNESAGKKKTTRISRAGAYIKPLLVQCALCAIRVKSNPEIRSRYLSIKKRRGHKKAIIAIARMLLTAIYNILKKNEPYNPELYRRANTPPEHRTVSVEEAIFILQRQGYLVTANAP

SEQ ID NO: 279742 - protein, 350 aa, unidentified
MTHSKNFDVHVGIDVDKKSYAFTIYHNEMKKSKKIPSNADQLYSYFQKTYPNKNILYAYEAGPTGYDLFDYLKSKDCECMVVSPNSIPKPSNESVKNNRLDSKKIAIHLKAGSLTSIRVPEGPWRELRHLVRIREKYASQRKVARQRIKGLLLFAHLYPHIREEDTKWSNRYIKLLEKIPCSEAVRIRLDSHLSDLTYARKKLLEIHQQIKKFIEAHQDIQKNMEYLQSIPGIGIITATTILGKTGDPVHLKKVNELASFIGLTPRERSTGDVVRRGQITHFGNKDLRRLLIEAAWVSIRYDNELKQFFYRIMKRNHPKGAALKAIVAVARKLTTRIYSVLKNQRKYEKH

SEQ ID NO: 279743 - protein, 303 aa, unidentified
MDSVKYIGMDVHKEAISIAVLNSSGKLVMECVIETKAITILQFVQGLRGSLHITLEEGTWAAWLYDLLKPHVTKIVVCNPRRNALLKEGSKSDRIDARKLAELLRSNLLRPVYHGEHGVRTLKELARSYLTISKDLGRVMSRLKAIYRSWGIPCTGKQVYAPRYRAEWLAKITEAGVHRRAEFYYQQLDALRPLRQQVRQELLAEARKHSAWKLLRGIPSIGPIRAALIIAILQTPHRFRTKRQLWTYSGFGIETHSSAEHRFIKGELKRAKKPVSIRGLNRNHNHDLKNLFKSAATIAAAIS

SEQ ID NO: 279744 - protein, 321 aa, unidentified
MSTFVPLGIDVSKAKLDCALALDTKYRNKVFANTPSGFAELAQWFKRHAPGPVHACLEATGVYWEAVAQYLADAGHRVSVINPALSRAHGQSLGLRSKTDAVDARMLADFCREKQPAEWIPPTLAERQLRALVLRHQALTEMQTQEKNRAQVVREEVRESVDTHLAWLGDELARIERAIAEHLDRDPDLRSKRDLLDSIPGLGERTIAVLLAYGLSRERFDSARAFVAFAGLSPRLHESGSSVRVRPRLSKIGHAFLRRALYMPAMVTLYKTQWGQRFRQRLAGNGKPPKLIIGAMMRKLAQVAFGVIRSGNPFNPTLHGA

SEQ ID NO: 279745 - protein, 328 aa, unidentified
MCTLGIDVSKNKIDLCLLTAGPGGKKKHKVLTNEPAVARKVIDWLNAQKCVPESVTVVLEATGIYHENLAYGLHEAGVSVCMANPCRVREFAHGMDILNKNDAVDAFVLACYGELKSPAVWVPPSPEVRKLRALLRQRDALREDVQRTVNRLEKANSTSTPQEVIRSLERTKSWLNEELARIEKLITDHTDNDPGLKADLDLLKSIKGVKDQVGREMLALLKDGMFKSASQVAACLGLTPVEKTSGSSVRGRPHMSKTGPSGVRAKLYVAALTASRWNKQAKAIYERLVAKGKAKKAALGAVTRKLVHLCFGVLKTRLPWDENYVATA

SEQ ID NO: 279746 - protein, 414 aa, unidentified
MDKREWRPGSEAPEVRQQLNMRFIGIDVGSETHVVAVVDESGKVVFKAASFSEDADGYAKFRQILGAPGDAMCALEATGHYWQNLFAFLAAEGFPVALLNPLRTHHFAAEDLRRAKTDAIDALSIARFAQQKRPAVTVLPDEATLELREMVRLRDRMMEDLGDRIRQLHRTLDLTFPEFPRLVRDLSSYKATALLLRFPTATAFREASSGNIAELRYDGRHRIGPELAAALCDTAGRSVGRHEGPSYRLQTQYACEDISTLRERLKTLDDDIHRSLGQHRVGQLLTTIDGIGPNTAARVIAEVNLLAFRDAGALAAYVGVAPSVNQSGKRVPQRGGLHSVGHARLRAKLWMPTLRAVRNNAWLRHFYEGLVARGKPKKLALVAALRKLLSAMLSVARSGKPFEPRLPEAAISLA

SEQ ID NO: 279747 - protein, 355 aa, unidentified
MERYIGMDVHAASCTLAVISEKGRKLRDFPVETNGQALVEAIRMIPGHKHLVLEEGLQSAWLYETLSPHVDEIVVTGVTESRGHKSDKRDAYGLAEKLRVGNLDKPVFKSPCQFTRLRELSRIHMTLVGDVVRVQSRIKSLYRSRGILVSGVNVYGVRHREEWQKQLCSSAQTRATRLYDHFDFLLEQKKQAEIDLLRESKKHPIVRVLETAPGFGPIRAARLVPIVVTPHRFRTKRQFWSYCGLGIVTRSSSDWVQATDGGWIKARVPQTRGLSRQHNHFLKSLFKGAATTVITQLRKDPIHARYERLLDGGTKPTLAKLSLARMIAATVLRMWKDEKEYDPGRTGLSKKTREG

SEQ ID NO: 279748 - protein, 340 aa, unidentified
MSLYGGIDLHANNSVVVLLNDQDQVIYQKRLPNHLPTILEPLNLHHGEIKGVVVESTYNWYGLVDGLMEADYRVHLAHPAAMQQYNGLKYTDDHSDARWLAHLLRLGVLPEGYIYPKATRAVRDLLRKRAHLVRQHTANVLSVQNILVRNTGARLNLTRIRELTKSDLAGLLPEPDQVLAVTSSLAVLDCLSQQIKTLERTVHQRLHQTSAYEHLLTVKGIGPILAQTITLETGDVRRFPAVGNYASYCRCVDSTKLSNGKRKGTGNVKNGNPYLGWAYMEAAQFALRFHPSAQRFYQRKLAKTNNNMILARKAVAHKLARACYYVMRDLVPFDALKAFG

SEQ ID NO: 279749 - protein, 317 aa, unidentified
MTYTSRFVGIDISKSSFDVCVLPEERFANFANDAAGIARFVTFLAQWEGVERLVLEPTGGYERGVVEGLLAVGLPVAKVNAKQIRQFARACGRLSKTDRIDAFVLADYARRMDTKVLEPSSPAHAMLIDLVSRYRQLSHMIVQEKNRREKLVNQDNARTRAWIEQTLAFLQQQRQAVVDAMAACLTSDEHLALKAEVLMSLKGIGLRTACFLLAGLPELGQMNKGQIAKLVGVAPINRDSGQMRGKRMISGGRKPIRDALYIAALPAIRFDPNMKAVFQRLKAKGKPGKVALVAVMRKMIVILNARMRDHRATALDC

SEQ ID NO: 279750 - protein, 324 aa, unidentified
MTLSPLGIDIAKLKFNACLVRAGGKLRHRAFSNDEAGFAQLSAWLTKNGAALTHACMEATGTYYEALATYLHDAGHTASVVNPAAIKAYAQSRLSRTKTDRVDATPVAGFCAERRPPAWRPPAPELRELQALVRRLEALVEMRVAEGNRLSSGGTVAAVRESVEEHIAYLAEQIKRTEKLIRDHIDRHPGLRRQRELLDSIPGIGETTAAALLAQVPDILQYKSARQVAAFAGLVPRERQSGGSIRGRVRLSKIGNARLRKALYFPAVTALRCSPFFQAWAEGLRARGKSKMAVVGAAMRKLVHLAYGVLKTGKPFDPEWPKRA

SEQ ID NO: 279751 - protein, 461 aa, unidentified
MNRRKPADKQKRSTHRKVDWKALEIVHQDAAGIDVGGSEHWVAISPDRDSEPVRRFGCFTRDLHEMAQWLVEKRVRSVAMQSTGVYWMPVFEVLEGHGLEVYLVNAQHTKNVPGRKSDVQECQWLLKLHAFGLLNNSFQPTDEVRIARTLWRQRGNLVAEASSAIQRIQKVLTEMNIQLSNVLTDISGVSGMTITAAILEGERDPYELAAMVQSGVKASLEDIAKSLEGNWRKELLFVLKQHLELDQIYQQKIGDCDLELRQHLEVLNSTVDLTTQPIGPRPKGKKNSRNAPSFDLRTELYRITGIDWSQINGIDVLTAQTVITEAGADLSAFPNEKQFASWLGLCPTNEQSGGKILNRRTRKVVNRATVAFRNAASTLIRSQSYLGAQYRRLRTRLGAPKAITAMARKLACLFYRLIKHGQQYVDKGMEYYEARYREQQIRSLAKRAQKLGLQVIIPTTA

SEQ ID NO: 279752 - protein, 410 aa, unidentified
MEVLYRVCCGLDVHQASVTACLRSPGDGPQRRQEVRTFGTTTRELLQLADWLTAAGCTHVAMESTGIYWRPVYNILEGSVELSLVNAQHVKMVPGRKTDVRDSAWLAQLLELGLLRRSFVPPAAQRELRDVVRYRKRLIEERAREANRVQKVLETANIKLGSVVTRVLGVSARAMLKALIAGDQAPEELAELAQRRLRRKRAALSEALTGRVTAHHRFLLDQLLRHIEFLDGAIAACDRHVETLTAPHADALARLDTIPGVARRTAEVIAAELGCDMSRFPTAGDAASWGGLCPGNRESAGKRLSGRTRHANRSLRQALVESARGAVRKRDSYLAAQYRRLVKRRGDKKAIVAVAHSILVIAYHVLRDGQPYRELGGDYFERLNAERLTRYHTKRLAALGYTVTLTKAAA

SEQ ID NO: 279753 - protein, 403 aa, unidentified
MNAVGIDVSKGKSMVTILRPFGEIVSSPFEIKHTSSDIHSLIKLIHSIEGESLVVMEHTGRYYEALAHQLSAADLFVSAVNPKLVKDFNNDSLRKIKSDKADSVKIARYALDKWQSLEPYSITDELRAQLKVMNRQFHFYVKQKTAMKNNLIGLIDQTYPNANTYFNSPTRSDGSQKWVDFVSTYWHVDCIRKMSLNAFVEHYQNWCKRKKYAFNKSKAEEIYTKTKELVPVFPKNEITKHIIRQAIDQLNSTSVTVETIRTLMNETASKLPEYSIVMQFKGIGPSLGPQLMAEIGDVTRFTHKGALTAFAGVDPGVNESGSYAQKSVPTSKRGSSNLRKTLFQVMDVLIKTMPQDDPVYQFMDRKRTQGKPYYVYMTAGANKFLRIYYGRVKEYLSVLPDPS

SEQ ID NO: 279754 - protein, 425 aa, unidentified
MSEKIVVGIDVSKAFSDICILSPNNDIIKRLKISNDITGMRSLIYVLEKVEDEYKDRAVIIMEATAHYHQILANFFRKHNYEVIVINPIQSGALKNINIRKIKSDKTDAYNIALLYRIKNYNETITHSDTVNSIKKLCRQHKELTDEIVEHINRLIAFLDISFPDFKKVFADLQGKTPLSLLEKYPTIQEVLSPENKQDIIQLIKENSHKSSSYAEAKYEKLFKAAEKSIEVCIVSLSSAVLIQTTVRVIFSLQEALKAIDDEIKRLSLLDEKFHKEIVLLQSIPGVGEYTACVVLSELGDISNFSKPKELVAFFGLDPGVSQSGTYNRKNNKISKRGSPHVRSILHMLAKSNVYPNRNREYLNPVMRAYFEKKIAEKPYKVVMCAIMRKMVQIIFAVLRNQKSFELRTPEEHQKLIREKSKLVA

SEQ ID NO: 279755 - protein, 425 aa, unidentified
MNVASIDEPRFAAYVAIDWGDSKHVWSLQPADSDRRERGEIEHSPEAVAAWAAMLSARFGGQPVALAVEQSRGPLVFMLGKYEQLHIYPIHPRAAAQFRAALFPSGAKDDPSDAELLLDLLVHHRARLRRLQPDTEQTRLVQHLVEGRRKLVNERTRQTNRVTAQLKLYFPQMLDWFDAVDAPLVGALLQRWPTLEALQKARPDTLRSFFTAHNCRRQELIERRLDQIHQAVPAVRDKALLEAAQAMTKVLVELIATLREGIARFDRQIAQAVAAHPDFAIFDSFPGAGPALAPRLLAAFGSQRERYQSAADLQTFSGIAPVTERSGKSQWIHARWACPRFLRQTFHEWAAHSIGFCDWARAYYQQQRGRGNDHHAAVRALAFKWIRIAFRCWKQAVPYDDARYMQNLRQRGSPLIAALAKPELP

SEQ ID NO: 279756 - protein, 408 aa, unidentified
MFCGIDWAEKHHDVALVDEAGKLLAKARITDDAAGYRKLLDLLAEHGDTEAEPIPVAIETSRGLLVAILRVGARQVFAINPLAASRYRDRHGVSRKKSDPGDALVLANILRTDMPMHRSLPADSELARAVAVLARAQQDAVWNRQQIANQLRSLLREYYPAALDAFVTGRKGGLAHAEARAVLAIAPTPTAAAKLTKPQIRAALKRGGRQRYTEAETKRLQDIFRAEYAHQPPLVEEAMGKQMLALLRQLDAAAEGADDLAEAVEASFQQHPDAEVITSFPGLGALLGARVLAEIGDDRSRFADARALKAYAGSAPVTRASGKKRYVGRRFVKNDRLTHAGYLWAFAAITVSPGANAHYRRRRERGDWHAAAQRNLFNRMLGMLYHCLQHRVPFDEQRAFAPFVEVAA

SEQ ID NO: 279757 - protein, 388 aa, unidentified
MSKVTMIGCDVHDASLVLKVAVGQEAAVKKTFGGSEVAEMILWLKEFAQRHEAPRIVLVYEASSRGFGLYDQLRDAGIECHVLAPTHLPHTAHRRKNKTDDKDADMLLDEVRAYVLAGRELPDVWVPDLRTRDDREAVRVRLQFGEQRTGVKNQIRQLAKRNSLAFPVWFTKSGEWSRRSLQWLREMAGGTSACLAEGARTALVSLIDLYAALSCELKELDRGILKLARSPRYAQTFRKLKLMPGVGTLTAMVFLTELGDLARFANRRQLAAYLGLAPAAYESGTHDDRKGHITRQGSARVRHVLCQAAWAAVRCCKESKATYEKIRRGTSKRTKIAIVALMRKLAIAMWHTALSPEVTRLLEEVDRGKDSAEAPAENATVGAATLAG

SEQ ID NO: 279758 - protein, 444 aa, unidentified
MQLKQRIQPTIESAKTMSESIAAAALQGVAAYIGIDWADQKHDVVLRSASQPNKVEHRIIEHKLEALMEWVGQLQQRFGGQGKILVCLEQSRGALIYHLMGYEFFELYPVNPLQLARYRETFSPGGAKDDRADAELLCELLYCHRDRLRAWKADSELTRKLVFFTEGRREAVDQRARLSQAIKSQLKVYFPLALELLNNDTTTALAADLLLRWSSLEALQKQSAHTLRKFFYGHNCRGEAKMLERLQLVQEAQPLTQDAAVIEPAALRVQMLACQLKHLLPDIARYDKKIAELFAVHPDRFLFENLPGAGLALAPRLAVAFGSDPNRWESAQEIATLLGIAPTRRASGKKTGKKASVHFRQACPKFHRQSFHEFAGCSIRYCPWADAHYQTQRARGKGHHTAVRSVAFKWIRICFACWKQRIPYDPQRYLQALQRRGSPLADAC

SEQ ID NO: 279759 - protein, 420 aa, unidentified
MKEWNQFTHFAGFDWAHDHHDVVIVDASGKTVADFRFEHTAKGWADFLQQISAFPDLALAVETKSGVAIERLMELQCSIFPVHPQSAKAYRQRKVPSGNKTDRVDAWSLADALRLDGAQWKQLAPQDPRIKELRLLCRDEVALIRDRTAFISQLRQALYEYYPAALEAFDDWTCPFAWTFVVAFPTPEALLKAGKRKWEKFLHLHKLARPETYQRRLEIFANATQFAGSTPVANAKSRLAVTRAKQLQLLEKQLGEYRTEIQRLFAQHPDAPLFESLPGAGDKIAPRLLAEIGDQRALFPDPQALQCLAGTAPVSFQSGQIHRVHLRRQCNKFLRHTVHLWANLSRECCPWAATYYTALRAKGKSHAGALRALGQRWLKIVWKMWQTRTVYDADLHGRNQLKHGSWVLQLVTKADAAPKK

SEQ ID NO: 279760 - protein, 340 aa, unidentified
MQIATIGLDIAKNVFQVHGIDAAENVVVRKQLRRSQVIVFFKALAPCLVGMEACATSHYWARELTKLGHQVRLMPTKDVKAYLKRNKNDAADAEAICEAVRRPTMRLVAIKSAEQQAQLMQHRARDLLMHQRTQLINAMRSHLAELGIIAPQGREGVKELLAIIASDADTQLPSDARASLIVLAAQLQALQTTIGVIENRIVVQHRANKENRRLQTVPGIGVIGASAIAATVTNPKIFRSGRDFAAWIGLVPRQMSTGGKPKLGPISKQGDRYLRRILVVGAVSVLRRAKLHPEKFPWITQMLARRPFKVVAVALANKMARIAWALMMSGKTCRAARFAA

SEQ ID NO: 279761 - protein, 333 aa, unidentified
MKNYTTFIGIDVAKLTLDYCMVSLDLQPEQGQILNTQKSIETFLKTLKKAGCEMNETLFIFENTGIYSSLLALVLSENQLDYAQVPALEIKRSLGINRGKSDKVDAKEIANYARRNTDKIALSVLPELSLQQLRIVFAEREKTIAAIKSFERTRENEMFLSKEVFASVKAINRQTVKQLKKQLAMLDDRIKILVRENEILYKQQQLLKSIPGIGELTSVYLLIVTKGFTAFANGRKFACYSGVAPFEHSSGTSVKGKTRVSHLPDKKMKSLLHMAALTAIKYDAELKNYYTRKKAEGKHSMLVLNNIKCKIVYRIFAVIARDSSFVNLHKFAV

SEQ ID NO: 279762 - protein, 461 aa, unidentified
MSNGSRRLSRGDRRRNDRLAGLRAVITRDTAVLAFDLAADKQVSALTDQDSRVLARRTVSAKAWHLREVVEWGLAQARAAGFSSVVVACEPTGHRWRVLDQIAAGLGVRLVCVQPLLVHRARESEDFTHNKSDETDAMIIARLVTELRCYLPERAEPDWARLRHLGARRAELVTDATAARQQVTDLLECAWPAALQAAGKPMKSKSWLAAMTVLLDRVGATGDLAVIRRWGWSRFAAAVRRELARNGTTRWYSKIVKAVFDAAADPARAGAGVLDQRAGALERTRFALADLAHARAETAAVEARMVEVLDELGLTALVTSIRGLSAVGAAAILAETGDPARFSSARALVKHAGLCPRDNASGNYQGKTGISGRGRPQLRLAAWRAVWPAVRNNPVLAARYAHLTGRTENKLTNTQARVAVAGSLLRQLHAVITTGAAWDPAIASGLKPHSPASARRTAPAA

SEQ ID NO: 279763 - protein, 367 aa, unidentified
MSSVVAERGSIHLGLDVHKNTISVGVLEPAEQSPRTDRISSDEDAVRRLVARFPDPRRLRACYEAGPTGYELARLLGSLGVRCEVIAPSLIPTAPGDRVKTDKRDAARLARLHRAGELVSIRVPSVAEEAVRDLCRARADMVIDQTRARHRLGKFLLRHGRVWRDGQNWTLKHRAWMAAQRFDDQALATTFAHYRATLAARESAVATIEADLAPWFTRAPFTDAVARLGAYRGITGQGALTLASEVCDWRRFPAAGAFMGFCGLVPCEYSSGERTRRGHITHAGNLHLRTQLVESAWAYKSHPSVGAAIARRHDGLAPEVIARAWAAQLRLTGRFRRLDARKTSRNIVVTAIARELAGFVWAEMTSD

SEQ ID NO: 279764 - protein, 482 aa, unidentified
MENRNIYLNQSQELLSLFEDAGNNSKVICIPMDYAKKDHIVMFCDGNGHILKKPFSVRNNPEGIEYLTDQVTRSCRRRQINHKHVFFGGEDVGSYAENFINTLRSGGWVVAGVNAHDAKKQRANQQASTDRLDLMGIASMLLNRRANCSPAQSGIYRNLRTLVRHRRKLVVMSTEEKNRMHAVVDRLFPGFLNEKKSGICPFSEASLYLMEDRFSPRQIRRRKQPKLIEILHRCGTNKPEDTAKKLQSYADCVLVTPNEYISTFQLSLTQHVKHFRCLRDSIEQLEHEIAVWLAQTEGAFLTSIRGIGIVLASGIAGEIGNPQNQKPVNNLVSYSGIIPRVKQTGGTQGKTHIGKVAKRCNRILKDYVVQSANQLGLHGPQDLMSDYKRREAAGQHADFGIARRYLRTAMCLMRKPQIYLPPEFRNAETKPEERAGYYLMAWPALRDKWKKAGAIEAAFDDKHFLGRWRNMVQELYEIKLKL

SEQ ID NO: 279765 - protein, 248 aa, unidentified
MTILTSPTVIGVDVAKAEIVVYREDLEITQVINNDRTSVGRWLKTLPAQSSIALEATNLYHLDTAELAHGMGHRVYVVDPYRVSHYRESIGQRAKTDPCDARLLARYLTSEQHRLRVWSPPPRHYTVLKSLLNKRAQLMKARVSIMLSWSNEPLLEDLLAHGLEHFKQLDQAIQELLRKVSQEAGISENIRRCKAIEGIGELTATGLATTYMRGEFASADAFIAFLGMDLKAKDSGKKHSPRHLSKKR

SEQ ID NO: 279766 - protein, 343 aa, unidentified
MQGVTTVGLDIAKSVFQVHGVDARGKVVVRRQLRRRQVLPFFKKLPSCLVGVEACATSHHWSRQLRALGHTVRLMPPAYVKPYLKRQKNDAADAEAICEGVTRPNMRFVETKTPEQQSCLMLHRTRHLFIRQQTAVINAIRAHLAEFGIVAPVGRNGVEELLDVVADPNDDRVPEVARECLAGLGAQLRMLKAQILEFDRCIVAWHRSNETSKRLDEIPGVGPALATALVASVADPRVFRSGRDFSAWVGLVPKQNSSGGKEKLGSITKRGDRYLRSLFTAGALAVIRYAKIHGTKHRPWLTALLGRRPTKVAAIALANKIARMAWAMMAKGERYKEPAALAA

SEQ ID NO: 279767 - protein, 418 aa, unidentified
MEKKNVKMDVINPNCAGIDIGSRSHFVAIGQELSDVREFGVYADDLVSICHWLDEYSITSVAMESTGSYWQNLYVELIRHGFEVVLANGKFTKNIKGKKTDVKDARWIQKLHSIGLLTGSFLPDEQTEKLRTYCRQRENWITLGAEATHKMQKYLKLLNFRLDVVVRDVTGLTGLTIIKDICEGNLVPESLAKHRHYNCRKTEEEIAKALKGNNREDFLFGLKQEYESYNFYQKKITECEKMINQFLKQQINTDPTKKKLKAPDKKHKRVNKNAIKGIDLNQASYQYFGGVDLMSIEGVSHSTILSIISEVGPDGFKEFATAKQFTSWLRLAPNNKISGGKLLSSKTPKGSNRLKIALRNSANAIGNLKDTHLSNFFKRVCYKKGRTVAVSATARKLAVIIWNMVVKQITYKPPIEYL

SEQ ID NO: 279768 - protein, 340 aa, unidentified
MFKNFIGIDVSKAKFDLALIKDCDKENMVQAVFDNTQKGIKAMARFLEKECQVQLSDTLFCMEFTGIYCRPLTTFMTEKECNVWLEMPVNIIRSLGLQRGKNDRVDARRIALYAYKNKEDIKLWKPQRDVILKLRDLLSLRERLISSRKSLMAPIDELIAMGDKQGAARVKRGCKLTLSSIEKEIEQIDKDLDDTIKNDPQLKELYSLATSVPGVGKYTALFMICYTNEFSIYNNPKQLACYCGVAPFEYTSGSSVRGKTRVSHMANKVLKRMLHMGALSAITRDPELSDYYQRKIALGKNKMLVINAVRNKIIHRLCAVIKRGNEYQPENLFKEHLVLS

SEQ ID NO: 279769 - protein, 311 aa, unidentified
MDYIYIGVDVSKEKLDAYRPNTKKNETFLNQEADIEKFCKSFKKYKTPVMVVVEGTGGYEGLLVRMLTKHKVDVAIVNARQVRDFANGIGMDAKTDPIDAYVIYRFAEVVKPSPKAMASDGEQKHSALVTRRSQVIDLITQESNRLKQCWDERSKQSIRKTLEFLRNEAKAIDKELEAMLALDEANKRKLEILDSVKGIGPVTQSMIVSKLPELGKLNRGQIAKLAGVAPINRDSGAKEGKRFISGGRSYVRRILYMATLSAIRSNTTIQAFYRQLKSRGKQSKVAIVACMRKLITILNMMLKTDQVWQTK

SEQ ID NO: 279770 - protein, 352 aa, unidentified
MRRYKQITLKGKSLFVGIDLHLLQWHVTIRTEDVEIFSGSIPGTWEALRKLLDRYPGAVLHTVYEAGYFGFWLHDRLVEYGAQCIVTPPSLLPIEYGNKVKTDRRDSRKLAQLLAKGMLKRVWVPSPEERFHRQVIRRRRQLIGDRVRTENRIKAELRFYGIQIPETMTKWSKAYEMNLHRLKFNDHWMQESFQRLLEEYAFLSDQIKKQTTVLQTLAETPLYKERVKILRTVPGIGLIAAMELLLELQDMERFRRADQLAAYVGLTPSQYSSADKVRMGRITAIGKNQLRGTLVEVAWRLIGKDRAMRKRYERIKVRSGSKRAIIAIARITLLRTRRMLLDNKSYVMGRAA

SEQ ID NO: 279771 - protein, 377 aa, unidentified
MVPLQSCPIARPPGPHSPAGGVAVHQPEQAVEVIIGVDTHKDTHTAVALDTLGTRLGTTTILVSREGYRQIEAWARSFGSVRAFGIECTGSYGAGLSRALQASGHRVLDVNRADRRARRRHGKNDPLDAEAAARAVLSGQATALAKSGTSSVEMVRHLKLARDSAVKARAQAMQMLKALIVSAPAELREQLEGIRGKVTLVRHLAALRPGPMTSTTASAKVGLRAISRRWLSLSEEIEAHDRDLDVLAATHTPELITAPGIATGTAAEMLIVVGDNPERIRSEAAFAKMCGACPLPASSGKTSRHRLNRGGNRQANAALHRVIVTRMRCHQPTIDYVRRRTAEGKTKAEIMRCLKRYVAREVFTHLCKPRQPVSETA

SEQ ID NO: 279772 - protein, 391 aa, unidentified
MTKPKTKTVNDFSRCLDPLDMDATLIAVIEMSQSSWLVAGIVPGVERQPLKKLAIDEDALLSLLNRWRAEAEKNGHPITRIAVAFEAGHDGFWLARWLAAQGVEAHVIHASSVAVTREHRRAKTDRLDTELLKRGFLGWLRGERGHCKMVAVPTLAEEDAKRPSRERETLVGEASRIITRVKSAFVRLGIRGFNPKLKTAAARLETLRTPECEPTPPNTLAALQRDLERHQIVKKQIRELEQTRLENLAQAPAKGSNVMVLLLARVIGIGVETADMLVREVLSRTLRDRRAVARYAGLTGSPDESGAKRREKGLARSGNARVRHGMIQLAWRFLLFQKDSALAQWYRQRTGNAPSMRKPLIVALARKLLIALWRFACDGVVPEGVRLRPAA

SEQ ID NO: 279773 - protein, 359 aa, unidentified
MAAAEGGLRGEVREYGRIANTPAALDRLAGKLGHEGVWLRFCYEAGPCGYGIQRHLSARGHECVVVAPSLIPKRAGDRVKTDRRDAASLARLHRAGELTAVWVPDPGHEAMRDLVRARLDAVHALRRARQQLSGFLLRHGCHYGRPAWTKLHRRWLAGLKFEQAVHHLVLEDYVQAVEAAEARRDRLTAQIAAMLPDWTLAPVVAALQTMRGMALVNAATLIAELGDLSRFANPRQLMAYLGLVPSEHSSGASVRRGGLTKPAPGGEQGAGNGAARRLLIEAAWCYRFPARVSRELLLRQEEQPKRIREIAWKAQVRLCARYRKLARTGKPANVVTAAIARELAGFVWAIARSVPPAAD

SEQ ID NO: 279774 - protein, 356 aa, unidentified
MSKTKDNGISFKGQHFYVGMDVHKKRWSVTIRNSGLKLKTFSMDPSPEKLKVHLETNYPGGIFQLVYEIGFSGYWICRRFKELGLECIVVNPADIPTGHKEKDRKSDPVDSNKLARELENGNLHRLYVPLENDQHLRSLCRHYRKVVQSNTRVKNRIKGHLDFNGIKVPYQSSYWSRNLINYLNELPLDNGPAKAYLRLSLEELEEHRQRLVRILKELRYWVQERGEVRVIQNLRSIPGIGFKTAMIIYTEIMDIHRFRTLDHLKSYAGLVPSTWSSGETDRTRGLTYRSNSQLKYVLIETAWISIRKDPVLLKHYQKLTLRMTKQEAIVRIASKLLNRIRYVWKNDSPYVMGVIE

SEQ ID NO: 279775 - protein, 342 aa, unidentified
MDEYDGRQFVGIDLHRRRSVIVRQSESGEQLSAVRIVNDPVALGLQLEQAGSDPEVVLEATYGWYWAVDVLQACGAHVHLAHPLGVKGFRYRRVKNDVRDAADLADLLRMGRLPEAWIAPPQTRELRELVRYRAKLVAIRSGLKAQIHAVLAKAGVLIAASDLFGVTGRQRLAKVPLGAAYAQRIGSLLQLIDIFDSHEARFAAMIAEQLDTHTGYHAIQQVPGIGPVLAAVFVAEIGDVDRFTDPAHLCSWAGLTPTHRESDTVVHRGHITKQGSKAVRWAAIEAVQRHPTTAKIAADKQRIEARRGKNIAKVAAARKLLTLVYYGLRDGHIRALDRTRAA

SEQ ID NO: 279776 - protein, 370 aa, unidentified
MLDTTTFVGLDVHARSIKAVSLDVMTGEVRCATFGYDAGAVAAWVRSVDPKARCVYESGVTGFDLQKRLSGLGVDCAVGAVSKMIKPSADRRRKNDRNDAEFLARMLSVGNVVEVWVPDDECEAARDLTRALEDARDDLSRSKQRLSKFLLRHGLAFDERTPTGRRKGNWTRAHWSWIESIRFAEGADNEVLAYYVDAVRRAAEEKARLEGLVGAEARKPRWRRRVDSLRCLKGVDTATAADLVFEAGEFSRFRNARSFAAWVGLTPSEHSSGESDRRGAITKAGNRHLRKTLVEAAWHYLTCSGRPKDLARGQAPDPAARRHAAKGVRRLVDRREALLARGVHSNKANVATARELACWVWAVGLMAEEA

SEQ ID NO: 279777 - protein, 408 aa, unidentified
MNPLFVGIDVSSKNNVAYLMKPDGSKHSSFSVQNNLGGAKLLSEKIVSALHSMQLNDVVIGLEATSIYGDSLVYALREDGSLGRFQRKIHVLNPKQVRKFKEAYPDLPKNDWVDAFVIADHLRFGRIAKEVYMDDYRYQALRTLTRARFDIIQNLTREKQRFANYLFLKCSGIAQDKDIQNTSATTIAIMEHFETVDDLANADLDELTAFISEAGRGRFVDPDATAKAVQAAARGSYRLPKTVNDTVNQAMSVSIASMRALKEQVKVLDKAIEQHLEIIPNTLTSIPGIGKVYSAGIIAEIGDIHRFNAQASVAKFAGLVWHRNQSGDFEAEHSQMIKSGNRYLRYYLLEAANSVRRCDSEFRRYYDLKLKEVNKYQHKRALALTARKLVRLVFRLLKDNRLYIPPEG

SEQ ID NO: 279778 - protein, 339 aa, unidentified
MNPTPVGVDIAKSVFQVHYVDPESGEIVNKRIKRARFLEYFANRQPCRIGMEACGGAHHWARQLIRMGHQVKLMPAKFAKAFNIRNKSDAADARALWLAVQQPSKAVAVKTEAQQAVLALHRMRQQLVKFRTMQINNLRGLLTEYGEVMGQGRAALDNAMPGVLERVAERLPAVLIDTLREQWDGLTKLDQQIDEIERRLRRWTQQDSAVKALTDIPGVGALTASAAVATMGDPNAFRSGREFAAWVGLVPKQTGSGGKVILLGISKRGDTYLRTLLIHGARSVLRHAKSPSAWLQDIRKRRPSNVVTVALANKIARTIWAILAHGQPYRSDHVSTKLA

SEQ ID NO: 279779 - protein, 342 aa, unidentified
MKIIGCDFHPGFQQIAMVDTETGEHTEKRLTPEEAIQFYRQLHGPVVVGMEACGNTLWFERLLAQLGHTLWLGDAGKIRAMEVRKQKTDRRDAELLLQLLIEGRFPRLWVPNLEQRDLRHLLLHRQKLVGMRSQVKNQLQHLALNQGIQRKSKLWSRAGRKLLEELPLSGWTARRREELLLLLDDLEPKIGELDVAVEQAAERDAVAQLLQTHPGVGPITALAFSLTLGQIERFAHSRKVVSYLGLNPSEHSSGGRQRLGSISKQGNAMLRSLLVEAGQSAARLVPELRRAYQRLKHRKHSAVAKVMVARKLAVRLYWMWKTQQPYSATRMQGSPTGPVAER

SEQ ID NO: 279780 - protein, 334 aa, unidentified
MALEFLAIDLGKRSFHLYGIDSDGVILSRKVSRAKLAEVVGNLAPTVIAMEACASAHYWARCWLAAGHEVRLINPRFVKPFVKGSKNDAVDAEAIFEAAGRPTMRFVPVKSTDQQDLQSLHRARDRLICQRTALINHTRGLLAEYGVVLPQGPGRFMAQAPTAIAGAEMSDLARAIFGELMDQLDDLDRRIQKLDAMIVTLCRTNETCRRLAKLPGVGPIIATAIVGSVNDGRQFRSGREMAAWIGLVPRQYTTGGKPRLGGIGRRANHYLRRQLIHGARAIVSRSAKHDDRQSTWLKALIARRGFNRTTVALANKTARIAWVLLSRKQEYAAP

SEQ ID NO: 279781 - protein, 424 aa, unidentified
MKVTYQTCCGVDVHKSFLVATIVKTTGGIEPSYQKKRFSTFNNSILEFKQWLLDNDCRDVCMESTGKYWVPVFNLLEDEINVVIANPKWVKAVKGNKDDTKDSKWIGDLFRLGLVKGNYITCKKVRILREYTRYRYKLVSCRSSEKNRYQNALTVCNVALDSVVSDIFGKSSTSIIDYLLEQSGTSINHEEIASKLLRSLKSKEDAVIESVEGYQMTDAQKYRMRLVRAHMDYITAEINDVDKMIENMISSNPDFENTVQFLCTIPGVKRDSAITIISEIGTDMSQFSSSKRLCCWAGLTPGSNESAGKKKSVRITRAGVYLKPALVQCAHAAVKSDKSPYYKKKYESLVKRRGKKRAIIAIARMILTAIYQMLSTGEQWNPSDLYKIDMPEALVEKQKAKAIKQAKKLLQREGLFPPDEPLAS

SEQ ID NO: 279782 - protein, 319 aa, unidentified
MAQNEVVVVGIDVAKDKVDACIRSLSQRQTFPSTAEGRRALIRWLRKHKVGKAVMEASGGYEREWAKALRNAKIEVRIVDPKRVRSFAQSAGRLAKNDAIDAEMIAWFAETFDEARGQAYDAAREELVQIVNARQALLEQQTQMQNRCEHTVPIPVRKMHERLLKAIALEVTKLEAVIAALTKASPHFAETAEIIESVPGLGKITSAGLIAAMPELGQVSNEAISALLGVAPYDDDSGKRQGERQIKGGRRKVRNLFYMACMGAATQHNPVLKTFYRRLIAKGKKPKVALVACMRKLIVILNIMIARREKWDASRYAVS

SEQ ID NO: 279783 - protein, 322 aa, unidentified
MAMLSFGGIDVSKDRLDVMVLPEEQCSSVPNDAAGWAKLVEQLRGFSISAIGIEASGGYERGAVRALLAAGMSVRQVNPFKLRQFARASGVLAKNDPLDARMIASFVAVMPTRPAQRQTPAAERLAEMLAVRRQLSAEKVAAENASRLLEDAMLQRLSRRRIARLAADIDMLDGHLVEVVGTDAPLAHRYRLLTSMTGVGTVLACTLIALLPELGGMTRKQVAALVGVAPYAFESGTLKGRRCIWGGRANVRQVLYMAAMSASNWNPGLKAFHDRLKAAGKKPKVTIVAVRRKLLTTLNAMLRDDVVWADRLRGRHSVPTVR

SEQ ID NO: 279784 - protein, 460 aa, unidentified
MNEYFIGIDASKGYSDFVMINEKKQTVIENFQLDDTFQGHTRLYELLHGFNQDYPEATIYAAVESTGGYENNWFQSLLKFQASLPIKTAHLNPLGVSHNSKADLKRNNTDKISAKNVAEYMIAHPEKVSYQHQDSLASLRKQWGFVTMLTKQSTQLLNQLESLVYNANPEILIYCKGDTPQWILKLLTSYPTALRLSRAKVKVLARIPYISLDRAKQLIATAKKSVASASDKVTEQLIVATVKQIVHLKKTIKVQSEVLANECQIPEVALLKTFTGIGDYSAIGLMLQIQSVNRFLTSKKLSSFFGIHPEYKKSGDGTYKYRMSKKGRKEGRRVLFIVAMSAIQSNPLIRDVYQQAVERGMEKMSAMGLCMHKILRIVYGMLKHNKAFDPQVDLKNRQKKPSRQRKVGQDKDRRYQNFDSNAPISRRQKMKRKERKQSQNANSVECGISEAPVPITQLAN

SEQ ID NO: 279785 - protein, 339 aa, unidentified
MEKRYIGIDLHRNRFTCCIRLENERTYVTEWELEDLGKFVKKLRPTDEVAVEITGNTRLFHDAVAEHVARVVVVNTNQFRVIRQSVKKTDPNDARTLALYLSKNMLPEVRMKDKEHGQLASLTQTRDTLVKLRTALKNKINNILSARGLNLAKEALSSEKKLAEVLALPFDEIVRIELRVIVEQIRSLNRSIAELEKTIGEEGSKLDGHKGLASIKGIGKITGAILLSVIGDINDFADEGHLASYFGIVPRVSNSNETEHSGRIHKRGTKLGRTALVQSALIAANYSTYLKRFYEQVKARRGAGKAIIALAKKFLGIIYRTLKNKWVFKDFPNFVLAEE

SEQ ID NO: 279786 - protein, 319 aa, unidentified
MAQNDQIVVGIDVAKDKVDACIRSLSQRHTFPNTAQGHRKMIAWLHKHKVNKAVMEASGGYERDWARVLRLAGIEVRIVDPKRVRSFALSAGRLAKNDTIDAEMIAWFAETFSAAPGQPHDAAREELRALVKARKHLLDLQTRLKSQNEHAAPEAVQKAHARILKSLATEIAKLEAAISAKVKATPDFAERAEIIESVPGFAETTSANLIAGMPELGQVSDEIAAALIGLAPYDDDSGKRRGERHIKGGRRWVRNAIYMPCLGAATQNNPVLKVFYQRLIAKGKEPKVALVACMRKLIIILNTMIARRQKWDASRYAPN

SEQ ID NO: 279787 - protein, 383 aa, unidentified
MPKASALPEGPAAIQTNLAAIFVSLELSRSTWIVTSLSPGAGERMSKHSVPAGDVSALLLRFAELKRKARVRMGMSFPIVAIQEAGLDGFWLHRLLESEGVESHVVDPASIATSRRRRRAKTDRLDGEALLRALMAFKRGEPRVCAMTVPPTPEEEDRRRLGRERKTLIAERVEHVNRIKGLLFSQGIADYEPLGRDRHKRLAKLTTGDGRPLPDNLKASIGRELDRLELLLDQIRAVEAERDALLAKAEPPVGKMLLAFKGIGPEFASILWTEGLFRHFDNRRQVASYAGLAPTPWQSGSISHEQGVSKAGNARLRTALIELAWLWLRNQPTSSLSLWFKQRVRDGRGKKTTIVAMARKLLVALWKYVASGVVVEGAVMKNA

SEQ ID NO: 279788 - protein, 471 aa, unidentified
MPENRKKTDQGDSQMEAEGLPVVRANVAGIDLGSKQHWVCAPKPGGQGREVKSFGATTPELERMAAWLKERNVASVAMESTGVYWIAPHEVLERHGLEVVLVDTRQLARVPGRKKSDPVDCQWIQRLHSCGLLMGAFRPVEQVCMLRTLVRDKAVLVAETGDWLRRMQKSLDQMNVRVHRAVSDIDGVTGMAMVRAIVGGERDARQLAKFRDPHCHQSEEAMAEQLSGHWRADHLFTLEQTLKMYDAIPERIAAYEQEIMRKLAELEREECRGKEAPKLNNPNKAKAIKKRGEEPLRQALYRTSGVDLTGIDAIGVETVLLVQSEYGTDLSMFPTEKQFVSHLTLAPHKPTSGGKPVKKQKKKRGSASSRVAAGLRMAALSLRNSKTALGAHYRHIAARKDGDVAVFALARKLATLIYRLLRWGQPYLDEGAAAYEKRYQEGRLKRLTATAKDLGYQLTPKAVRASLVVSP

SEQ ID NO: 279789 - protein, 341 aa, unidentified
MENVALIGIALGKHSFHLHCQDKSGKALQRKKFTRTNLMQFLATCPSTVVVMEACAGAHFMARRISDIGHEAKLISSQFVRPFVKSNKNDFVDAEAICEAASRPSMWFVQPRTEVQQAMRALHRARESLIRDKVKTNNQINGFLLEFGISLPVGDTVIKRLPLVLVEHEIPEYLSRLLMKLHAHYLYLVEQITELESELNQSIKTDDATQRIMTIPGVGPITASLLSSQLGDGKQFSCSRDFAASTGLFAASTGLVPRQYSTGGKSTLLGISKRGDKNLRRLLVQCARSFMMRLEHQQGRLAEWVREQLSKKHSNVVACALANKLARIAWAITTNHNAYQA

SEQ ID NO: 279790 - protein, 406 aa, unidentified
MGYHTEAFIGVDTAKLRNAVAVAESGLNGQVYFYGEIDNTEAAMRKLIRKLESKYKKLTFCYEAGPTGYGLFRLIKELGHNCSVVAPSLVPRKPGDRVKTNRRDALNLAKLLRAGQLIAVWVPDERHEAMRDLVRAREAAHIDYTRNRQQVSAFLLRVGRYYTGKKTWGKAHLKWLAAQKLDNYEQRIAFEELLLAVRQSRERIERLEQAIRDSLPEWSLAPVVEALQALRGIDLISAVVFMSEIGDLSRFASPRQLMAFLGLVPSEWSTGESVIRGPITKAGNRRARRILVEAGWSYRHPPRVGKEKQKKVEAVPRTVREIAWKAQTRLCGRFRKLTRKGKRSTTVTTAVARELSAFIWAINRELARKPCSEQKSQPRPHQACRRAQLSQAQALRVAAERAASLE

SEQ ID NO: 279791 - protein, 383 aa, unidentified
MKIVALDLGKSKTVSYAVDPRTGEAAFETIRTTPEDLGRWLRRHRPSHLVMEIGALTGWVHDLARACGVRRIDVANVNHEAWRWRNVKRKTDRLDAQKLADLAVAGQLPTVHMPEAAVRQWRQLITYRSSVVDRRTAIKNHIRSILAAVGESMSPGQRGWTEKGRDYLRSLARPLEGVAPEDLWRGELDLELRALDAVEEHVKAVEAKLGAMGKADARVARLQTIPGVGPRLAEMLVALFDDPHRFRSGRQVSSYLGLVPRQWQSGATDRQGHISRQGSRLARKLLVEVAWVGLRYNPTLRAIYDRVCGGIAKRKKIAIVAVARHLAVIAWAMLRDETPWQAPPASTPASPPPEAPPRQRRRARTTTAPKTKQRVYRFGPPAG

SEQ ID NO: 279792 - protein, 348 aa, unidentified
MEHICRIGMDTSKHFFQLYGVNAAEEPVLRKKLRRKDMVAFFEKLAPTVVAIEACGGSHHWARLLSSFGHQVKLIAPQLVKPYVKRGKNDAADAEALCEAMSRPTMRFVPVKTAEQQAAVMLVGVRDRLIRNRTQLANSIRGYASEFGLTAAKGMAHLDPLIERIQADESLPDLARELFAAQAKEYEQLQAQIDEVDVKLKAWHHADECGRRLAQIPGVGPIGAALLMMKTPAPEMFRSGRQFAAWIGLTPKDHSTGGKVRLGVITRAGDEALRSVLVVGATALLRFVANGKSKSALSPWLGQLLKRKPAKLVAVALANKLARIAWKLMVTGQSYVRKSTPTTVPGAA

SEQ ID NO: 279793 - protein, 359 aa, unidentified
MQRNKISFSGQKIFVGIDVHKRKWSVATITESGFQRVHTQNASAQELIDFLHRHYPDGDYRAVYEAGFTGFSTYYSLNAAGISCMVIHAADVPTTQYENVMKTDKIDCVKLAKSLRAGLLKGIYIRPKDSIDDRGVIRMRRAVIKDLSRYKIRVKHLLMSNGVQIPEQFDKRKGNNWSGAFIQWLKGDVKLLSETRRTLDMLIAQVERMRQAQVEATRELRKLSRTERYATNYDLLCSIPGIGGIVAMTLLTEINDITRFNNEKQFASYLGLVPTSHSSGDKTIHGEMTFRGNKELGPMMIEAAWVAIRNDTGLAASFSNYCRKMKPQQAIVRIARKLANIIISVLKNKKKYVPYSCNG

SEQ ID NO: 279794 - protein, 359 aa, unidentified
MKIVGCDFHPSYQQIAVLDTETGEVQEKKLIHANGEAEKFYRELESPALVGMEATGNARWFELMVEKFGHQLWIGDAAKIRASYVRKQKTDKRDAGHILTLLVEKRFPRLWVADAQQRDIRQLLTHRHKLVGVRTRLKTELQHLALNQGIQKKRQLWNERGRALLESLPLQGWTQQRRKDLLQLLAVVEPQIEQLDKAVEQVAKANPQAVLLMSQPGVGPITSLAFAVTIGEVSRFAHSKQLSSYLGLIPSERSSGSKRRLGSISKQGNVFLRTLLVESAQSVVRCDPQFRKEYQHRCHHKAKGIAKVAAARKLAVRLYWMLKSNKPYPEVLLIGGSPRHPVAAQAKAVQLNGHPRISH

SEQ ID NO: 279795 - protein, 348 aa, unidentified
MTIVADLFNFVVGVDTHAVTHTFSVVDARTGAEQQRATFPTSPAGLGRAVSWIQHHSTGKVLVAVEGAGSYGALLLNHLTGAGLEVCEPSPMPTRRGQGKSDDLDAGRIARSVLGIDTQLLRRPRADTGPRVALRVLVVAREELNNDRTRAINALTALTRTVDLGIDTHRPLTTTQIRTIAAWRARDEPDWLATCRAEAVRLARYIGHLDHQLHDNRALLDHHVGDQAPVLTTLTGVGAIVAAAVLIAWSHPGRVRTEAAFAAIAGTCPIPASSGNTQRHRLNRGGDRRLNHALHTIVLVRMRIDPATRAYVTKRRAQGRTTKEIMRSLKRYVTRELFRALPRTLDAT

SEQ ID NO: 279796 - protein, 357 aa, unidentified
MQKKNTKLDFTGQEIYVGLDTGKKSWEVSILTKDFEHKTFSQPPRPEALVGYLHKHFPGAKYLCVYEAGYFGFWIHDALRQQGVECLVTHPADVPTKDKERRNRNDQVDARKLARNLRSGGLTPLYVPSRSTREDRSLVRMRMAMVKKQTRCKNQIKALLSFYGYTIPDELVRSHWSRRFIGWLEGLSFQQESGKQALQALLEELNHLRQLIAGLTRQIRALARQEPHRTLVGYLKSVPGISTLTAMVLLTEIVDINRFKSLDHLASYVGLVPGEDSSGEQERVTGISNRRNAHLRALLIECSWVAVRKDPALLMAFSKLSKRMPKNRAIVHIARKLLNRVRYVLKHQESYEPCVVA

SEQ ID NO: 279797 - protein, 391 aa, unidentified
MVCVGIDVAKDKHDCCILDSDGMVRADCFTIPNNMDGFKQLLQTIRNCTKKSDKIKVGLEATGHYSYNILGFLLDNGLPTYVINPLHTNLYRKSLSLRKTKTDRVDARTIATMLLSDVDLKSYTDIAYHNEELKSLTRYRFDKVQECAKLKQSVSRLATILFPELEQLVSSIHGTSIYALLGEYPGAKQISEVHLTKLTNLLTTASKGRYGKEKAIQIREAARASIGSVMPAKSLELKHTIKLIQELASEIDEIEDSIQKIIDELNPPILSIPGMGVNSAAVILAEIGDFSNFSSPDKILAYAGCSPSTYQSGKLTNCYAHMEKRGSRYLRHALYNATKYVCYWNPVFAEYLAKKRAEGKHYNVALSHSMKKLVRLIYALQKSGKTYLAAA

SEQ ID NO: 279798 - protein, 338 aa, unidentified
MSIYAGLDVSDKTTHICVVDGDGKVLRRDVVASDPDVLAKWLNKHCPDLMRVVLETGTLSTFLYHGLVERGITVECICARHAKGVLSARVNKSDVHDSEGLAQLARTGWYKRVHMKASATHIDRAALRIRSQLITSRTAMANQLRGLLKLFGLRMGTARTSGRRAERLTAFYAQRPDLKPLFAPLIAAMEAIEEQLRASNHLLNERAKADEVCTRLMSVPGVGPITALTFTSTIEDPHRFARSDDVGAYAGLVPRRNQSGERDTSGHISKAGDHMLRKALYEAANSALSQVKRPFALQQWGRRMAEAKGAKRARTAVARKLAALLHSLWLNETEFRWA

SEQ ID NO: 279799 - protein, 364 aa, unidentified
MEDCTKIAGMDVHKKNIVEAVLSAGTNRVEEKLTLENHPAQVESMVKRLSGKGPLEFVYEAGPCGYEIQRQITALGHKCVVIAPGLTPVKPGERVKTDRRDAEKLARLYRAGELTEVRVPTREEEAARDLVRIREDAVSDRLRARHRLIKLLLRQGRVYRDGNAWTQAHYRWLSAQRFEHEAQQQTLEGYSRALGEAEARLETLEQQVLDLAQTERYRKLVNNLRCLKGVETLSAMTFAVEAQDFGRFGKARDFMGYIGVVSSENSSGERVRRGRITKTGNAHLRRVLIESAWSYWGRNIPSNAVAARRKGCAPEVVKLARKAQDRLHRKFQRMVARGKPAQVAAVAVARELSGFVWAIAQASK

SEQ ID NO: 279800 - protein, 405 aa, unidentified
MEIFCGIDWSEAAHDVAVVDETGRLLARRRIADDAAGFTALTELLAGYAGRPERVDVAIETGRGLLVAALRAAGHRVFAINPKAVDRYRDRHGVAGAKSDPGDARVLADILRTDRDRHRPLPADSDLAAAVGVLARAHQDAVWARVQDANRLRSLLREFFPAALTAFADLTTNTALAVLAAAPTPTAAARLSRANLTGLLRVAGRGTRPTEAVRLAEIFTVDQLRQPPVVEAAMGQAVRAIVRTLTAANQSISDLEAALAAAFDQHPDGEILRSLPGLGPILAARVLSEFGDDPTRFPDPASRRAYAGTAPITRASGRSRVVLARHVRNKRLADACYLWAFAALNRSPGARAYYDTRRAAGDRHNAALRRLASKLLGQLHHCLTTSRPYDEALAWPQPDTTPAAA

SEQ ID NO: 279801 - protein, 433 aa, unidentified
MNDHPLPVGIDFSQKQAAIALLLPDGQPLEGHRTFANSASGYVQAKRYLLDALHAQGLAGLDISGEATNYYWLPFFVRLADDPDLAAQEVQLFLLNPRWVRGFKKCFAPDDKTDAKDPFYIAERTRTRRPPVPWQPQTEWWPLRFYTRLRFHLAQALTREKNFAHVYLFLRCSAYHRTRPFSDTFGATSRRVLTALPALPALTAQPLAERANLLDGWSGHHLPDPLDNARKLQQAAAESFPLEAALAEPVQRVLDLTLQHIADLEALIAQVEQWIADEVQAHHPEVLNLAGILGIGPVLASGIAAEIGDLSRFFHGQKWDKKRQRFRAKNLRDVEDAVAKLAGLWWPPADSGDFVAQERRMAKTGHRYLRYYLIEGADGRRRYLPEYAAFYARKYREVTKHQHKRALVLTARKSVGLIVGLLHRNEAYRAQEG

SEQ ID NO: 279802 - protein, 322 aa, unidentified
MDTFQLGIDVAKAKLDCALRLPEGKLRHKGVENTQAGFLALRAWLDKQGVRTLHVCMEATNTYWEPVAEFLAGVEAVTVSVVNPAQIKAFGASRRGRTKTDKADAKLIAEFCAERRPAPWQAPAPAEQALRALVLRLEALQGMRTQESNRLDIARPTVKEGIAQHLQWLDKEIKRIIQAIRDHIDNDPALRDKQRLLDSVPGLGERTIAVLLAFYATPGRFGNARQAVAFAGLDPRQQESGTSVKGKPRMSKVGHAFLRKALYRPAMVTLYRTDWGKQFRSRLAVAGKPPMLIIGAMMRKLVHVAFGVLKSGNTFDPARHGA

SEQ ID NO: 279803 - protein, 394 aa, unidentified
MILVGIDIGKSSHYFSVIRKKDGEVLLEPSKIANDHEGFESLIRSVRSYRKEDILFGMEDTGHYHFALLKYLLDRKFKVALINPVITDFTRKANGGISKTDRLDTLTICDVLSSNRQKKPYRIFRVSRFDLYEQRSLTRHHHNLKEELNVYTNRLQKCIDIVFPEYNGLFSSRYGIVYNNVLKVYGSAANIASADIRSLRKCFEFKGRGRRISLTAEKLRQAAINSIGMDSAADTIQIRHLIQMIEQLSDQIEETDKKIEEFSIRLNSPILSIPGISHFSGTSILSETGDINNFTHHAQIIKYAGVAPLVYESSQYRAEHTRITKSGSRYLRKTLYQIIIPVIKSNEAFRRYYDLKISQGKSPRCAQGHCVRKLLRVIFHILKTDQQFDPTLLR

SEQ ID NO: 279804 - protein, 351 aa, unidentified
MDATTVGVDLAKNVFVACVADCTGRIVERREFNRASFLSWLGTLPAGTVIGMEACGSAHHWGRTAQRLGLAPRLMAAEFVRPYRKRQSVKNDRADAEAILVALLSPGMRFIPVKTEAQQQRLAWHSLRVGWVEERTALLNRIRGLLAEFGLIVDPGPKHLRALLAERERDTASPPALRGLIHSVRDQLDALDARIGECDRQITAQQANDPLAKRARDLPGVGLITADAVTASVGDASMFKNGRQFAAWLGLTPSQSGSGGKTKLGHITRRGDDYLRTLLVQGARSVMAATLRKQRRESPDQLTRLQQWIVALKGRIGYHKTLIAIANKHARQLWAVLAKGETYNPQAWQRA

SEQ ID NO: 279805 - protein, 338 aa, unidentified
MKCYAGIDLHSTNSYVVVMGEDQKVLFDKRLPNDLLTIEQALKPYAENLEGVVVESTYNWYWLADGLIKKDYRVHLAHTGSLDSYQRLKHSDDKTDARWLANLLRLQVLPTGYIYPQEQRGLREVLRKRILLVRQRTMNILSLESILSRYEGVRLNGKKLQALTSEEFQHYFSDEDVRQAIRPQWKILTTLNEEIGELENYLKSRLKEDLAFRNLKTVPGVGIILAATICLETGPIQRFAEVGRYASYCRCVKSDRISNGKKKGENNGKSGNAYLSWAYVEAANHAIRHYDPIRRYYDRKRTKANHTLAIKAVAHKLARGSYYVLKDEVFFDIKKAFS

SEQ ID NO: 279806 - protein, 356 aa, unidentified
MSREIKYIGMDVHKEAVVIAVLSSSGKLVMESVVETKASSILQFIHGLRGELHVTWEEGTWAAWLYDLLQPQVRQVLVCDPRRNALLKEGNKSDKIDARKLADLLRTGMLRPVYHGEHGLRTLRELGRSYRTISQDLNRVMNRIKALYRGWSIPCAGTQVYAPRYREQWLQKIEHTGVRRRAELLYQQLDGLQGLRRTLRPELLAESRKHKASKLLRQIPCIGPIRAARLLGLMQTPHRFRSKRQLWTYSGLGIETRDSAQYCYVQGQLQRTKKPQQIRGLNQNHNHEMKEIFKGAATRASCGVGPLRNFYGALLAKGMKPEMARLTLARKIAAIALTLWKKEEPFDAEQLKPQAA

SEQ ID NO: 279807 - protein, 378 aa, unidentified
MKKELYLGLDVHKDCILTAVAEEGRKGEVRDTGAISNDLHAVEKWIGRLRKVHGKEVILRACYEAGPCGFGLARRLGQLGVECEVVAPSMTPKRSGDRVKTDRRDARKLARLLRAGELTSVYIPESTDEAIRDLCRARSDAVDDRRRSRHRLKGFLLRHGYHYQGKTSWSPESFRGYLRELVLPHPAMKVILEEYLISIHAATERIERCEAAMRALLDKWRLRPAVQALMAFKGFQTVAAMILISELGEVDRFAHPRQVMAYLGLVPTENTSNDKRRQGRITKCGNAHARWLLVERAQHYATPPKVSKELSRRQEGQPAQVRAISWRAQNRLHRRYTRLLGRRLQRNKAMVAIARELCGFIWELLRTQPCYQAQAPPL

SEQ ID NO: 279808 - protein, 453 aa, unidentified
MCLEDRPVLEPNAAGIDVGAREMFVAVPPGRDEKPVRVFATFTEDLERLTDWLEQCGVTTVALESTGVYWIPLFEILEQRGIRPCLVNARHMKNVPGRRTDWHECQWLQFLHSVGLLRAAFRPGQDVCAVRTILRHRNELVAAASQHVQHMHKALTQMNLQIHHVISDITGSTGRAIVDAILAGQRDGAELANLRDPRIKADTETIRKSLEGNWRPEHLFTLGQSRDLYRIYQQQIVNCDLEIEKMLQGFAPRIDPVARPLPPDRKRNRAGSQRRRKNGHPHPDFDLRTEAYKLFGVDVSQIPGLEENALPLFSEVGRDMSRWPSAANFVSWLALCPDNDISGGKLLWRGARRVKNRAGHLFHMAAYALHRSPTPLGNYLRRMKAKLGPQAATMATAHKIAVIFYTMIKNQVEYDETIWDARDAEREKRLEAKLKRQAKQLGYELVPIEPKAA

SEQ ID NO: 279809 - protein, 408 aa, unidentified
MRIIGLDIHRAFAEAVTWENGKLKRLGRIDMRRDRLAAFAATLSSNDIVVVEATGNAAAVAEVIGPYVRRVVIANPKQVRIIAHAKIKTDTIDAGVLAQLYASGFLPEVWIADQPTQALRRQVTRRNQIVRQRTRLKNIMQSILHAHLIPACPHQDLCAPKGRAWLGQQVLPADERRAIERHLREFDRLGEDLRVVERDLARSALADERVARLMTVPGIDMVVALAIVAAIGKAERFERPQKLVSYLGLNPSVRQSGPGPAHHGRITKQGRGHARGMLVEAAWAAARVPGPLRAFFQRVRARRGQHVAAVATARKLAVLIWHLLRKGESYLWARPALHARKMRNLELTAGYKPARGQRGAAHAYNLRSHREQERRWIEQAELAYSRFVAGWNPRGPRARTGAPKEERQ

SEQ ID NO: 279810 - protein, 390 aa, unidentified
MFYLGIDIGKFNHAAALMNQRGKVIATLPSFPNTRSGFQNLLAVISFHLPPAEELRIGMEATGPYWIPLTEWLKTHGWIPVILNPIKTASLRNYGVRGSKTDNIDSVLIANTLRIEGEQPQPVSPKLSEELRHFTRLRADMVKDRTRIALRVTSLLDRLFPELLSSFSKTLSPSCLALLSQAPTPSKVLALGEERLAALLRKVSGGNLKATRAQEIMDKAIESVGVPSQAMEEVLALLLEQINLLGSQLRTLDRRITDLYEEAGLCFTSIGGVGILSAATILGEYGSVTKFTQPKQMVAFAGIDPKLRNSGKHQGQVHISKRGPRYLRRALYLACQSVVRNDDYFHSIYQRYRDKGKSHKEAIIAVMNRFIHVLYAMWRDNRPYYPLTQA

SEQ ID NO: 279811 - protein, 347 aa, unidentified
MHFYTKQHQFYCGIDLHARSMYVCILSHDGEMLVHRNMKAAPEPFLKAVAPYREGLVVAVECIFTWYWLADLCVQEGIPFVLGHALYMRAIHGGKAKNDKIDSQKIAALLRGGMLPQAYVYPAEMRATRDLLRRRMHLMRKRSELLSHVQNTNSQYNLPEIGKKIAYKANREGVAERFDDAAVQKNIEVDLALITYYDELLRDLELSIIQTAKKHDANTLYLLQTVPGIGKILSLVLLYEIHDIERFPRVQDFASYCRLVKCAKESAGKRLGTSGKKIGNAHLKWAFSEAAVLFLRNNPKGQKYLVRLEKKHDKGKALTILAHKLARAVYYMLKRKTAFDIDMFLST

SEQ ID NO: 279812 - protein, 359 aa, unidentified
MQTQVTELDFTGQKIYAGIDVHKKSWQVSVYSEELFHKTFNQPPKPKILYGYLTKHFPKGTYFSVYEAGFCGFWIHDELQSLGINNIVVNPADVPTTNKEKKRKTDKIDSHKLARQLRSGDLEAIYTHNRKVLEDRNLLRMRRTLVKDLTRNKNRVKADLYFFGIEIPEQFTKNPSYWSKRFIRWLEEQEEHQRWTGTASFRILIDQVKSLRAQLLEVNKKVRALSREEYYQKRVALLGSIYGVGLVTSMTILTEIDDIYRFANLEKLRSYVGITPTSHSSGDKDLHGEMINRGNKFVKAAIFESAWIAARLDPVLHMNYVKFCKRMKPNKAIVRIACKLLDRVHYVLKNEVPYKSGIH

SEQ ID NO: 279813 - protein, 353 aa, unidentified
MVIIGCDFHPSFQQVAIFDNLTGEYQEKRLGHRDEAEQFYRGLSGSAVRVGMEACGHYPWFERLLAELGFELWLGDAGRIRATVVRKQKTDRLDAEHILRLLREERFPRIWVPSLEERDVRQLLVHRHKQVQARTRTKNQLQAMALGQGVQKKWKLWTQAGRAELEKLELLPYAAARRKQLLHTLDQLQGEIEELNRRVEEEVAKRPAALRLRTHPGVGPVTSLAMVLTLGPAERFGCGKQVGSYFGLIPSEHSSGGRQKLGHISKQGSAFLRFLLVEAGQTAVRYDPELGRFYRRLAARKHRALAKVAVARKLATRLYLMLREDWNYAQLCQAVVQVSPSHSVVESKDRPLE

SEQ ID NO: 279814 - protein, 356 aa, unidentified
MSVYLGVDFHARTQTVCWCDQADGLVHQRTLDHQHDDVRGFYTQFAVPAVVGLEATGYARWFHRLLESLGHRLLVGDAYVIRKCALRRQKNDRRDAELLLDLLLHGDFPAVHIPSMASQAVLRLLRYRQRLVEIQTKLRNGTQALALNHQLRLGPKLWSKQGQQQLLALELDDADVLQREHSIELLTQIRTRIRTIEKELTLRADHDTRVRLLRTHPGVGLLTSLVVVHALEPVTRFDRARRVAAYCGLDPCETSSGETVRMGHISKQGNRLLRHLLVEAAHRAVHCKADSDLRNFYFRLIERKKNAAVAITAVARKLVLRLYRMLRENIDYTEFRRRGREARRARKTASPVVGGC

SEQ ID NO: 279815 - protein, 485 aa, unidentified
MAKRKQSNFERINLERMNRKQRRELGQRLEKSDPGLEIVHPHAAGIDVGNESHFVAVPGNRDPQPVREFGCWTGDLVKMAAWLKGCGIETVLVQATGVYWIALKDIVEQQGIEVVVANAQHTKNLPGRKSDVQECQWLMKLHTYGLVRGSFQLAEDMQGVRAVWRLRGRHVEEAARSVQHMQKALTQMNVQLANVLSDISGKSGQAIIGAILEGERDPGKLAKLCDRRVQASTEEVAESLRGNWRDEMLFELSQARESYRFAQQQIQSCDRKLESYLKVLPTRQVEIMLPAPPVPSPATPVRARQAPRKQGNTPEIPGMRDELVRICGVDLTTIDGISIVTAQTILAEIGTDTSRFRTEQAFVSWLGLAPNRDISGGKVIRVVRRKVPSRASTALRLAATSLKSSDSYLGARYRHLQRQLPSKASAVKAMARYLGVLVYRLMTKGQAWVDQGAARFEQKRKALSLATLQARALANGYRLVPVTAS

SEQ ID NO: 279816 - protein, 386 aa, unidentified
MRTSDVSTPIAERISTIFVAIELSQKSWLVTMHCPDKDKISHHKLEGGDHGGLLALIDRMRARVARALGAVPRVVSCYEAGYDGYWLHRLLMAAGITNHVFDPASIAVDQRARRVKTDRIDGEKMLRTLMAYLRGEPRVVRIVRVPTAEMEDARRASRERARLTKEQTAHTSRIKALLRLLGMAVGNPRRRDFPNWLSAQRDWQGQAVPPRMLAEIRHEHARLMLVRERLDALMEPQPTVDLPPAAAQMAERGALLLGLKCLGPAFATTLSSEVFYKDFRNRREVASYFGLTPSPWKSGGIDREQGISKAGNPRARGAAIELAWLWLRHQPNSKLTQEYRRRTLDASKRIKRVAIVALARKLMIALWRYLTTGLVPEGAVLKAVQM

SEQ ID NO: 279817 - protein, 439 aa, unidentified
MPTASLPVLDPTAAAIDVGSEQLHVSIAGGRPKVFGTTTGELHSLRDYLLAQGVRSVAMEATGIYWLCPYEVLEKAGLQVVVVNGKYVKNLPGRKTDLSDCQWQATLHAHGLLKPGFVPPEHIRRLQDYLRVRTDHIVMAGSHEQHMQKALERMNLKIHDVISDLTGVSGLKMVQAIIGGERNPVALLALCDPQVQKNKAGRLRAALEGNWKAEHLFALRQAYELWQFYQQKIAECDQAIEAVLKELAGPEDPKNPAPPPIKRGGVNAPHIAGLHGLLWRLCGGKDPTQLPGIADYVLLQLLSEVGSDLEKNWKTEKHFTAWLGLAPGSRNSGKRRGSQRRSRNRAGRLFCVVARSVGRSVDKALGGFYRRLKGRKGGLVANLALARKLAELFWRLMVHGARYVEQGLKKYEEKVAHTEQRLLQKLACKYNMVLQPKAA

SEQ ID NO: 279818 - protein, 341 aa, unidentified
MKNKSFIGIDISKNVIDVSFFCEGTPIKDFPHDVFNNSRKGFGEMCTWLKKNHVVLSNCLFGMEFTGSYSMELEKFLNAKKYQFCMLSTHVVKHYPMGPKDKSDKIDSAKIADFLYRYNGTECVKPYKMPDKTMQRLKALMNERKFLVEQRTCFINRRQLCTTKEDALLYDGYIKKFDHDIENIELEIQKLLETDDSLSTTYKNLLAIPGIGFVNAMNVIVITRNFTAFETARQYASYVGVAPHSHTSGTSVKWRPRPSARCDGQAKADLSMAATVAVQYDAELQSFYNRKLGGKQDSDTKRKALNAVKFKLILRMFAIGKQNRKWDPLDSKSSNEKLAIS

SEQ ID NO: 279819 - protein, 406 aa, unidentified
MDVIYPRCAGLDVHKQTVVACARLSGDGAAKQEVRTFATTTSGLLALADWLESLGVQHVAMEATGVYWKPVWHVLEGHFVLVLANAAHVKNVPGRKTDVNDAMWLADLLAHGLIRASFVPPAAVQELRTLTRTRKQFVRERGSHAQRIEKILEDANLKLSSVITDILGKSGRAVLKAIIDGETDPQALVSHIGRVKAARAELLEALRGRITAHHRFMLKLHLDHIETLDNAIAHIETEVGLGLEPFRQAAKLLSTMPGLSSVSAHVVVAEIGIDMSRFATPGHLLSWACLCPRNDESAGKRRSTRLRRGGKWLKTTLVQAAWAAIKVKGSYLQAQFHRLRARRGAKKAIIGVAASMLTAAWHMLRNGTEWHELGAAHFDRADATKTANRLIRRLQQIGYKVEATPA

SEQ ID NO: 279820 - protein, 422 aa, unidentified
MLQEAQDHEEIVERVAALDIGKSFLVCCARIPHEIRPERRMQEVQTHPTMTRSLLAMADHLRCLGVTRVVMEATSDYWKPVFYVLEAAGFETWLVNARDVKHLPGRPKTDKLDAVWLCKVAERQMTRPSFVPPPEIRRLRDVTRYRTDLIGVRGAEKNRVEKLLEDAQIKLSVVASDIFGVSGRAMMAALLAGERDAKVLAQLARSRMRGKIAALEEAFTGHFTDHHAFLLGRMLEWIDAVDADIAALDAKIEEMVAPFVTAIERLDEIPGIGPTAAAVIVAEIGLDMDRFPTPGHLASWAKFAPGVKESAGKKKGKGATGHGNRYLARTLGEAAVACARTDTFLGERYRRIARHRGKKKAIVAVGRSLLMVIWHLLNNPDAHFHDLGPNYYTRRIDPERRKRSHIHQLEALGYKVSLEPAA

SEQ ID NO: 279821 - protein, 379 aa, unidentified
MEQEVRTFGTTTRELGKLADWLGEASITHVVMEATGVYWRPVWHILEGHFELVLTNAMHVRNVPGRKSDANDAQWLSELLAHGLVRGSFVPPTQVQEVRELTRTRRQLVRTITQNTQRIQKTLEAANLKLASVVTDTLGVTSRLILKAIHKGETDPEVLADLACGRLKNKRSELVEALRGHLTEHHRFLIGLHLRTIEGLEKEIERIEKRLGKLLKPLAEQEARLTTIHGVSTTVAQVILGEIGWAMERFATVAALISWAGLCPQMHESAGKRKRNRIRKGASWLKTVLVQAAWAAVRTKGSYFRSKFLRIKSRRGATKAIVAIAADILKAAYFILRDGVDYKDLGPDYFERQDKNRAVRRHVKRLQALGYEVVIAPVA

SEQ ID NO: 279822 - protein, 309 aa, unidentified
MATSSYVGIDVSKDRLDVAVLGEKQAKQFSNTKDGIAQLVEQMVDLQPELIVVEATGGYQRAVVDALFHAGLSVAVVNPARVRQFARACGLLAKTDKLDAQVLAVFGQRVQPKRYEGKSEAEKQLSALLVRRKQLEEMLKAEQNRLRTISPNLRSSVERIIAILKEEKKRLEEQIEQFLREQKAWQEQREILSSAPGVGMVTTATLLADLPELGKMDRKKIAALVGVAPMNYDSGRKRGYRKTKGGRGDVRSILYMSTLVATRYNPLIQKQYQHLLKRGKLKKVALTACMRKFLTILNAMVRDQQPFRV

SEQ ID NO: 279823 - protein, 499 aa, unidentified
MEWDWRASEVGARRKTKQKPAMVEPVEIPDAEHELVVDRGAAIDVAKAAGKVCVRLPGKSGRRFSRVWDVPARTGAITELAEQLVELGIQKVTVESTSDYWRIWYYLLEDAGLDVQLVNSRDVRNVPGRPKTDKLDAVWLAKLTEKGLLRPSFVPPAPIRVLRDYTRLREDLIRERTRYWQRLEKLLEDAAIKVSAVASKLDTLSTRDMVEALIGGERDSRRLADLARGRMKTKRSELITALDGRFDDHHAELARLLLGQIDALTAQIGALSARIERLIDAMDESDHPTGDRGRSGGGGPQVTGAPSTGGQATAPARRTTTAIGVDSDTATVVEPQRLTAVERLDEITGVGQCAAQTIIAEIGLDMARFPTPEHLVSWAKLCPRTIQSGPVIRGGKTGKGNPYLKGALGEAAAAAARTDTFLGERYRRLVKRRGRLKALVAVARSILVIVWQLLSDPTARFHDLGPDYHTSRVVTERKIRNHIAHLTAMGFHVTLQPAA

SEQ ID NO: 279824 - protein, 584 aa, unidentified
MASRSRHNRSRRSNAKSSHRTNKPNKRLTLQKPNGSLARRVQDVGPQHFAIVCVDPAKLRSEWMMADFLGNMIIPPTTLEHQLAGYQAAMLRLRNAIRENGIKDVVVVLERTGRFHHAPRAAFRQAGFETRIIHPFATKQFRLPDNPGVKTDPNDLCGMHRASVAGFGLIEPEPDPTHRRLQMLARHRRDLVQKASRLCCQIRDHLHVALPGYAGLFQDLWTHQSALVIPRIAATPQAVLELGADRLRERLQADKLRPQTATIAKVMAWAAETVRLEPDPDTEFHNRVWIDLDDHRQMLRQCVFSLERDIASTLAGTPYVRLLCIPGINVVSAGELGGELGLIRNYAGPNSLTGRCGLYPGRYQSDGTDRTGGIIRSRNRPLRAALMRIADNLANHNRFFRGQAELARSRGEDERKLRIPIAKRFTRLAFALVAGDEPLRHPCCQSPDAVLEKLREFQRQHQTSPEQVLLDLQTAIDQLTPGSHPHEATVLTQVLEQQSRRRRGPTPLGALLPAVLSRLTSGGGMAQQPSQPTKQPANQQESLHSRDVDAGESDQSSGSVAGSALSPRHPESQATRTTRFRAPD

SEQ ID NO: 279825 - protein, 457 aa, unidentified
MGHARARRIPAQLVEDEDYQLRHERVAGIDIAKAKADVCTRLPPQREDGRRASRVEEVPARSAGILALAGRLLADGVELVVMESTSDYWRIWYYLLEAAGLNVQLVNSSQARQLAGRPKTDRLDAQWIARLAEMGLLRPSFVPPPEIRALRDLTRTRLQLVRDRTREWQRLEKLLEGALVKLSSAVWSLARSQTARVILEAIAGGESDPRALAALASGRVRGGRAAIEQALDGMQVRGHHRMLIRAHLDHITFLDRQIAAIEDEIGAAVDAIPAAWGTDADGVPSPDPGPDAAALPAVGRLAEIPGVSPALARAIIAETGLDMTRFPTAAHLVSWAGLAPVAKQSGPRSRKPRKGQGDVYLKGYCTQAAAGAAGTATFLGERHSRLARRIGGNRAKCAVARSILTIIWHLLSDPGARFADLGPGWHERKTDRDRKIRAHVRQLQALGLNVELTEAAA

SEQ ID NO: 279826 - protein, 375 aa, unidentified
MARKRTLSTLDTSIAYEAVGLDLAKEDAAIAAFGPDHEGPYLIDRIPYDKLYELLADMAPTLVAMEPCSGAHQIAEQIQELGHEVMMISGRHVQAWVKDHCNGQKTDLNDAFAILNLAYDRWLTPIRGKTREECRLLALQASYRQLKGQRTKTMVHVKATLHAWGFPIRAGSFNQKALHELIDANREAFGDEVAETLHLMINRVRDLDHDIATVLKLLTEATKRDPRASLLRSIPGFGVLTTSRWCAVIGDIARFDSPKQTMAFIGLVPNNRITGHHTETSSGREARGQGKMSKRGDKMLRSLCILGAGALCLMVRNDRLPDCPFVASIKERLASPRPWFKVLVYVAAKLVRIATALLKYGETFSFEKAGISKGF

SEQ ID NO: 279827 - protein, 473 aa, unidentified
MAVRNRKPVCVGLDVHRNNVWACVTFKDPAKGKDGLVFVTKKFDSNHTDLASMCEWIYTTLPDLEDRAIDVYMESTGKYSTPVFDVCEEMGLKPHIVNPKHVRTIAGQKTDQKDCAWIAELGANGLLRESYIPVRELRESRRLSRSRTKLVQERGDTIRRIRNILTEANIRMDLVFSGIEGESARSVIEYLLTTEEPDLEEVKKRIRKSCRIMRSSTHKERKEKEEELRKAFAGAKFSSVQKFELENAYERVDRLTAQIQRYEQMMTEILEPFKSYLDLLDSIPGISGLSAMQILSETGTDMGQFKNEKHFISWCGLCPQSNQSNNKHKSVKIGKGGYYLKPVLIQCALNAVKHPYFKGKYEAIAARRGKKRALIAIARKMMVLAYHMFQTGEYFQERKKQIPAVLEKEQSEREQSMETTAEATDAPAIIRTAKEIVEMLQNTDDEMKHKIEQLLAQIGIAQCEYQTGAISTI

SEQ ID NO: 279828 - protein, 355 aa, unidentified
MEKIKYIGLDVHRDTISAAVLNESGRLLQQSVLMTRTTAILDFIGGVRGSLHVTFEEGTHSAWLYDLLSRRVDKLVVCNPRKNALLKSGNKGDAIDARKLADLLRAGLLSPVYHGETSALEVQQLARSYLMLTEDTTRAMGRLKAVFRGQAISCTGRKLYGPKHRGEYLAALGGCALRRRAERLYQQLDALQQLRRDARHDLIVECRKHVEAKWLQTVPFLGPLRAAVLIGRVQTPHRFRTKRQFWTYCGLALETRDSAEYRVTDGQLERKRRPAQVRGLNWNYNHELKNVFKGAANAASTGQGVFREFYLGLLTKGMRPEMARLTLARKIAAIALKIWKKGESFDAEHLKSKAA

SEQ ID NO: 279829 - protein, 400 aa, unidentified
MIDTSDIDVFLGLDVGKGEHHATAVAPAGKKAFDKRLPNTEPKLRELFTKLQAKHGTVLVVVDQPASIGALPLAVARDMGCPVAYLPGLTMRRIADLYPGEAKTDAKDAFIIADAARVMPHTLRAIDGEDETIAELEMIVGFDDDLAGEATRVANRLHGLLTQIHPSLERVLGPRLQHPAVLALLERFGSPAQIRKAGRRRLVTLLRPKAPRMAERLVEEIFTALDEQTVTVPGTEAATLIVPSLAGSLAAVLDQRKLLAGRIEELLEAHPLSQVLTSMPGIGVRTGARILIEVGDGSTFPTASHLAAYAGLAPATRSSGSSIRGEQPSRRGNKQLKRAFFLSAFAALGDPACRAYYDKKIAQGKHHTQALLCLARRRADVLFAMLRDGTFYESRTTAAT

SEQ ID NO: 279830 - protein, 320 aa, unidentified
MTYIGIDVSKDSFVAAYPAKSGYSTKTFKNTTSGVRQFISSLPEGCHCVMESTGNYSMLLLYLLQQANIIVSMENPQKIKHFARAMLSTTKTDEIDAKLIALYGEKMEPIPYKIPSESIILLKQKRTVLRQLKKQLLMMTNLQESMAVLPKQDPTSKASIEQTIKFLRKQISKMEEEITNLSNKEYKRQMDLLTSIKGISNTIASALIIATGGFTYFSSAKQISRFLGLCPTYQQSGTSVNVKGHINRNGDTYLRSQLYVAAVSSTACNSACREAFVKMKERGKAGKVAIIAVANKLIRQAFAVVTNNRPYVDGYVSSFA

SEQ ID NO: 279831 - protein, 371 aa, unidentified
MNYNTKYVGLDVSKEKIAVAVADEGRSKPRYIGMINYTVEAIRKLIKRLGEPEQLQMCYEAGPTGYGLYRLLKSMDIKCEVIAPSLIPQKPGSRVKTDKRDAINLATLYRAGELTPIYVPTEDDEALRDLVRAREDVKEDELRAKHRLTKFLLRNEIRQPKGTKKWTVKYWEWLRQLRLPRSSSRVVFQEYVQQLIEYQQRLTILEQEIKAQAESGVHAPLIQKLMTLRGIAIITATSLAAEVGSFQRFSQPSGFMSYTGLVPSESSSGDARRLGAITKTGNRHIRKLLIEAAWSYRHKPAVGRDLKRRQKGQPTNILSISWKAQHRLHKKYYRLMGRGKESGKAITAVARELAGFIWAIANEPDGEMELA

SEQ ID NO: 279832 - protein, 342 aa, unidentified
MDHFAGLDVSVKVTSVCIVDDTGKIVREVKVASEPEALLAVLKNPAYHFKRIGLEAGPLSQWLFSALAEAELPVVCVETRHMQALLKAQINKTDRNDARGIAQMMRVGLYRPVHVKTLRSQKLRMLLTHRKLLQSKAIAIENDLRGTLRNFGLKVGMVGTVKFEARIKELVENLPDLAVLVEPLLVVRRVLREQIVVLHRRLLAIVRDDEVCRRLMTTPGVGPVVALTYRATVDVPARFRKSKSVGAVFGLTCSKYQSGEIDRSGRISRCGDEMMRVMLYEAAQSMLYSKKWSWLKAWAMQIARRRGMKKAIVALARRLAVILHRIWVDGTEFRWTREVATA

SEQ ID NO: 279833 - protein, 409 aa, unidentified
MDVLIERGVGLDVHKATVVATVRVPATGGGRLTVTETFGTMAADLLALRVWLQAYGVTHVALESTGVYWKPVYYMLEGGFTLLLINMQLLKHVPGRKTDVKDSEWLAQLLECGLLKASFVPPPPIRELRDLTRYRLQQVRDRAQEVNRLCKVLEDSGVKLTSVLTDVMGVSGRSMLAALLQGTTDPVVLADLARGRLRKKLPELRRALAGRFRRHHAFLVEQILAKIDFLDETVERLNAEIDERLAPFEPLLARLDTIPGVNRVVATTIVAETGGDMTRFPTAGHLCSWAALCPGQNESAGKRRSGTTRDGNRYLRGQLIQGALGASHSKGTALQARYHRVKRHRGHKKAVVAVAHQILEIAYYVMHDGVTYDELGADYFDRRHADRAMRRHVRHLEALGFRVTIEKAA

SEQ ID NO: 279834 - protein, 347 aa, unidentified
MLHAGLDLSRKKLDVCLLSDEGEHLDQLAVPPDADSLRTLARRIAEVHAEPVLAVIESMTGARIVHDTLEQVGWGVEIADAQRVKGLAPLACKTDKIDSKVLAILSHRDLVPAIWLPDPRVREERELARFRLHLVKHKSALKNRIHSTLINFGVPCPVTDLFGLEGRRLLERLSVPEPWRGNISASTALIDELEEQIEAINRRLRDGHADHPYIPLLMSVPGIGWVLAFTIAAEIGEIERFASPVKLVGYTGLCPRVNQSGERDHRGPLTKHGPRYLRWAMLEATMHALRHPAYSERYERNKRRLGKQRGPKVAQVDIARKLTGAIWHMLSRNENFAPRGADFRLAA

SEQ ID NO: 279835 - protein, 406 aa, unidentified
MYIGWDWATDTHDVTVMDDTGKRIDRWELPHTEEGFTKTLARLRKHGDPADLPVPIETTRGLAVDRLLAAGHPVIPVHPNAFHAMRPRWGASKAKTDAGDSMKLADYLRTDGHLLPRLGPTEQATLDLQALTRQRADHIHARVAAVNQLAALLDEHWPGGKVLFSTLDSDIALAFLERYPTSGWAAKLTAGRLEAWCKRRGYSGGKTGSVLIERLRSAPAAASRLSEPVARQLILMQVQLVQGIRATIRASEKAITAAVETHPYAPLFATMPRIGKVNLAQIIGEIGPFLERAQNCEQLIAETGVVPVTRASGKTRSVGFRFAANRRARLAIATFADNSRHSSDWASKIYNDARDRKKRHPHATRILARSWLRVMWACWRDGTCYDPEIHQANGKIKPAADEPLAA

SEQ ID NO: 279836 - protein, 308 aa, unidentified
MSNILFQNLFISVGIDVGADFSFMSIALPNRTFVGKPFKILHSDLISLSMAVSKIKEAEEMYSLESHIFLESTGIYHFPLFCYLRDKGFLVSIINPIITKNSTSINIRKVHNDKFDSKKAALIGLNPDLKVSLIPSDLVLDLRNLSREYYDLMDNRSAYVNKLQGELRMVFPQFLKIFSKITAVSLMCEIGDFSAFQSSKQLFAYFGLDPAVKQSGNFEGTKISMSKRGSRIARMVLHTMALISISRNKDGSAKNPVLRDYYLKKCQSKPKMVALGAVMHKVCNIVFAILRDEKNLKSSHRRNTRRIT

SEQ ID NO: 279837 - protein, 391 aa, unidentified
MSIYVGIDVAKRFHVAALVDAAGEVVTTLRFTNDAAGYERLRQALAPYPIPAVLVALEATGHYGHALRDWLLRQGFTVHIFNPLKLSRFRDFYVQWHKSDTRDAVALAHLLRFGERQPYWPPPPQLGCLKQMVRHRGVLVQARARVKNQLRAILDELFPEYQQVPFFRDPFGSTSLALLRHYPTPAQVAALSEAELTAFLRQHSGGRLGRERARLILKHAQHSIGSPTAAEAYGPLLPTFVAVYQVLAAQVAQLTTQIEARLANLEQSLTTVPGIGPVLAATILAEIGDVHRFPSADHLVAYCGLALSVWQTGQAPERRFLSRRGSKRLRAAYYRAALVAIEHDPHLGAYYRRRVRQGLSKQRAVLAVARKLVRITYALLKSGQPYCPRMP

SEQ ID NO: 279838 - protein, 397 aa, unidentified
MRPDGARVKTHHRAVVSVARYIGLDLHKDYIHGCEWIPLETRERHFRVKNDPDAWARLAEELGPDCEVAVEVTGNAFELYDVLSEHCAKVVLANPNALKRLGSGQHTDRVDAAHLAKMMAMNTIPAVWVPPQPVREVRRLLQYRFRLVQQEVRCKNQVKAVLRRYGCDARIGRTPDSVIQELNSLRVCPADKAVLISALRMLTSVEGERQAIEAEIARRLDEHPQAKVLLSIPGVGAITAAAIWAWLGEPNRFRTGKQVASYAGLDPSVHQSGETYYHGRISKNGNHLLRTLLIEAAQTLARYDRGQLGAFFRRKCLQIGAKRAIVALARKLVVLAWRMLQRGQTYRDQVPATTQRKQTALRRLSHRTTAWDEVAATLQACFLARTGSPQESVASSA

SEQ ID NO: 279839 - protein, 321 aa, unidentified
MAHGKVASDPDALFAVLREHCLCPERIVLETGTLSNWLARELRKRGLPVTVIDARQAHAVLRLQHNKTDENDASVLADLARTGFYRSVAVKSESGQRHRALLKAREHLVGQLRSRGNAIRGLLGTFGIRLAKGTAKFDLRVRAALAERPDLAAIFEPLIGERAALLGAVEQLDRAVDAEAEADPTCRLLMTAPAVGPVTALAYVATIDEAGRFTKSRAVGAYVGLTSRRNQSGEMDYSGRISKQGDAMVRALLYGAANSLLTRVRRAHPLKAWARRVKRKAGHKKACVALARKLAVILHRMLITGEAFAWPQDNARETATA

SEQ ID NO: 279840 - protein, 331 aa, unidentified
MEKLNYVGVDVSAKTVTMIIDQQGKRTDPLDLPNDARGHKKLIGMITKSRSHARVVLEATGVYSLDLSLALHRANRVEVMVANPRAINQFAEAYMRRSKTDFLDARILLEFAMRMDFKLWSPPERHIFDLRAISRRIEGMVKTATQEKNRLHAADHFDEMTDVVRADIEDNLEQLKNRIARLRSQALELIDEHPDLARSFGHITSVKGIAEAAGIQILAELSVLPSDMDVRQWVAHAGIDPRQFQSGTSVNRPARISRRGNAHLRKALFMPALVAVQSEPHVKAFYDKLVARGKTKMQANVAVMRKLLHAIYGMLKHDQDFDGEKFYMLGT

SEQ ID NO: 279841 - protein, 428 aa, unidentified
MAEDTTLTSQTWLVAIDIGKAFHAVLVEGGDGKRQQFRMANHVEDYDRLVVFLRGLPGPARIALEPTGDFHRTLAHRLLREGFSVVSVSSVAGARYREALFNSWDKNDPKDAHVILQLLKHGLVQHYHDPLLAGDHDLQELAKTYHQIVLARKRLADSLLNHYLPLYFPEMGRYWESTRVEWFVAFLEQFPTPAAVQALPKEAFVRAAWSVVGRKVNKQAKLEELYELAQRSIALPVAVDSVAIETFRLQLAQLRRLAELRQTLEARAHALLKDRADFQRLCSLPGVAAILALVILAEGGDLRRFPHHRQFLKYCGLDLAKCQSGQFRGRARLSKRGNARLRMAFWMAAQRAVRMNENSFRDKYERYTRHDSGNPDVRRKALTAVAAKMARVAYAVVKHDQPYHGYHEHALPSGSIPLKRAVGARATP

SEQ ID NO: 279842 - protein, 395 aa, unidentified
MIYVGIDVAKDKHDCCILGSEADKLFPVFTIPNNKAGFDELYEKMFSVTDDKTKIKVGLEATGHYSLNLLGSLIDKGLPTCVINPLHTNLYRKGLSLRKTKTDKVDARSIAMMLMTNKTLKPYSDISYHNEELKSLTRYRFDKVQERAKLKSSVARLVNILFPELEKLVPSLHMASVYSLLSKLPGASYITECHLTHLKNLLETASKGHYGRDMAITLRNTARDSIGSVIPAKSMELKHTIHLIKVMTEEIDEIEDSIKSIMDTCNSPIMTIPGISYRMGAMILAEIGDFTRFNYADQILAFAGLSPSTYQSGQLDSSYSHMEKRGSRYLRYALFNAAKFVCKWDENFGAYLSKKIGEGKHYNVAIGHAYTEWNLQAKPTEDNSLTSHPFLRAPV

SEQ ID NO: 279843 - protein, 300 aa, unidentified
MASARLPTTYIGGTDVADGIRWVGLDVHARESTVAVFDQRSGELTTRRVVGRPHELIERLMDIPVPARMVHEAGPTGYGLARRARALGIEMLVCAPGRTDRAPTDRIKTDKRDAIRLARRLAAGELTFVTVPSVEHEQLRDLVRCRDDIRADLMRARHRLGKFLLRREIYYDRPGEPWGRKHRIWLASLCFSDQASRLTMADYMHAHDVLLARRDRIEAELEQLASESIFAKPIARLRCLRGINTLSALGICAEVGQFERFDHPDSLAAYLGIDPSENTTGQQRRQGSITKAGSTHARRL

SEQ ID NO: 279844 - protein, 347 aa, unidentified
MLHAGLDLSRKKLDVCLLSDQGEHLDQLAVPPDVDSLRRLARRIEEVHCEPVCAVIESMTGARIVHDTLERQGWSVQIADAQKVKGLAPLACKTDKIDSKVLAVLSHRDLVPAIWLPDPSVREERELARFRLHLVKHKSALKNRIHSTLINFGKPCPLTDLFGLEGRRLLKRLQVPEPWRGNITASIELIDDLEGQIAEINRRLKESHAEHPYIPLLLTVPGIGWVLAFTIAAEIGEIERFPSPEKLTGYTGLCPRVNQSGEKDRRGPLTKHGPTYLRWALLEATMHALRHPAYSERYERTKRRLGKQRGAQVAQVDLARRLSHAIWHMLSRKEKFAPRGAAFRLAA

SEQ ID NO: 279845 - protein, 355 aa, unidentified
MDYLKDIKSFVRSKMVFCGIDIHHNHWNLCFICDGELIEKIRIQPRYDILKSRLLRYEGARQIRLVYEAGFSGYWLYRKLVADGYECIVTPPSKLLKTGDKVKTDKRDAQFLASYLSSGHLKSIYVPPADVEADRRIVRRRTQLVKQQTRAKNQIKSFLHLQGIRTPDDIKTSWSNRYLQWLEQMRFEYVSDNYTLRHLIKSYRSIRQDVAEITRCLRRLSGNDKYRREYKRVTSARGVGLVTAMTFLLEIHNFTRFMNERNFASYLGLTPAQYSSGEKVRLGHITRQGNSNLRRVLTESAWTVIRYDPHLKEKYDRIRKQGANGKKAIVAVARSLAIRLRRCLLDKTDYVLGVC

SEQ ID NO: 279846 - protein, 410 aa, unidentified
MVERFVGIDVALREHRIAVLDRDGEAVGQSFTIAASTDGVATLLRTLGARGATAAQTLIGLEASGHLWENLEAALVGAGYRVIVLNPLQTRRYRDVVRRKAKTDDIDAHVIAGLLRSGAAQASYVPDEQIQSLRELARLRARLMADRQDYLRQLVAQLDVVLPEHRTVLGDLLTARARGILAQFPTAQHLAHANPRAIRRAAEDAGARGFSLNDATVVRDSARRSLYSGKAAAARAHVVRTLVSQLERLTSAIDEVDRAATALLPPSEPGTGPSDAELLQTIPGIGPQTAATLLGELGAFTRFTDARALVAYVGFYPVINESGDRAATPRLSPVGSRIARHSLYLAAVNAVRRSAEWRTIYLRKKAQGKTAKQALVVVAVKLLHALYAMLKHRQPYNPSRLLVAPATIGS

SEQ ID NO: 279847 - protein, 361 aa, unidentified
MSTIAEDDVRVVAGVDTHKEFHVVVVLDELGRKLDMATFAATPRGYRELTGWVTYFGEVLAIGVEGTGSWGAGLCRHLRERGLNVIEVNQPDRHKRRRKGKSDRLDAEVAARAVLAGDATALPKSGDGPVEALRQIRVARAGAMKARTAAANQLHSVCDTAPDQIRSQLRGLSTRRKIAIASRYRPGDPLTPSGAAKRALVTIARRWAALDAEIAELDRAIKTILDAIAAPLLARHGVGYETAGALLCTAGDNPDRLATEASFASLCGTAPVPISTGNSNRRRLNRAGDRRGNSALWTIVMARLRSGHAPTVEYLQRRVAEGHSKRDAIRCLKRFVARELYGDIQAITAAQTTKSPLEIAA

SEQ ID NO: 279848 - protein, 372 aa, unidentified
MSTNSITWVGMDAHKNSIKVAVLLPEQSNPVEWTEDTTSEAVRRLARRLQRQASGEVRSCYEAGPTGYALQRQLRAAGVSCTVIAPSLTPVKPGLRIKTDRRDARKLAELLRAGMLTEVHPPSESDEALRDLCRCRDDVRVDLLRSRHRLTKFLLRRHCIYRETKHHWGTRHVAWLEQLRFDDAVSQATFDSYFLAVQQLEERQRQLDARLAEFGGQEPYREPVAWLRCFKGIDTVTAVCLVAELHDFRRFRSPRQLMAYVGLVPSERSSGERERRGSITKAGNRHVRRLLVEAAWHHRHRPALSAPLRARREGQPARVLAIADRAQERLCARYRRMSERGTIHPKTIVAMARELTGYLWAVLHPAAAPTRG

SEQ ID NO: 279849 - protein, 359 aa, unidentified
MSTQSKPFSFKGQKIFVGLDVHLRSWSVTVLSEQAVLKKFTQDPSPAALNKFLTNTYPDAEYYSVYEAGFCGFWIHWELHNLGISNIVVNPADVPTMAGERLRKTDAIDSGKLARSLRSGELKGIYVPDSLATEIRSLIRLRDSLTKDQTRHKNRIKAHLRYLGIDIPEEFQRPGCTWTNKFVLWLKRLDLETDYGRKTLDLLIAQYEDLRAQQLKMMKELRLLSRTERFEEPLRYLMSVPGIGQLAGLTIISEVDDIARFKDAAHFASYVGIVPMCYSSGEHDGTGNITVRRHAKLRWLIVEAAWVASRKDPVLSSAFVEYCRKMKPSKAIIKIARRLVNRIYFVMKHQQPYVNCYVS

SEQ ID NO: 279850 - protein, 344 aa, unidentified
MEITTIGLDLAKNVFQVHGINSAGKVVVKKALRRSQIRRFFEELDPCLVGIEACGTSHYWAREITKLGHEVRLMPPAYVKPYVKRGKTDAGDAEAICEAVRRPTMRFVAIKSPEQQAALALHRTRDLFVKQRTQLVNMIRGLLAEFGIEIPRGIGQALMLAKRIAAHEVPDIPPLAAKVIAGLAGQVLDLQARLGEIERELLSWHRSNDIAKRLSTIPGIGTVCATALAASVTDPHQFRSGRQFAAWLGLTPLQHSSGGKERLGRISKMGDKYLRRLLVVGMTSLIRRAKYKPEAVDPWLADLLSRKPVRLVTVALANKAARVVWAIMVRGGVYRMPAGVMTPV

SEQ ID NO: 279851 - protein, 371 aa, unidentified
MNHVTSIGLDVHARSITAVALDSTTGEVRSQRFGYSPAELASWILGFESPKAVYESGVTGFHLVRTLRALGVDCVVGAVSKMHKPAGDKRRKNDRNDAEFLARQLLAHNVVEVFVPDEETEAARGLSRALEDIREDLTRAKHRLTHLLIRWGHVWDERTPEGKRRGTWTKAHWQWIRRVELPEPAANETLDFYISEVRHMEAQKKAIERRIAQHASRPRWAGRVEALRCMKGIETMTAFAITVEAGVFSRFDTARSFAAWLGLVPSEHSSGERVARGGITKAGNSHLRKLLVEASWHYTRATEERKRALNDPGVPFAISSHAAAGIKRLVKRRRHFTRDLRKRPVVANVATARELACWVWALGRMSEGTLA

SEQ ID NO: 279852 - protein, 342 aa, unidentified
MNQYVGLDVSLEETKIHVLDEAGGRVWRGKCASHPDELETTICKHAPGAVRIGLETGPLTTWLWRELSKRRLPMVCLDARQAQRALDMRANKTDANDADGLAHLVRAGWYKEVRVKSRDAMLSKAVSAARRQLLDISTNLSNQVRGLMKTFGLVVPKGKGRIFEANVRRLLDEEHALAAVVLPLLEAWCAIRNRAAELDRLLLRKVRDDANCRRLMTAPGIGAVVAASYVAAIESPANFKHARDVGAWVGLTPRRFQSGEMDYDGHISRRGDERLRALLYEAATVILTRVRSASALRSWALALKKRLGFKRAAVALARKLAVVLHVMWKTRKNFDPNHRLVA

SEQ ID NO: 279853 - protein, 413 aa, unidentified
MRTGLTIFCGIDWAEDHHDIAIIDEAGTQLAKRRIGDDAAGYATLLGLLAEYGETGEHLAPVAIETGRGLLVACLAAGGRDVYVINPMAAARYRERTAVARAKSDAGDALVLANILRTDRHAHRPLPNDSDLVRAIAVLARAGQDAAWSQQQIANQLRSVLREYFPAALRAFCVKHVGLASAEARTILAAAPTPTAAARLTKARLRSLLKQAGRQRNVEVWVERLHGIFRAEALHHSPRVEDAFGQQARALLLQLDAAVRATEQLLAATEAAFLEHPDAEIITSFPGLGTITGARVLAELGDDRDRFADPRALKAYAGAAPVTRASGKVRRVLHRRVKNDRLSAAGYVWTFAALTKSAPARAHYDRRRAAGDRHNAALRNLFNRFLGQLHHCLQQRQKYSEDKAFPTPQAAAA

SEQ ID NO: 279854 - protein, 353 aa, unidentified
MEQFIGCDAHKKFSVFASIDEKGVYGATVRVGHDREVFREYLRMLPASSPIALETSGCYYWIVDEMERAGHEPRLAHALTAKRRMEGRHKTDKMDARGLAMLLRNGTLPEVWIPPAELRDQREMLRWRMWLSGTRTRVKNRIHGILQRYNVEIDYADIFGDAGRASLLARQAELPPYSRESLMQQLQTVDWVESRMAECEATLEKMLEPSVERDLLDTLPGVGQVLSAVLALEIGSVARFRGPDHLASYAGLVEAARESAAKKRPGGCPRDCNVYLRWAYVEAANVIATQRRRWPERHVAQLYERVKKGSKMHGKAAVAVARHLAEASYWMLSKQEVYREPQAKRQALSSTHG

SEQ ID NO: 279855 - protein, 392 aa, unidentified
MLRDHLEDQTAIRTQFGAIFVSLELSRKTWLMTSLSPGKGEKMSKRGVEAGDVAGLLRRFAELRSKAAAQTGKVFPIIVIQEAGLDGFWLHRLLEREGFESHVVDPASIAVPRRRRRAKTDKIDGEALLRALLAYKRGEPRVCSMVVAPSPEEEDERRLCRERKTLIGERVAHVNRIKGLLFAQGIRDYAPLSRNRRKRLEELRTGDGRVLPPHVKAQVERELDRLETVIDQIKAVEKERNRVLFPPAPKAGRGEAQAPGAAMLTDYRGIAEDAAATLWSEGLSRHFSNRRQVGAYAGYAPTPWRSGSIAHEQGVSKAGNPRLRTTMLEVAWLWTRHQPDSALTRWYFARLGDYPTKARKKTAIVALARKLLVALWKYVRFGEVIEGAVMRS

SEQ ID NO: 279856 - protein, 411 aa, unidentified
MDRIYDNCCGIDVHKKLIVACFRKGNKQEIREFGATTRELLEMADWLKDGGCEMAAMESTASYWKPLYNILESSGLNAMVVNARHMKAVPGRKTDVRDAEWIADLLQHGLLQPSYIPDKEQRELRELVRYRKSLVGERTRELNRLQKMLEGANIKLSGTVSDINGKSARNILEYLLTGASVDGQKYDEMYEQKIIAHNLKATKEQIIDDLNGVMSPLQRRMMKELLAHLDELNIHIKNLNDEIDNFMKPEEKQASHAIQDVTGIGNTSAQAIISVIGTDMERFPTDRHISSWAGLCPGDNESARKRKSGKTRKGNSLLRTTLITCAHSAVKNKKSYFHAQFMRISSHRGKKRAYVAVAHSMLIAIYHILKDGVVFKDLGADYYNQFNKERKINAYLKKLKALGWEAPVVAA

SEQ ID NO: 279857 - protein, 342 aa, unidentified
MEQYVALDVSLKEISVCIVDSNGDVVFEGKTAAEPAILVKLVRSKAPQVKRVGLETGATSPWLFHALASAGLPVVCMDARHAHAALSIRPTKSDRSDARGLADMLRMGWYREVHAKSVTSHERRTILGARHQLVTMRSELDAQIRGILKTFGLILGTGNKDTLIQRAEKLAAGHPVMSGLVAKLAEVRRHVTSQIAAIDRDIRHLVHTEPTLKRLMSVPGVGPITALAFLSAVDDPRRFKHARDVGPYLGLTPTRYQSGETDRQGRISKCGDTFTRTCLYEAAHVLLTRVQRFSPLKAWGMRLAKRIGGRKARIAVARKIAVILHCIWTDGTEFWWTREKAA

SEQ ID NO: 279858 - protein, 323 aa, unidentified
MGVPTVSTDSPTVIVGIDISKDDVDFFVLNWKGCPSGRRPRRATDLAILATELATFKPRLVVLEATGGLETPVWAALEAAGLRVAVVNPKRVRDFARSLGLLAKTDSLDARMLARFGELLGPAPTRLPDRVAREGRELVRHLDALVGTRAQHRTRRRQLAGELALASVERVIASLSEEIALLEQQIKEALRQQPGPCQRAAQLRTAPGVGPKTSWALLAELPELGQLSGRQVAALAGLAPMARDSGRFRGRRRIVGGRARVRKALYMAARSAVRCDPHLAAFRARLLAAGKPKQVALIAVARKLLVALNSMIRDRRPWIPLPA

SEQ ID NO: 279859 - protein, 340 aa, unidentified
MNNGLKLLGIDIGKNSFHLIGHDAGGHQVLRKCFNRNRLLQFAAQIEPCTIAMESCGGSHWLARKLASLGHRVKLIAPQHVKPYVTGNKNDFIDAEAICEAASRPRTHYVAVKTAEQQVLSVQHRLRESLVCHRTEAINRVHGFLLEFGIALPATKAAIAKVPELIDNSRSDLPLQLKRIMEHLLEDIRRLDAEIKACDVQIKQQLAQDDAGTRLMTIPGIGPITASALVADLGDASNFKTSRDFSAFLGLVPRQFSTGGRPVLLGISKRGDRRMRTLLVQGSRALMIRIDRREDALGQWVRNLLARKHPNKVACALANKLARIVWAVLRRGGTYNASMI

SEQ ID NO: 279860 - protein, 345 aa, unidentified
MEIRTIGIDLGKTVFHLVGLNARGEVVVRKKCSRTQLLRFTSNLRACLIGMESCGGSHFLGRALREQGHDVRLMPAQYVKPYVKTNKNDYIDAEAIAEAVTRPTMRFVPIKSDDQLDLQSLHRVRERWVIRRTAVINQIRGFLLERGITMRKGRKHLEASLPGILEDAENKLSGALRGLLTQLQIEMQYLHRQIEECDQLIVRIASELEPCRRLLAIPGIGPVIATATIAAIGNGAAFKKGRGFAAWLGVVPGEHSSGGKQQLTGTSRRGNKYLRKLFVLGAHTVLLQRTKQSPGLSTWLASLIARKRKQVATVALANKMARMVWAVLFKGEAYRPPLVPQLNAA

SEQ ID NO: 279861 - protein, 364 aa, unidentified
MFIERTSVGLDVHARSVAAAAIDGVTGELFQAKLTPSFEHVRAWCAALPGPVAVAYEAGPTGFGLFRALSAAGIRCEVVAPSKLQRPSGDRVKTDARDAVHLARLLRLDEVTSVAVPSVAQEAARDLVRAREDARGDLMRARHRLSKLLLRHGIVYDGGAAWTGKHDDWLRRHARGQLGADATGLAFDADYDAVLATLARRDRLDCAIAQLAADSEFTPLVRRLGALRGIGPLTGFALAVEIGDWHRFTGATIGAFVGLTPSEHSSGASRAQGPITKTGNSHVRRLLVEAAWHHRARYVAGKTMRDRWDLTTPAARARGDEGNRRLHQRWATFTERRKRPVIANVAIARELAGWCWSLAVQQDN

SEQ ID NO: 279862 - protein, 338 aa, unidentified
MIGVDLAKNVFQLHAASMMGQLQFRKRLSRQNFFKFMAEQPPAVVVMEACGGSHYWAREMIRLGHEVKLIAPHYVKPFVRRQKNDAADAEAIVIAAQRPEMRFVEPKSVEQQSRAILFRARERLVHQRTELVNALRACLYEYGHVVPQGVRQIKRIEAILEEPHSDLPELMREECRDLLDQIVALTVRIAARTAKVRALSAERDIARRLQTMPGVGPLTALAIEAFAPPMENFRCGRDFAAWLGLVPRQFSSGGKERLGRISKAGQADIRRLLIIGAMSRLNWLGRKSIPESSWLARMMARKPRMLVAIALANKMARTIWAMLTKNQDYRDPAQAVAA

SEQ ID NO: 279863 - protein, 373 aa, unidentified
MSEDQDVTVGVDTHKDVHVAAVLDQTGRVLATRNFPTTMRGYAQLATWAESFGTVAKVGLEGSGSYGAGLLRFLTDYGLTVVEVDRPDRSTRRRIGKTDTIDAESAARAVLSGRATGTPKTRDAHVEMIRALRVARRGAMKARIQAGGQVESLIVSAPEPVRQLVRGLAGKKRIRVCAALRPGTVSDPATATKLALRSLARRWLALQAEIDDLDSHLAALVTAAAPYLVALPGVGIDTAGQLLVTAGDNPHRLHSERAFARLCGVAPIPASSGRTDRHRLHRGGDREANRALWRITLVRMRCHQPTKDYVTRRTAEGKTKTEIMRCLKRYIVREAFTHLAPRPTEQAPWPGATTDGRRVHRHDRDTANTSRRR

SEQ ID NO: 279864 - protein, 323 aa, unidentified
MERFVGIDVGKTWLDVAERPGGGAWRVANDPAGWEQVLAQIGPADPAEAPLIALEASGGYEAGVVLTLDAAGLTPAVANPVATRRFAQSLGRRAKTDKIDAAMLAQYAERMRPTPRPVPARGRVRLRELLARRAAVVKMLVEEQNRAHEASALVRPQVEAVVALLTAQKRELDHLLASAVAADPDWQARVDRLDSVPGIGALTATVVAVGLPELGTGSAKGQAALLGVAPHPHESGRFRGRRRIAGGRAWVRHVLYEATLTTVRCEPTFTAHYRQLRARGKTHKQAMIACVRRLLGILHAMLRDGLTWQETKVGQGRFLPHGT

SEQ ID NO: 279865 - protein, 270 aa, unidentified
MEPTTIAIDLATRVFQVHFVDPDTGIIHSKVLKRAQLIPFFANRPCSRVVMEACGSAHHWARQLAKLGHDVRLIAAQFVRPFVKSNKNDAADAAAIWEAAQRPGMRFVAVKTEDQQAMLALHRMRQQLVRFRVMQVNQLRGLLYEFGVVLPQGRRASIEAAKGAMASLADQLPTMLTDSLQDQLSRMLALDEQIQRIEQRISNWRRGDEACCRISEIPGVGLLTATAAVAVIGNAQAFRSGREFAAYLGLVPRQNSSGGRVKLGGISKSV

SEQ ID NO: 279866 - protein, 354 aa, unidentified
MGLRYIGLDVHQDTVSAAVLDHRGKLIMQSVIATRAAAILDFLHGIQGTLHVTFEEGVHSAWLYDLLQRRVARVLVCDPRKNKLLKSGNKGDLIDARKLAELLRNDALSPVYHGALSALEVQHRTRSYTLLTEDTTRVMNRLKAVFRSQAIRCHGKKIFRPDLRQAHLAQLPTPGLRQRAESLYRELDALHPLRLQAKREMLAECRKHPAMKWLQSVPYLGKVRTAVLIGRVQTPHRFRTKRQFWSYCGLALQTRDSAEYRLVQGQIERKARPAQIRGLNWNHNHELKGLFKSAATMAAFRQGIFHEYYVGLLAKGMRPEMARLTLARKIAAITLKIWKEGGRFNAEHIKPQAA

SEQ ID NO: 279867 - protein, 346 aa, unidentified
MLYAGLDLSRKRLDFHLLDAEGATVDVGASPPDADGLDRLTERLERHGAPIRAAIESMNGARFVHDRLELRGWQVEIADAQKVKGLAPLACKTDRIDAWVLAELARRDLVPAIWLPDPRVRAERERARWRLHVVRHRSSLKQRVHAVLLTHGKPCPVSDLFGVRGRQLLAQLGLPEPWQGTIEASLRLIDELDREISDCERELRRLGADHRYVPLLCTVPGISWVLAYTIAAEIGDIGRFPTPRKLAGYSGLCPRVYQSGERDLRGPLSKQGPRYLRWALVEASTHACTAPVYRDRYQRTKARIGKQRGAKVAQIDLARRLSEAIWHMLSRGEAFAPKGATDPLAA

SEQ ID NO: 279868 - protein, 336 aa, unidentified
MQSMIEGQSHFQPFGLSYWGFEDLNKGVGSMTASYEYHIGVDYHKSYSHLVVQDSSGKTLRSGRVKNDRQSLGGFLERYRENSHAVVEATRNWMVMYDWLDDICDDVVLAHPLKVKAIADAKIKTDKIDATVLAHLLRADLVPEAWAPSEKSRDLRVALRERMFYVRLRTMTKNRIVTVFDRYPEQTAQLKKLGDLFGKTGRVQLAQVNVSEIDRIQIDRGLDFIGDIDVRIKQSEATIRAMTKANANVKLLKTIPGIGEFFARLIDAEIDDISRFRNPKKLAAYAGLVPSTYSSGGKTFHGKIIKQGNKWLRWAFVEAVTPPSPAMCSFAPDTST

SEQ ID NO: 279869 - protein, 356 aa, unidentified
MQIIGVDLHTRQQTVAMLNVETGEIVEKTLQHEGDSVREFYSTLTGPTRVGIEATGSMQWFLELMEELGIDCQVGHPAKIRAAEPRKQKHDRRDAALVLQLLVENRFPSIWMPSREQRDVRSLLLYRHQWVRIRTRVQNALQAMALSHGLRRGSSLWSERGQQAIASLSLTRYTAERRTALQSLYRHLEEQIEDLNRKVEELAWQRPQARRLMTHPGVGPITALATETFLGEPKRFVDGKAVASYVGLIPSEHSSGGRQRLGGLSKQGNPLLRFLWCEAVGHAVRKDAELQRFYQHKLVQKGLGKAKVAAARKLGIRLWILLRDQIDYQEFCRRGQLRQKHGGAHAGMPAREHDPA

SEQ ID NO: 279870 - protein, 376 aa, unidentified
MDSIIYIGIDVHKDSYSYCSYLKDKDTFFAEHKSEADSKNAVKYIKSVIKTAGSQEPVLVGYEAGPTGYKLCRDLQKAGFACVVMAPSTIYKPHGVRVKTDRRDARLLAQTLAYKTFKQVVIPSEKIEAMKEFTRARCSKKRQLKKAKQELLSFLLRMGMIYPERGSYWTQRHFEWLKTVQFKDDYLQLAFEEYFAEVNELMAKVARLDTQIRQMAENSDIKEDVEKLICFTGIDYLTAVSIAVEVGDFSRFSNAKSFSNYIGLCPGEDSSGLKVHHTAITKAGNSRLRQLLIESAKSIKYGRLCSAKSKRLIQRQEGQSPLVIQYADMAIARIRHKMMSMERKGLHYNVITTAAARELSCFIWGMMTGNISRASV

SEQ ID NO: 279871 - protein, 346 aa, unidentified
MRIIGCDYHPSWQQISWVDTLTGETEEKKLDHASGEAEKFYRQLPEPAVIGMESTGNCQWFVEMATTAGHEVWIGDAAKIRASEVRQQKNDRRDAALILKLLLEGRFPRIWTPSGEEKDLRQLLIHRHKLVRIRVQVKNELQHLAMNQGVTRAGKLWSKAGEKVLSELPLKPWASRRRQDLFKIREMLNGQIDLLDQAVLQAAQNNEKARLLMTQPGVGPITSLAFVLTMGDVSRFPRGKQVASYLGLIPREYSSGGHQRFGPISKQGNGFLRMLLVEAAQVAVRCDPQMRQEYLHRCHQKAKGIAKVAAARKLAIRLYWMLRTNRGYPEVVRVESSPRVPVVGAS

SEQ ID NO: 279872 - protein, 342 aa, unidentified
MQVTTIGLDIAKNVFQVHGIDAAEKVVVRKQLRRRQVLEFFKALPACLVGMEACATAHYWARELTKLGHRVRLMPAKDVKAYVKRNKNDAADAEAICEAARRPTVRFVQIKSTEQQGRLMLHRARDLLMRQRTQVINAMRAHLAELGIVAAQGRDGIKELLKIIASEADARLPVDAHTSLVVLAAELQAMQTLIGSIEKRIMVQHRLSEASKRLKSIPGIGLIGATAIAATVPDPKVFGSGRDFAAWIGLVPREDSTGGKQKLGPISKRGDRYLRRILVVGACAVLRYARHKPEKYPWLTKLLERKPFKVVAVALANKMARIAWALLAKGDTYRVPALAAAT

SEQ ID NO: 279873 - protein, 461 aa, unidentified
MSRKKPTGKQNRSAQKRVDWKALEIVHPDAAGIDVGGSEHWVAISPDRDLEPVRRFGCFTTDVREMGRWLVEKGVRSVAMQSTGVYWMPVFEVLEQQGLEVYLVNAQHTKNVPGRKSDVQECQWLLKLHAFGLLNNSFQPTDEIRIARTLWRQRSNLVAEASSVIQRMQKVLIEMNVQLSNVLSDVSGMSGMKIIGAILEGERDPWKLATFVEPEVKAKPEDIAKSLEGNWREELLFVLRQHVELYRIYQEKITDCDLQLRKHLESLGSKVDLRTQPIGNRPKGKKNSKNAPGFNLRTELYRITGIDWTQINGIDVLTAQTVIAEAGADLSAFPSEKQFASWLGLCPTNEQSGGKILNRRTRKVVNRATVAFRNAALTLLRSQSYLGAQYRRLRTRLGAPKAITAMARKLACLFYRLIKHGQPYVDKGTEYYEAKYREQQIRSLAKRAQKLGLQLVIPKTA

SEQ ID NO: 279874 - protein, 325 aa, unidentified
MSLYLGIDVSKETLDVYLLREKDSEETQMANTRKGFNQLHHWLQKRKAGSAHVCLEATGIYGLEVAQFLHEKGYRVSVVNPVRVKGFAQSQMRRSKTDKLDAAVIAAFCRALQPDLWTPPEPAWYELRALVRHIDDLQHTRQQQVNRLESATLPAVRDQLQQHIAFIDEQLAQIKNQIRDHLKRFPHLKREVDLLKSIPGIGDLTAWRLLAEIGIISRFADIRQVVAFVGLDPTRHESGRSVRGGRHISRKGCASLRAALFMPALTAQRHNPLLRAFAQRLQAHGKLPKQIVVAVMRKLLHLAYGILKSGQPFDPNYGQQFHPAA

SEQ ID NO: 279875 - protein, 366 aa, unidentified
MCILAVDIGQSKSVCCVYESSKQAREFVTVRTRPEAFAELITVHKPSLVVIEICPAAGWIRDLCQGMGVKLLVANTSDDAWRWRGVKRKTDRDDAWKLARMAELGHIRPVHIPEPWVRQWRQLIHYRQRLVRNCTAIKNRIRAVLAMVNVELPAGRKGFSDDARATLTGCESKRLESCGMEELWRGALRMDLDQLHVLERHLSRVEKQLDVYAGKQEAVRRLMKVPGVGPRTAELVVALLDDAPRFSRGKQVAAYAGLAPRKYQSGQMDRDGHISHAGDGQLRALLVQASWTGIHHNVGWMREVFDRVSGGNKKRRKKAVVAVARRLLIKLWAMLRDGSEWRDPVASRKAVCGGSVGVGRRMISGV

SEQ ID NO: 279876 - protein, 342 aa, unidentified
MPIVADQYEFVIGVDTHAATHSLSVGTAATGAIVDQSMFPTNPSGLERAVTWISRRVGEHATLVVIEGVGSYGAGLAERVLGSGLAVVEPAAMSAARRRGVGKTDSLDAVRIARSVLAVDISRLRWPRAEGARAALRVLVVAREQMAGERTRAVNAPTALLRITDLGVDSRKALTRKQIDAMSTWRSRSEDVTMQTCRQEAVRLARRIRALDTELIDNRKALDSAVNAVAPELLELPGVGSVVAASVLIAWSHPGRVRSEAAFAALAGTCPVPASSGNTLRHRLNRGGDRRLNRALTTIVLVRMRTHPDTRAYVARRRREGRTTKEIMRCLRGTSLGNCSVH

SEQ ID NO: 279877 - protein, 361 aa, unidentified
MEVVYRCCCGIDVHKKIIVACLNQGGEQSLREFGTTTSEIKSLATWLTESGCEIIAMESTGVFWKPLYNLFELMDLDAIVVNAAHMKALPGRKTDVKDAEWIADLLRHGLLKASYIPSREQREIREITRYRKSLTEERCRETNRLQKILEGANIKLDSVVKDINGKSARKLLEKIIEDDVPTSEEEISKMIHGRMRSKLGQLVTAIEGITTPLQRKLLAQVIDHIDDLNRRIADLDKLVQDYMDEYEAAITALCDIPGIARRSAEVILAEIGLDMSRFPSAAHLCSWAGVCPGNCQSAGRRKHGKTTKAAQDDFDPMRKICTFCKRVLFLGAIPADRSKARQEPCYTCSRSFHVNRHIPHA

SEQ ID NO: 279878 - protein, 400 aa, unidentified
MISVGIDVSKGKSTVCILKPYGEIVSKPFNITHTHKDLSELSSMLFRLNDEVKIVMEATGIYHLPILTYLHEKGFFVSVINPYLMKSYRNESLRKAKTDKIDSRIIANYGIDHWFKMKEFQISGVIYEELKLLGQQYRHYMKLHLLSLAELTHLLDLTMPGIKNLLASWNETNRKDKRSDFVERFWHYDIITSMSEQEFTEKYILWAKEKKYVPSQEKAKVIYTLAQESIPTLPSETSSVKMLVTEAVRVLKEVDATLGLILSRMQEIAKTLPEYSVVREMGGVGNTLAPKLIAEIGDVRRFRNGKALVAFAGIDPPPYESGQFVGCNRKISKRGSASLRKVGYETMRSLKMRSRPEDPVYRYVVKKESEGKSKKSAKIAGLNKFLRIYYARVTELYKNI

SEQ ID NO: 279879 - protein, 320 aa, unidentified
MLSFCGIDVSKDRLDVIVLPEEQCCSVSNDRTGWADLVERLRGRSIAGIGIEASGGYERGVTRALLAAGMPVRQVNPFKLRQFARASGVLAKSDPLDARMIASFVAIMPTRPAQRTPAGAAQVAEMLAVRRQLSAEKVAAENASRLLEDAMLRRLSRRRIGRLAGDIDLLDKRMVEIVANDPALAHRYRLLTSMPGVGSLLACTLIALLPELGCISRKQVAALVGVAPYAFESGTLKGRRCIWGGRANVRQVLYMAAMSASNWNPALKPFHDRLNAAGKKPKVTIVAVMRKMITTLNAIVRDDVLWADRHSGRHSVTTTR

SEQ ID NO: 279880 - protein, 342 aa, unidentified
MEAKRYIGIDLHRNGFTACLRLENGREYLKEWRLEEMGKFAGKLRPSDQVAVEVTGNTRLFHDAVAPHVARVVAVNPSQFQVITHSVKKTDSNDARNLALYLAKDLLPEVRMKDKTQAQIASLTQTRDSMVKLRTALKNKVNNLCSAQGVNLNKESLSSEKGLRAVLEMHFDLLVNLELRIIIDQIRSLNKSIAELEETIGKQSQKLEGHKNLTSIKGIGGLSGGILLSIIGDIGDFADEGKLAAYFGIVPRVSNSNETEHSGRITKRGTKLGRTTLIQCALIAQRYSPYLKTYYEKMKSRRGTGKAIVALARKFLGIIYRTLKNKWVFEDFPNFVLAEEAV

SEQ ID NO: 279881 - protein, 335 aa, unidentified
MNYKLFAGIDVSKLKTDVVFFLADHPDERTHGSFENSSEGFAKMTEWIHGLTGLPLSDMLFCAENTGLYTLPICTFFDEKEGNLWVENALRLNRSLGLKRGKSDRADAAEIANYAFIHRRRAILFKLPSKTMSRLKHLLSCRKQLVKHQTALKNANGELEAFDADAAVFTLEIRKALIREYDKKIGMVEAELLKCVKEDGLLERQYRLVNSVYCIGPQTAMFIVVLTQGFSLFDDPRKFACYCGIAPFPNTSGTTLKGRTKVSHLANKKIKALLTMCALNTIKIDNEFKRYYDRKIKEGKHHSAVLNVLRNKLVSRAFAAVNKDRPYSRELLTAV

SEQ ID NO: 279882 - protein, 396 aa, unidentified
MAGTEPHAWGTGRMDDITYVGLDVHKATVCVAIAEGGRGGEVRHVGVFENRPDILCKLAARLDKGGRRLSFCYEAGPCGYGLQRLLTSRGHSCIVVAPSLIPMKSGDRVKTDRRDAMMLAKLHRAGELTAVWVPDAGHEAMRDLVRARATAGRVLAQARQHLQGFLLRHERIYRGPRAWTLAYRRWLTTVRFDHPAQQIVLQEYIHAVQDAEARRDRLTRQIEELLPSWSMAPVVEAIQAMRGVALLVAVTVVAEVGDFHRFANARQLMAYLGLVPSEHSSGCTIRRGGITKAGNALARRVLIEGAWTYRMKARVSRKLHDRLEPLPAEIRDIAWKAQVRLCARYRRLAASGKPSVVAITAIAREMVGFIWAIARLVPPAVEDQRTHPAHAEAPRC

SEQ ID NO: 279883 - protein, 448 aa, unidentified
MRARKGPSDRKPKLPKHLQHINAHAAGIDVGCRSHFVAVPEGSCEQPVREFSSFTDDLHRMADWLLECGVSTVAMESTGIYWIPVFEILESRGLEVRLVNARHVKNVPGRKSDVLDCQWLQQLHSYGLLAGAFRPEEQVCALRAYVRQRMTLVRYASSHIQHMQKALLQMNLQLSNVVSDISGVTGMRIIRAIVGGEREPMALARLRDPRCRSSESTIARSLHGHFRAEHLFSLKQAVELYEFYQTQIAECDREILAQLAGFDAADAAGKGPPTSVEEALQRISGVDLTDIDGIDTTSALKIIAEVGTDMSRWRSAKHFASWLGLCPGTKISGGKRLSAKSKPVANRAAATLRMAAFTLLKSKSALGAYLRRQRARLGAPKAITATAHKMARLVYSMLKHGSAYVDVGQDHYEQRYRDRVVKNLKRKAQSFGYVLVKELETLPQPLVP

SEQ ID NO: 279884 - protein, 328 aa, unidentified
MTRIICGVDISSTSLEACIGRDGAAASFANNPEGIAELAVFCAAHQVDLVAMEATGGYEKQPFALLSEQGLAVTVLNPRAVRRFAEGMGLLEKTDALDAGVIAWFAEVKRSQPQSLQSASQQQLRALVCRLRQLTALRTAQRNESRLVTDAVVLAWFAELLEVVARQVRELESAIAALISQDPLWHELDQAFRSIKGVADRTVARLMAEMPEIGTLSNKAISKLAGVAPLAHDSGKLQGKRSVRGGRASVREILFVVAGVSGRYEPDFIAFHQRLQAAGKPGKVIRIALAHKLLVRLNAKAREVRQRFNAEPAAQQPAVLTTQRRAVA

SEQ ID NO: 279885 - protein, 338 aa, unidentified
MNNSHIIGIDLGKNSFHLVGHDHAGNQLFKKKLTRQKLLEFLSCHEPVIIAMESCGGSHWLARKCTEFGHTAKLIPPQYVKPYVKTNKNDFIDADAIAEAASRPTMRFSSAKTESAQVISTIRKIRSGYIRERTACMNRIGSILLEFGISLPKGHASMKGLFQWLVDKNQNLPPLIIFELSELHEHYQNLNERIDSQADKVERILADNEQMKQLQSVPGIGPVIASACLSSVGNPNDFKNGRNFAAWIGLVPIQYSTGGKSTLLGISKRGNKELRTLFIHAARSILWRDKSVKKYFGSWLVELKKRKPFNVAVVALANKIARIAWAVLVSKKSFEIRT

SEQ ID NO: 279886 - protein, 408 aa, unidentified
MNAVGIDVSKGKSMVAALRPMGEVAMLPQEFLHTEVGLEQMAYTIIALGEDTRVVMEATGRYHEPVAAALHECGIYVCVLNPLYIKQSGGGSIRKVKTDKADAMKIAKYGLDNWVDLREYTPMDTVRQQLKLCSRQYNLYMKTVVSLQNNLISLTDKTFPGVNELFSSPERADGHQKWVDFVMTFWHCDCVCRVSEKAFTERYQKWCKRKGYHYSAEKALDIYAGSCGHFTTLPKNDNTKLLITTAAQQLLAGKMTLAALRAEMTRLAKQLPEYDTVLAMYGVGETTAAQLMAEIGDVRRFPRRSSIVGFAGVDPAVDQSGKHEAKSTPTTKRGSPHLRKTLYQIVCTYLRKAPAEEPVYQFLDKKRAEGKPYFVYMTAAQNKFLRIYYARVKECLEAFDAQQNSAQS

SEQ ID NO: 279887 - protein, 429 aa, unidentified
MNVVDSIRLEEFRQIRKEIRGSNEHLIVGIDVAKYKHYAFYGTATGKTLLKRMIFENNLEGFRKLRAQEDALKVRYGLDKVIYGFEPTANYHKPLGEYLIRSGRHVVLVAGTAVKNNRKTIDGRWDKNDTKDAAVIADLICQGKFLFYEYPSMPLRDLRNLLSLKRRLKRQEHGQKVRIRNHLLAQYFPELDVYYGNWGKEGLAIVRWCLDPSVIAGLEYEDFVRRVAPDARGSSYKQERLRAVWEKAVDSIGCRAGESLDVEAKLMVEGLAYIRDSIREVEDNIEEVCSCFPEYSYLLSIPGFGPDIASRVIAAIGNPFRFDNQRQVLKMAGMDLSANRSGKTSDNATPRLSKNGNAYLRYALYQAAMIASYRSTPFIQYFTDKLRGREKEKGIKTKMRVKLAAKMLIIAWTLMKKREPFDPKYLSRD

SEQ ID NO: 279888 - protein, 437 aa, unidentified
MSNVAYLGLDISQADVSVCFLLADGGEPVPRWTVSNSQPGAERLSATGAQLCQAHQVTELRIGLEATGLLWWHLACALIAAPLLRPFQPHLYVLNPHLVQTFRRNYGALPKTDRADAFLIAERVRFGRQLPPPFQVDVRYAPLQRLTRFRFHLAHNLAREKSYFLSFLFLTFSSFGQVQPFGDPFGATASAVLTELTTEELAQQSLEDLAAYLQTQGHGHFSDPAALAATLQQAARDAYRLDKVLAEPLRIVLSTTMANIRSLTAQLKALDKTIAAELQAIPQTLASVPGLGPVWSAGLIAELGDVSRFADDDAIAQFAGLTWPAHESGQFQAEDTPLSQRGNRYLRYYLVEAANSVRRHCPEYTDYYAAKYAQTPKHPHQRALVLTARKLVRLIDALLRTQTLYQPPEQRQTPAGSGPHAQRPQRQRHQRQADPVT

SEQ ID NO: 279889 - protein, 449 aa, unidentified
MTEPQEIEDEEYEQILERVCAIDVAKASGMVCTRVPHPSRPGKRRTRVWDVAATTNSILQLGEHLAGEGIEKVTLEATSDYWRIWFYLLESCGLDVQLVNASDIKNAPGRPKTDKLDSVWQAKCTERGMLRPSFVPPAEIRRLRDYTRLRTDLTRERTRHWQRLEKLLEDALIKVSAVASTMGTLSVRDMLEALIAGERDPQVLADLARGKMKAKRAALIEALTGRFDDHHAELARMLLDQIDHLTAQIGTLTSRIEELITAIPAAQGVNADGTTGPGAGTGPDAAVADAITRLDEIPGISPLGAQVILAEIGLDMTRFPTAGHLVSWAKLCPRTIQSGAKNRSGKAGKGNPYLKGILGEIATAAAKTDTFLGERYRRIVKRRGKLKALVAVARTILVIIWHLLSDRAARYRDLGAGYYASRIDKDRKTRNHVRQLEALGYTVTITQAA

SEQ ID NO: 279890 - protein, 443 aa, unidentified
MQDAQPDQSAMPEIAVWIGIDWADQKHAYAMQIAGEERVGRGEIDHTPEAVEEFFTELGRRFPDQMIAVAMEQARGSLLFMLSKYGHLVLYPVHSSTMDHYRKSFYPSGAKSDPTDADLILELLRKHPDRLRPFRPDTVATRTIQFLVEARRDAVNDKTRYLNRLTSQLKMFFPQILQWFKEVDAPVVSDVLTAWPTLEHMQAAKPSALAKFFGRHRFSPERSDQLRTALVAAIPATRDQAVIATGVIVVKRLIEQLRVLRASIKEHAEKIEELTTSHPDFEIFASLPGAGKVMIPRLIAALGTDRDRYMTAAELQCYSGIAPVISRSGQQCHTDWRRACPKFLRQTFHEWAWYSTRKCSWARQYYDTQRARKKSHHAAVRALSFKWIRILFRCWKDRSLYDEARYTAALASRRSRQDQPSVKIMWKNIAGFCKPAEIPSENA

SEQ ID NO: 279891 - protein, 450 aa, unidentified
MQKEPDKRKGLSLECIESNAAGLDVGATEVYVAVPPDRDSQPVRHFQTFTPDLRAMAAWLVQCGITTVAMESTGVYWIPPHEILEEAGIRVCLVNSKHVKHVPGRKSDVSDCQWLQYLHSVGLLRASFRPTSEICAIRSLSRHRAGLVESAAMHVQHMHNALTQMNLQIHHVLSDITGLSGMAIVEAIVAGERDPIRLAALCHKKVRSAQETVIKSLVGNYRPEHLFTLKQSLSAYQYFHELIAECDREIERLIRQMDGKIDPQQEPPVSGIKSQKRSKNQFHFEMGPELNRIFGVDLTTIPGVSALTAHTLLAEIGPDLSRFPNAASFASWLSLCPVNKKSGGKVLSAKTRQSNSRASHALRIAALTQARSQSHVGSFYRRLRARLGAPQAVTATAHKLARIVYHMLTTRQAYDESVFKREDQKQAQRQEKRLRKQAKTLGFELVPIAA

SEQ ID NO: 279892 - protein, 415 aa, unidentified
MSNPLVVGVDVHRQTNTVCLMDLAGHVLGRRRTIDNNRPGAALLVDHLAQQMAAGDFDTIQIAAEATGWYWWHFFQTLSRDPTLQLWPLQLYPLNPRLTANFAKTYVDRDHTDQGDAFVIADRLRMGRDVPPPYQLDARYLAVRLLTRYRLHLVHTLAREKAYALSILYLKASEYGRLKPFGNLFGAASRAVLQEFASLEEIAAVPFDELVEWVDVRGKRRFADPQHNASTLQQVARDSYLLPEALRLPVHQVLSWSLQHVTFLEGQLKRLDGAIAEQLECIPHTLETIPAIGPVFAGGIVAEIGDIARFEYDQAKVAKFAGFKWKKHQSGDFTAEETHLTRTGNRYLRYYFCEAANAVRMHDREYGAYYERKYHEVRQHQHKRAIVLTARKLVRLVVRLLTSHQAYQPRRSASS

SEQ ID NO: 279893 - protein, 333 aa, unidentified
MVAGTLGSLHKAGSTKMTHTTITTAGIDTSKAKLDIAIHGQAACWCVDNTSVGWQQLARDLAKAGVMRVGIEATGGYERGVVRYLREKGFTVLILQPMQVRAFARVHLRRAKNDALDAILIAACTAMTDQPNRELDERLAELAGHLTFIEQIEEDIARLKTRIEHIEEPRLRRMVIADITRLKTRRAAEIGRIISALRCYSDLAHRFDLVFSIPGIGERTALALIIRMPELGRVSREEAAALAGLAPFDHDSGTHKGERHIAGGRARLRRSLFAAALPAAFRWNKALMDLYARLMARGKAHNAALIACARKLLIYANTVVQRGTPWVDKPIPA

SEQ ID NO: 279894 - protein, 341 aa, unidentified
MEKVATIGLDIAKQVFQVHGINEAGAIVCRRRLRRDDVVAFFKVLPPCLIGIEACATGHHWARVLIALGHEARLMPASYVKPYVKRQKNDATDAEAICEAVTRPTMRFVPVKSEEQQSVLMLHRVRELLIRQRTMLVNALRGHLAEFGIVTRQGAAGVGTLIALVEDGDQDVIPPLARSALLSLVRQLREVHEKVSEMDCQIQAWHRANELSRRLETIPGIGPITASAIAATVADASLFKSGRQLAAWIGLVPRQNSSGGKDRLGRISKQGDPYLRRLLVVGAHAVLRFSKNRKTAPTRWAADLLAKKPYNVVAVALANKMARIVWALMSTGKRFEAAGTI

SEQ ID NO: 279895 - protein, 402 aa, unidentified
MNAVGIDVSKGKSMVAVMRPFGEVVLSPFEVSHSSGELSKLARLLKSLDGESRVIMESTGNYHAPIAKVLYDAGLYVSVVNAMLIHDYGNNSLRRAKTDKKDAVKLANYGLDHWLSLPQYVPEEDTRFLLKCCYRQYQQYAKLHTMLKNNLILLLDMIFPAVNRLFNGSARADGSEKWVDFIDVFWHVQCVASLSLNAFREKYLKWCKKHGYNFKEEKALEIHKTAREHVAVMPKNATTKLLVKQAVAQLRTVSSAKVALQNEIDTLASSLPEYPVVMNMFGVGPKLGPQLMAEIGDVRRFHSKKALVAYAGIDAPPYQSGQINVHSRSISKRGSPALRRTLFLVMGVYLQCSPVDEPVYQYMAMKRAEGKPYLVYMMASANKFLRRYYATVKACLNNLESG

SEQ ID NO: 279896 - protein, 393 aa, unidentified
MDVGKEEHFAEVLDDVGERLFARSIANDEAALEALLDRAAENGTAGLVIDQPGSIAQLALAVSRRRGVPVAYVPGLVMRRAADLYPGEAKTDRRDAYVIADTARTKRKQVQWLDATSDELLERLKVLNGFDIDLAADQTRLTNRLRDALTSISPALERALGSRLAHAGVRDLLAKYPTPSALRAAGRARITRALKARSPRLATKVADDVVAALDAQSVTVPAEATIGRVVAELAVELDRLFARRDALAGEVEEVFLAHPFGELLSSMPGVGPRTGSRILAEIGDGSRFENGDKLASYAGLAPVTRQSGKSVNGEYKSRRGNHRLKNAMFLAAFASLRAPESKAFYDRKRAEGKRHNAAIICLARRRCNVILAMLRASRAYNPNHAATDLVDAA

SEQ ID NO: 279897 - protein, 334 aa, unidentified
MYYSGIDLHTDNCYITTLDQGGTVVKQERITNAAELVLNYFGSIRGPHKAVVESTSGWYWLNDLLEDHGIELVLAHAKYLKAIAYAKVKTDKVDSHTLATLLRQNLIPRAHKISRPLRGLRDTMRLRLRLVQQRSACLRRLDSITVKFNTSAVPDPYRFQLSVLHHTRDNFTQQILALEKSLHPVLIPNDDVQHLLGVPGIGKLTAFSLYLEIDGIQRFASHKHFASYCRLVPAADNSNRRVRHHSSQDGNKYLKIAFTEAAVHAIQYYPEFKRFYQRLARRSNQAVARTVVAKELAKIVYYILKNKVAYQGFKGQPISRAKSLQWPRRSSSQA

SEQ ID NO: 279898 - protein, 417 aa, unidentified
MHHGRLMAKDTMQLACDWSHSSAPSEPEGRRPVYEVEYERFTLNGTVVFVAMELSKSAWLLAAQGSPSGKTASHRLESGDIPGLLALLRRLQARERQTCGGGDVQIVVGYEAGYDGFWLQRRLAAEEIICWVMDPGSLQVNRRARRAKTDRLDAAMLLRALIAWCRGDRAACHMVQVPSVAREDARRTHRERQRLVAERVQHVNRIKGLLATQGINDYQPLRRDRSARLEELRSCDGHELPPRLRREINRELKRLELVLEQLEAVEAERDAAVAEPAADDADAAKVALLAKLGGIGNELATVLVREGLFRSFANRKEVAAYAGLTPMPFASGERHREQGISKAGNPLLRKAMVELAWLWLRYQPDSTLARWFTERVGSARGRIRKITAIALARKLLVALWRYLTAGLLPEGAHLKTA

SEQ ID NO: 279899 - protein, 337 aa, unidentified
MSQSIYGIDLAKHSFSIHGEDHHGKILIHKTITRSKVLVMFANIPPAIVGMEACGASHFWARELAKLGHTPKIMASKYVAPFRTGAKNDLNDAVAICVAVTRPSTRFVKIKSPEQQAILFLHRARDNWVHERTALLNQMRAMLAEFGIIAPKGRHALQTAIPEALEDGKNQLPDLARAIISDSYEHLLSINQRIADQEHCFNMLVSRSHNAQKIMKVAGIGPITATAVIASIGKGEQFDKGRDFAAWLGLVPSQYSTGGKPRLGRITKKGDKYLRTLLVHGARAVISAIGNKTDRLSLWCKSLVERRGFKRAIVALAAKNARIVWSLLSNDTEYQPI

SEQ ID NO: 279900 - protein, 359 aa, unidentified
MREQRNKISFRGQKIYVGIDVHLKSWSVTVLSETSVLKKFSQHPSPEALYGFLTRSYPGAEYHSVYEAGFCGFWIHERLTALGIDNIVVNPADVPTKSSEKLRKTDTVDSGKLARSLRANELKGIYTPDSVSLVLRSLIRLKNSITKDTTRQKNRLKSQLRYLGIEIPQEFLTPFSNWSKRFFAWLKEIETLTPSGRQALDIHIRHLEELRRQKLEMTRALRTLAKTDRFREPLRLIMSVPGFGQATGMAFLSEICDITRFRNAEQLAAYIGMIPMCHSSGEKDGTGDITIRKHAVMRCNLIEAAWVAVRQDPAMNLFYTEQCKRMPKSKAIVKVARKLVNRLFFVLKHQTEYVNSIVS

SEQ ID NO: 279901 - protein, 343 aa, unidentified
MQAVTTIGLDIAKSVFQVHGVDAHGNVVVRRQLKRRHVLAFFEKLPPCLVGLEACASSHHWSRELQALGHTVRLMPPAYVKPYVKRQKNDATDAEAICEAVTRPNMRFVPTKTAEQQGCLMLHRTRHLFIRQQTAVINAIRAHLAEFGVVAPVGRKGVEELLRVVADARDERVPEIARACVAALGAHLRMLKAQILEFDRRIMSWHRSNAASKRLDAIPGVGPALATALVACVADPRAFRSGRDFSAWIGLVPKQRSSGGKDKLGAISKKGDRYLRGLFTAGALAVIRYAKIHGTKHRPWLTALLARRPTKVAAIALANKLARMAWAMMAKGEHYKEPAALAA

SEQ ID NO: 279902 - protein, 316 aa, unidentified
MGEPEVFVGIDVASQWLDVAVRPEGTAWQVRNDATGMAALARELTSRKPTLIVCEATGGYEIPLVLAVAAQELPLVVINPRQARDFAHAVGQLAKTDKLDAAGLAQFAQAVRPPVRPLPVEAAYALSALVARRQQLQEMLVAEQNRLGTALAAVRASIEEHIAYLRGQVADLEAELADQIRTNPIWQHTSELLCSVPGIAETIATVLVADLPQLGQLTRRQIAALAGVAPYTRESGLSRRKGLIRGGRAPVRRALYRAVLTALRWNPVLAAFYRRLKADNKPTKLAMVACMRKLLTILNAMVRDDMRWLEAPMTAA

SEQ ID NO: 279903 - protein, 455 aa, unidentified
MAPRSKSNQRKSRPTSTPPLLPPHAAGIDVGAREVYVAVPPGADARPVRRFATFTQELLAVRDWLGPCGVTSVALESTGVYWIPLFQILERAGLEVVLVNARHCKNLPGRKTDVQDCQWLQYLHSVGLLRGSFRPTDQVCAVRTILRHRESLVAGAARCVNHLHKALTQMNIQFQHVSSDITGVTGLAILEAILNGERDPVALARWKDHRIKASRDTLAKSLRGDWREEHLFTLRHNFELWKVHQQLIAACDAQIESMLGEFDTRADQDAVLAPARTTHKKPQKNEPQFLAREECWRVLGVDLTAVPGFQTPTVLVLLCELGPTFADKFATAKHFGSWLGLCPDNRITGGRVYSVKTREVKSRVAKALRLAAQNLGRAQNYFGDLYRRWKARLGAPKAITAMAHKLARVLWHLLKFKQPFDWKAFEKEEQKMKRKKLLRLQNLAAALNYQLTPLP

SEQ ID NO: 279904 - protein, 350 aa, unidentified
MPRKFDTAVVTIGIDPGKNTMHLVGLDARGEIVLREKVTRTKIVSRLANMRPCLIGIEAGMGTHYVTRDLLALDHDVRQVPPVYAKPFRQIHKNDFRDAHAVAEAVQRPTTRCVPPKTDEQLDLQALHRVRYRLVGQRTAIINQIRCFLLEHGITVRQRLHWLRHALPDILAQRTDVLSPRMVRILEDLAQDWRRLDDRIEAVNGEIDALSKNTEPCRHLMTIPGIGPIISSAVVAAIGDGAAFTRGRDFAAWLGLVPKQISTGDRTILGRITKRGNRYLRMLFLQAARVVLLRPRNWMQHSFGPWLAAAAQRLHHNVLATALANKLARIAWSVLVQHREYEARLSVATT

SEQ ID NO: 279905 - protein, 343 aa, unidentified
MTRVVRELIAMEVLYDRVAGLDIGKASLTVSVRTPGARRGRHQETRTFKTTTGSLRVMRDWLVEQGVTIAAMESTSTYWKPPLYCLEEVMKVWLLNAAHMKAVPGRKTDVRDAEWIAQLLEHGLLTPSFVPPPPIRRLRKMTRYRIQLHGDRTREIVRLELMLEDASIKLSTVASSLKTVSARAILAAMIDGESDPQVLAEIAKGRMRKKIPDLAQALEGHFDVHHAQLARSILDRIDRVEQAMAELDLAIEAQCAPWAHQLELLQTIPGVGPKVAQVVIAETGADMSKFPTAAHPASWAGLAPAIYESAVDVVAPWFVPGRGLVGRWEPRLWALQCCFEHAS

SEQ ID NO: 279906 - protein, 371 aa, unidentified
MERDSTTKFIGLDVHSKTISVAIADEGRKGEIRHYGTIENTFDAIDKVIKSLATTGAELRFIYEAGPCGYALYRYLSGNGFKCIVTSPAMIPKRNSVRIKNDRRDALKLARLFRAGELTGIYVPDPEDEAVRDLARARNDARVAERKAKQRLNSFLLRHNFVYPGKKPWTKTYLVWLGKVSLKHPAQKIALQEYIDSVHECTGRVKRLSEQISLAVEEWRMAPTVKALQSLRGVSLISAAITVAELGDLSRFQHPKELMAYLGLVPSEHSSGESIKRGHITKTGNSHARRVLVESAWTYKHHARVTPPLIKRQRDLPKNICQISWKAQLRLCARYRRMMARKKPMQVVVIAIARELAAFMWAIAKEVEVVA

SEQ ID NO: 279907 - protein, 417 aa, unidentified
MKEEEKSSCCRYVALDIHKYYSVVAGVDRDGDEILAACRVEHVDLENWLPKHLLRTDRVVIESTTNAWHVYDLLEPLVAEVLVANPIKVKQIACARVKTDKKDTLILARLLAANLVPTVWVPPKHVRELRQFVSHRRRLANMHTQVVNRMHSVAHRHHLNHPKGKDFQAKNTEWQKDESLSRLEKMQLELDMATRAHLEEQSERMTRELGRMSHEEPWASDMLYLMQVPGCGVVTGMTILAAIGDITRFETPKALASYSGLTPGLEQSGVKLRGKGITKEGRRELRWALVEVAWRAVKADPHWKQHFEELKKRMHTNQAIVTIAHHLLVVVWYVLTKHEPYRHYSPERIAYKYLTWSWALDKEQRQGMTRPQFARYYLMRLGIGNELKRVALNPEFPYRLASVEEVLALRPELQPPE

SEQ ID NO: 279908 - protein, 341 aa, unidentified
MEHYAGIDVSLEQSSVCVVDATGKIIREAKVASDPGALIEWFAALGMRLTRIGLEAGPLSQWLFRGMEEAGLPVELLETRHVRNAFKTMPVKTDRKDARGIAELIRLGWFRPVHCKSMPAQETRAILSARSLVQGKLHDIEMSLRGILRGFGLKIGKTTPTRFAARVSELVSGHPTLEAIATALLAVHEVLLREFKNFEKRVRIMARRSERAQLLMTTPAVGAVISLTYWSAIDDPARFKKSKSAGAHYGMTPKRYQSGETDYTGRISKIGDKSVRTALYQAAHLILTKPVKSCGLKGWAMTLAKRIGMKKAKVALARKLAVIMHRMLVDGKPFDFAAKAA

SEQ ID NO: 279909 - protein, 344 aa, unidentified
MKDTNILAIDLAKNVFQVCKREPKGKVIFNRELSRAKLKELLAKQPRSVVAMEACGSAQYWARFALDHGHEVKIISARSVKPFQTKQKTDRNDALAIAIAASQEHIHGARVQSTEEQALQSLERARHLAQTHQIAQSNQIRGLLAEFGIIVPPSLSQLRKHIPFILEDAENGLPSAFRETLNYLWQHLLLQIEHIDTLEQQLEKAVKHDTTCQKLMKLEGVGPIGALGLAVRLGQGENFTNGREASANIGLTPKQHSSGGKERIGHISKRNADKRLRSTLFQGALSVITQVIKRPARTNKERWLQALVERRGKKIAAVALANKTVRTAYAILKNDTEYQPVLLA

SEQ ID NO: 279910 - protein, 329 aa, unidentified
MQSEFHVGIDVSKFTLDVFILEVRSHRRFKNDSNDFPAILQWIEKCTKYQSAFICFEHTGVYSMALAAFLESQHIVFAMVSPLEIKRSMGIVRGKNDVVDSKRIAEYASRFRDKIVMTKLPAKDITRLHFLLTLRDKTARTLTGYIAAVNEVQRGIGHEELPELFASYDAVITALKSEIKKIEAAIKHIINTNPDLKTSFKLITSLKGVSLIVGTYMIVYTCNFTKFATWRKFACYCGIVPFSHQSGTSVKGPAQVSPIANKQLKRLLHLAAVSAASHDPELREYYIRRQSEGKSKMSTLNIIRNKVVARAFAIVKRGTPYVNIRQYAT

SEQ ID NO: 279911 - protein, 357 aa, unidentified
MEKHTKLDFTDQSIYVGIDVHKKSWTVSIHTADFEHKTFTQPPKARVLAGYLIRHFPEATYYAAYEAGYSGFWIHDQLLSLGVPRQGGMIHPADIPTKDKERRRKNDPRDSRKLARGLRSGELDPIHVPSVVAREDRGLVRMRFTVAKEQRRIKNRIKGLLLFHGVSIPRDYDKRYWSGAFIHWLSLQKMHSVTGRATLQSLLRQLKMYRDEQARILREIKQLAHSDGYSLLVKCLMSIPGIGLISAMTWLTELVDIHRFKRFDCLTSYVGIVPRQHASGDHDYRTGLDHRGNRLLRKLLIENSWIAVRKDPALIMAYTELTKRMVGNRAIIRIARKLLRRIHFVLRNEATYEIGLA

SEQ ID NO: 279912 - protein, 319 aa, unidentified
MTQIVLGIDVSKKTLDAALIFDNLTFCKQFKNSADGFRLLAAWLASLQITRIHACLEATGTYGEAIALFLHERGHLVSIVNPLRIKGYAQSNMQRNKTDRLDARLIADFCLTQEPDEWQPPSAEVKHLQSLVRRVEVLEGMRQSEENRLANAGLEIKPSIERMITLIKDEIRELERQIKQHFDRNPDLKEQSELLQTIPGIGERTANLLLSEIEFDRYDSARAIAAQAGVTPRKKQSGTSLKQTGLSKLGNARIRRALYFPAIVARQHNGIVKEFAKRLKKNGKTPMQIVCAAMRKLLHIAFGVLKHKRPFDASLAFSA

SEQ ID NO: 279913 - protein, 424 aa, unidentified
MAVVMIGVDPHKASHTAVAIGAAEQPLGQLRVRASAVQAERLAGWAQAWPQRAWAVEGAGGTGHLLAQQLLAAGERVLDVPPKLAARVRLLATGNINKNDPNDARSVAVAALRSLGVREVRRDDHAAVLKVWSKRYQDLGRARTQVACRLHQVLCELLPGGVPGQITAGQAAHLLDAITPADAVEEARWELADELTGDLRGVDAQIRETRKKATTAVRAAGTSLTSLFGVGPVIAAAVLGDVRHASRFPNRDHFAAYNGTAPIEVASGGRKIHRLSRRGNRRLNHAIHMAAVTQIRYRHSPGRAYYDKKLAEGKTGKEALRCLKRQISDAIFACLQADDQRAAAAATKSPGGQPGNHSAARAAGSHPERRLFGQATPGPATHPTTPAGAAAPAPFPAPLPSRASGRPGPGPGAARPRSGASRRP

SEQ ID NO: 279914 - protein, 397 aa, unidentified
MDYDVVIGLDVGKAAHHACALDRGGKRLVDREITNTESSLRAIFTSMAAQGRVLVVVDQLHSIGALPVTVAQAMAVDVAYLPGLSMRRLADLHPGNAKTDARDAYVIAHAALTMPHTLRTLDVPSEAQADLAMLLGYDDDLAAQVTAAINRLRGLLVQIHPSLEKALGDNVAHAGVLHLLIKAGGPDGLRKMGKTRIDTTLRKHAPRIHERLATEIWDGLAAQTVTVPGTSAAAKVLPGLAAQILQLRDQRKEIAKDVEKVLDAHPLAKILTSMPGVGVKIAARLLAEIGGDVTAFPTSAHLAAYAGLAPVTKRSGTSIRGEHPNRGGNKRLKNAMFMAAFTSLRADPASRTYYDRKRAQGKKHNAALICLARRKTDVLFAMIRDHQPYTPSQPSAA

SEQ ID NO: 279915 - protein, 415 aa, unidentified
MKVVFPTCCGVDVHKSFVVATIIKTPKDSIQPSYQKKRFSTFNSDLKRFAGWLRENDCLDVCMESTGKYWVPVFNILEKQGIRVVIANPKWVKAVKGNKDDTKDSKWIGDLFRIGLVKSSFIPARDIRILRELTRYRYKLTCMKSSEKNRFQNAFTVCNVALDSVVSDMFGKSATAITDYLTSDEDFDPQHCVSLLQRSLKKKADDVLASIEGYEISPEQKYRIGIIRDHLHYIEKLIERVDTCINAMIEKYDGAIGLLCTIPGIDRSSAITVISEIGVDMAQFGSSKRLCCWAGLTPGNNESAGKKKSVRISRAGVYLKPALVQVAHAAVKDKLNPYYALKYERISKRRGKKRAIIAIARMILTAIFSMLSTGQIWNPVDLFKVDMPEHLKEQQLQKAVKQAVRFLEAQGLKVS

SEQ ID NO: 279916 - protein, 411 aa, unidentified
MDLMYARCAGLDVHKATVVACVRMPGPRPDARHAETTTFATTLRGLEALAAWLTAHEVTHVAMESTGVYWRPVFAVLEGTVQVQLVNARHVKMLPGRKTDVRDCEWLAQLLECGLLRGSFIPPAVVRDLRDLTRLRKALIRERGHHVNRIAKTLELANIKLGSVVTDIMGKTGRAILQALSAGLDDPEQLAACAQGLLRKKQAALREAVEGRLTPHYAFLLQQHLALIDTLDAHITTLDARIEAAMAPFAEAAALMQTMPGVATRAAEAILAETGMDMSPFPTAAHFASWARLCPGNHESAGKRRPTTTGKGATWLRATLQEAAWAAVRTKKSYYRALYYRLKARGGPKKAIVAVQHAMLVALWHMLKRRVPHQDLGADYFAQRNTERTLRHHVRRLEQLGYQVLLAKEAA

SEQ ID NO: 279917 - protein, 344 aa, unidentified
MEYVGIDLHKRESQICIETDAGELIERTIRTLRERFGAILGARSRARILLEASTESEWVAQCLETLGHEVIVADPNYAPMYPERRRRVKTNRRDARTLATACRLGAYRPAHRVSAAQRQIRQQLTVRDVLVRARTRAIAMTGALVRGEGLRVRSGKSEQFVTRLHELPLPSSLRVTLAPTLALLETLETEIQQADRAIEQVAVNDPVVMRLMTAPGIGPVTAAAFVATLDGADRFAGAHQVESYLGLVPSEDSSADYRRRGAITKAGNPRMRWLLVQAAWAVWRSKKADAQPLRAWAQRIAGRRGRSVAIVALARRLAGILFAMWRDETPFDTARLGRRATAVH

SEQ ID NO: 279918 - protein, 372 aa, unidentified
MNYNTVYVGIDVHKESFSLCAYTIETKKASHYQKTDADYKNVLKYVEFLRTIYGDDANFICGYEAGCLGYNLYHQLTANNIKCIILAPTTMLEQRSKKRIKTDRRDAEIIAKCLAQHNYNPVHIPTAKDEETKEFLRMRDDHKLALKKVKQQILAFCLRHNYCYDGKSHWTAAHLKWLKALTPEALYKEILDEYLLTYQTLSDKIERLDKRIEELATQDEYKEAVKKLCCFIGVKTHTALSVLVEVGDFKRFASAQHFASYLGLVPGEDSSGDDQNRLGITKAGNRHVRLLLTEASQCYARGQVGFKSKELKSRQSGNTPAVIAYADKANERLRRRYYKMVLNKYKKHNVAKTAIARELACFMWGMMTDNIA

SEQ ID NO: 279919 - protein, 347 aa, unidentified
MRFYTRQHTHYCGIDLHARTMSLCVLDQAGEILLEQTIRCDPQVFLRTITPYRADLVVAVECIFTWYWLADLCAREQISFVLGHALYMKAIHGGKAKNDRIDAQKIATLLRGGMLPEAYVYPPAMRATRDLLRRRLHLVRKRGQLLAHIQNTHHQHNLPEPTRKLIYRSNRDGIADQFTDPSVRKSIETDFALVAVYDQLLRDVELHIVRTVKAQDPDSFLRLQSLPGVGKILALTILYEIHDIRRFPSVQDFASYARLVTCAQMSAGKRLGTGGRKIGNAHLKWAFSEAAVLFLRQNPSGQKLFQRLQRKHGKGKALSILAHKLGRVTYHMLARGTAFNPEKFMAA

SEQ ID NO: 279920 - protein, 348 aa, unidentified
MKITRIGIDLAKQVFQLHGVDVNERVVLRRQLKRKEMVDFFKALSPCDIGMEACASAHHWARTLEVMGHRVKLIAPQFVKPYVKGNKNDANDAAAICEAMSRPDMRFVPVKSVEQQNLQALHRIRSELVHQRTAKVNQIRGLLGEYGIVIGQRIQAVRQAIPEILEDAENDLTAHFRKSLRGLQGDLSQLDERVTELDREIEQAAQDNAISRRLQQLRGVGPKVATALLMLLGDGCQFQSGRDASASVGLVPGQHSSGGKDRLLGISKRGNAYVRTLLIHGARAVIQHAKDKTDPLSCWLQSLCQRRGKNIAAVALANKTMRMAWAMLRSGQDYQPDYGRPTEQAQPA

SEQ ID NO: 279921 - protein, 435 aa, unidentified
MSRRAYRATRVNDVNWEQIARGKEGLGVTLGVDVGKFDVLVVCRWADGRFERPWRIKNPWEIPTLVALVRQVKTDRKLVMAMESSGTYGDALRQALGDNGIEIQRVNGKAAHDYAEVFDGVPSQHDGKDAAVVAELAALGKAKPWAYQAADSWEEELTYWVEEMVAQRQMVTLWQGRLEGLLARHWPEASQVLKLSSGTLLRILKRYGSPQALAEDAEAAKQLARWGRSLLSPEKIEKLLAGARSSVGVRVGQWQKRQIQEYAEKALAARQQSDRAQRRLAQLAEGQTVLQAQGKVVGVPTACVLWVSTGDPRSFDSAAAYRKAMGLNLVERSSGTYQGTLRISKRGSARTRQWLYFASMRLVQRCGVRPWYEAKKARDEGDARRVLVAVMRKLAVALYHVGVRNEAFQPRRLFGRIGRRSGKSAECSVSGKEPA

SEQ ID NO: 279922 - protein, 341 aa, unidentified
MEHVAVDLGGRESQICVRDEHGEIVAEQRVQTQRLGRWLARRPQSRVILETCAESFWAAEVAQSYGHEVRVVPATLVRSLGVGARRIKTDQRDARCLSEVSSRISLPSVHIPSSTARERKTLCSMRQGLVGMRTQSINMARGWLRGQACTLPSGSSPTFARRVRQRLLELNVGVPTYVERTLIVIESLCEQIAAADRELAAIANTDPVCTRLMTVPGIGPITAVNFVATVDDVQRFTSAHQLQSFLGLTPGESSSGQRKHRLSITKAGPGRTRWTLVQAAWSVRRCHRGSRLWHWGQTIEQRRGKHIAVVAMARKIAGILYAIWRTEQNYDPMRAARAIDV

SEQ ID NO: 279923 - protein, 406 aa, unidentified
MELIALYKRVIGLDIHQAQITACAIIEEADGTQRIEQKQFGAFKRDRRELAEWARTLCPEQVVMESTGIYWKSPYAALESAGIRALVVNARHVKNVPGRKTDIGDAQWLATLARAGLLRGSFIPSARLRELRLIARQRQKLVGQLASEKNRLHKVLTDGGIRLGVVVSDVHGQSARAMVKALIAGRPAHEILDLASKRLKASREELFDALEGELTASHRFVLDELMRHIEEIEARIARFDARLLEGLSPEHNTLVLLQTLPGVNLIGAAMLLVEIGNDMDAFGSADRLASWVGICPGNNESAGKRKSGRVRKGNLYVRRLLCEFAHAASRTTSVFKSKFQALIVRRGHKRSIIALAHKMVRTIFFMIKRNEHYRDSTTDYEALSIQRNAPRWIKALTKFGFIPATA

SEQ ID NO: 279924 - protein, 413 aa, unidentified
MHRIAGIDVHKKMLAVVVTDVSGEGELRFDQRRFETAAGSLNQLRQWLEELDAKEVVMESTAQYWRPVWAVLEPKFHLELAQAQSNRAPRGRKDDFRDAERLVKRYLSEELILSFVPAPEQRLWRTLGRTRTALIRDRARMQNRVEAMLEEMRIKISSLVTDLFGLSSRRMLQALADGETDPAKFALLAEKGLRAKPEQIAEAFSEAAGVNNSYRRLLRHFLDRLEMLERQVGEIDRELAEAMREHDDAVTRLAEIPGLGADSAQRIIAETGPRALVFPTPEHLCSWVGTCPGSNVSAGKSQSERSPKGNHQMRHLLNQAANAAVKSRGSVFEAFYQQKKRGDPKRHGVAVWAVANKLCRIIWKVLHDGVRYEERGTRPKPEVVRQRLNRVLRHLRRLGYEANLRPLQSQAPA

SEQ ID NO: 279925 - protein, 395 aa, unidentified
MRTVCGLDVHKGMILMCILKENGEKIIREFTTLTVDIESIRDVMQEQGVQEVGMESTGIYWIPVWRILQGHFDLKLINPWFIKQLPGRKTDVKDSEWIATVIQKNLVRGSYVPGRHIQELRQFERRYVRLCEQSTRIEQEIDRQLHRCNIHITNYATKIGSASVIKVVKAIIEGETTAAVLEKHVHGRIKNKYKGEITASLTGVISGVDRFIFNQNILEYGLILAQQEECLKEMSGYCEKYFMKELQLLCTIPGIQKLSAMIIIAELGVDLKTFATAAALTGWAGLRPRNDESAGKIKSKKITKGNKYLRRILVQCAWAASRQKNCWLKTKFEQLCVRKSSKKALIAISRKLLVIIWNVLSKQEPYKEFIPKIDPQQKQKKIDYHKKIIQQLETV

SEQ ID NO: 279926 - protein, 310 aa, unidentified
MKEKEIKFIQVVKVGCGIDVHKDITVATIRKSNEDYETREFGAYTSSLTSLRDWCKLEGVTHVAMESTGIYWKPVFNVLEEDFDIILVNAKHVKNVPGHKTDKKDSIWLSKLLLSGLLKGSFIPPCDIRELRDLVRYKRKVSADIGSEKNRIIKILEDANIKLSSVLTDVDGAVGTRIINSLIEGKTNVEELAKFHHHRIKASKTEFKLALEGRITKHHRFMLKLHKDSIADKERIIERIEREIDEAVKAYQIEIDLLQTIPGVGRDSAISIVSEIGVDMSIFPDENHLSSWAGMSPGNNETGGKKKPQK

SEQ ID NO: 279927 - protein, 406 aa, unidentified
MSMNAVGIDVSKRKSTVAILRPGGEVVASPFDVPHLSGCFQPLIQHIRALNGQTRIVMECTGRYYEPVARQLSQAGFFVCAVNPQIIHGFQGQDNPLRRVKTDKADSIKIARYTLDNWANLKQYTLMDELRTQLKTMNRQFDFYMKHKTAMKNNLIGLIDLAYPGANTYFDSPAREDGSQKWVDFLDTYWHVDCVRKMSCNAFTLHYQKWCCRKKYNFSRLKAEEIYETAKELIPVLPKDDFTKRIIKQAIQQLNAASQTVEQLRILMNETATKLPEYPIVMAMKGVGPSLGPQLMAEIGDVARFTHKGAITAFAGVDPGVNDSGDYSQKSVHVSKHGSPALRKTLYQVMDVLIKTKPDDPVYLFMDKKRAQGKPYYVYMTAGANKFLRIYYGRVKEYLASLPASE

SEQ ID NO: 279928 - protein, 378 aa, unidentified
MNKVRFVGLDVHAETIAVAVAEPGRDGEVRSLGSIPNRQESVRKLVKKLGPPEQLRVCYEAGPTGYVIYWQLTELGVRCEVMAPTLVPIKAGDRVKTDRRDAQKLARSYRAGGLTPVWVPDAAHEALRDVVRAREAAKKDQLRARHRLGKFLLRHGRRPPTGIRAWTQRYLAWVKRDVHFEHPAHEATLLDYLHEVEHVATRIERLESAIDQAVTTAPAAMRAVIEALQGLRGIAQVSAATIVAEVGELSRFARAPQLTGYSGLGAREDSSGDRRRRGGITKTGNAHLRRVVVEAAWAYRHRPAVGAALRKRQATLSEDVKAIAWKAQHRLHTRYRRLLGRGKCPQHVVTAIARELLGFIWAIGVTAETEQRTRRMAA

SEQ ID NO: 279929 - protein, 369 aa, unidentified
MKNVTTYVGIDAHKKDLFMAMLVGDQTTPVAWKTPNEPGAIRRLLKKLEREAPGPVRVFYEAGPCGYALQRRLTTQRVSCDVVAPALIPRKPGERVKTNRRDARKLTELGRAGLLTTVRPPTPEEEAVRDLARARDDAREDLQRCRHRLGKLLLRRGLHYTAGRHWTQGHRRWIGSLEWTHAAERSVVDDYLLAIDQVEARLKELDQRLTEVAETEPYKERVGWLRCFRGIETLTAMFILAELHDFRRFHSARALMAYLGLVPGEDSSGEKHRRGRITRTGNALVRRVLVEMAWHYQHRPGVGGALARRRRGQPSRIIAIADKAQQRLCRRFRLLALQHKPGPKIAVAVARELAGFLWAALQPAAPTQA

SEQ ID NO: 279930 - protein, 350 aa, unidentified
METILAIDLGKHKSVFCKLDTSSLKPEYFSAKTNPQKFHDIFIELDVENSIVLFEVGSQAGWLSDMLHAIGIKFKVANVNHSAWKWTNNQNKSDKTDAHRLAMMYHHGFFPEVYIPEKAVRQKRSLIYYRQKIVNRMTQVKNGIRALMTTVAIDLPTGKNCWAKKYRKQLEQLALPFDGIEGHCDLWRGQLHMELQQLDALQACLDKTTAKLDELNKQKQSIKLLETIPGIGPRTAEAVVAVIDDPHRFKSCRQVSNYAGFTPRRYQSGQMERSGRISKRGNPLLRALLVQASWSALRFDWARHIYKRVCRGSAKRRKIAIIAVARHLLMRCWAMLRDDKPWYYKIEEAV

SEQ ID NO: 279931 - protein, 330 aa, unidentified
MCYLKWVGVDVSKDKLDISIFDGKLHIMHQVANDKKAITDFFKKLVSVSDTHVIMEATGIYHVILFSKLIDLGYSVSVVNPLSIKRYSQMKLSRVKTDKADARIIAEYGKNQKPSLSKLPPPDQIAIADKLRAIDSFLTIITMLNNKIHALQRSGIGDKSVIKEYNRQINFMRRSIKRLEEQIDNLVTKNYQESYDLLLKIPGIGPRASSLIIAFFGKYENFETAKQVVGFVGLNPNPRESGTSVRRSSNISKKGNPYIRKILYEAALAASIYNPDCAELYERLLSKGVHKSKCRLAVAHKMLRQTFGVLKNGRDWIPHYHKNRIQQEIY

SEQ ID NO: 279932 - protein, 331 aa, unidentified
MTSCTGIDGSRQSLELWDGTHEEEVPNERRLTTLKKLLKKRYGTNWNEGGFIYEPTGPYSNYLREFAAEHEVRVVEVNPTKSANFAKVLGNRSKTDAIDAKMLYTFHVLLTEEDFWIPEIDEIAEQLGAFIGSYEIIQKTRTMLSNHVHALEEKSGVTRKLKDSLEKELGRLGAMEEQLEKEMEAYAEDHEETREDLHNLLSMKGIGVISAMSLLYLFRTYPGANRNEITALAGLDPVRRQSGSSLNGGRKISRAGDPLLRKVLSLACMNSIQHNECRGTFYEHLVSDHHKKPNVALLACMRKFLLIAHHLTVTKSKYQTLEHDANPCLSS

SEQ ID NO: 279933 - protein, 428 aa, unidentified
MNEVERVRLEGFRQLNKEIRGSQEHLIVGIDVAKEKHNAFFGTATGKTLLKRLVFGNDIKGFQRLLTYVEAVKIKHGLEKQVFGLEPTANYHKPLGEYLIKCGLDVVLVSGVSVKRNRELLDGRWDKHDTKDSANVADLISQGKCLFYEYPPMALRDLRNLLSLKRRLKKQEHGLKVRIRNHLLARYFPELDRYYGRSGSEGLAIVRWCLNPSVIAGLEYEQFVGLVAPGSRRIVQHKRLKAIWLKAVDSIGCDVGEAVEFEAKVMVEGLKEIRQAISATNDKIEDICLQFAEYSYLLTIPGFGPDVSSKVLGAIGNPFRFNTQKQVLKMAGMDLNAQRSGNRSDAAIPVISKKGKADLRYALYQAALVASTKDLNFIVYYTNTLRGREREKGIKIKMRVKLAAKLLVIAWTLMKKKEPFDPDYLNIE

SEQ ID NO: 279934 - protein, 342 aa, unidentified
MKREIYIGVDVSKNWLDLAYYDGIDIDWKSGHIRVDNNKSGYRKISIWLKKLQIAKGSALFCMEYTGLYCYNFRIWLESEGITYGMVNPRKMHRFEPDLGEGEPALDRIKTDEMDSFRIAIYCEKHSRKIKSSPSRLPGPAFFNLKRLLAERRQYVKHSVLYKQQLNDISAYDTEESCKRKQAGLKSLSVLRRQTDIEMREIIKSDEAIYKNYKLLCSVIGVGLVIAVETIVLTENFTAITNPRKYACYVGIAPGRKESGISIKGGDHVSKKGFKQAKANLSLVALQAIRHDSNIRGYWLRRKADGKHTGVVLNAIKFKMILRMFAVIKRQKPYVEMEKYRK

SEQ ID NO: 279935 - protein, 328 aa, unidentified
MNHIGIDVSGKALSIVISVNGKHRKAQSYENTPEDHKRLVALIQKLQGESIVCMEATGMHHFDLAVALSRSETITVTVINPKAAHNFAKALMQRCKTDSIDADILASYAERMPLWQRPSEEALALRALARRISATNKIKAQVKNQLGALMLTQETPEVILAQTKSLIGTLEEQIASFRINALNIVNRNRELREVFALITSMKGIAEASAIQLLGELLTMPDDLTVKQWVAYAGLDPKHFESGSSVVKKTRISKAGNRYIRQALYMPALVASRSEPHVAAYYKHLQEKRGLLKIQAICAVMRKILHAIYGMLRSKQPFDGCMFFRMETV

SEQ ID NO: 279936 - protein, 340 aa, unidentified
MEKVSTIGLDVAKHVFQVHGVDAQGAVVVRRKLRRDDVVAFFTSLPACLIGIEACATSHHWARVLTALGHEVRLMPASYVKPYVERQKNDASDAEAICEAVTRPTMRFVPTKSEEQQSVLMLHRVRELLIRQRTMLVNALRGHLAELGIITRQGATGLSMLVALVEDEGHDLIPPLARSALFLLVQQLREVHEKVGELDRQIHIWHRSHELSRRLETIPGIGPITASAIVATVTDASLFKSGRQLAAWLGLVPRQNSSGGKDRLGRISKQGDPYIRRLLVVGAHAVLRFCRKGKAAPTRWAAELLAKKPYNVVAVALANKMARIVWALMTTGKRFADSPT

SEQ ID NO: 279937 - protein, 348 aa, unidentified
MKNKSFVGIDISKNVIDVSIFREDTNIKMFPHEVFNNTRKGFGDMCSWLKKSRVVLSQALFGMEFTGCYSLDLEKFLTSKNYSFCMLSTRIVKHHPMGTIDKRDKNDSAKIADFLYRYDGTECAKPYKLPSKAMQQLKQLVNERKFLVEQRTNFMNRMQMFETKEDSAMYESYIKKLNHDIEKIDQEECELMSKEEDVFDTFQNLLTIPGIGFVNATNIIAITRNFTAFDTARQYARYVGVAPCSHTSGTSVKWRARPSEHCNGQVKADLSMAALRAVEYDVEMQMFYNRKLGGRKDSDTKRKALNAVKFKLIRRMFAIGKQKRKWEVLNTSDDRKNLHIEKSKASEL

SEQ ID NO: 279938 - protein, 472 aa, unidentified
MAAGKMNRKQSKELARRMQSANPGLEVVHPRAAGIDVGNSAHYVAVRRDQDVEPVRRFECFTADLHRLADWLEACGVKTVAMQSTGVYWIPLYEILEERGLEVYLINARHTKNLPGRKSDVQESQWLLKLHTHGLLNNSFQPPAEIRVVRTYWRQRGEHVRGASTCVQRMQKVLTQMNLQLANVISDLSGLTGQAIVRAILAGERDPRKLAELSHPQIRASREEIVKSLEGNWRLELLFVLKQEMEMYDTYQRKIAECDRELQAHLKQFADNVGRSAPGLTSTEQLKAFKAKKAKRVQGNAPEFNLSSELQRISGVDLTGIDGVSVIVAQTILSEVGLDMSRWKTEAHFASWLGLCPDNRVSGDKVLKRGTRRVINRAATALRLAATTLIRSRSYLGAQYRRLRTRLGAPKAITAMAHRLARLVYRMLKYGQEYVDKGTQFYEQRLRDQQLQSLKKKAASLGLRLIEADEVA

SEQ ID NO: 279939 - protein, 412 aa, unidentified
MKDLLEISCGLDVHKEKIVACILIGPLGKPTCSEIREFSTLIPDMIALRHWIVSKNCHHVAMESTGIYWMPIYEILEDAFSGDITLLVVNARHMKNVPGKKTDMRDSEWISTLLRAGLLNGSFIPEKRIREFRDLNRYRKSVIRDITSQKNRIEKFLQSSGFRLSSFISDIFGASGRNIILHLVEHGQIDKTALDSCLKTKTRNRIDEILMSVNGTLSEHQKAFLRILMTHYDSLKKHLAEIETSLEEDMAPFALQVEQLNSIYGISTTASCAIIAEIGIDMKPFKTAEHICSWAGLCPGNNESAGKRKSTSVTKGNPYIKSMLCEIAWVIAGKRNTYLSAWYWRIKQKKGAKKAIVALARKLLVIIYTMLKQGTLFDESCFETRRKRCEQKQLSRYIRELEKHGYHVEAQS

SEQ ID NO: 279940 - protein, 394 aa, unidentified
MAKVEHTSDARVLVGIDISKHRHEVLIAVPGKTRRRRMTVLNTAEDYRRLIAALLDYGLPVTIGFEATGNYHRALMFALGAAGFDLKLVSSVALARTREALHNSWDKNDPKDAQVILRMLEIGAVQVFHDPLVVGTCDIQELSKTYEMVARSKTELWHRILTHYLPLYFPEADRFHRSSRGDWFLALLEAFPSPYMITAMDKDAFIEAAWPVIGRRVAKAALLADIYETSKTSVGLPVAPDSDAIRMFRLVLAQGRSLVQQRNAIEDRATELLADHPDYQLLRTIPGIGPVNALAVLAEAGDLRRFRHHRQFLKFCGMDLATVQSGVFRGRSKISKYGNARLRRTLWLASQAAVLKPANSFRDKFERYIAQDRHNPDLRRKAYTVARDQLPDGR

SEQ ID NO: 279941 - protein, 399 aa, unidentified
MFYGLDVHKEFIQVCVLDSKGTKREEYRVGGSAEEVEAFASKLQPSDQVVLEATFHTWILHDILSRHVRRVVVANPLQVKAIAQAKIKTDKVDAFTLAKLLRADFLPEVELPDPKAWALRQLVSHRRLLVKQRTATKNSIHAVLNRRLVHNPNKDPFSKRARQWMKSLDLPAAEGFLLQNSMTLLEDLDDRIDAVDHKLLEQASIESDARLLMTIPGVGVTAAIGLIAAIGDVRRFGTPDQLASYFGLVPRVSQSAGRCHHGRITKTGSSTARSLAVESAQILARSSSPLTATYWRVRRKRGHNVAVTALARKIVVLVWYLLTKQEPYRYGEPHLARRKLRKATLPELRQRSKRVPQTLDAVYEEAGLPPLAHPSEAERRTIAINRRARTRISNSLKSH

SEQ ID NO: 279942 - protein, 331 aa, unidentified
MKLYAAIDLHSNNSVLVILDEADRMVLQRRLPNNLERIREALCPYGEQIEGIAVESTYNWYWLVDGLMDAGYRVHLVNTAAVKQYEGLKHKEDVDDARWLAHLLRLGILPVGYICPKEARGVRDLMRKRNQLVGQRSRQILSIENVLSRDTGGRASANEIKRWQEKEVDQLALTESSRLAVKSNLAVMHCLNEQIERLEAEILKKAKLRPDYQGLLTVSGVGKVLALTIALETGEVSRFATVGDFSSYCRCVGSEHLSNGKKKGSGNVKNGNKVPGMGLGRSGELRRALRAGGQALLPTQVRQDDARGSDQGSGTQAGPSLLPRDARSGAV

SEQ ID NO: 279943 - protein, 273 aa, unidentified
MKHYAGLDVSLEETSVCILDETGKICREIKVASHPEDLLHVLQAPVWNFERIGLEAGLLSQWLFNGLAQAGLPVVCLETRHTKAFLKAQVNKSDRSDARGIAQMMRVNLFRPVHVKTLTSQKRRVLLTARKLLQEKAIAFENEIRGLLANFGLKVGVVGAAKFEERIYELLGDLPDLAEIMEPLLDARRRLREHFSTLHRKLLELARGDEVCRRLMSIPGVGPVVSLAFVATIDTPARFRTSKAVGPALGLTPVRSQSGHTERIGRISLCGAP

SEQ ID NO: 279944 - protein, 483 aa, unidentified
MSRLGPAPRRMTRITHEVLDQVLCPRNSLDFGPAAETRLPAKQQPPTPSTFLMKRPKPTTPVLAKGRAVVGIDVGKRKHAATALTPQGEIIAQLAAFGNTRQGIDLLESAALRPAGGPGKVLVAMEATGHYWMCLYYELQRRGYHCVVLNPLQTNAHSRSQIRKNRNDRIDSEGIARLVLAGEARATRVPNEKTAELRLWVRHRQRLLHAAGSMERFAHTLVDRVFPEYAELLSKPFLPSAQKLIRQFGLAPAQLVSQEAEVRQLLRTASRNRITPATVNRLLEAAKQSIGSRQAENVAQRQLVLVFDYLAILRQQIATIEEELETRVEEIGSPLGSLGITANLVAAIHAESDPIQDFRSADQYVAYAGLDPSSHRSGDTINRHGRISKRGSPTLRRALYLAAYVVARKHACFRRFYKKHRRQGKGHTNALVIVARHLARVVWRLLTDRREFTKRPPKPIPPSNNSKKPAKSTTTPKPVRVTA

SEQ ID NO: 279945 - protein, 315 aa, unidentified
MLYDGIKGRIKTRNIQNNRHSVENILRWLRLQHCGPEDVHVVMEATGVYHERLATELHDAGFYVSLANPHRSREFARGMGIMTKTDKVDAYMLACYAFLKNPHRWEPPAPEIRYLGALLRRRDVLLGDALREENRLEKYLSTDTPADIISSCMHMAQLLRDEVSNIERQIKAHIKASPALRRDYTLLTSIKSVGPQLGMHMLVVLRSHDFSSAEQAAAFLGVVPIEKRSGTSVRSRPRMSKIGPPQLRAKLYMSALCGKIYNKRMRNIYDEMCLRGKPKMVAIGALMRKLVHWCYGVLKTGIVFNDEGLKQVLST

SEQ ID NO: 279946 - protein, 320 aa, unidentified
MTATSDRSQYVGIDVSKATLDVAIGDEKPFPVSNSREGLDQLLSRLRTREVALIVLEATGGLEALCAATLAAAGMPVAVINPRQARDFAKATGRLAKTDAIDATVLVAFGRAVQPEPRVLPDEATRQLDALLDRRRQLVGMRTMEQNRLSGTVPAPVRGDIEAHLQWLEQHIAAVDQQLEDRIRSSPVWRAKDELLRSIKGIGPVVSRTLLAAVPELGRLDRRQIAALVGLAPMADESGQYRGARRIQGGRSWVRSVLYMAALAARRFNPVLREFAERLAAAGKRPKVILAAVARKLVVIANAILRSGRPWDPNFAAADA

SEQ ID NO: 279947 - protein, 345 aa, unidentified
MADTSASYQLYVGVDIAADTFAAAWLSASGVLAAPFTGEQTPTGFAALQRRLQATAAAAAETLVVLEATGNYWVALAVTLHEAGYRVAVVNPRQAHHFAKAQLRRAKTDALDARDLARLAAALQPPPWVPPPMVYHEARQRLVARDALLAMRTQARNQRHALLQWPVVVAGVRQHLDEIVADLDRRVASLEAEIAAVLGASAWAESLACLTSAPGIGLVTAAWLLVGTLNFALCASPTALAAYVGLAPMPRESGRSVRGRPTIGHDGNRRLRTALYMATLSAARYNPAIKAFYDRLRAGGKPHKVARCAAARKLLHQAWALGTKQQRFAPNHEQHRQEGAPELAA

SEQ ID NO: 279948 - protein, 399 aa, unidentified
MLAVGIDISKSKSVAAILNQDGSMHTSPFEFHHTQPELDAFIKYILNSKQSATILMENTGHYHYPVLKAFQEAGLPVCMVNAYQIKKFGDMDLRKAKTDKKDAVRIARYALEKSYSLVPYTSMEQKYEDLRFLARQYNQRMLTLKTNKVFLLNLLDETMPGITNILPLTTRTPETSLSVLFINRFKSYDRIKKMGKSRFLDAFEKIARKSRNRQTKTYGLAIYEAALRNITTRGENEYTLAAQDQCLELVCESQKAADSIILKMKTLAETLPEYAVLRSMAGVGDRLGPLILAEIGDIRRFHSGKALNAYAGNDPPPYQSGTFESHNRHISKRGNAALRKYCFEVMQALKLTRPQDDPVYLFLLKKEQEGKPYNVAKMAGVDKFLRIYYARAMETLKQQ

SEQ ID NO: 279949 - protein, 455 aa, unidentified
MAPRSKSNQRKSRPTSTPPLLPPHAAGIDVGAREVYVAVPPGADARPVRRFATFTQELLAVRDWLGQCGVTSVALESTGVYWIPLFQILERAGLEVVLVNARHCKNLPGRKTDVQDCQWLQYLHSVGLLRGSFRPTDQVCAVRTILRHRESLVAGAARCVNHLHKALTQMNIQFQHVSSDITGVTGLAILEAILNGERDPVALARWKDHRIKASRDTLAKSLRGDWREEHLFTLRHNFELWKVPQQLIAACDAQIESMLGEFDTRADQDAVLAPARTTHKKPQKNEPQFLAREECWRVLGVDLTAVPGFQTPTVLVLLCELGPTFADKFATAKHFGSWLGLCPDNRITGGRVYSVKTREVKSRVAKALRLAAQNLGRAQNYFGDLYRRWKARLGAPKAITAMAHKLARVLWHLLKFKQPFDWKAFEKEEQKMKRKKLLRLQNLAAALNYQLTPLP

SEQ ID NO: 279950 - protein, 387 aa, unidentified
MKSNTQNAKIEAITEKTLVLGIDVGSETHYARAFDYRGIEYSKKPFKFSNTEAGFVTFKEWILDLKERHEKDKVVPGMEPTGHYWFNLGKFLQDNEMKPVLVNPHHVKKSKELDDNNPTKNDRKDPKVIAGLVREGRYMIPYLPDGVYADLRTASNIRFQLQAELTRIQNRISRWFNIYFPEYKTVYGKPDAKSGMLILKAAPLPEDILTLGIDGVNQIWRDAKLRAVGKARAKTLIEAAGHSVGSKEGAVSARMEIRMLLEDYESRNMRLQEVMVLIEELVKGIPMAEKLLEIKGVGIRTVSGFLAEVGDISRFNNPKELQKLAGLALVENSSGKHKGGTTISRRGRKRLRYLLFEVAMSLVAKNPEFRELHNYYTTRRLNPLKKM

SEQ ID NO: 279951 - protein, 351 aa, unidentified
MKTEPTAQPKLYIGIDIHKRSWKIHCATDLFSGKSFTMPPNPEVLQSYVAKHFPDHEVTVAYEAGCCGYYAHGSFEGYGWCSLVVNPADIHRKGKERFTKTDKIDAQLIARELKDGRLDSIHIPDVAREQLRSLFRRRNDLVKDFRRIKSTLKMQLLYFGVRIPEEFDNDHWSHSFRHWIDSLEFVHATARETFDSRMRSFRFIDKELRDVSTKLRAYCRKHYKKDYYLLRSVPGIGGIVACGILCELGDLRRFNSIKHLAGYVGLAPWIHQSGDNQRHTGITMRAHRLIRSYFIEASWQAIRTDPIMQGYYRKHVGKNVKCIIVKVARKLLSRTLAVLKTETPYAIGVIE

SEQ ID NO: 279952 - protein, 396 aa, unidentified
MAKLWIGVDIGKTHHHVAAVDGDGRLVYSRRVANDETALLTVMAEVSTHGRPVCWAVDVTTGLSALLLTLLWRRQVQVRYVSGTVAFHMAAAFAGENKNDARDAVVIAQTIRMRPDIPVLEPSDRLLAELTVLTSYRADLVGQRVATLFRLQELLTGISPALERAVDLNRKGPMMVLACWQTPAAIRHAGVDRITALLRRGHVKNAVHVAEALVAAARQQTATLPGQRAAAVVVGQMATEILALDQRIAAVDGLIAEHLDQHPLTPIVSSLPGMGPLLTAELLVHTAGMTEYDNAAKLAAHAGLAPVSRDSGTVSGNHRQPRRYHRRLRHILWMAAFTAARECPASRAYYEKKRGEGKNHRQAILALARRRVDVLWALVRDGKTFTRPAPAIRAAA

SEQ ID NO: 279953 - protein, 358 aa, unidentified
MAGKVTETAVVGGVDTHKDLHVAAVVDQNNKVLGTQFFSTTRQGYRQMLAWMTSFGALKRIGVECTGTYGSGLLRYLQNAGLDVLEVTAPDRMERRKRGKSDTIDAECAAHAAFSGIRTVTPKTRNGMIESLRVLKTCRKTAISARRVALQIIHSNIISAPDELREQLRNMTRMQLIRTLGSWRPDASEYRNVTNVYRISLKSLARRYLELHDEIADLDVMIAAIVDELAPELIKRNAIGYESASQLLITAGDNPQRLRSESDFAALCGVSPVPVSSGKTNRYRLNRGGDRAANSALHIIAIGRLRTDDKTKEYVARRVAEGHTKMEAIRCLKRYISREVYTLLRNQNRQINSIPITA

SEQ ID NO: 279954 - protein, 409 aa, unidentified
MRDYLGVDWADQTHAVWVVDESGTKIAARTVTHTAEGLDAWGRELDEWRAQGSELWAAIERPDGRVVDLLLDHGVVVYPVNPKALDRARDRFRQSGAKSDPFDARVLADFLRTDHTHLRALQPSSEAAQELKLLTEDCQRHIRQQTRLVNQLTATLKAYYPRALEVAELTSALAREFLLAYPTPAALTALTERQWQRWARAHRLTEARTGELWAVLRRPQLPVPAHVVRAKARLMRALLEQLMPVMAAVAQYRKAIDDFFARMPAAQWARTLPIGKHGITAPTLWARLGDAPGRWESFRHLQAHAGTVPVTKRSGKQQRVVLFRFACDKALRYVVDQVAFLSLLSSAWARAYYDQQRTRGHSHRQALRALGAKWLKIIFVMWERHVPYDEQYHLATMTRQQLRRQNQIA

SEQ ID NO: 279955 - protein, 388 aa, unidentified
MIKQDLEESNGGRTVVGIDPCSEFLQLAILTPKKKTEFKKLPLSPSITEEITKSTDPKTTQIAIESYGSYGKLFVYDLLKKGYDVREVNPHISKKLSGLYSEEHSDQKDAEILAKALLLIPDLPRISITDKKQWLAKLTRTRRKLVKDLNGYLNRLHIALAESYGVVYKKLFKILFAKKALQFFEDYPTINDSLSNKNAKKRIGEEKWALLKQAGKWRDTYYLETLRTEIRGMIEIIRCINSTKLAIDEKIYEIADKIEEMKILKTFPGIGGVAGASLLSEIGDIDRFGQESHLSAYCGVSPVIWQSGTGRIRTKRRKRYSRRLKGILYFIALSQIRINPESRAYYDRKIKEGKTHWQAMNALSRQLIKIIYYMLKNMEPYRRPVLVN

SEQ ID NO: 279956 - protein, 341 aa, unidentified
MNSVAIVAIDLGKHTFHLHAQDDRGHELYHKKFNRAGLAMHLASLEPCTVAMEACGGAHYMAREAAKWGHVPKLIAPHLVRPYVKSNKNDFADAMAICEAASRPTMRFVSPKTEAQQALAMLNSQRDAYIKERTASVNRIHAGLLEVGISLSPGFHAIKELPALLEECSFSAQIKQLLLGLRDHFNYLDGQVKALDKQVERQAAEDDLASRLMTIPCVGPITSSVLAAELGNGQQFKCGRDYSASIGLVPKQHSTGDKTVLLGISKRGDRNQRRLLIQCARVYLMGLERQTGALADWVRQLLARHHCNRVVCALANKLARIAWSIAAHHDEFKARPSAMNA

SEQ ID NO: 279957 - protein, 367 aa, unidentified
MTKVIKYVGLDVHKKSISVAVADEGRENTPRYIGQIENNMDQLNKLFRKLVSKGVELSCVYEAGPCGYSIYRYLKGNGIDCAVIAPSKIPRKSGDRIKNDRRDALSLASLHRSGELTPVYVPDCEDEALRDLVRAREDAQEALRKIKQQLGAFLLRHDLIYTGKSRWSSAFYNWLSDISMKHYAQQITLQQYIKTVEYCTNNVELFTDQISKVTKESRLKPLIEGLQAMRGISLITAATMAAELGDLTRFENPSELMSYLGLIPSENSSGPTVRRGSITKTGNGHVRKALIESAHSYRFPARISRVIRKRQEGLSEKVCSIAWKAQVRLCARYRRMTSNGKKSNLVKTAIARELAAFSWAIAHKITI

SEQ ID NO: 279958 - protein, 320 aa, unidentified
MAQRSFCGIDVAKDRLDVMVLPEELCWSVANDAAGWAELVARLRGLRIAASGIEASGGYERGVVRALLAAGMSVRQINPFKLRQFAKACGVLAKNDRLDARMIALFVATMPTRSAQRYAAVERLAEIVTARRQLSDDKVAAENASRLFEDAALRRLYRGRIARLAADIALLDKRLAEIVAGDAMLARRYALLVSMPDVGPVLAVTLLALPPELGQMNRKQVAALVGVAPYDFDSGRLKGMRCIWGGRAPVRRVLYMAALIACRCNPQLRAFHDRLAATGKKAKVVLVAVMRKIITILNAMLRDDASWIDRSIGRHIVPAA

SEQ ID NO: 279959 - protein, 355 aa, unidentified
MSHLNSGIAVIGIDIGKNSFHLVGQDRRGAIVLRQKWSRGQVEARLANLSPCLIGMEACVGAHHLSRKLQLLGHNARLMPAKYVRPYSKGQKNDFRDAEAIAEAVQRPTMKFVATKTADQLDLQALHRVRERLVSQRTGIINQIRAFLLERGIAVRQGLRFLRAELPGILATRTDVLSPRMLRILEDLSADWRRLDARIEGLTGEIETLARQDQHCERLMTVPGIGPIISSAMVAAIGTGDVFSKGRDFGAWLGLVPKQISTGDRTILGSISRRGNRYLRALFVQAAWVVLVKLGPKHWERYGLKSWIEAAKKRLHHNVLAIALANKLARIAWAVLNKGRAFACDKTDAMASRPV

SEQ ID NO: 279960 - protein, 260 aa, unidentified
MRPLSIDCDAHKHYSQLEVQDANGQVLNRARLDHRPGVIASFFSRFPSGTPVAFESVGNWYWIADEIKAAGCLPLLTNPAKAKLMMGHVNKADNLDANGLATLLRIGTLPTVWLPPAALRDQRELPRTRMALCAMRTSLKNRIHSTLAKEALSPEDGAELFSKRGRAGLESSLSRLPQETARFPYAPQFSSYCGTIPRISSSGGKTRYGKMRSESNHSLMWAFIEAVIGAVARHLAESTVWILSKNEPYREPSWFSPRQG

SEQ ID NO: 279961 - protein, 416 aa, unidentified
MEVVYERCCGLDVHKKLVVGCLIIPGPGGKPVKELRTFGTMTEDILSLSEWLAEAGCTVVAMESTGVYWKPVYNMLEGLFDLLLVNAHSIKVVPGRKTDVKDAEWIADLLRHGLLKGSFIPDRERRELRELARYRTSLIQERTAERNRLQKVLEGANIKLASVASDISGVSARAMLEQLVAGSTDVAGMAALARGRLREKIPELEKALSGRFGEHQRFLVTQQLGHLDTLEELIERVSTEIRERMRPFEESIARLDTIPGVGRETAEAIIAEIGVDMSRFPTDRHLSSWAGLAPGNNQSAGKSGSGKTRKGNKWLRVSLVQAAKSLSRSKNSYLSSQYHRLASRRGKNKATIAVAHSILVITYHLLRRQQDYADIGPNYFDQRNQNKVRRVLVHRLESMGYKVTVEPTEQSDTEAA

SEQ ID NO: 279962 - protein, 415 aa, unidentified
MSVFAGIDWAERHHDVALVGDSGELVNKRRISDDMDGFVGLLEMLAEAGDSPDDPIPVAIETSRGLLVAALRATGRKVYPINPMAVARYRERHSMTGKKSDHLDALTLANILRTDAEAHRPLPADSELAQAVTVLARAAQDAVWRRTKVTQELRALLREYYPTFLNTFAGTRHTNLATPEARAVLALAPTPEQGTKVTKTQIIAALRRAGRQRRLEQTAQRIQQALRRPQLRQLPLVESAMGRQAQALLATLNIECTNADLLSAAAIDAFQKHPDYHIITSFPGLGNNTGARVLAEIGDDRNRFTEPKGLKAFAGAAPITRASGRSISIRRRHVKNNRLAAVGFVWAFATTPRPGPLRDLYDQRRALGDRHAAALRNIFNRSLGQLWYCLQTHQLYDQAKAFPAPNQSRSELATA

SEQ ID NO: 279963 - protein, 356 aa, unidentified
MSEITRVGVDLAKSVIQVNAVDAGGKLVTNRQLSRDKFLPWCAQLPPGCLVAMEACGGAHHWARQLIALGLNAKIIAAHLVAPYRMQGKGGKNDANDAAAVCEAASRPNMRFVPVKTTVQQGILSVHSLREGMKEERTASINRIRGMLTEFGLVAAKSPEKLREKLTGMLEDASNDLSGLARLVIQEAYDQWKDLDKRIEWCDERISAHVKDDAQAKAAKELIGVGPVTASAVVATVGDFHQFKNGAQFGAWLGLTPRQNSSGGKNSLGGITKRGDMYLRMLLIQGAKAAVMTAHMRSDPISTWLFQLREKSGWQKAAVAMANKNARILWAMMTKGCRFDPKHVSVKPVGPATAMA

SEQ ID NO: 279964 - protein, 344 aa, unidentified
MEITTVGLDLAKSVFQVHAVNRQGKKVLNKQLKRNQLAEFFVKLPPCLIGMEACGSAHYWARKLASYGHTVRLMAPQFVKPYVKSNKNDVADAEAICEAVARPNMRFVSVKTVEQQAVLSLHRTRQGFVKARTAQANQIRGLLAEFGLTIPQGISHIARRVPELIEDASNELSGSLRMLIQRLMDHLKELDRHVGELETQIKAWHRTSETSRRLEKIPGIGPISATALVASVGDPSNFTNGRQLAAWLGLVPRQHSTGGKATLLGISKRGDSYLRTLLIHGARSVILAAQKKNPSGGWLNGLLSRRNPNVAAVALANKNARIVWALLAHQREFRADHVPALARP

SEQ ID NO: 279965 - protein, 378 aa, unidentified
MIATTRPEMSVSEPTLYVAFEVGKKEWQLAMTSGFGVDPWVRTVVSGDLPAVAGALRQGRMRFALPAQARVVSGYEAGRDGFWIHRALTQLGLDNRVVDSASIEVNRRARRAKTDRLDALNLVRMLVRVCAGERKVWSEVRVPTVAVEAARHVSRERTALRQEQTRLSNQLRGWLATWGCRLPRYRKPGWWTAVRDWAGAPLPLEVQTRLARAEARWAVLERQRTELEAQQQAAVPAAAPASALRQLVQLKGVATTSASVLLDEGLVWRGFRNRRQIGGLLGFAPTPFDSGESEREQGISRAGNGHLQSISIQLAWNWVRWQPLSALTQWYRARFGTGKRARRRGIVAVARKLLIALWRYVTTGVVPAGATLKVAAIA

SEQ ID NO: 279966 - protein, 346 aa, unidentified
METIVRIGLDTSKSVFQLHGVDGTEQPVLRRKLRRGQVLEFFRRLPPALVALEACGASHYWARELQSLGHEVAMIPPQYVKPYVQRGKSDAADAEAICEAASRPKLRKNFVPIKSPEQQGAQMLARVRNQFIGRRTQLANSIRGYAAEFGFTAPKGLSRLQQLLIDIQADATVPELTKELVDALAAELARVDDQIAKLDKKLMQLHRSNEMSRRLAAIPGVGPIGATLLSIKVVDARGFKSARNFAAWLGLTPKNHSTAGKNRLGVITRAGDGMLRTVLVAGATAVIADMRRRETRSWPWLKDIIARKPPKLVAIALANKLARIAWKLMVSGERYRPASNVAQMPT

SEQ ID NO: 279967 - protein, 468 aa, unidentified
MFQLGIDVSKKTLDLCLLREGVKGRVKTRKLQNDINAVSAVIAWLSKQHCKPEDVHIIMEATGVYHESLAYGLHKAGGRISLANPHRAREFARGMGMLTKNDRVDAYMLACYGVLKAPEPWLPPPEEVRHLSALLRRRDALVADSTREKNRLEKYLATDTPSVIAESVEAMIGQLNAEIKRLDSLIRSHLNQHPELKKDFDLLTSIKSVGYQLGLNMLVILRSHDFATAEQAAAFLGVVPVEKYSGTSVRGCPKLSKIGPPEIRAKLYLASLCGLRFNPLMKAMYERLCLRGKAKMCAIGALMRKLVHWCYGVLRSLNDQQLDALQCWYPDDGIHIRYQTPGGQMEDIAFASPGQKGASMLQFLLSYGTDPLLLDQPEDDLDCLMLSMSVIPAIMSNKKRRQLIIVSHSAPIVVNGDAEYVISMQHDRTGLYPGLCGALQEAPMKALICRQMEGGEKTFRSRYERILS

SEQ ID NO: 279968 - protein, 323 aa, unidentified
MLIHYIDIAKRNFVIAVSSLSKTKTETNNPKGIAHTIEYLKKHKVALVVTESTGGLEIPAAKAIRRAGIAVIIANPRQTHQFAQSQPLTKTDAKDAKMPAFFAQMTAQKEDSQTMPYQPPTEAEEVLEALVNRRNQSADMRTAEKNRLHQVHETQVGSVKQLIAHFDRLIDELDKQIDNHTHTHFDGKAQVAEQIKGIGSITTATLMAMLPELGRLSHKRIASLAGIAPHPRESGETKFKSRCFGGRSAVRKALYMATVAATRFKPLIRDFYQRLPSEGKPYKVAVTACMRKLLTISNARMRDYFAENVTAENDTAENGIRTA

SEQ ID NO: 279969 - protein, 413 aa, unidentified
MLLVPVFCGIDWAEDHYDLALVDQAGVVLTERRINDDSNGYQLLLALLAEHGDDQVEPIPVAIETPRGLVVACLRRTGRQVYAINPLSVARYRERHSVARTKSDRIDAQLLANILRTDRAAHRPLPADSELAQAVAVLARAQQDAVWNRQQVANQLRSLLREYYPAFLEAFQDRRPGGLAHPDACAVLAIAPTPTQAARLTRPQLQAALRRAGRQRGITAVSVRLQAIFRRTWLHQLLLVENAMGRQSLALLKQLEAAAQAADDLAEATRVVFQQHPQVAIFTSFPGLGELPAARLLAEIGDDSTRFADARGLKAYAGAAPVTRASGKRLVVLHRKVKNQRLASVGYLWTFAALRLSTGARAHYDRRRVAGDRHTAAQRHLFNRFLGCLYYCLQTGQTYAEDQAFPAARPIAA

SEQ ID NO: 279970 - protein, 358 aa, unidentified
MIVMKYYTSTTQFNCGIDLHARQMYVCLMDRDGKKLIHTNIKNNDFAYFLKLVAPYQHDLTVCAECMFGWYWLADACQAAGLQFVLAHALYLKAIHGGKNKNDRIDSEKIAHLLRTNLIPPAYVYPAAKRPLRALLRQRLYFVWRRSELLARIHSHQLAHNRIPPKQTRRIRDSWEQQLLAAEPEPLRQLALKNDLAMIKHFDTQIFALEEELQRQAKKSAAREYALLQTVPGIGENLGLTILCEIGDIARFPTVKDFLSYCRLVKGTVASAGKIKGLRGAKLGNPYLRWSFGEAAVIAKRDHAVIGPLAQQLEARMNGNKFKANTVVAIKLARAVYFMLKSHTVFDPDRLVAALSRN

SEQ ID NO: 279971 - protein, 399 aa, unidentified
MLAVGIDISKSKSVAAILNQDGSMHTSPFEFHHTQPELDAFIKYILNSNQSATILMENTGHYHYPVLKAFQEAGLPVCMVNAYQIKKFGDMDLRKAKTDKKDAVRIARYALEKSYSLVPYTSMEQKYEDLRFLARQYNQRMLTLKTNKVFLLNLLDETMPGITNILPLTTRTPETSLSVLFINRFKSYDRIKKMGKNRFLDAFEKIARKSRNRQTKTYGLAIYETALYNITTRGENEYTLGAQDQCLELVCESQKAADSIILKMQTLAETLPEYAVLRSMAGVGDRLGPLILAEIGDIRRFHSGKALNAYAGNDAPPYQSGTFESHNRHISKRGNAALRKYCFEVMQALKLTQPQDDPVYLFLLKKEQEGKPYNVAKMAGVNKFLRIYYARAMETLKQL

SEQ ID NO: 279972 - protein, 404 aa, unidentified
MELKPLYRCVAALDVHQAKLTVCVLQEDGDGELQVELREFGGFKRDRREMAEWVASFHPEEVVMESTGIYWKSPYAALERCGIQALVVNARHVKQVPGRKTDIGDAQWLAILARSGLLRGGFVPPANFRELRLTSRQMQKLTAILAAEKNRLHKVLTDAGIRLAVVVSDIHGQSARAMVKGLIGGECPQQVLTYASKRLKATEEELLDALDGELSAEHRFVLGELMDHIEDLERRIVRFGNHLLQGLAPQQGLLQALQTIPGLDERGAAMLLVEIGDDMGAFSSGEKLACWAGVCPGNHESAGKRKSGKKRKGNPYVRRILCEAANAAARTRSALAELFKSLLIRRGRKRAIFALAHKILKIVFVLISRGDYYRDATVDYEAMSVERNAPRWIRMLRKYGYISA

SEQ ID NO: 279973 - protein, 497 aa, unidentified
MLYGDAAGAVFPLGRFVPVTTVGHRALAVIDALMRTLSVINPNAAGIDVGSEKLFVSIAGEEPAVFGTVTDEVYRLRDFLKQEGVTTVAMEATGVYWLYAYGVLEAAGLQVIVVNGRYVRNLPGRKTDMSDCQWLATLHAHGLLRGGFVPPAEIRRLQDYQRLRADHISEAASQVQKMQQALERMNIKFHDVISDLTGVSGMKVIKAILAGERQPARLLELCDKQIQKKKSERVLESLHGVWAPEHLFALGQALSVWEFYQKLLAQCDRQIEAVLKDLAGPPPASPPSSPESGETKAKGPKPPGKNAPQIDDLHALLVQICSGRDATSLPGVADYHWLQLVAETGTDLSAWATEKHFVAWCGLAPGTKQSGKRKGSVRRQCNRAGRLFSAGARSLVQSVDKGLGGFVRRISRRKGGLVATKALARKLAGLYYRVLRHGLEYAERGLREYEQKYEQSQRRLLAKLAAKHGFQLVSQQALALKAAISQAASPNPSQSHA

SEQ ID NO: 279974 - protein, 342 aa, unidentified
MNLPIRIGMDTSKSVFQLHGVDENEVVVVRRQFRRAEMIRYFERLPPVLVAIESCGSSHHWARLLQSFGHEVKLIPPQYVKAYVKRGKNDAADAEALCEAVSRPSMRFVPVKSKEQQAACMLMTVRERLVSVKSQLSNAFRSYAAEFGIVGPAGRQNVTALIKRVLEDDSLPEMARDLFRLQAEEYAAVQARLAKIEAKLMKWHREDDVSRRIATIPGVGPIGSSMLSMKAPPPETFRSGRDFAAWLGLTPKDHSTGGRQRHGGITKAGDSVLRSTLIVGATALLRHIRKGRHKPTPWLASLLERKPPKLVAVALANKFARIAWRLMISGGVYNRPEAAMSI

SEQ ID NO: 279975 - protein, 340 aa, unidentified
MNVTTVGIDLAKNVFSVHGVGRDGKVLLRRSVGRADLLSMFAQMTPCLIGMEACSGAHHFARELRRLGHDARIMAPRFVAPYRKSGKNDGNDAEAICEAVGRPNMRFVAVKSVEQQAVLVLHRVRKEVSDQRTALINQLRGMLCEFGVVLPRGRYSFRHKLPPVLEDTGNGIPELARRLFQEVNERIGVLDAQILAYDREIEALARHSEAARRLMEMPGIGSVTATAIVASVADMKIFKSGREFAAWLGLVPRQYSTGGKVRLGRITKQGDVYLRTLLIHGTRAVLAALGTKDDRLSQWIRSLIERRGYRKAAVALAAKHARMIWAMLARGEPYRRASAA

SEQ ID NO: 279976 - protein, 393 aa, unidentified
MICVGIDVAKDKHDCFILSSEGEVLADVFTIQNNAGGFDTLLQTIRRCTRPEDKIKVGLEATGHYSYNILGFLIDKGLPTYVINPLHTNLYRKSLSLRKTKTDRVDARTIAAMLMSDVDLKSYTDTAYHNEELKSLTRYRFDKVRERAKLKQSVSRLVTILFPELEKLVPTLHMASVYALLSEFPGAKQVAGAHLTHLKAALYDASKGRYGRDMATTFRDAARCSVGSVMPAKSLELRHTIRLIHELDAEIEDIEAAIQSMMDEIQSPITTIPGMGVRMGAMILAEIGDFSRFDSPDKILAYAGISPSTYQSGQLSLSGAYSHMERRGSRYLRYALYNATKYVCLWNPTFAAYLAKKRAEGKHYNVALSHAVKKLVRLIYALEKSKRPYSTAA

SEQ ID NO: 279977 - protein, 427 aa, unidentified
MKYTQNEKILQVTDETLVIGVDVASEVHYARAFDFRGIELGSVFRVPNDAEGFHNLTLWINELKVKHGKKNVMVGMEPTGHYWFNIGHYFRTHGIKVVLVNPFHVNRSKELDDNNPTKNDRKDPKTIAMLVKDGRYMIPYIPEGVYSELRIAMESRWHLVKQLNTIRNRVKRWLSIYFPEFNTVFKSWEGKCALIALREFPTPAQVLSKGTEAIAERWKKDKIRAVGLKKTMQLVAAAKSSVGVQEGLWAAENDLMMLLEDYEIKMKQLDRLMKMVESLVNQIPGIHEVLKIKGVGLVTVAGFMAEVGDISRFDHPKQIQKLAGLNLRENSSGKHKGKTTITKRGRKRLRALLFLAMMPLVAKNAEFRTLHQHYISRANNPLKRKQSLILLGCKLIRIIYALLKKQIAYDPEKMMNDIQRANASLAA

SEQ ID NO: 279978 - protein, 349 aa, unidentified
MEHIGIDVHKRESQICIVAEGGELVEQRIRTEPERFAAVLGKRPRTRILIEASTDSEWVARCLEALGHEVVVADPNFAPMYATRTRKVKTDRRDARALAEACLLGAYRPAHRLSDPQRHVRGRLGVRDALVRTRTRYISLIRALLRQHGYRVPSGSAENFIQRVQRLPLPGRLRSVVAPLLAVMRPLNEQLAYSDERIEHLAAQDPRVPRLRSVPCVGPVTAAAFLAAVDDAQRFRHAHQLEAYLGLVPREYSSGETQRRGPITKAGHSRTRWLLIQAAVSILRRHPLEAEALRTWALRIAARRGKQVAVVALARRLAGILYALLRDGSVFEPQRVRPPRPTAPALVAI

SEQ ID NO: 279979 - protein, 371 aa, unidentified
MKSIIYIGMDVHKKTYSLCALLKETGEIIGETKIPADVSLIIKFIENAKKSVDSDDVQIKTGYEAGCLGYSLYWQLAEKGIECDILAPSTMHRSAKNKVVKNDRRDAKNIAANLANGTYKSVYVPTDEDVEIKEYIRMMHDFKIELKKVKQHINAFLLRFGHQYPGKSKWVPAHIKWFKELELSDMHREILDEYLSQLEILSEKIERFKHRLEELSQKETYNEKIGQLRCIKGIDTTAAMTMHAETSDFDRFPTANAFASYCGLTPGEDSSGESYHRLSITKQGNSMIRTTLIEAAQVLVRGTIGKKGKKVKSKQKNQDVKVIDYADKAVIRLQKKYHRMIFRGVKRNIAITAVARELACFVWGIETGHIS

SEQ ID NO: 279980 - protein, 348 aa, unidentified
MIIIGVDFHPEFQQMASVDTDTGEFQEKRLAHREDAEKFYRALAGQKVRVGMEASGHGRWFERLLSELHFELWIGDAAKIRTKRVRKQKTDRQDAQLILQLMLEDRFPKIWVPSGENRDLRQLLWHRHRTVQARTRIMSQLQAVALNEGLRCKKRLWRKHGREQLESFRLAPWASRRRRDLLELLDRLNPMTAELSQAIEQEAEKFPEARRLRTHPGVGALTACAFVLIIGKADRFECGKQVASYLGLVPLEDSSGNRRRLGHITKQGSSMLRFLLVEAAQVTARSLPEWRSKYFHLMMRRGRKIAKVAMARRLAIRLYWMWRKGWDYEQVKKFGSHAGQLGTGRGVQ

SEQ ID NO: 279981 - protein, 412 aa, unidentified
MEIIHACCCGLDVHARTVVACLIKHGRRQTRTFSTMTDELLRLSDWLVAEGCTHAAIESTGVYWKPVFNILEGAVEVVLVNAYHVKAVPGRKTDVKDCEWLADLLRHGLLRASFIPPPEIRELRELVRYRQTLIKEQVAVSNRVQKLVESGNIKLAQVASDALGLSGRAMLRALAEGETDAEKLAGMARGRLKAKKAELQRALEGRLTPAQRFVLGELLQRYEELEAAITRASAQIAQEVAQSSDPFVPEALKLLQTIPGVGERLAETIISEVGVEMDRFATDAHLASWAGMCPGNKESAGKRKSGKTTKGSVYLRAALVQAAWAASHTKQTYLAAQYRRLAKRMSKKKALVAVGHSLLVIVYHVLKNRASYQELGGDYFDRQHVEAQRARLIRKLETLGLKVTVEELPQAA

SEQ ID NO: 279982 - protein, 354 aa, unidentified
MVTITNDPAPNIVVGVDSHKETHQVAVLDRTGALMGNRSFAVTLHGYRELEAWLATLGTVDRVGMECTGSFAAGLTRYFRERHVDVFEVTTTHRATRARRGKDDAIDAEMAARKVLSGEARARAKDTTGDIESIRLLKLSRESAIKARTVALLQIRDVLITAPAELREWIESAGGTRHRVNRAGALRPDVERLGEPLQAAKFTLRQLSRRVKFLDEEITNLDLQLAELVKRCAPNLLQCRGIGTQHAAQLLITAGQNLERLHSDGAFARLCGVAPVPVSSGKTNRMRLHRGGDRQANRTLHLIAVSRLRIDPRTQIYMERRRKDGLSKMDVLRCLKRFIAREVYNALKLDLLHC

SEQ ID NO: 279983 - protein, 352 aa, unidentified
MNTSTIAWLGLDAHSKNCVLGQLDDQGQEIKWWRFATQPQQLIQHVQSIPATDKRLMLEESNLARWISQLLKPHVQQLIVCDARRNRLISHDHHKHDKRDAFALARLLRLNEFKPVWQPIEPQRVLFKRIAKSYENAVQRQTRLKLQLKSLFQHWGLFPAGATVFSKPGRNDWLKQLPYDPLRSQARLLYELLDQALAGQNQFRRLMCQTGQQFPEIQRLRTTPGVGLVGAHLFVAYVQDPKRFPKFGRLSRYCRLGIRDRTSDDKPLGYQQLDREGIGTLKAISYRAYLQAAKRRTGPVWDFYQLSLRHTGSTTHARLNTQRKILLTLWTLWLTGREFDPDQFFRSQPLDA

SEQ ID NO: 279984 - protein, 361 aa, unidentified
MKKPALHLIAEVPCRQPRVAMTIGIDLGDVWSHYCTLNENGEVVDRGRFRTTPKAIEKWLTAVPRARIAMEAGTHSIWISEQLQELGHEVIVANVRELRAISHSDRKSDQVDAEKLARYARLDPEILRPIAHRTVEQQEALTLIRARYLMVRLRTAAVNAVRGLTKSCGHRMPASSTRCFAKRGLAVMPPGLAQALGPVLEEIAAMTIKIKLYDRQIQQLSQTDYPETQALRKVPGVGDLTALTFVLTLGSKERFKQSRDVGCYLGLRPRRSQSGDRDPQLGITKAGNIYLRSLLIECAGHILRPQGKDSSLRQWGFHLAARGGKQARNKAVVAVARKLAVLLHRIWVTQEQYMPFYAAAA

SEQ ID NO: 279985 - protein, 426 aa, unidentified
MRFFGLDVHLDFCEVAVVQDGKVSRVGRVDSTPEAIREFAAGLNGSDQVVLESSCGAMMIARLLGESNVGRVLVCNAAETRAISHARVKSDRFDAAMLAKLLSAGMLKAVWVPDEATSALRRRVARRAGLVRARTRVKNEVHAVLARCLLGRPPASDLFGKQGRVWLAGQELPVEEAETVASCLRHIDFLGGEITMLDREIARQALAFPGFGRLLTIPGVDVGTAAAVVAAVGDVTRFPSAGQLVAYLGLDPKVRQSGSEPARYGHISKRGDPQARSMLVEAAWTSIRSPGPLRAFGERVRARRGAQIAAVAVARKLVVLCWNLLTKDQDYAFARPSLTRQKTRRLELAAGAPQLPRGRKKGAPVSGASSSQRAAERELQHQAELAYRRLIADWRTTAPKGGAGATPGRASNKPTRGKAARQATSP

SEQ ID NO: 279986 - protein, 479 aa, unidentified
MENSVVMRKPAEILDADHELVIERVCAIDVAKASGMLCTRLPQGAAAGRRVSRVWEVAATTRAITELADHLVAVGIEQVTVESTSDYWRIWFYLLEARGLDVQLVNARDVKNLPGRPKTDKLDAVWLAKLTEKGLLRPSFVPPAGIRQLRDYTRLRVDLTRERTRHWQRLEKLLEDALIKVSSVASKLDTRSVRDMLEALIAGDRDPRRLAELARGRMKTKRGALVEALSGRFDKHHAEIARILLDQIDGLSAAIDQLTTRAELLLQALLATRAGDQRAGGAVHAPGSGDPRQAPTEAPTEASVPAGGTIAHRGGNGLSASQRLDEIAGIGPLAAQVIIAEIGLEMSRFPTAGHLVSWAKLCPRTIQSGATRRSGVAGKGNPYLKGVLGEAAAAAAKTNTFLGERYRRLVKRRGKLKALVAVARSILVIVWHLLSDPTARFYDLGPDYHTRRIDTTRKIRNHVSGLTALGFRVTLEPTA

SEQ ID NO: 279987 - protein, 346 aa, unidentified
MEHYVGLDVSLKLTSICIVDRTGKVEREGVVASDPEAIATFIKLHAPHVVRIGLETGATSTWLWTELNKIGLPVICIDARHAKAVLKMQINKSDRNDAAGIARIMQCGWYKEVCVKDLDSHATKALLVSRALLVKIKRDIENQIRGLLKNLGLVIGRAKMNMFAMRAAQLAEDRSELFAAVDPLLKAREAVEQQIVDLDRKVLRLARNNAQVRRFMTAPGIGPVTALCFLATIDDPARFKRSRSVGAYVGLTTRRYASGEIDWTGRISKCGDKMLRSYLYEAANVLLTRVAKWSALKAWGIRLAKRSGLRKAKVAVARKLAVILHRMWIDGTEFKWSSKDAADQPV

SEQ ID NO: 279988 - protein, 404 aa, unidentified
MWYVGIDWANDHHDALLIDEQGRQVGSLRVDHSPQGMSRLNTFLEQIVGTESKEQMACIIETTHGLLIAHLLEAGWPVYPVNPRTVDRRRSASGAKTDTIDAYLLAKTGRADLTDLHRLTPDSEKIAELKLLTRDQDALIHMQTRLVNQLTACLKAYYPVALELFTKLQQKSTLRFLQTYPTPQAAMAAAVEQIQEVLRQARHSNPTPVAATIFERLHQPHLQADAVTTRTKSRLMLVLASQLLPLIEQIAQYDKEIATLFLTHEDHELFASLPRAGKRLAPRLLAEIGDDRTRYQDASSLQALGGTSPVLFQSGMYSKAHRRMACIKPLRNVLHQFAWQTTQSEPWASDYYQRKRAEGKSHSVAVRALANVWVRIIFAMWLHHQCYETATFEHAQQQHARPAA

SEQ ID NO: 279989 - protein, 342 aa, unidentified
MQISTIGLDIAKNVFQVHGIDAAEKVVVRKRLRRRQVLEFFKALPPCLIGMEACATAHYWARELTKLGHEVRLMPAKDVKAYVKRNKNDAADAEAICEAVRRPTMRFVRIKSAEQQGQLMQHRTRDVLIRQRTQIINALRAHLAELGLVVAQGNAGVNELRAIVTDEQDTRLPIDARASVIVLAAQLEALESVIGAIEKRIKMQHRSSEASQRVEAIPGIGVIGATAIVATVADPTIFRSGRDFAAWIGLVPRQDSTGGKQKLGPISKQGDRYLRRILVVGAIAVLRRAQENPGKYPWLTQLLARRPFKVVAVALANKMARMAWALLAHGGTYRAPELAETA

SEQ ID NO: 279990 - protein, 438 aa, unidentified
MLKINYMSTLFVGIDVSSKTNSVYAMDFEENKYLSASFGNNQPGADELVNRIAACMQKHRNLDTLLIVLESTSVYSVHISNFLTSSEVLMPYKPYVFCVNPKATANYRKSYIGMEKTDPTDAYLIADFGRVGRTKKLEPWRGGQFISLKRLARHRMHLSACITREKTYMVSNLYLKFSELQLLEGDDQPFGNLYGATSSAVLTEFLSPQEIIDMPEEDLLTFLAQKSRNRISDLSKTSELLRKAARDSYRLDKCMYEPLNISLASSFNCIQAYQKEIRLIEQAIDKCIKGMNTNALIILQSIPGIGPVWTSGILSEIGDITAFHSSDALAKYAGLYWPKGDSGDFTSEDNQMSKAGNPYLRYYLGEAANSVRKHIPEYADFYARKYAEVTKHQHKRALALTSRKFVRLVFGLLVKNQLYTGEKLDTEYNIESNRHSVF

SEQ ID NO: 279991 - protein, 358 aa, unidentified
MAVNEGTRRIVGGVDTHKDLHVAAVVDEQDRVIETRSFATTRQGYRQMLAWMRAFGDLQHIGVESTGSYGAGLLRFMQQAGIAVLEVTTPDKQDRRRRGKNDDLDAQNAAHAAFAGQRTVTPRSRDGMIESLRVLMACRKTAVSARRVALQMIHNTIVCAPDGLRDQLRSLTRMQLVRTPASWRPDLTAYRDLESAYRIGLKSLARRYLELHDEIADLDVMIAAIVDELAPNLVACNSIGHIGAAQLLLTAGDNPERLRSEASFASLCGVSPVPASSGKTVRHRLNRGGDRAANSALHIIAIGRLRTDQRTKDYVARRITEGHSKLDAIRALKRYLAREVFTLITQRRREINATRIAA

SEQ ID NO: 279992 - protein, 422 aa, unidentified
MDEEVYYERCAGIDVHKKLLVVCLRIGRKTEVREFGTLTHEIREMVAWLKANGCQMAAMESTGSYWKPLYNIFEQEGLPAMVCNAYHIKNVPGRKTDVNDAQWIARCLSQGLLNPSFVPDREQRELRDMIRFRKSQIEERARNINRLQKFLEGANIKLGSWLSDVEGKSATALLELVIGKDDFTVDDVAERMQKNMKSTADELFQSLDGYMTPTQRNFFAHIMMIIRQQTGQIERTDEMIQLSLSENYKAAVKALDELPGIGRVSAEQILAETGVDMGRFRNQHSLSNWAGVAPGNNESAGKRKSGKTTPGNKALKSTLVQCAKNAKKNKNSFFSAQYGRLVSHRGKNRATMAVAHSMLIAIYFVLCGCQFKDLGADYYTQFNREKKINSHIKQLSKLGVIIPDAIMQEIRTRPPDSQARSA

SEQ ID NO: 279993 - protein, 418 aa, unidentified
MFKILKNNCCGLDVHKTWIYACIGITDSNKRTEYKQARFSSFTKGLNELCDWLAKYNCNDVCMESTGKYWIPVFNILEKNNIWVTLSHPKYTKPQKGNKTDRKDAKWICDLYMCGMVKPSFIPPADIRELRDLVRYRFKLTCMITGEKNRAHNSLTVSNLKLDDVFSDVFGKSSRSITEQILQHPGETFDVAPFVDGRCKTPIEEIQAAVDGAISTEQAVKLKQCLTHIDELEMHKAEIEQEIFRLSDKYESVLNLIRTVPGFDKNPLTAIQVLSEIGGDMSVFPTAKNLVSWAGCCPRNDQSNHKIKSTRISRAGSYFKPVLVQVANALIKSRKHPEFTTRYRRIKARRGHKKAIIAICRMILTAIWHILTDLKPYTPEGFLESRPVNKSKVLTTSQALNLMKQRGYIIKDDVVSVT

SEQ ID NO: 279994 - protein, 326 aa, unidentified
MAFIELPILGIDISKAKFDVALLVYGKVKKSRVFENNLVGFKALSLWLVKQDITHLQACMEATGTYGDELATYLYDQGFEVSVVNPAQIKSFSGAQLNRAKTDKADAKLIAQFCASMHPTAWMPPPVHVRELQALVQRLAALLQMERQEQNRFGTAAPLIQPSIKAVLVTIKAEIKAVERMIRDHINRHPDLKDQSKLLDSIPGIGIATIARLLAFVGDVHRFNDAKALAAFVGLNPTVHQSGSSVRGKSRLSKKGNATIRKALYMPAVVARRYNPIITEFAQRLKKAGKSNMLIIGAVMRKLLHIIYGVLKSGKPFDANYAVKNA

SEQ ID NO: 279995 - protein, 425 aa, unidentified
MNYKQNEKINQVKESTLVVGIDIGSTTQYARAFDWRGIELGKVFPFSNSREGFESFKAWMQHLQDKYKKLDAIVGIEPTGHYWFDLGAYLEDEGILLVMVNPYAVKQTKELDDNSQSKNDRKDPKVIAKLVTEGRYSAPYTPDGVYADLRIMVANRKRLIREMTQIKNRFARWFAIYFPEYTDVFGDYEAQSSMLLLKKVCTPEAIVELGAEKINQIWRDAKLRAVGMKRATTLCETAKRSIGLKKGSSAARYEMKLLLEDYEYKKAQLDAVIEEIEKLCRKIPESEQMLAIKGIGVITVAGFLAEVGDVRRFESPRQIQKLAGLSLRENSSGKHKGQTSISKRGRSKLRAVLFNAAIPLIATNPEFKSLHEYYTTRANNPLKKKQSVIAISCKLIRVFYAILANGVTYDAQKMLSDIHRQPQAA

SEQ ID NO: 279996 - protein, 450 aa, unidentified
MHETSSFSADITKKRDRAAGIDIGASEHWVCVDPTLTTSPIRRFEAFTQDLIALVSWLSSLGVTSVAMEATGVYWRELYTRLVEAGIETMLVDPRRTKNPRGRKTDMQDCRWIWQLHACGLLDGAYVPAPEVQELRTIMRLRSAHVERCGIALKELQRALSLMNLKLQHVLSDFGGTTGQRIIIDILKGERDPAVLAKHRDYRCKHDEKTLAKALTGTWRKEHLFLLKQAQADYQHHTHVIAECDQEIKTMLDRLPQRSDDDGDDLIPKRPTGKHDYGFDAQQAAYRVTGIDLAGIDGIGPNTALSFIGEIGFTLDAWPTAKAFCSWLGVCPNPKRSGGKHLGAMPTSANRAAQILKNAAMGLKGTKNNPLSKYYARMALRLDHASATKAVAHKMARIIYALFKNRTAYDRTKLDQPTSGKAIERMITKLTREAQKLGYDLVQAKSQVAV

SEQ ID NO: 279997 - protein, 312 aa, unidentified
MPMHECPLFLGVDVAKLSLAIQFPDQLWSTANTAQGHAAFLARLRDHGSVHVICEATGGYERALVLALHQAGVAVSVINPRQVRDFARACGRLAKTDAIDASVLRDYGAKLRPAPDAPPLEGEAEFAELVRARQEVVALLTDETNRREHTRLPALVKLSHARTRQLEKQLAQLDALLDAHVAAHAELTAKAERLQQVAGVGRVSALTVLALLPELGRIGDAQASALVGVAPLNHDSGQFRGQRHIHGGRAALRRVLYMAALAATRHNAILKAFYLRLREKGKPAKVAITAVMRKLTVLLNRLLKNPQFTLVS

SEQ ID NO: 279998 - protein, 388 aa, unidentified
MADVKPYDLSGPLVSFDHTVTLTAVVELSAKSWLVAATVPGLERRPLQKLPADEKGVLRLIDRWRAESLKAGKMVRRTVVAFEAGRDGFWLARWLRRHGVEAYVIHPSSVPVSREARRAKTDRLDTSMLMRALLGWLRGEPDCCRMVAIPAIADEDSRRPGRERQSLIRDRVRVVNRIKATMAWLGIRGFKAGLNNAAQRLGELRTPEGEPIPPNTHAELLRNLQRLRLLKEQIAEIEEERIQRLSRPTHNGTDAMVQLLAKVRGIGIETAEMLVCEVLCRGLRDRRAVARYAGLTGTPDESGRRRREKGLPRAGNARVRVGMIQLAWRMLQFQKESAVVQWYQQRVGNVNGSGKKTFVVALARKLLLALWQYAMTGEIPAGFVLRAA

SEQ ID NO: 279999 - protein, 347 aa, unidentified
MKFYNKQHKYYCGIDLHAKKMYVCVINQTGKIIFHQNMDTDPEILFKVILPYLDDIAIAVECIFSWYWIADVCKDHHIPFVLGHALYLKAIHGGKTKNDKIDSRKIAALLRGGNFPMAYVYPKKLRSTRDLLRRRMHLMHKRSELLAHIVNTNTQYNLPAFNKKIAYKTNRIGLTDRFTDPSVKKSIQINLSLIDTYDKLLQEVELYIVKHAKAHDANKFYRLRSVPGIGKILALVFIYEINDIRRFKRVQNFSSYARLIRPTKESNGKYAGKANKKIGNHHLKWAISEAVILMLRESDEAKKYLARLENKHPKGKALGIFSHKLGRAIYFMLKNNQAFDMNKFIQS

SEQ ID NO: 280000 - protein, 412 aa, unidentified
MAKAQPVVRWTGRGIGLDLHRDLCEIAICEEGVTRSAGRVAMTPEGIESLAESLLGTDRVVMEVSSGAWEVARRLEGRCQRVVVVSPDDTGIAHARAKTDKLDARALASLLWKGELEAVWTPDERVRVLRRRLHRREQLVRARTRAKNEVHAVLMRTLQGKPPCSDMFGVKGRRWLDQLQQRLAVEETETLESALRQIDFLEAEIEQVERTVAQQMLDWPQAKRLLTVPGVNVIAAASFLAAVGDITRFRDSRKLVAYLGLDPRVRQSGDQPARSGRISKRGSAQARWGLVEAAWSVVAQPGPLRAFYERTRAKRGHGKAIVAAARQLAVLFWCLLTRGEDYAHQQPSLTAQKLRRLELAASAPVRNGKPSGVWATRARMRQAEKQLAEQAQASYERTVRDRQATRPKRARA

SEQ ID NO: 280001 - protein, 375 aa, unidentified
MTKIIRIGIDTSKSVFVLHGVDAAEQPVLRKKLRRSQVLEFFAKLEPTKIGLEACGAAHYWARELTALGHEVVLLPPQYVRPYVKRGKNDAADAEAICEAMSRPTMRFVPVKTVEQQAALMLAGTRDALIRRRTQLTNAIRGYAAEFGLTAAKGLDKIEPLLARIAAAAELPRLAQELFAGYGKEYAQLKVQIQKIEAKLMAWHKDNELSRRLVEVPSIGPIGASLMAMKVTDPHAFRCGRNFSAWIGLTPKDHSTAGKTRLGVITRAGDESLRSILVVGATSVIKQVRRGKGHPSPWLVELVGRKPPKLAAVALANKTARIAWKLMVSGERYNPAAAARAGRGSPLTRGCAPRPALAARIRSRGAALPAAGTEA

SEQ ID NO: 280002 - protein, 413 aa, unidentified
MRVMVERCCGLDVHQETVVACLLIGAPGVRPSKEVRTFRTMTRDLEALRDWLKAAEVTHVGMESTGVYWRPVYAVLEGHFELIVGNARHIRNVPGRKTDVKDAEWIADLVRHGLIAKSFVPARPLRELRELLRYRRKLVASQSAERNRLLKLLETANIKLASVASDVFGVSGRAMLKALSEGNVSAEEMAGLAKGQLRRKHDDLVLALEGRVEEHHRFLLAIQMHRLEAAEHDIEVLDSRIAERLEPYRTQHALLMQIPGVDWVVAAVLIAEIGIDMNVFLSANHLVSWAGVCPGNHESAGKKKSGHARKGNVHLRTILVGAATSASRTKGSYLKDKYHRLKARRGALRAALAIAHKILVAAYHMLAKGLPYRDLGEAYLDHLDQTRTAANLKRRLERLGYTVVLQLKEAATA

SEQ ID NO: 280003 - protein, 325 aa, unidentified
MSESIIGIDISKAEVMIALLKDGKAIKCKFSNNNSGFKKLESWLEKNNAGKVKACMEATGSYGFKIANFLYAKNHEVYVINPLSIHAFAKSRFSRNKTDEADAMIIAEYISKMPAIPYKPSDDSNHELRYLYRCSDDLKLQLVQANNHLEDKIILPKAVVKTWEKLVGNIEIQIKNIEMAIKSLIKTNLDLKQHYENLQTIPGISKTTAIAILAETPDISAFANARQFAAFAGLTPKQRQSGSSIKGKTRLSKLGSAKLRKAIFFPAIVAKNHNPIIKAFCLNLKKRSKPNMVIVGAAMRKLMHIIFAILKNKTVFNPNLVSTIK

SEQ ID NO: 280004 - protein, 503 aa, unidentified
MICCLSAGPRAIEYWCREPDQQTATDTQGHLKLLLRAREVESYRNWVSGQPISTWGCGMLPIIYKQVAGLDVHKKTVVATRMRVTTEDRDAWETRTFGTTTPDLLELHDWLYEWPCSHVALESTGDYWKPVYNVLEGTFEIVVVNAKHVKHVPGRKTDVKDSEWLAELMMHGLLKASFVPAKPQRALRMLTRYRTTLVQERARVVNRVHKLLEEANIKLGSVATNIQGVSARAMLAEIAAGQTDATQLADLARGRMRSKIPELEKALTGLVQPHHRFLLSRQLAHIDFLDEQVEELSVEIARQVEAMSNPSTPMGSEGNAETGAEPPPTEETERPLTWNEAVALLDTIPGVDQRTAEVMLAEMGLDMSQFPTAKHLATWAGLAPGNHQSGGKRYSGRTTKGNRPLCSIMVQAGWAAVRTRDTFLKARYHRLAARRGKKRAIVAIAHSMLVSAWHMLTYRQPYHELGGDYFDQRQKETKVNYLVRRLEKLTGGSVVLEFQPTAA

SEQ ID NO: 280005 - protein, 265 aa, unidentified
MIAETTIIGIDVSRDWLDGFCLPGQMRFRHSNIADGHIALVAMIQQLSGPFKVGFEATGGHEWVVWTKLAAEGIVAVQLPPAQIKAFALSRGTRAKTDRIDAELIARFMAFRPEVGRELPDENLRILRTLTTRRGQIVDMRKRLRAQVGARKKQGVSADVETLDDDLEDVLQTQIETLERRIETIIAQVEPFSTKANLLRSIPGIGPVSAAMLIAELPELGRMTSGEAAAMTGLAPVPHDSGAMRGRRTIAATCAVSGCARRNLS

SEQ ID NO: 280006 - protein, 373 aa, unidentified
MPKYSTAFGMDVHLRSTTVCALDADTGEAVTRRFPGNPWGEIAGWMDGFPGPSLAAYESGYLGFAPQRELAGLGVECVVAAVSKIPRSAADSASKNDRNDAARMAKAILAHDISPVWVPSPEVEGIRDLAGAYDGATARLATAKQRLLAFLAKRGLVYGGTTPAGNPRKYWTYDFLRWLDKVRPEDDGGVRTLAALRNEVEAAAEARADLLSEYRAAVDASPIAAEVAALQSIKGCAFALAAAFSAEVGDFTRFRSGRQVTAYFGLAPSQRSSGDSVRLGGISGAGNALVRKLAVEGSWCYAAARHQPKLMPRDTGVPLEIRMHGRKGSERLLRRREEMLARGMPAAKANAATAAELVRWLWALGMMCREGAE

SEQ ID NO: 280007 - protein, 423 aa, unidentified
MRAIGIDVHRDFCEVAISEGGELRSAGRVPSTPHDLELLATSLAADDEIALEATGNALAIARILEPHVARVVVASAKELHAISGAKAKTDRRDARTLAKLLSAGLLEGTWLPGEDLRALRRRLSHRAQLVRARSRLKSEVHAALLRNLVGAPSATDLIGAAGRRWLAHLELPADERETLASCLRTMAFLDGEIAGFEQAIARFALSSPEIRRLVTIPGVGLLCAATFVAVVGDVRRFPSARRLVGYLGLDPRVRQSGSTAARTGHISKEGPSSARAALCEAAHAALRSPGPLRAFGGRIAARRGRQVAVVAVARKLAVIAWHLLRSGEDYAYANPAQVRLKWRRIELAAGAPSQKGRRTGVSLESHREREVALAAERAYRRLVADRQATGSKTGTGAAVGRASSRVLEGPSSAADLSAPASAL

SEQ ID NO: 280008 - protein, 420 aa, unidentified
MTNANIIPADAVLVAIDIAKVRNEVLIEDPRHKRRRRLQVLNNRAEHDRLIEVLQTYGRSVVCGFEATGNYHRPIAWRLAEAGFEVRLVSSLALARTREALHNSWDKNDPKDAQVMLHMLKIQATQFYHDPLRAGINDAQELSKTHEAIARAKTEIQHRILTHYLPLYFPEIERFRGNSRSDWFFAFLDAFPTPASIVVLSKEEFVKAAWGVVGRKVSKTQILMDIYETASTSIGLPLPLEAPAVRMFRMVVAEARSLIRQRNEIEAQADELLRHSQDYQLLRQIPGVGPIIALTIIAEAGDLRRFHHHRQFLKFCGLDLSTQQSGQYRGQTRLSKFGNARLRRALWIAGQVAIRQRENGFRHKFERYIAKDRDNPDLRRKALTAITAKMARVVHAVIKSGSDYRPFVEGRVPGGRTSLS

SEQ ID NO: 280009 - protein, 355 aa, unidentified
MTSTKYIGMDVHKESISSAVMNASGKIVMECVIETKASMILQLVDGLRGDLHVTFEEGTWASWLYDLLKPHVTKLVVCDPRRNALLKDGNKSDRIDARKLAELLYLNKLKPVYHGEHGMRTLKELVRSYLTITKDLVRVMTRVKAIYRSWGIPCTGKQVYGPRHRGEWLAKISELGVRRRAEFYYQQLDALRSLRQEVRRDLLAESKKHQAWKRLCQIPSLGPIRAAVLLGILQTPHRFRTKRPLWKYSGFAIETHSSADHRSVDGQLQRSKKQISVRGLNQNCNHDLKNLFKGAAIVASSKPGPFQEFYAALLAKGMRPEMARLTLARKIATIALIVWKKGVCFDAQYLKPQTA

SEQ ID NO: 280010 - protein, 349 aa, unidentified
MLADEVDYVIGVDTHRDQHTLAVVVASTGAVVAQSSVRADRRGYLAALAAAGRYAGGVRVWAVEGSGHYGAGLTRFLSDRGEAVVEAGRSPRTERRLRGKNDPLDAVRAARSVLAAETMATPRAGERQEALRVLLLARRSAVDVRRLALVQLRSVIVTAPEGVREELRHLPVGQLLRRCSRFRRSSSRTPDELAIVLVLRALARRIEAATGEASLLEREILGHVRALVPELLNEPGVGPIVAAQLIVTWSHRGRVTSEAAFARLAGVAPLPASSGLTTRHRLSRGGDRQLNRALHTVILHRRQHDPTTRDYIARRVAEGKSTRDATRILKRYLARHLYRVMQNASPAMT

SEQ ID NO: 280011 - protein, 315 aa, unidentified
MNEAADVIVGIDVAKAALDVAVRPSGEARHLANAAAGIGELVGWMQALSPEVIVVEATGGYEAPLVAELGIAHLPVAVVNPRQVRDFARATGRLAKTDRLDAQALAHFGQAMRPTPRPLPDEDTQALAALVERRRQVVAMRTAEENRLGATRVAPVHARIQAHLAWLEADLGEIDGDLQQQLRASPLWREQDDLLQSVPGIGPIIALTLLAQLPELGRLSHGQIAALVGVAPLNRDSGTLRGRRAVWGGRQAVRTALYMGTLRATRCNPAIRLFYDRLLAAGKAKKVALVACMHKLLTILNAMRKHQTPWQAQAA

SEQ ID NO: 280012 - protein, 340 aa, unidentified
MDEYAGRQYVGIDLHRRRSVIVRMTREGERIGPVVRVDSDPFELAQQVALWGENPEVVLEATYGWYWAADVLAEAGATVHLAHPLGVKGFTYRRVKNDERDAADLADLLRMGRLPEAWVAPPAARALREVVRHRCKMVSLRSGLKAQVHAVLAKQGVRVAVSDLFGAAGRAQLNQMQLDPPFAARVLSLQRLIEAYTFEIEVATKRLTAQLTHHPGYTAIQALPGVGPILAAVFVAEIGDVTRFARPQQLCSWAGMTPRHRESDTTVHRGRITKQGNTLVRWAAVEAVQRVHRGPIAHTRARISARRGNNIGKVAAARELLTLVFYGLRDGTIRCLAPTA

SEQ ID NO: 280013 - protein, 338 aa, unidentified
MKLYGGIDLHSSNNVIALLDEEDQSIYRKRLPNNLEYILGQLSPYREAIEGLVVESTYNWYWLVDGLMEAGYRLHLANTAEIVQYEGLKYSDDDTDACWLAKLLRLGLLPEGYIYPREERAVRDLMRRRSHLVHQRTSNLLSVQNLMARNLGVGLSGNRVKRLSFEEIDLLLPDEYLSLAVKSNVAVMGCLEEQIVQLERSAKARIKIKPAFKLLLNVNGIGDILGLTIMLETGDIARFPKVGNYASYCRCVGSERISNGKRKGRGNTKNGNKYLAWAYVEAANFAVRYHPLIKRYYQRKRARSNGVVAIKTVAHKLARACYYILRDQVEFDVRKAFS

SEQ ID NO: 280014 - protein, 384 aa, unidentified
MSGSFDETVVVGESRHRLPRGRTAPVHPAVSSTGAQHRDRCPSHVRPNSRTISIALTRKVTVTRIICGVDVASQSLEARIGQHGPAATFANNPQGIHALAAFCHAHQAELVAMEATGGYEQQAFAQLSQQNLPVAIVNPRAVRQFAQSMGSLEKTDAIDAAMIAWYAETKNSQPLCLAPHTQLELRARVTRLRQLTELRTAQLNQQRLVTNRAVADGFRQMLAFLAAQMEELEQTVAQLIAADPLWRELDQAFRTIKGVADRTVARIMAEMPEIGTLSNKTISKLAGVAPLANDSGKHQGKRSVRGGRAAVREILFIVASVVGRYEPDFIAFQQRLRAAGKPPKVVRIALAHKLLVRLNAKAREVRQRVTVVQLPPLALAAGSL

SEQ ID NO: 280015 - protein, 339 aa, unidentified
MKLYGGIDLHSNSSYIVLMDSGGTVVQRSRVSNEIGLVLRSLAPYREQIDSLVVESTYNWYWLVDGLKAAGYAVKLANPSAMQQYQGLKYSDDRSDARWLAEMLRLGIVPTGYIYPQAQRPLRDLLRQRSLLVRQGTGQLLHTGNILCRNQGRKSSRQPIRQMTVADAQQLFPDRERTLAVESSLRVIEVLDEQIASIEKQVLHRIKPEAGFQKLQTVYGIGPILAMTIWLETGDIGRFGQVGDYASYCRCVASTRISNAKKKGENNSHNGNPYLAWAYVEAATYAARFYRQAARFVERKTAQVNRTLAIKALAHKLARACYYVLRDGVVFEPTRLLGS

SEQ ID NO: 280016 - protein, 339 aa, unidentified
MPLYSGIDLHSNNLTAAIMNEAAKRILRKRLVNDPEVVLATLEPYRTELAGIVVESTYNWYWLVDALMEHGYRVHLANPSAIQQYSGLKYLDDNHDAFWLANLLRLGTLKEGYIYPKEDRPLRDLLRKRFHLVKLRTSLIISLKNILSRNFGLQMESSRIKNESLDTFISDLPGEDNVILVIRTSKASIDFLTVQIKEVESAVLKQAKNKPFYLKLLELPGVGKILALTIQLETGPIDRFQKVGNYASYCRKVESRWLSNEKTKGRGNAKNGNKYLAWAFSEAAEYARRFDSASRTFYNHKLSQGNAAMAHNALAHKLARAAYYMMRDNAPFEEARMFA

SEQ ID NO: 280017 - protein, 369 aa, unidentified
MGDRITYVGLDVHKDGIVVAVAEGGLRGEVRDYGRIANTPAALRRLAHKLGQEGVALRFCYEAGPCGYGIQRQLSASGHDCVVVAPSLIPKRAGDRVKTDRRDAASLARLHRAGELMAVWVPDAGHEAIRDLVRARLDAVHALRRARQQLSGFLLRQGCHYGRAAWTKLHRRWLAGLKFEQAVHHIVLEDYIQAVESAAARRDRLTAQIEAMLPDWTLAPVVAALQTMRGMALVNAATLIAELGDLSRFANPRQLMAYLGLVPSEHSSGASVRRGGLTKAGNSAARRLLIEASWTYRFPARVSRELLLRQEEQPKPIREIAWKAQLRLCARYRKLARSGKPANVVTAAIARELAGFIWAIARRVPPATN

SEQ ID NO: 280018 - protein, 366 aa, unidentified
MEKYKFVGLDVHKATIAVAVAEANGGEVRYVGEIANTPEAVVKLVKQLKKEGATASFCYEAGPCGYVLYRQLKGMGLECLVVAPSLIPTKSGDRVKTDRRDSLNLARLYRAGELTAVWVPDGAQEALRDLTRAREDMKHAEKQIKQRLLAFLLRHGKSYGGETNWTKMHFRWFETVKFEHPVQQIVFQEYVETVKAMVKRVEGFDGQIGTSAAESVFWPVIQALMALRGVSLLAATIVVAEIGDLRRFASAPQLMAYLGVVPSEYSSGATKTRGAITKTGNGHVRRILVEAAWTYRHPARKTEYLQRRAKHAPDNIQEIAWDAQKRLCGRYRLLEAKGKLKQKVCTAIARELTGFIWAIGQALPQQ

SEQ ID NO: 280019 - protein, 355 aa, unidentified
MDSKKYIGMDVHKESISIAVMNGVGKIVMECVIETKASMILQFVDGLRGDLQVTFEEGTSAAWLYDLLKPHVTKLVVCDPRKNASMKEGNKSDKIDARRLAELLRLNHLNPVYHGEHGLRSLKELVRSYLTITKDLGRVMTRVKAIYRSWAIPCTGKQVYAPRHRAEWLGKIGEPGVRRRAEFYYQQLDALRTVRLEVRRELLAESKKHQTWKRLCQIPSIGPIRAAVLLGILQTPHRFRTKRQLWTYSGFGIETHSSADHRNVDGQLRRAKKPISIRGLNRNCNHDLKNLFKGAAIVASSKPGPFQEFYAALLTKGIRPEMARLTLARKIATIVLIVWKRGASFDAQHLKPQTA

SEQ ID NO: 280020 - protein, 328 aa, unidentified
MIMLGIDVSKTKIDCCIFPQGLTGKRKNKIFTNTESGFGSLLKWLITLKIEPDQVTAIMEATSVYHENLGYYLYDAGVKVCVANPSRVRAFAKGMSMLNKTDKADSEALSRYGYTAKLIIWQPEPENVRLLKALLGRRDVYLGSLLQEKNRLEKAQSTHTSVVVIKLLEENIEYLNQQLEHIDKLINNHIDQNPTLKQDLKLLQTIPSIGERSGLLLLGLFHSHKFEKASQAAAYVGLVPVHQLSGSSVNKQSHLSKAGDSKIRSVLYMSALTAIKYNPHIEALYQRLLSQGKNKMCALGAAMRKLIHLCYGVLKHQTAYQRDYLLVE

SEQ ID NO: 280021 - protein, 340 aa, unidentified
MNNILKQIFGIDVSMDTFVVRFGTTDTNQDQQISKSLSFKNTTLGFKKFIQWVKKHIISNDIPLFFVMEATGVYYENLAHFLYSNNYNVSVILPGKIRNYAKSLQTKSKTDPIDAANITSFGLERKLNLWKPANSIIKPVKELCREYHSTKIIITEIKNQLHAKNHSYKPEKQTILRKKQLIRLLEKQTKEIENQIKAVIKQDKELSEKIDRAVKIKGLGFISVVTTVAETNGFELVNNQKQLASYAGLDVVYNDSGIKKGKTSISKKGNKFLRKAVFMPALSASKHNQKMKELYIRLVSKGKNKKLALIAVARKLLLLIYTIWKNNTDYIPDYQPCLGK

SEQ ID NO: 280022 - protein, 384 aa, unidentified
MNRIVKIGMDVHSTNYTLCAMEPVLDGEDRIFANIKVTPDCKNVIQFISKLKNKLGTSDTYSIECGYEAGCLGYSLYHQLTDAGVKCTILAPTTMLTPQGKRIKTDKRDAFMIAQCLSYGGYHAVHVPDEKDDAIKEYLRMRDDHKLVLKKIKQQINAFCLRHGHFYDGNKWTIKHREWLKTLKLSDLYRETLDEYMTTYEEQESKIERLDRRIEELASDSAYKEKVKKLGCFLGIKTHTALSLIVETGDFKRFAKGNTYAAFLGLAPGESSSGDNVNRTGISKAGNSHLRTLLIEGARGICKGKIGHKSKDLRLRQAGNSAEVIAYADKANVRLRSRYYRFMRHEKKKNVAVAAVARELACFIWGMMTDNISIVPERGKQNVA

SEQ ID NO: 280023 - protein, 386 aa, unidentified
MQKLNDLSRSLTPLKPDGTLIAVIEMSLSSWLVAGIVPGIERQPLKKLEVDESTLLKLLIRWREEAKKSGHRIERIAVAFEAGRDGFWLARWLRARDIEAHIIHASSVAVSREHRRAKTDRLDTELLKRAFLGWLRGERDHCKMVAIPTIKDEDAKRPNRERESLVGEQSRIVNRMKAALVRLGIRGFNPKLKKAVERLDGLRTPEGEPIPPNTLAELRRDMARRRLVSDQIRQIEDTRLERLEQAPSDGPHAMVRLLARVIGVGIETADMLVQEVLSRNMRDRRAIARYAGLTGSPDESGRKRREKGLARSGNARVRRGMIQLAWRFLMFQKDSTLAQWFRARTENARSTRKTMIVALARKLLIGLWRFVREGVVPDGVVLRPVS

SEQ ID NO: 280024 - protein, 347 aa, unidentified
MKFYTQQHRYYCGIDLHARTMYLCVLNQQGEILLHRNMPCSPDFFLKAIAPYREDMAVAVECIFTWYWLADLCAQENIVFVLGHALYMKAIHGGKAKNDKIDAHKIAALLRGGMLPMAYVYPALMRSTRDLLRRRMHLMHKRSELLTHIQNTNSQYCLPQFGKKIAYKKNRQGVAEHFPDSSVRKSIEMDLSLIDHYDKLLTEVELYITQNAKIHDVNAFNRLRSVHGIGKILALVILYEIHEIDRFPTVQDFVSYARLVKCAKESAGKRHGSSGTKIGNVHLKCAFSEGSVLFLRANPAGQRYADKLTSKHGKAKALSILAHKLGRAVYYMLKRDKAFDMNKFLNS

SEQ ID NO: 280025 - protein, 316 aa, unidentified
MREAVFVGIDVAQDWLDVWLHPLGQHSRFANTLTGIGELEQLLISFKVEKIVVEATGGLEYLAAQHLQQAGLPVAVVNPHFTSAFRTMRGKYTKTDSLDAETMALFAQKMEPEVRPVPTAQNKEMKDLAARRRQLLSMIGAEQNRLTRVQSAVARRSIEAILSALRQEKKEIDQHLQASIQNDESSRQKYQLLTSIPSIGPAIAMTLITELPELGQLGKKQMTSLAGLAPHHRESGRMKGKSTIKGGRQPVKAALYMAALVSLRYNLTFRGFYDRLVKKGKAKKVALTACMRKILLVANEIVKSQRPWQYDYQSQG

SEQ ID NO: 280026 - protein, 316 aa, unidentified
MKTYAGIDLHSSNNYIGVIDAKDKRLYSKRHDNRLEDVLKVLGKFKANLQGVVVESTYNWYWLVDGSMDQGYTVHLANPNAIQAYDGLKHTDDKWDSFWLAHMLRLGILPVGYIYPKQQRSIRDLLRRRLMFVRQRTSQILSLQSMITRNRGLNFSGAQIKRFRDEFIDKLFSDPHLVFTAKRNMATIRFLDHIVSEIEVEVQSQVKLKKEFIPLLTTPGIGKILGLTIMLEIGDIGRFFKAGNYSSYCRCVESKKTSNGKKKGETIRKTETDIWHGHMLKRPTMPFETARKLKDFFNAKWQKVIGCLPQRLWPTN

SEQ ID NO: 280027 - protein, 345 aa, unidentified
MQQDRHVHTSLARTVAGSSRPNTSPGTPPLYGEEDEMATSSYIGIDVSKDRLDVAVLGEERVWQVANAPEGINQLVKWMVELDPELIVVEATGGYQRAVVEALFVAGLAVAVVNPARVRQFARACGLLAKTDKLDAQVLAVFGQKVQPRHYTGKSEAEKQLSALLVRRRQLDEILKAEQNRLRTICPSLKSSVQRMIACLKEEKKILDMQIQQFVAQQDGWQEQTEILKSAPGVGQVTTATLLAELPELGKMDRKKIAALVGVAPMNYDSGKKRGYRKTKGGRGDVRSVLYMSTLVATRYNPLIRAQYQQLLKRGKLKKVALMACMRKFLTILNAMLRDQQPFRM

SEQ ID NO: 280028 - protein, 358 aa, unidentified
MYIGVDTHKKTHVLVAIDAQGQMHATQTVANTPQGWVTALEWAGDYRDACRWGIENSGSLGKGFAQFLLADGETDVREVSPQRTAQYRRRGRTQDKTDAADALAIARLISAEGEQLPLVQADDLSTELRLLSDHRDNLVAERTRLINQLHAQMLQIDPCYMERSGVLTTATGVRYCHALVLPHADGVLRTRLLIVHQLAGQILGLREEIETIETALRRRVQETGTPLLQLCGVGTLVAARLIGELGCTARIHSAAALAALAGIAPVAVSSGGRHGHRLNRGGNRQLNKAFHVIALSQLRREPLAQAYYAKKRAEGKTARAAMRCLKRRLVDVLYRLLPKSDDGNRLREGHELPIEAAA

SEQ ID NO: 280029 - protein, 392 aa, unidentified
MTLINIVAANQKYYAFNLLSVFIMVFWSVQYLLQHLLVQTQLSDQLLQPLILIFQLPQTPQFRHARPGKFFLPVNGMDYLLPLRLTVRNVLTKRITMNIVFLGIDLAKNVFQLCGLNQAGKPVYTKRTGRKELLQTLANIPACLIGIEASTGAFYWQREFEKLGHKVKVISPQYVKPFVRGQKNDGNDAQAIAVALMQPTMQFVPPKSPEQQDIQALHRARQRIVNHHTATVCQIRGLLLDRGIPIGSAVSRARRAIPLILEDAENGLSSRMRRTIAELYDLFNDLGRRIHFFDKEIETVFRQSEACQHIAKVKGIGPKTATAVAAAIGKGTEFKNGRHFAAWLGLVPRQHSSGDRQVLMNMTKKATSICGHFLFMVPALSSGLPRITMMVI

SEQ ID NO: 280030 - protein, 360 aa, unidentified
MSEHSLVAQVRTVGLDLGDRMSQVCGLLEDGTVGSEEQVASRKDALRLYFRRFTHVRVVCEVGTHSPWVKPLLESLGHVVLVANPRKLRALYAAGPKSDVIDARMLARVGRMDASLLGPIHHRSLPTQADLAVLRARALLVRARTKLVNHLRGAVKSMGSRLKAGSAASVHKIPLDEFPELIRPAMAPLLIALASLTAQIQECERKIEALCRDRYIETALLMQVPGVGPVTALCFLLTIEVPERFKKSRMVGAYLGITPRQKSSGESDPDLPVTKSGDRMLRTLLTQCAHYILGPFGEDCDLRRFGQRLLQRGGRSGKKRAITAVARKLAVVLHRLWMTGRDYEPLRHARLASPEPSVSA

SEQ ID NO: 280031 - protein, 317 aa, unidentified
MEVSLIFVGIDVCKAQLDVAIRPSGEEESFANDKVGIKALVKRLAKIGPTLIVLEATGGYERQVTRALVSADLPVVVVNPRQVRDFAKATGQLAKTDSIDAAVLAHFAEVIRPELRPLPDVVTLELRALTARRRQILEMIAAENNRLAMTSKAVRKHIDAHVHWLEQGLERVEKDLDRSIKQSPIWKENEELLRSAPGIGPVTSHTLLAELPELGTLNRKQISALVGVAPFNRDSGSLKGRRSIWGGRAPVRCALYMATLVATRRNPVIRDFYKRLKAKGKPFKVALVACMRRLLTILNSMIKHKTYWSETFSLQTT

SEQ ID NO: 280032 - protein, 345 aa, unidentified
MGPMYYIGLDVHKRVISFCVKEGSGKIHAEGSIPATRCELDRWLKTLPQPWSAAMEATMFTGWIYDHLKPHAAALKVAHPLMLRAIALAKKKNDRIDAGKICDCLRCDFLPECYMAPTALRELRRTLRYRNLLVRQMVQMKNKIAMLLMEAGVSYNKQRLHKAGYFRELLATNPDIDEGLSSLLRCCRETVVRLERTESALARSLERDPRLHDRVERLMTIPAVGRITALTWALEVGEVERFSSIRKAISYCGLCGTERSSANTVQRTPLSKQRNKHLQTTLIEAAKMAPRYSPALALLYDRERQKGNANRATLAVARKLVAYLMAVDRRQEYFLTGRLEASAAA

SEQ ID NO: 280033 - protein, 345 aa, unidentified
MKKILKQALGIDVAQKELVVSLGCMCEDLSIEIYAHKVFPNTAKGFSILVAWVEQRVDLTIKVRYVMEATGVYHESLAYYLAQEDREVSIILPNKISNYFRTLEVKTITDKTASETIARFGLERKLDLWKRPKPVFKKLRQLTRERDQIVQERTMAKNQLHAEQAEAEPHPSSVSRIQKRITLLNKQEKEIQQEIAKMAKEDLEVSSSIEHIRSITGVGLLTTATVLAETNGFELIRNKRQLTSYAGFDVKEKQSGTSVRGKARISKRGNRYLRKAMHLPALAAIKHSDRFKAIFVRLVSKHGIKMKAAVAVQRKLLEMIYTIYKTKTLYNEDYLKMKREQTVTT

SEQ ID NO: 280034 - protein, 338 aa, unidentified
MTLYSGIDLHSTSSHISVIDESDRELVSKKVQNRLDVVLRELERYRGELSGVAVESTFNWYWLVDGLVAADHTVHLANPAAMSPYQGLKYTDDRHDARWLAHLLRLGLLPTGYVYPPEERPVRDLLRKRGHLVRQRTANLLSLQNLWARNTGEMVSGNELKKLTVEQVRDRWGEGPLALAIESTMAVIETFEEQISKVEKAVFKQGRLKEGYEILTSIPGVGDILGLTILYETGDVSRFPAVGHYASYCRCVDSKRLSHGKKKGEGNRRNGNRHLSWAFTEAANFAVRHEPRARRFFERKRAKKNRALGIRAVANKLARASYFMMRDRTLFDPDLLFA

SEQ ID NO: 280035 - protein, 363 aa, unidentified
MKIIGCDFHPSFQQIAMLDTETGELVERKLLHPEEAIRFYESLAGEEVLVGLESMGNTLWLERLLSRLGFALQIGDALAIRVSNPRKQKTDKRDAWHILRLLQEGRFPRIWVPSIAERDLRQLLKHRHTLVQMRTRVKNQLQHIALNQGWQKKRALWTESGQQWLRKLELEPWTSRRRDDLLEMLKEMNQRIAQLNTAVEQAAEQRPEAVLLMSHPGVGPILALATVLTLGDVSRFPRGKHVASYLGLIPKEASSGQRRRLGAISKQGNSFMRFLLVQAGMSAARGEAGLGRVYKRLLAQRKHHGVAKVAVARQLAVRLYWMLRENKQYPAVVRMQGSPSHPVAEVMAVALNGRPASQPNQQG

SEQ ID NO: 280036 - protein, 462 aa, unidentified
MTQRKPKFVLKPGKSKAALSITHPNAAGIDIGSASHFVAVPPDRDDEPVREFPSFTVDLHALADWLKACGVDTVAMESTGVYWIPVFELLESRGFTVLLVNARHVKNVSGRKSDVLDCQWLQQLMSYGLLSGAFRPTEQVCVLRSLWRQRAMLLRNQGRYVQHMQKALTQMNVQLANVISDVVGETGQKILRAIVAGERDGQVLGAMKNARIRASVGEIAKSLQGNWRTEHLFALKQALDAFDFVGTQLLECDEQLQRQLQSLQAYTGEPAKGKRRPRSRNAPKFDLRTQLFNMCGVDLTRIDGIDVTTALAVISETGADMSRFPTVAHFTSWLGLCPGTRITGGKVMSGKTKRCANHAAQSLRLAAAALRPSQSALGAYYRRMCSRMDRPKAVTAAAHKLARLIYAMLTKGEEYTDHGQDYYEERYRQRVMQNLNQRAAKMGMKLVPDEQAAQKNPSNSTA

SEQ ID NO: 280037 - protein, 327 aa, unidentified
MILGIDIAKEKFDVALFSEKTLLSSGTFKNDFTGYKKLCRWLSNYTAQSVWACMEATGRYGEDLALFLFESGHKVSIVNPSRIRKYADSKLIRNKTDLLDAKIIADFCRTQEPSLWLPEALEKSELREITRRLNVLLEERTREKNRLESGVKSKIVKESIEKNLAFLSEEITFLDENMQEHIDQNPDLKEKQRLLISVPGIGKKTASLILGELPSVDRFQHVGQVIAYAGLSPQKHSSGSSVRKKTRLTKIGNRNLKTALFFPAMTAMKYNPVVIALALRLEKRDKEKMVIIGAAMKKLLQIAYGVLKSRRPFDPNYAMSSHIMLDR

SEQ ID NO: 280038 - protein, 463 aa, unidentified
MQEKRNKEVERHRGQLQGLPVIRCLVAGIDLGSEQHWVCAPTSDGSGREIADFGATTPELIRMAEWLKRRQVESVAMESTGVYWIAPHEVLEAQGLEVLLVDTRQLARVPGRDKKTDPTDCEWIQRLHSCGLLRGSFRPQEQICMLRTLVRDKASLVAESADWLRRMQKSLDQMNVRVHRAVSDLEGATGMAILRAIAAGERDARKLAQLRDRRCRQSEEQIAEQLSGHWREDHLFSLQQALKMYDAIHERIAAYEKEILGRLHQMERPDQPGQTAPPLGNANKAQKIKKHGQEAKRQALYRMSGVDATQIDAIGVDTVEVVISEYGLDLSRFPTEKQFVSHATLAPHVPKSGGKPLKKRKHNSASTRVAAALRMAALSLRHSDTALGAYYRNIAKRIGGDVAVFATARKLATLIYRLLRWGQPYVDEGAQAYENRYRQLRLQNLTARVNALGYKLTPINAGA

SEQ ID NO: 280039 - protein, 413 aa, unidentified
MKSARDTLPEEPANGLTCGIDWACDDHAVSVVDARGREILRLTVEHSAAGLQQLRTTLAGHGVEEVAIERPDGPMVDALLDAGVTVVVISPNQLKNLRGRYGSAGNKDDRFDAFVLADTLRTDRARLRPLTPDSPATAALRATCRARKDLVAHRVAVANQMREHLKRVFPGAVGLFTDIDSPISLKFLRRFDSQDRADWLSTKRLAAWLASVGYCGRVDPAVLHARLAAAPRGATGDAGAAAAHITRALLATLDTLVEQIKALTEQITEQLDTHTDAHIFTSLPRSGTVRAARLLAEIGDCRARFPTPESLACLAGVAPSTRQSGKMRAVGFRWACDKQLRDAVCDFAGDSRHANVWAADLYSRAIARGHDHPHAVRILARAWLYIIWRCWHDGVAYDPTKHRALQAHQQHAA

SEQ ID NO: 280040 - protein, 423 aa, unidentified
MGCGSDQAFTAFVGIDWADTKHDICVQAAGSKRRELTCIAHEPGQIESWACSLRERFGGPIAVALELTKGPIVYALQKYDFIVLFPINPATLARYRQAFKPSGAKDDPTDAELALDLLVCHREKFTALQPQSAAMRTLIHLVEQRRLLVNDKLRFTNRLGNALKQYYPQALAWFEQRDTPLFCDFLVRWPTLAQVKRAHKAGLERFFWNHNVRYANVVEERIRAIKAATALTTDEAVISAFRLQVQVLVEQLRTTLQAIDRFDRQIAKLAPTLPDYALFSELPGAAPHLAPRLLVAFGEQRERFKSAEELQRYSGVAPVTERSGKKNWVHWRWQCPTFLRQTFVEWAAQTINKSFWAGAFYRQHRDQGSTHQAAVRALAYKWIRILYRCWQTRSAYNEVTYLNALKRRGSPLFKHIAAAIETG

SEQ ID NO: 280041 - protein, 344 aa, unidentified
MTHYVALDVSLRSVAICIVDNNGDIQLEKSVNAEVEDIVQILRSFDGEITSVGLEAGVLTQYLTYGLQAAGYEVVCMESRQVKAALSAMRNKTDKNDARGIAQILRTGWFSRVHVKSIGSHHIRALLSCRRAVLNKCVDLENEVRGLLKIFGIRLPSHLEHSVFEEAVRESIEADAALAHGLIPLLEARGVLYQTFLVLDRRVKAMARTDALCQLLMTAPGVGPITALTYKAAVDDPRRFKHSRTVAAHFGLTPRRFQSGEVDRLGHISKAGDADVRTALYTAANSLMTRTVGFSTLKAWGMQLMKTKGRRVAVIAVARKLAVILHRMWIDGTEFQWGTEGSNT

SEQ ID NO: 280042 - protein, 349 aa, unidentified
MTKVSMIGLDLAKNVFQVHGIDASGKVVVQRQLQRRQMEKFFAELPPGVVVGMEACGGAHHWGRVVQKLGHEARMMPPAYVKPYVKRNKNDGRDAEGVCEATGRPTMRFVPVKSLESQAVLALHRTRRLLVRQRTMTANALRSVLSEFGIVAAQGIKGLRSLIEIIDDPANCVPEVARMPLQVLARQWERFNADICKLEGKIVGAAKSDAVARRLMAIPGLGPIGATAILAAVPDASVFKSARDFAAWLGLTPRQFGTGGKQRSGGISKQGDRTLRTLLTVGATAHLRYERARDIKDPWLQALLARRPFKVAAVAYAAKMARIIWAMLVTGEVYRAPNRGRCVSTQAAA

SEQ ID NO: 280043 - protein, 340 aa, unidentified
MNRYLGVDLHRNCFTVCTLKEDGQSELRRWSIHSLSEFAHTIQATDAVAVEATGNTRYFCQSLKERGCRLVVVNPQQFQVISRSVKKTDAHDAKTLAQFLARDLLPEVRLKEALQAEIASVLQTRDKLVKLRTTLKNKINNLLAGRGILIRRESLSSDKGLEQVLQAPVSDLESVELEVLVGQIRHLNDSIRKLEAAIKEQGPKLRGYQNLKSIKGLGDIGSSTLLSAIGDINDFASEGKLAAYFGVVPRVNNSNETERSGRITKRGNKLGRTALVQCALIAMRYSPYLANYYARIKAARGTGKAIIALARKFLGIIYKTLKNGWIFEDFPRFVIAPAGV

SEQ ID NO: 280044 - protein, 370 aa, unidentified
MGNASTLHVGLDVHKDSIAVAYATEDGAVAPVPFGTIGTRQCDIDALVRKLQSKSGRLVFVYEAGPCGYWLYRYLTKKALTCLVVAPSLIPRKPGDRVKTDKRDALTLARLARSGDLTPVYVPAVPDEAVRDLARAREDALKDLNAARFRLKALLLRNDIRYTGRANWSAEHCRWLARLVLPTAAQQIVFQEYVRTVTERTDLLRRLEAELLEQAKTWRLSPVVEALQALRGVQFTVAITTIAELGDLTRFDTPRQLMSYLGLTPSEYSSGERRRLGGMTKAGNGHARRVLIEAAKAYRHRAKVSEQIQARQQRLPAAIRDIAWRAQLRLCGRYRKRLARGKHPNTVAAAIARELAAFMWAIAKVRPVPA

SEQ ID NO: 280045 - protein, 347 aa, unidentified
MKQVSTIGLDLAKHIFQVHGAGADGSPVFNRRLRRSEVLHFFSKQPACLVGIEACGSAHYWAREIATLGHEVRLIPPAYVKPFVKRGKTDAADAEAISEAVTRKTTRFVPIKTAEQQAGTMVLKSRALLVKQQTQTINALRSHLAELGIIAAAGRTKVEALVAIVRDVADIRLPAAARFALTAVADQIEAQADQIDKLERAIVAAARTDKDMRRLTTIPGIGAITAATIKALVPDPGGFKSARHFAAWLGLTPRQHSSGGKERMGRISKMGNPELRSLLVLGATSVLRIARKADRAPPWLKSLLARRPYKVAAVALANKTARIAWALLNRGGIYRHPETLATTTPAA

SEQ ID NO: 280046 - protein, 441 aa, unidentified
MSKFAGGLAQADYMSRIGQLPPQQCLVVPIDVGKSSATALVVDHHGRIVQDLFEFDLTVSGANKLITVVAAAEQRAGALSVRAGIESAGHYHRALATTLRDKGFDIVELNPYHVKMARAQMGQARIKTDLRDCLSMAEVLVRGRGWGPHSQDGTIAEQRLWTARRRRKLAAAQVLGGQIHALADLAFPGLTGCFTTGLEAKTLRMLLATLAEPAAVAGMDANALVAHAATHRVRMLRPKARQVIAAARDAMCVPEAQRRAAQQLLAEDVATFDALQQALVNGDVHLEQLLPHTPAGVLTSVPGIGVVTASYYGAALGDPDRFANADAAYRYSGLTPTSYESAGRKATNNRISKVGSVELRQAIITLGTVLALHHPDFAAHKRRLLAAGKRPIVAAIALGHRAHRLAFALMRAQQPYDPRRWQQGQQGGRLARTTARAARTT

SEQ ID NO: 280047 - protein, 348 aa, unidentified
MNITTVGIDLAKLFFQVHGVDARGKVTLRKQLKRSQVVAFFAQLAPCLVGMEACGGAHFWARKLLEFGHTVKLIAPQFVKPYVKTNKNDAADAEAICEAVGRPNMRFVPIKNTEQQALLGLHRARQGFVAARTAQANQIRGLLAEFGLVIPAGIRCIERKLPEFLEDAENGLSGASRALFARLLEHFRELDRQVKELEREINAWHREDTASQRLQAIPGIGPLTASALVASVGDAKVFHNGRQFAAWLGLVPRQDSSGGKTNLLGISKRGDTYLRTMLIHGARSVLLSLKRHPDRAGGWLARLADRRNHNIAAVALANKNARIAWALLAHGRDYQAGFRSANPLAVGA

SEQ ID NO: 280048 - protein, 315 aa, unidentified
MTNIAVFVGVDVSKAQLDIAVRPEGRFAAANDEKGIATTVERLRQMQPTVVVLEATGGFEVPLASALATAGVPVVVVNPRQVRDFAKASGILAKTDRLDAQILAHFAEVMRPVPRPLPDEETQALSAIVARRRQLLEMLTAEKNRLSAAAKPVRKSLRAHISWLEREVAHTDNDLTRTIHASPVWREKDDLLQSTPGVGPVLSTTLLAGLPELGRLDRKQIAALVGVAPLNRDSGTLRGKRTVWGGRAHVRAVLYMAAVVATRYNPVIRTFYQRLCAAGKAKKVALTACMRKLLTILNAMMTHRTPWHAGVIQCG

SEQ ID NO: 280049 - protein, 371 aa, unidentified
MARNGTLAKSQELQPSFQTTTEQITIGIDLGDRFSHCCVLGPDGKILTEGRLRSTPETMARHFKDLPPSRIAIEVGTHSRWLSQLLTEWGHDVIVANPRNLRMIADSIRKSDQVDAHMLARLARVDPQLLSPIVHRKQESYPDIIQLKARDLLVKNRTRLMNAVRGVLKSAGVRLSPCGTSCFPSKAAMCVPDELKMSLTPLLETISHLNKQIYSLDKAIESTAQNRYPETNRLRQISGVGSITALQYVLTMGDPGRFAHSRDVPAYLGLTPRRHQSGSVEQQLRISKAGNKQLRSLLVQCSQYLLGRFGPDSDLKRWGTRMFERGGKNSKKRAIVAVARKLAVLLHRLWITGDTYHPLYNVAISSVAPES

SEQ ID NO: 280050 - protein, 342 aa, unidentified
MKKIFIGIDFSKLKFDAAIFQTESKSIVSNEVFDNNHSGYIEFLKWVKENTVCQQSNLLFCGEHTGYYSANLSTFLHDSGHDLWLVSGLQMKLSQGIKRTKTDRMDACKITEYAYRYQDKVLLFQPISNALEQIRDLLSYRERLVETRKVLSTSAKEMKRVKNTASCDFIYLDSLDYIKSLSKSIRNCENRIEALINEDIALSTNYNLINSVVGIGLVNATLILVATSNFSTFSNARKFGCYCGVVPFEYSSGSSVRGKTRVSKLANQHLKTKLTLAAQNSIRHDPELKDYYLRKRNEGKCHWLVLNNVKNKLIHRIFAVVRDGKMYSKQYLHPLKSALLEC

SEQ ID NO: 280051 - protein, 439 aa, unidentified
MFSASVLGGVKLEEKELEKPIRAWIGMDWADEKHDVSLYEVGTGKQETMIVRQSPEALQEWLGQLRTRYDDGYVAVVLEQGRGGLLNALMGCEFLVLYIINPKSLSSFREAFYGSGATSDPVDAELMRDMVRQNPGRFRAWRPDDVMTRSLRLLTEGRRNLVNQSTALTNQLTALLKGYYPQALAWVGRLDTAWACDFLGQWSTLQSLQASSRRQILRFYEKHPRASLNLSEQLKQIQNARALTQDEAVLESSALMVQALVSQLRPLLASIAEFDRKIAMIFRKHPDRPIFESFPGAGAALAPRLTAAFGTDRDRFQAAKDMQELAGIAPVTEKSGKKKFVHWRYACPKFMRQTFQEFADHSRRWCKWAKMEYELLRKRGKSHNAAVRALAYKWIRILFRCWKDKKPYQDEIYTKALLLHGSPLSSLLAECVEKPVNGL

SEQ ID NO: 280052 - protein, 352 aa, unidentified
MCVVDEEEKIVHESIQVTDPEAIAKCLSRLDLNIVKVGLEVGSITRWLTLKLRDLGVKAIPIDARLMNGILKINVNKTDENDARGIANAMRASMYSEVHLRSDDNIELSILLGSRHALVGQRTKLMLTIRGHLKAVGIRPKSFSSNNVGERLAEHLETVPAPIANSVRALISTISKLNEEIENIEKMIGEQVKDNEDVNLLQTIDGVGPILATAFTSALDDPKRFKNCRSVPAYFGITPRQYSSGETRIMGRISKCGNSYVRSLLYQAAHVILTRTAKWSKLKAWGMKIQRKHGLKKAAIAVARKLAIIMYRMLITRKSFVHGEPKKKKEKKGVPFKTKCKEEKSELVASMR

SEQ ID NO: 280053 - protein, 343 aa, unidentified
MDHFAGLDVSVKETSVCIVDETGKIVREVRVASEPEALLAVLASPAYHFKRIGLEAGPLSQWLFSTFAEEDLPVICVETRHMRAVLKAQVNKTDRNDARGIAQMMRVGLYRPVHVKTLRSQKLRMLLTHRKLLQSKAIAIDNDLRGTLRNFGLKVGMVRAAKFEARIKELIENFPDLAALVEPLLVVRRVLREQLGILHSRLLAVVRDDDVCRRLMTVPGVGPVVALTYRATIDVPARFRKSKSVGAVFGLTSAKYQSGEIDHSGAISRCGDELMRTMLYEAAQSMLFHSTRWSWLKAWAMQIARHRGMKKAIVALARRLAVIMHRIWVDGTEFRWTREAVAA

SEQ ID NO: 280054 - protein, 423 aa, unidentified
MAKKKVVEVLEAIYRCCAGLDVHSRTVSCCVRRLDEQGKLHAEVRTFGTMTRDLLALCDWLHAEGVTHVAMESTGVLWKPVYNILEGQFEILLVNAKHVKNVPGRKTDVKDCEWIAQLLQCGLLKSSFIPPLPQRELRDLTRTRTQVTNELAAVANRIHKVLEDTNIKIGVVASDLLGVSGRAMIAALIEGETDPVKMANLARGRLREKIPVLEQALVGKVRAHHRFLLQTHLDHLTYLESLIERLNQRIEEAARPFEPAIAALIPIPGYDRASAQSVIAEIGPDMDRFPTDAHLNSWAKFCPGNNESAGKRRSGPTGHGNRWLGATLVQVGWGASRTKGSYFQAQYRRLAGRRGKKKAIVAVGHSILTVTYHILKDHTAYQDLGADHFDRISRDRIRRYHIKRLEDLGYTVQLSDNQDNQAA

SEQ ID NO: 280055 - protein, 366 aa, unidentified
MKKISTVAMRGNKVFNEPKLTIGLDLGDRTSHYCILNEAGNVILERSLPTTPKGIHQTFSKIPRSRIALETGTHSPWVSRQLSQLGHEVIVAHARNVRLIGESSRKDDQLDARTLARLARIDPELLGPVRRGSANAQIHLTVIRARAALVSTRTALVNAARGLTKSYGERLRKCGTGQMNREIAKGLSQELRDALEPLLQEIESLNERIAECDRRIEQIAKEAHPEVALLQQVKGVGSLIALTYILTLDDPHRFRRSRDAGCFLGLRPGRRNSGLSEPQMHISKEGDRYLRTLIVQGAHYILGPFGEDSDLRRWGLKLAERGGKNAKKRAVVAVARKLAVLLHKLWVSGEVYEPLRNNHKVVSAVA

SEQ ID NO: 280056 - protein, 304 aa, unidentified
MFGIGIDVSGENLDVAVHEQAFRQFKNSKRGWNSLIRWLQQWPAKQVVLEASGGYEQKALDALHEAGLPMVRINPGRGRSFASATGKQAKTDRIDAMVLAHMADALKLTRYVPPAAWQRRLGELCQRRRHLVQMRVSEHQRMRAFSEPSLISMLNQHLREIQKSIKQLDATIAALLAEQEGWRDFAKLKGAGPVLMATLACELPELGKLSGKAISALVGVAPMNRESGTWKGRRSITGGRAVVREALYMAALTAKRYEPRLKEFFESLVKQGKPGKVALVAVMRKMLVILNARKRDAEAQMASA

SEQ ID NO: 280057 - protein, 446 aa, unidentified
MEVVFPYCAGLDVHKKRVTACRLVSDSTGQVPEGVAELQTFGTMTHELLALADWLVEAGVTHVAMESTGEYWKPVYNLLEGLVTIFLVNASHVKNVPGRKTDPADARWLAKLMRYGLLQASFIPPIAQRDLRDLTRYRTKLVQERAREVNRVQGVLERANIKLASVASDVLGVSGRAMLEALITGQADPATMAALAKRRMRSKIPALEQALTGTVRDHHRRLLAMQLRHIDFLDEQIAALNSAIAQCVTTLSQEAPVSPAPLAPTTIDVPTPADPPPPLTFTRAVELLDTIPGVNQRGAEMIIAEIGIDMTRFGTAARLAAWSGVAPGNDESAGKQRSGKTRKGNQVLRAGLTQLAHGAVRTKGTYVSALYRRLAARRGKRRAILAVAHSIMGSVFHMLSRNEPYRELGPNYFDERRRHYTVDRLTSRIENLGYRVHLEPLPTAAA

SEQ ID NO: 280058 - protein, 422 aa, unidentified
MLEQAQDGDEIITHVAGLDIGKASLVCCARVPDQARPGHRLQEVQTYATMTRSLITLADRLAVLGVTRVVMEATSDYWKPVFYLLEAHGFEVWLVNARDVKHLPGRPKTDKLDAVWLCKVAERQMIRPSFVPPSPIRMLRDLTRYRVDLVAEAGAERNRAEKLLEDAQIKLSVVVSDLFGMSGRAMMAALIGGQRDPHTLAELARSSLRRKIPALQEALTGHFTDHHAFLLGKMIARVEAIEADIREVDARIEAQLAPFAPAAARLLEIPGIGPAAAATIIAEIGVDMTRFPTPAHLAGWAKFAPGVKESAGRRKGNGSTGHGNRYLARVLGQIAVTAARTNTFLGERYRRIARRRGAKRAIVAVGRSVLTIIWHLLSDAETRFHDLGADFYLSRTDTERRKRNHIRQLEALGYRVSLDLAA

SEQ ID NO: 280059 - protein, 441 aa, unidentified
MAMRKREEDEVFPNAAGIDVGGSSHWVAVPRQADDEPVREFGAMTDDLNAMADWLLSCGVDTVALESTGVYWIPVYEVLERRGLAVWLVDARQMKYVPGRKSDVQDCQWLQKLMSLGLLRAAWRPGDEVCVVRAVVRQREVLLAEQATWVQRMQKALVQMNLQLTEVLTDVMGMTGQAIVRAIVAGERDPKVLARHRNGRVKASAADIERALTGNWREEHLFVLGQALAMVDTLAQRVLECDAKTEALLAPLGRHDVELDGPGKRRGKNTPGFDARTALARWAGVDLTRINGLAVTTVMTILSEIGPDLSRFVNVKHFCSWLGLCPGTKVSGGKVLSARTRRSTNRVRQALKLAAMSLSRNDSALGAFYRRLCSRMDKPRANTAVAHKLARMVYFMLTRGEAFVDQGQQHYEEQQRQRSIDALRRRATALGFQITPAAQTP

SEQ ID NO: 280060 - protein, 379 aa, unidentified
MDHANTDTPAETILHGALELSKNSWLLALQFPDRAQPSLYPIRGGDTVGLMAKLMAARDRWAKVSGKAPSIVLCYEAGYDAFWLARFLKARGIECLVVDAASMQVNRRARRAKTDRIDVGMLLRALIAWGQGDRHVWSVVRVPSVDEEDLRRSHRERDRLVRERTAHINRIKGLLFGQGIRDINVKTKYKTLQIDKLVTGDGCPLPPRLASEITREIARLALIQEQIATLERERDQAPTPCKATEKKRVQLMCLTGIGPAIAAVMTREVYYRQFDNRRQVAGFLGLATSPHDSGDVERSQGISRAGRGQVRGTMIQAAWLWLKHQPKSAITRWFVQRTAGQSGRIRRIMIVAVARKLAIALWRFLEQGLVPQGAMLANR

SEQ ID NO: 280061 - protein, 459 aa, unidentified
MKVLHEHVAGIDVHKDMIKVAIRSPGDKPWTRKTEILEFRTFYGVLQAMARELRRRGVTHVVMEASGVYTDPVYYALCEQEGFTGVAVVNPAHVKALKGHKTDARDCARLAELLECGLLQGSYIPAAELKEVRDLTRYRTKTVQARASEIQRLGKALESAGIKLGSVASDITGKGATAMIEALIDGERRGAVMADLAIGHMRTAGKLADLSMALEGRFTEHHALMCRLSLDRITVLGTAVADLDARIAAGTAPWQREIALLKTIPGFGDTVAWAWIAEIGPAPHQWFGSHEKLASWASLAPGNYISAGKRKHGRTGDAGTYIKPALVQAAWSAIRVKGRLQARFNRLVRRMGGPKNPAAKKKAIVAIAHTLLKIAYQVLRSGTPYQDPGADFYARRDTPQHRQAWLESQIRKLHPGRTITITISPPPDPAPDAAMTSGHPARQPRRIASPGAAAPGTPA

SEQ ID NO: 280062 - protein, 304 aa, unidentified
MYGIGIDVSQATLDVAVHEQAFRQFSNDKRGFVRLIQWLKQWPITQVVLEASGGYERAALEALHEAGLPMVRINPARARRFAQATGRAAKTDRLDAAVLAQMAQLLPLTRYVPPAPWQRRLAEFAQCRRHLVQMRVSEMQRLRQLTDPVLITIKQRHLAQLSEDLKQLDKAIAEQLAVQPGWKNIGTLKGAGPILVSTLACELPELGTLGSKAIASLVGLAPMNRESGTWQGKRSITGGRAVVREALYMAALTAIRYEPRLRDFYATLKAKGKASKVALVAVMRKMLVILNARKRDAEAALVCT

SEQ ID NO: 280063 - protein, 348 aa, unidentified
MECYAGLDVSLELTSVCIMDRDGKVVREAKVATDPGELGGYLRGAGVELKRVGLEAGATTQWLYGGLAELGLPVVCIETRHAKAAMAAMTNKTDRNDARGIANMMRTGWFRAVHVKTVIAQELRFLLTARQTLVRKVIDIELAIRGMLRSFGLKMGKVPKRHFEARVHELAGDRPNLMMALRPMLKARLVLRTEYETLSKIAIKVARDDAVCRRLITVPGVGAIVALTYRATIDVPTRFKRSRAVGAHLGLTPRTHQSGEVDRTGRVSKSGDGMTRTALYEAAHVLLTRVKRACALRSWGLRLQKNRGHKRAVTAVARQLAVVMHRIWADGVDFDWGAPTEGNSATAG

SEQ ID NO: 280064 - protein, 381 aa, unidentified
MIFVGIDVAKNKHDVAVLNDKGKLILKPLTFSNTRAGFNLFINTLSQLKQDYLIALEDTGHYAFNLLDFLHEHGATVYTYNPLLIKEFAKSLSLRKTKTDKKDARTIALKLLSDPNREQFRHDNRKEELKILTRHIHRLKKKQSDWKVQYTRCLDIIFPEIDKIIGKHSDYAYELLSHYPSPQKMSEAGFEKLLEIKRLTMPKIQDILKVAPNSIGTTSEAREFELIEIIENIKHYKRLISKAENKVDELMAEFTSVITTVAGIGNRLGSIILAEIRNIHTFDKPAQLQAFAGLEPSIYQSGQLDTQGKMVKRGSPHLRWALIQAAKSVARFSPAFKAYLRIKLDQGKHYNVAVAHVAKKLVRVLFHLLKNNTPFDESKVR

SEQ ID NO: 280065 - protein, 324 aa, unidentified
MAKRTTICAGIDTGKRKLDVAIDGSSLQLQVENAAEGHKVLLEWLRRHKVKRIGIEASGGYEIPVVTELRRKRFVVVVFQPAQVRAYAKFHLQLAKNDKIDAALIAACTAAVRKIHAAPDPRLQPFAEHLTLIEQIGEDIKLYKNRIETCRDPRIQKLWKEEISRLNKRERAELKALVAAIRQHPDLAQRLDLIYSVSGAGMPTAVAILVRMPEIGTLSREQVAALAGLAPYDDDSGERSGARHIEGGRKRLRRALYAAALPASFFWNPHLIALYQRLRAAGKVHKSALIACARKLLIFVNTVVARGTPWQNEQPVRATNPAAA

SEQ ID NO: 280066 - protein, 309 aa, unidentified
MSSWVGIDVSKNTLAVWVRPSGVNFIVCNSSEGHQALLLNLAEIQVERVLLEATGGYERAVMGCLAQAGHSVVRINPRRARAFAQAMGKLVKTDPVDAGVLAHLAQVIEPSACQPVSLARDELQELVRRREQVVKLRDDERRRLTLARSGVVQESLQTNISQLNEQIARLNSAIEAAAQRTDNQLVKQLGAIAGIGPVTVASLLAYLPELGQLSRRQIAALAGLAPYNNDSGQHSGKRCIKGGRASIRRVLYMATWSVIRCHSSFGARYAPLRARGKCAKVALVACMRVLLIRLNAMVRDHSSWRAETV

SEQ ID NO: 280067 - protein, 399 aa, unidentified
MAASRRVVIGADTHLDTNHLAVITDAGKPLADAEFPTSPAGYDDAARWAQSFGTIVIVGVEGTSSYGAGLTRVMQAAGIEVAEVSRPDRAARRRQGKSDPLDAYAAARAALAGDGLAVPKGEHTTALRALLSARRSAVKAHTAATNQIHALLVTAPAELRERFRRHSTTALVTALARCRPATHRDPTTAAVLTAAKALAQRVEFLERQKQDLTTQLDALVRQANPALRATYGVGPDTAAQLLVTAGANPHRLRTEASFAALCGAAPVPASSGKITRHRLSRGGDRAANNALYRIALVRMSAHPQTRDYVQRQDTNGRTKKEILRLLKRAIAREVFRLLTRPGPIDDYSDLRPARQAKNLTLATVAHHFGVPIITVSRLERGHQRNDTLAANYRQWLTAA

SEQ ID NO: 280068 - protein, 410 aa, unidentified
MMEVVYPRCCGLDLHKKRVVACLIVPGADGAPQKEVRTFGTMTDQLLSLADWLAAAGCTHVAMESTGVYWKPVYNLLEGIFELLLVNARHMKAVPGRKTDVKDCEWIAELLRHGLLQASFVPDRPQRELRELTRYRTALIQARSAEINRLQKTLEGANIKLASVATDIMGTSGRQMLAALVEGTTDGAVLAQLAKGRLREKLPALEQALTGRMGAHQRFLLARQLAHITFLDEQIEQLSAEIVERLHPFQEMIDRLDTIPGVGRRVAEVVVAEIGTDLTRFPTAGHLASWAGMCPGNNESAGRRKSGATRKGSPWLRMALIEAAQAAARTRNTYLMAQYRRLAARRGRKKALVAVGHSILVIAYYLLTRQTNYQELGGQYFDERDRQAVERRLVRRLEALGYKVSLDPAA

SEQ ID NO: 280069 - protein, 390 aa, unidentified
MYYCGIDVAKRKHAIALLDENGQPVQRAFTIENTRAGFDQLLQALAALNGPVLIGLEATGHYWWALYDDLTHHEHRVVVLNALQVHAFRKSGVRKVKSDRTDAIWIAEFLRFSQPEPAKPTTAVFLQLKDVSRFRYHLSDQIGDCKRKLLSVLDRVFPEYETLFSSVFLTTSRQLLTQAVSPQALADFDLQELTELLHTASRGRFDRAKADALQTLAKQSVGVRFLADAAQLQVRCLLGQIDLLEEQRQLVDDALAQLMAQVPQHLTSIPGVGSTTGAALLAEIGDIQRFDAPEKLVAYAGIDATVYQTGQFEARQMHMSKRGSPYLRHALWQAASMAIRYDDELRAYYDRKRQEGKSYGTALGAVCRKLITRVYIVLKENRPYEVRTKH

SEQ ID NO: 280070 - protein, 392 aa, unidentified
MHKDIHVAVVIDCWTNILGEITFENRPSKFDKFMQDVKKIYKDLTPCFGLEDTRGFGRNFASYLLGHKFTVKHVNPAYTDAMRSSAPMSKKNDAFDAFCVAKVLRDMVDTLPDEEHNDLDWTIRQLVKRRNSLVKGIVIAKNQLNSNLTNVYPSYKKYFCDVDNKTALLFWEKYPHPQYLKGVTPELLLEELRTIHKGMKQEQAEMILTLSEQNSPKEKDFQYERDLIIKSLVREIRFKKQENEEIDNELERLVDLTGYKLQTMPGINLITASNIISEIGNVQRFPNSDKLAQFCGVCPVNFSSAGKGKDQRSRQGNRVLNAIFHFLAIQLVQISPSGKPRHPVFRKYFEGKIKEGKTKPQALVCVSRRAVRIIYGMMRTKTEYKPFEKVQE

SEQ ID NO: 280071 - protein, 511 aa, unidentified
MNGLVVCREESFSQQPTCADGAPLWVKMVALRAGLAEPLDGDRVEAGKSAVACDPDQQSGPRCAEVPFFVAPGTREHAWQCLERTCGATIARSDAEASMRVMIERVAGLDVHQETVVACVLIGKPGERPTKEVRTFRTMTRNLEALREWLLSLGVTHVGMESTGIYWKPVYAVLEGSFELIVGNARHIRNVPGRKTDVKDAEWIADLVRHGLIAKSFVPPPPLRELRDLLRYRRKLVESQAAERNRLLKLLETANIKLASVVSDVFGVSGRAMLKALIEGTASAQAMADLAKGQLRRKRADLVLALEGRVEEHHRFLLGMQLRRLEAAEEEIAALDARIDEKLEPYRAPHALLMQIPGVDRLVAAVLIAEIGIDMSVFLSVYHLASWAGVCPGNHESAGKQKSGRARNGNVHLRTMLVGAAISASRAKGSYLKDKFYRLKARRGSMRAALAIAHKILVAAYHMLAKGVGYREIGEAYLDQISQTRTVANLKRRLERLGFQVTLQSKAQSAA

SEQ ID NO: 280072 - protein, 350 aa, unidentified
MTMLTEIVDIVIGVDTHKHTHTAGVVNASTGTELGDLTVNTDPRGYDMLVEFADQHNGTRVWAIEGTGSYGAGLARHLHAAGEWVIELDRPNRPARRHGAKSDLIDAYRAAREALSRATLASPRAPGTRAALSVRLAARRSAIEAATAAQRQLNALAIAAPEPLRARLREHTIRTMIPIAARLRGHTSWDHETVETAHVLRALAKRIIALETEAADHEHALTVTVKSWRPDLLDLCGVGPINAAIILCAWSHHDRIHSDAAFAMLAGTAPIPTSSGQTVRYRLNRSGDRQLNQALHNIAICRLRYDPTTRAYAERRHAEGKTNREIRRCLKRYITRQLFRQLQNPPLDTP

SEQ ID NO: 280073 - protein, 340 aa, unidentified
MQITTVGLDLAKNVFQVHGVNGHGKAVLRKQLRRDQVAAFFANLPACLVGMEACASAHHWARKLQAMGHTVRLMAPQFVKPYVKSNKNDAADAEAICEAVARPNMRFVPIKNVEQQAVLALHRARQGFVKARTAQANQIRGLLGEYGLVVPQGIAYIAKRVPDLIEDASIDLPGSFRLLIDRLLEHLKQLQQQVEEIEAQIKAWHRASDASRRLEKVPGIGPLTATALVATVGDAKNFDSGRQLAAWLGLVPRQHSSGGKPTLLGMSKRGDAYLRTMLIHGARSVIYRATQRADAESWLVKLTNRRNKNVAAVALANKTARTIWALLVHDREFKADYAAV

SEQ ID NO: 280074 - protein, 318 aa, unidentified
MTIHTESQIQINVGVDVGKSKLDIVLHPLDLHFQISNDEESILKVVHVLKKRNIERIVVEATGRYEHAFVFACDQANLPIVVVNPISVRRYAQAIGVLAKTDKIDASVIARFAATIQPEIKPIPDKQSHLIKDLLIRRSQLLEMQTMEKNRLQILPKALHRSIKTLLRSLQTQISTITKQIDETVMQVKHWRTKTEILTSVPGVGKVLAYTLLSDLPELGKLNRKEIAALVGVAPMNRESGSWNGKRRIRGGRHRIRTVMFMAMLSSIQCNPVFKRFYEHLKAQGKLPKVAIIACMRKLIVVLNTMLKNETRWGENMA

SEQ ID NO: 280075 - protein, 411 aa, unidentified
MLFVGDDWAEDHHDLEVEDDQGRVLARKRVGEGIAGMVKLHELVAEFLGDDDGPGQVVIGIETDRGPWVQALIAAGYQVFAVNPKQAARHREVISISGAKDDKTDAHTLADMVRTRRHQLRVTAPDSQIAAGVKVLTRAHQGLIQERTRHMLRLRSALRDYFPAALEAYQQGTLTLTGSDVLALLAKAPTPAAAAKLTLAQITTALKTAGRRGDVAARAVAIRDALRTEQLGLPDLVADAYAITVRSTIAILQTLNTQIPALQEGVEAYFGRHPDVEIYRSLPGLGKTLGPRVLAEFGDAPGRYADAKARKNYAGTSPITRQSGKQKTVHARFIHNNRLVNALDLQASAATLHDPHIKTYYNQLRGRGLGHHAALRQIANRLVGILHGCLKTHTPYNPHTAWAHRTQTTTA

SEQ ID NO: 280076 - protein, 355 aa, unidentified
MNSEKYIGLDVHQATIVVAVTDSSGKLIMESILETEAATILQFFAGLRGTLAVTFEEGTWSAWLYDLLNPHVDKLVVCNPRKNALLKDGNKSDRIDARKLAELLRGNQLKPVYHGENGVRMLRELSRSYLAIVKDLSRVMNRLKAVYRSWAIPCAGRDVYYRRHRAQWLDKIREAGVRRRAERLYDQLDMLQHLRQQARRELLAEARKHAITARLRQVPYLGPIRSALAVALMQTPHRFRTKRQLWAYSGLALETRISAEYRMVEGQVRRSKKLLCIRGLNKDHNHDLKGLFKGAATMASVRPGPFQDFYQAALAKGIKPTMARLSLARKIAAITLTLWKKGENFDAEKLKSQAA

SEQ ID NO: 280077 - protein, 400 aa, unidentified
MKSQARMPRGLQSGARQFGESQIQLDSAAAKGDGVDDTHFPASSVPQLLQRQQQGESSTMYPTTIGLDLAKHIFQVHGVDAAGKVIIRKKLRRSELVEFFKKLPACLVGMEACGTAHFWGRELASLGHDVRLMPPAYVKPYVKRGKNDEVDAEAICEAVTRPTMRFVPIKSAEQQSILMLHRTRDLFVRQRTMLVNSLRGQLAEFGLVAPQGIWRIPELQALAQDTDNSVLPDPARACAELIMMQIEDLQAKIKAIERALMARHRANEMSLRLATIPGIGLITATAMVATVVDASAFKSGRHFAAWIGLVPQQNGTGGKVHLGRISKKGEPYLRRLLVLGATAVVRYARDKPEFAGWVNALLARRPARVVTVAVANKLARIVWAIMRRGGSFRQRPLGIA

SEQ ID NO: 280078 - protein, 410 aa, unidentified
MEVLHAHCAGLDVHKDTVVACVRHMVGGTVKREVKSFQTTTKELMALSEWLSVEGCTRVAMEATGIYWKPVWHILADGEFELVLANAAHVKNVPGRKTDVNDATWLADLMAHGLIRGSFVPDEPTQDMRDFLRTRKQFVRQRSSSIQRIQKTLEDANIKLDSVISDIIGLSGRAMIEALIAGQSEPDKLAALAHRRIKASPAELEAALRGRVTDHHRFMLRLHLQQIDALNAAIAEIDRQVEANLEPFRTATTLLITIPGVSELMARTIGAEIGTDMSRFPTHGHLISWAGLCPRNDQSAGKRRSNRMRKGAPWLKTALVQAAWAAVRTKGSYLQAQFQRLRARRGAKKAIGAVAASILTAAYHMLKQGTFYNELGADFFDRSAKNSHAKRLLARLQNLGYDVQLTPINA

SEQ ID NO: 280079 - protein, 373 aa, unidentified
MPKYSTAFGMDVHLRSTTVCALDADTGEAVTRRFPGNPWGEIAGWMDGFPGPSLAAYESGYLGFAPQRELAGLGVECVVAAVSKIPRSAADSASKNDRNDAARMAKAILAHDISPVWVPSPEVEGIRDLAGAYDGATARLATAKQRLLAFLAKRGFVYGGTTPAGNPRKYWTYDFLRWLDKVRPEDDGGVRTLAALRSEVEAAAEARADLLSEYRAAVDASPIAAEVAALQSIKGCAFALAAAFSAEVGDFTRFRSGRQVTAYFGLAPSQRSSGDSVRLGGISGAGNALVRKLAVEGSWCYAAARHQPKLMPRDTGVPLEIRMHGRKGSERLLRRREEMLARGMPQAKANAATAAELVRWLWALGMMCREGAE

SEQ ID NO: 280080 - protein, 403 aa, unidentified
MAKVFIGVDPHKLSATIEVVDGRERVLATGRFGTDKAGYAAMRKQVASYPNRVWAVEGSNGTGRPLAQRLLADGEYVVDVPAKLSARARLLDTGHNRKTDAHDAHAVAVVAVRTKNLRVLAYDADLEVLRMLVDRRDELSKSKVQAVNRLHRLLSELVPGQSKKDITALQAKAILASVRPRDSVGKTRKRLALEQLAEMVAIEKKMKASSKELKTLVIARGSHLMDLTGVGPVVAARILADVGDVARFTDRNRFASWTGTAPLDASSGEQIRHRLSRAGNRKANHVIHIAAVNQIRLDTPGRAYYRRKLAAGKTPLEALRCLKRRISDALYRQLRADARTAATTDANAGPGGHRGASHVSSAAGSIPHTGASDQPLPGPAPTTLPASTPTRKTTILRPLEPAS

SEQ ID NO: 280081 - protein, 425 aa, unidentified
MSEELAKQAVRRSKRVRLNDLSDVHERCAGIDVHKASVTVCVSTGGGQGELRQYPTTTAGLRELKQWLTDSGVTHVVMESTGVYWQPVWQILEDEHYRLILANARQVRNLPGRKTDGEDAAWLATLLRKGLVRGSFIPPAEVRALRDLCRTRATLVMERATVSQRVEKVLEQANIKLDTVVTDVMGVSSRLMIDELLNDQTDRQRIADLAIGALRKKIPELIEALDGHLLPHQKTVLQTLLRQFDFLSKEIDGLEEAIEKYARPFAAEIARLDEVPGIDRIAAATLIGEIGVDMNCFPTPEQFCKWATMAPGNNETGGKKKSGSIGKGNTWLRRIMTQIAWAATRTKGSYFSTQFVRLLRRGSQKALVAVAHSLLGVVWHMLNRKERYRELGADYFQRRDYQQIVRSHVRKLEAMGLKVQVQSAA

SEQ ID NO: 280082 - protein, 344 aa, unidentified
MSVAIIGVELAKNIFHIHAVDRHGGVVFRASRKRSDWVEHVCERIEPKTIVAMEACASAHHWGREFQARGFQVRLISGQFVKPYVKSNKNDRIDAAAIAEAAVRPGMRFVTVKSRRQQDLQALHRVRDELMHQRTAKANQIRGLTAEYGIVAPVGLKTLRSAIPVWLEDASNGLSDLFRTILLGLQDDLTGLDERVDQLSKQIERIAAEDPIARRLSGLRGIGPLGATAWAIQLGDGRQFKRGRDFAASLGLVPRQHSTGGKARLLGISKRGDAYTRKLLVHGARAVIRHHKADNDPLNRWLHHQMSRKHPNVVSVALANKTARIAWAIARGAEYRPELAARTN

SEQ ID NO: 280083 - protein, 423 aa, unidentified
MEVMHRRVAGLDVHKQTVVACVRLMAGHRATRECRTFATTTEALVELLSWLAASQVTHVAMEATGVYWTPVWKILSEGDFTLIVANAAHIKQVPGRKTDMNDAMWIADLLACGLLKASFVPPEEIQELRSLMRTRKQLVREQTRHVQRIEKTLEEANIKLGTVLSDLMGASGRRMIEAMIAGERDPHRLAALAERSVKASPKALHDALHGRLREQHRFLLQLHLRQWDALDAAIRQIDEQVAGHIARVDQQAADGQLPFGELIARLCAIPGVSFLSATAILAEIGRDMSRFATAGHLIAWAGLCPGQNESAGKRKSSRLRKGAPWLKTMLVQCAWAAKRAKHSYYSAQFHRLCGRRGPQKAICAVAASILTAIYHMVRSGASHRDLGADYFDRRTPQARAKRLVAQLAKLGFAAQLQPLAEAA

SEQ ID NO: 280084 - protein, 313 aa, unidentified
MLYVGIDVAKNKHDVTALNVPGKTVLKPLTFSNNKAGFELLDLSLRQLNQDCLIALENTGHYAFNLLNFLHEQGYKVYTCNPLLIKEFAKSLSLRKTKTDKKDAHGIALKLLSDPNREQFQHDNRQVDLKILARHIHRLKRKQSDWKVQYTRCLDIIFPELDKIVGKHSEYTYQLLTRYPNPQKRIEAGFDKLIEIKRLTASKIQDILSVAPRSIGTTSPAREFEIIKHYKRLIDKAETCVNDLMAEFNSVITTVTGIGNRLGAVILAEIRNIHAFDIPAQLQAFAGLDSSIYQSGQIDLAGRMVKQGSPHLR

SEQ ID NO: 280085 - protein, 408 aa, unidentified
MEVIHPRCAGLDVHKRTVVACRLTPGDGPEPLRELRTFGTTTWQLLALADWLDEAGVTHAALESTGSYWKPVYNLLEDRFDLLLANAAHLKAVPGRKTDVKDAEWIAKLLRHGLLRASFIPPRPDRELRELTRYRTTLIRERADEVNRMAKVLEGANIKLASVATDIAGVSGLAMLEAMVAGEADPAAVADLARGRLRDKREALVEALTGRMGPHQRFLLGTQLRHLRELGALIDAVSGEIEERLRPLEAPLQLLTTIPGIGSRTAQVMLAEMGADMARFPSAGHLASWVGLCPGNDESAGRRRSGRTRRGSPWLRAALVEAARAAARTHAYPGTQYRRIAARRGAKRAAVAVAHSIIVIAYHMLSTGSAYRDLGANWFDERDREAVRRRLTRRLEALGYHVDLKPAA

SEQ ID NO: 280086 - protein, 401 aa, unidentified
MVSDFMKGRYNLMKIFVGIDIAKLNHFAAAISSDGEILIEPFKFTNDADGFQLLVSKLESFDKNSIIIGLESTAHYGDNLVRYLVAEFYQVCVLNPIKTCQMRKNNVRKTKTDKVDTFVITKTLMMQDDLRFITFFDLDMMDLKALGRFRQKTIKQRTRLKIQLTTYVDQVFPEIQYFFKSGLHQNAVYALLKEAPSPKEIASMHMTHLANLLKVNSHGHFTKEQAKELRVLAQKSVGANDSAISIQITQTIQQIELLDSQLEKIEAEMTDIMKFNDSVIMTIPGIGYINGGMILGEIGDIHRFSNPNKLLAFAGLDPSVYQSGNFQAKTTRMSKRGSRVLRYALVNAAWNVVRNNATFKAYYDAKRSEGRSHYNALGHCAGKLVRVIWKMLTDEVEFNLE

SEQ ID NO: 280087 - protein, 428 aa, unidentified
MTNRLKVGLDICQERNDVCIQDSDGEILVAHRPFPNNWPGYQELRQSLLATLEAHSCQGIDLAGEATGPFWFHTFRLLAQDSLLADRDLHLYLFNPKLVHGFRQALPPEDKDDIKDPQLVADYLRFSHPQHPWSCQSKYLALQRLTRHHCHLAHTLAREKTYFLSLLYLKASEYSHLKPFSDLFGKTSTTILQNYATIGELAAIPLDELTELLDRLGKRRFPDPADNARKLLRVAQDSYPMPLELLVPINFALHQLLEEIACLEKLLAASHQNLAAALQDFPTAQALQAWNGLGPVCTGGIIAEIQDPQRFVAGRKYDRQSHTMRPKTLWDGQAAVAKFAGLWWPQKQSGNFAAEERHLCTQGNVYLRYYLIEGANSLRRHTAEYAAYYERKYAESSKHHHWRALVLTARKLIRPLFMLLMKPLTDWH

SEQ ID NO: 280088 - protein, 343 aa, unidentified
MLIIGCDYHPSFQQISFVDEKTGECGNLRLDHKNGEAERYYRKLAGQQVRVGVEATGGMRWFERLLRELGLELWIGDPMKVRAAAARKAKTDKRDADLLLRLLLENRFPRIWVPTVEQRDARQLVLHRHKLVQTRTRAKNELQALDTNEGILKRVWTKSGQAELKKTALSPWASVRRQDWTELLLDLNQRIDPLDQALEQQAEQRAEVKLLMTHRGVGPVVATAFVVTLCDPKRFASSKQVAAYLGLVPQENSSGQGRQRLGHITKQGNNLLRGLLVEAAHVAVRFEPEWQRKYTRLAMKKNRSIAAVAVARCLAVHLWWMWKLGLEYEQFKAQKKESRSHAD

SEQ ID NO: 280089 - protein, 339 aa, unidentified
MKYTTVGVDIAKNVFQLHWVDGESGEIVSKQLKRAVFLEHFANREACVIGMEACGGAHHWARRLIEMGHEVRLMPAKFVKAFVTGNKNDAADARAIWMATQMPSKVVAVKTEAQQAVLALHRMRQQKIKYRTAQMNCLRGLLAEYGEVMAKSRAALDKAIPGVLAKLAERLPAMLIDSLRELWSELDRLDKQIADIERRLQTWMKEDKACKAIAAIPGVGLLTATATVATMGDAKAFRSGREFAAWLGLVPKQIGTGGKIQLLGISRRGDTYVRTLLIHGARSVLFHGKHVGSWAEQLQKRRPSNVVTVALANKMARTIWAVLANGTPYNQAHFVAPPA

SEQ ID NO: 280090 - protein, 349 aa, unidentified
MLIIGCDFHTRFQQIAMLDTETGELIERRLEHRNGEAKKFYAELQKPVRVGMEATGYAQWFERMLAKLGHELWVGDAAEIRAAMVRKQKTDSRDALHILDLLVQERFPRIWVPSPAERDLRQLLRHRHKMVCLRTSLRNQLQALAMGQGIYRKTKLWASAGREELQRLALDPWAARRRQELIEILDQLDPSLAELDRAVTKEAQNYPAALCLMEQPGVGPVTALMLVLTIGPVERFRRSKQVVSYLGLNPRENSSGGRQRLGSISKQGNSMARFLLVEAAQSAARYDEELRRDYRRLKFRRGSAVAKVAIARKLAVRLYWKLRKQLSTAPSTRMQGSSESLLVGVGLPS

SEQ ID NO: 280091 - protein, 389 aa, unidentified
MILVGIDVAKDKHDCFIQTAEGKVLHKAFSFANNYEGFEELFSKIISCNDDDIKVGLEATGHYSYNLLGFLLGKELPTFVFNPLQTNQFRKSLSLRKTKTDKVDARTIALMLATESNDNAYSLQAYQNEELKSLTRYRFDKVNQRSKLKQSLSRLITLLFPELESVVSSLHSSSVYAMLMKYPSAKDVAKSQLHSLTNLLESTSRGRIGADKAKLIRSLAKKSVGIYVSAKVLELRHTIKLVQILDEEIAEIEQQIQSHMQEIHSPLESIPGISFRLTAAIEAEVGDFKRFSSPDKILAFAGLSPSTYQSGKFTSQNAVMEKRGSRYLRYALLLAAHLVGKYSKTFATYLKKKRDEGKHYFVALSHVAKKLVRVMFHLQRTGESFLDFA

SEQ ID NO: 280092 - protein, 311 aa, unidentified
MEHSLFIGIDVAKDHLDVHILPTGEAFRLPHDGPGLTTLLDRVRPLAPTLLVLEATGGYEIPVAATLAGAGLPLAVVNPRQVRDFARATGQLAKTDPLDAHVIARFAQAVRPTPRPVPDEQARALGELVARRRQLVDMLGAELNRRRLLREPRVRRQLDAHIGWLEAALRRLDHDLTTLLRATPAWREAEDLLRSVPGIGPITATTLIASLPELGRLDRRRIAALVGLAPFARDSGAFRGRRMITGGRAPIRKVLFMATLTAIQHNPAIAAFYRRLVATGRPGKVALTAAMRKLLTILNAILRDRRPWIPT

SEQ ID NO: 280093 - protein, 480 aa, unidentified
MAIERSLVGLQVVEGEKWGCLGVRMVAFEFTANSQEVIPMRRKAYRSVAVKDVNVAEVASWLGAGGAWVGVDVSKQALLAVVRNVQGDWQRPWKVQQPAEIPQFVEMLKPLAAGRRLVVAVESTGTYGDALRQALSDAGIEVHRVRSTASSDYAEIFDGVPSQHDGKDAAVLAELAAAGKSQPWPCQPRSSEEGTLHGEVVWMDTQQDILQLWLGRMEALLGRHWPEATGVLPLTSGTLRRVLEEYGGPGALAQDPQAAEKLAPWGKRFLKPEKIERLLAAARTTAGVRMSAADQELMRRIAHEAREAQTKIDRSKKILEQATQKNETLQRMAQAVGRVTACVLWTTLGDPREYSCPAAYRKGLGLNLRERSSGKHQGHLKITKRGPSLARRWLYFSALRAIQRGAVRNWYERKKERDQGRGGKGVVAVMRKLALAVYAVAARNEQFDPGRLFPGRPRPATSQRTRAVLEAMESEAMELI

SEQ ID NO: 280094 - protein, 415 aa, unidentified
MALKIVYKICCGIDVHKTFVVACIASTNDKGITSYESHRFSTYTSGLKTLLQWLLDRNCKDVCMESTGKYWIPVYNILESDCSIVLAHPKYVKAIRGKKTDKKDAKWIADLFKHDLVAGSFMPPADIRQLRDLMRYRFKLTCFKSSEKNRLQNCLTVSNIQLGNVVSDTFGKSAQAILDKLLENPADTSFDLEPLVYKSLKKKLPELRDAIDGYITPEQAGKLKVIKAHYENLESRKAELEELILALAAPYQQELTILQTAPGISSPFTAIGIISEIGTNMEAFPSAKHLCSWAGLTPTNNESAGKKKSVRVSKAGCYIKPLLVQCANAVVKSTKHPEMRNRYLRLKKRRGHKKAIIAIARMLLTALYHMLKSGENYNAELYRKSDLPPVNREITVEQALMIARNQGYKIKSATA

SEQ ID NO: 280095 - protein, 393 aa, unidentified
MYYVGLDVHQRRSSLCILDGDGKLVKRLEVKGPWPKLIEAVDLHVPRPFAVCYEASCGYGPLHDRLRAAGRAERVAVAHPGQVRLIFRSKRKHDRVDAERLAKLLYLGEVPQVHVPGVDVRAWRGLINYRRKLVGRRAAAKTQVRALLRGLGVVEGVPRGLWTAKGLAWLKDLALASAADRVRRDVMLDDLDELGERVAKVEAELDRIAKGHPGVALLRTIPGVGPRTAEAFVAHVDDVGRFARVKQVGSYFGLVPCQDASADRNRLGHITKDGPAPVRWLIAEAAWQGRRRSPKIRAYFDRVMRGDPQRKKVALVATAHYLVRVMAAMLRSGEVWREAQQQQQQQQQQQQQQQQPKQQPKQQPKQQQTSALDQQVAATTKETKAKAKTSDKE

SEQ ID NO: 280096 - protein, 419 aa, unidentified
MKTFVGIDWGRQDLWVAVVDQDENTLGAKRFDNTMRGAKEMIEWILKVSSCEKEEIAIGIETKSLSVVDVLLEEDFEVFTISPFCMEKFRGMYSPSRSKSDKQDAVVLARTIRRDPKAFRKVVKEDEKIARLREWTRRLCDIKEEQVRLMNRIQDFLARYFPNFLRIAPSFDSKWVWELWEICKSPREAKKLKRETVEKILKWHKVRSVTVEQVISELSEEGLIQSKDFEKDYKALVEMDFERLVQAFEQAKVCERHIDRITQEIERWERKEENRKVTTVESISSLPGAGRVVTAIILAEAYSLVRNAKYRELRIYSGAAPVTRQSGSSRFVMMRRSCNRYLRYALYHLARGAMVNSVHWRRLYAEERRRGKRHGTALRKIGDKLLCILARLLIDQSLYDEEVVKKNAEKKLALTERRP

SEQ ID NO: 280097 - protein, 337 aa, unidentified
MSEVSTIGVDLAKNVFQLHGVDAEGRPVLRRQLRRSQMLEVFQNLPVCLVGMESCASAHYWARELTKLGHEVRLMQPSYVKGYVKRGKTDKADAEAICEAVTRPSMRFVPVKSADRQALLMTHKAREFLVRQQTQTVNAIRAHLGEFGIIVAKGIQNADRLIAACDRADLPAPTRRALNLLADQLIDTQRKIAQLTADIHADAKANDAAQRLQTIPGIGPITASALVAALPDVSDFRSGRDLSAWIGLTPKPHSTGGKERLGRISKMGNRYLRRLLYLGAIAQVSARRRGEPGEDWLWKIAERKKPKQAAIALANRMARTAYALLKNGTQYQAARPA

SEQ ID NO: 280098 - protein, 376 aa, unidentified
MGDYSEAFVGFDTSKLRNSVAIADGGRGGEVRFLGEIENTPAATAKLVRKLAARYKRLTFCYEAGPTGYGLHRQIKGLGFECVVVAPSLIPKRPGDKVKTNRRDALNLAKLLRADELTAVWVPDGCHEAMRDLTRARETAMLDLRTKRQHVSAFLLRLGRPYPESKKSWTKAHLSWIAGQKLEHPQQRLVLEEMMLAIRQAQERLQRLEQAIAAAIPEWSLAPVITALMAMRGMDLTSATTLLAEIGDLSRFQTPTELMAYLGLVPSEASTGDAVKRGPITKAGNRRARRMLVECSWSYQHPPRVGQAKQPKVDAAPPAVREIAWKAQCRLYRRYRTLIRNGKRKTVAIVAIARELAGFIWAVARAATTARVVAAA

SEQ ID NO: 280099 - protein, 352 aa, unidentified
MERYVGLDSHARSCTLGVMSAGGQRLKSLVVETNGRALVEAVCGIGGRVHLCLEEGTQSAWLYELLKPHVAEVVVAMAPERKGAKSDRRDAWARANELRTGAIETRVFKAPEHLAGLRNAVRAYGFAVTDVVRAKNRLKSVFLSRGMSTDASVYDPTKRAAWLKKLSSPHRELAEWLGRQLDQLEPLREEAERLLLAEVKKHPIIRTLSTAPGMGPIRTAQVVAIVATPERFRTRRQLWSYSGLGIVTRSSADWVQDRTGKWVRAQHAQTRGLSRKRQPRLKAVFKGAATTVIAQLADDPLHADYERMLKSGIKPTLAKLTLARKIAATVLSMWKHQEVYDPKRHRPTPEQK

SEQ ID NO: 280100 - protein, 344 aa, unidentified
MGEVITIGLDIAKAVFQVHGVDNSGTVVLRKSIKRAKVLEFFAALPRCLVGMEACPSAHHWGRELHKLGHSVKLMPPSYVKAYLKRSKNDANDAAAICEAVTRPSMRFVPIKTREQQAPVMLHRTRQLLVRQRTMLSNALRGHLAELGVVSAKGRNGTGELLRLIADADDGRLAPAARGILDVLARQYSAVGAEIAAIDKSILAWHRSCAASRRLEEIPGIGPVVATALVAEVGDWTAFSSGRSLAAWIGLVPKQHTTGGKERLGSITKQGNRYLRWLLVVGAMAVIRYAKKHGTKNRPWLARLMERRPTKVAAVALANKIARMAWAIMVRGERYKEPKLLVAA

SEQ ID NO: 280101 - protein, 390 aa, unidentified
MLYVGLDVHQKRSSMCILNDDGKVVKQELIKGPWPGVIDRLKRIDEPFRVCYEASCGYGHLHDRIAPLPRASQVSVAHPGQLRLIFKSKKKYDRIDANKIAKLLYLDEVPAVHVPNIDVRGWRKLIEFRQTLLRRRVALKNQVRAILRGEGLTAPRGLWGKKGMTWLGQVELPAGSKLALDLAAEDIAQVNEKMKRVEKELAKIAQKHAGVQLLMTIRGVGIRTAEAFCAYVDDVRRFARTHQVGSYFGLVPCQDSSAGKDRFGHITRDGPPTVRKLLCEATWMGIRHNPQLREFFERVMNDDPDRKKIALVATAHYLCRIMAAMLRSGEVWRDPRKQEPQQEPQQEPQQEPQQEQEQKQEQKQEQQDGLRPAVEGAPPRKTPRQKAVVF

SEQ ID NO: 280102 - protein, 418 aa, unidentified
MQVETDEGEIIERIAALDVGKAEVVCCARVPGPGGQRMQEVRTTSTMTAALLALGDWLASLGVSRVVMEATSDYWRAPFYLLENRFETWLVNAHDVKHLPGRPKTDRLDAVWLCKVAERQMLRPSFVPPPAIRQLRDLTRYRVDLLAVRTAEKQRVDKLLEDALIKLSVVVSDPFGVSGRAIMAALIAGERDPVVLADLARGSLRSKTARLTEALTGRFTEHHAFLLTQMLHRVDAITADIATVQDRIDARIGELAPAVARLDAIPGVGPVAAQMILAEIGTDMTRFPTPAHLTSWARFAPGVSESAGRPKGNAGTGHGNPYLARVVGEAAVSAARTDTFLGERYRRIARRRGKKRAIVAIGRSILVIVWALLADTEAQFVDLGPDYYAARTNPERRVRQHVRELQALGYTVTLNPAA

SEQ ID NO: 280103 - protein, 369 aa, unidentified
MDMEREVVCGADIHKQFLLATVLSNDGKKFQDRFDANFEGLLNFRQWLLDLGCQKLAVESTASYWLPIYLVVGKDVEFILANAYQIKHVPGRKTDVLDSEWIAELCLKDLIAPSRIFSEDERDLRSMTRTRESYVKMRTQNKNRIHQELESACIKLSSVLSDIFGKSGIHIIRGILKGSSIEDILDSIPSKKLKAKRKEIQDAIRMNMSPAQVDLISLLLDSVDILNREIESIDKQIQDLISKRQDDLKIAMSIPGMGFTTASAILAEIGDFKDFRTGDKLAAYCGLVPSVYQSAGKLITGHITKHGSPHVRRMLIEVAHAISRTKADSNLKRFYFRIKGRHGAKVAIVALARKVICILHHLIVNREMF

SEQ ID NO: 280104 - protein, 346 aa, unidentified
MTIVEATRSVTGGIDTHGEVHVAAVLDEVGGLLGTQSFRADPNGYSELLAWFEAFGEITKVGVEGTGSYGAGIARYLTRAGIHVIEVDRQNRQARRQAGKSDPLDAVEAARAAQSGRANGTAKSRDGSVEAIRVLVVAKRSARGARIKALTQMRQLTFSAPDQLQSRLKGLPIDQFVTAAQGLRPTRSLDAVSAATKAALSSLAHRVSDLESEIADLDARITPLLEETAPELLAVYGVGIDTAAALLVAAGDNPERLRSEAAWAHLCGVSPLEASSGKVTRHRLNRGGDRQANRALWHIVITRLASDPRTQTYMERRVKDGRSKREAIRMLKRYVAREVYRYLPRP

SEQ ID NO: 280105 - protein, 413 aa, unidentified
MLKIVYPICCGIDVHKTFIVACIASTNGQGVTTYQSKRFSTFTNDLRRCAVWLAKNNCKDVCMESTGKYWIPVYNILEATCTIVLAHPKYVKAIRGKKTDKKDAKWIADIFKHDLVSGSFIPPADIRQLRDLMRYHWKLTSFTTGEKNRAQNCLTVSNIKLDDVFSDVFGKASSAITTRLLESSEPFDVTPYLTKNIKAPVEKIQAAVEGKMCAEQAEKLRIIRSHMDALELCRLNLQSLILTTAEKYLPQLNIVATAPGIQAFSAIGIISEIGVDMSVFPSSKHLCSWAGLTPQNNESAGKKKTTRISRAGVYIKPLLVQCALASIKAKKKHPEIFNRYNNLKKRRGHKKAIIAIARMLLTAIYNMLKKNEPYNPELYRKADRPPIHREVSVEEAVYILQRQGYLVTAPPTA

SEQ ID NO: 280106 - protein, 429 aa, unidentified
MNNVDNIRLEQFRQIRKEIRGSKEYMIVGIDVAKEKHYAFFGAATGKTLLRRMIFENSIKGFEKLLSHADSLKVQHSLDKVVFGLEPTGNYHKPLGEHLIKCCRNVVLATGVAVKNNRRMMDNRWDKNDTKDAAVIADLISQGKFLFYEYASMPIRDLRNLLSLKRRLKKQEHGYKVRIRNNLLAQYFPELDKYYRNCGKEGLAIVRWCLDPCVISGLEYDAFARRVAPNGRGGIPQQERLRAVWKKSIESIGCAVGESLDVEAKLMVEGLKYIREAIRYVETKIEEICLDIPEYQYILSIPGFGPDISSKVVAAIGYPYRFDNGRQVLKMAGMDLSAARSGNKSDNVTPKLSKSGKADLRYALYQAALIASCRNIYFMRYYTEKLRGREKEKGIGMKMRVKLAAKMLIIAWTLMKKQEYFDSEYLNIE

SEQ ID NO: 280107 - protein, 383 aa, unidentified
MVEGEAQRMKGTSRSRGARLEAGYGNEVPRWEVQRLINSLQKGKSMSIVHVGVDLAKNVFAVHGVDESGKAALVRPSVSRAKLSELIAGLPPCTVAMEACSGAHHWARLFAAYGHTVRLIAPKFVTPYRMSGARGKTDAADAAAICEAVQRPAMRFVPLKSEQQQSQLMVHRARQGYVQARTACINRIRGLLAEFGHVLPLKADTVRRQAAGVLEELPGCGNTVVGDLLSELHRLDERIAQYDRHVAQIAREDERARRLMQLPGIGATTATAMVAMIGNGHEFKCGRQLAAWLGLTPGQYSSGGKTRLGRITKNGDGYLRSLLILGARSVLALAKGRSDAISSWALALQQRRGYWKAVVAIAAKNARMAWAVLRRGENFKMPA

SEQ ID NO: 280108 - protein, 416 aa, unidentified
MISFPKRERAQHAAACVGVDAGKFSHTLVVRPQHQPDSKRFSFSTTRSGFDSAVAFIRQQTGGVAAETILVGIEFAGNYGFTFAHYLAQLGFPIVSVLPAHTKRWKDVAHNQPLKTDAKDAATITDLLAQGHFVTFPFLSPAYADLRYLVTARERLSLLRRGAITQLRTLIQVVFPEFEALFPLIAKKTPFTLLRTFPTPHDLLDATRTKVLRVLKTASRGHLGAETYEQLVTAARATLGLPGAQARLRQEILLTLERIALFERQIRALEAELVETLQAVPETPYLLSIPKVAPVTAAVFLGSIGDPRAYEAGEQILRVAGLSLIERSSGVLRGTKRISKRGRPLLRQAAYMFAVRSITKGGLFRAEYEALCQRNGGIKMKAVVAVMRSGLRLLYSIARDRRLFTIDPPAVRRVAA

SEQ ID NO: 280109 - protein, 391 aa, unidentified
MVYLGIDVAKDKHDCYIVNSDGEILANVFTIPNDQTGFNLLLQRLKSVAPDLSKVKVGLEATGHYSYNILGFLLDKGLHTYVINPLHVNLFRKASNIRKTKTDPIDARTIAEMIMSNVVLTSYTAKSYHNEELKSLTRYRFDKVHERAKLKSSVARLVSILFPELEKLVPTLHMHSVYALLTEFPGARQIASCHLTRLSHLLSESSKGRYKRDKAIQIRETARSSIGSVMPAKSLELKHTIHLIEVLTEEINEIELSIRRIMDADPSPILTIPGISYRMGAVILAEIGDFSRFTSPDQILAYAGLSPSTYQSGKLGNAYPHMEKRGSHYLRFALFNATRFVCNWDPTFASYLAKKRAEGKHYYVAISHAAKKLVRLIFALVRSGQAYSPAT

SEQ ID NO: 280110 - protein, 382 aa, unidentified
MKKDSIAKLQVTKSQIRRMAAKQRLTVGLDLGDRSSRYCILNEAGEKASEDQLPTTKAGLDGLFGKMAPCRIALEVGTHSPWVSRQLAAMGHEVIVANPRKVRLITQSVKKNDRMDAEQLARLARVDPQLLAPIRHRGVEAQGDLAVIRARAELVDCRTALINTARGLAKPMGERLKSCDADSVKESLAEGLSEATQNAIRPLLKSVEEITKQIGAYDKKIQEIGKRYPETKVLKQVHGVGTLIALTFILTLEDAERFARSREVGPYLGLTRKLRDSGESQPELGISKAGDMLMRRLLVQAAHCILRDGAPESDLKQWGMTKVQAGSGKKGSKRRKKKAAVAVARKLAVLLHKLWVTGEVYDPQYNRKAVEAAKGKEKTAAA

SEQ ID NO: 280111 - protein, 311 aa, unidentified
MTSDSIGIDISKDFLDAHRLSDGAASRFPITPAGFRALSTWLGEDMPARVVFESTGSYHRSFERAFSGKLPLVKVNPLQARRFAQACGTRVKTDAVDARILASFGNALILEPDQPLDEKQYELRELFSSRGALIKDRTRLINRLQTHSLALVKRQTKARIDQITRQLKTLQQDINARVQDCPSRARANTILRSIPGIGEVAAATILIEMPEIGTLHKKGAASLTGLAPMTRQSGKWRGKASIQGGRKQLRDALYMPALVAARHNPDMCNKYKALIQQGKPQKVALTAIMRKLIELANALVKADREWAPNGT

SEQ ID NO: 280112 - protein, 448 aa, unidentified
MSKSTTKKEKVKRISQLTVINPTAAGIDVSDTEMMVAYPINSEQLEIRVFGCFTRDLHSIAKCLKENGITSIAMESTGVYWVSLFLLLQEYGFEVYLVNAKHVKNVTGRKDDESDAEWIQKLHSCGLLTASFQPDSMIRTLRSMVRHRKNLVKTSSTYLNRMQKALELMNIKLHTIISDIDGKTGKLIIEAILAGERNPEVLADLRDKRIKASREEIIKSLEGYWTAEHLFELKQCYQLYSTHQQMIDECDREIEKQLTVQIASQNEGVIHEIQKVKRKVSSKNKVPYNLTAYLKEILGIDVTEVVGISELSALAILSEVGTDMLKWKTEHHFTSWLGLAPNTKISGGKVISSRIKKKKHHAGQVFRIAANSLYNSKSPMGDYYRRIRAKAGAAKAVVATARKLAIIFYKMVINKEEFKPSAIEDYQQKYKEKKINQLKKKIALLEAA

SEQ ID NO: 280113 - protein, 365 aa, unidentified
MPRIAEQALPVTGGVDTHADMHVAAVVDQVGRVLGTEVFPAAEAGYRAALAWMRSRGELAKVGVEGTGSYGAGLARYLAARGVEVVEVIRPNRQARRRRGKSDAADAVAAALAALNGEAAGVPKSRDGAAESIRMLRVARCGAVKARTQAGNQLRDLIVTAPEQVRQQLAGLTRERQVQTAARFRPRGLAGPAEGARAAMASVARRHQALTTEIARLDVALGQLVRHAAPPRFLAKPGVAIQVASTLVVTVGDNPGRVRREASFAALCGASPVDASSGKQLRHRLNRGGDRQANSALWRIVVTRMAHDHRTQAYVARRTTEGKTKREIIRCLKRYVAREVYKALTGPARAATAGPKQDTLAQFLT

SEQ ID NO: 280114 - protein, 375 aa, unidentified
MSNHSEAFVAFDSSKLRNAVAIADSGRTGEIRFLGEIENSTTATAKLVRKLASKYERLTFCYEAGPTGYELYRQIRILGQECIVVAPSLIPKKPGDRVKTNRRDAVSLAKLLRAGELTAVWVPDRHHEAMRDLTRARDTAVNDLRSKRQQISAFLLRKGLHYCAGKKTWSQAHLNWLMSQRFEYPEHRLVFEEMMMAMRQAQERLERLEQAIRAAVPDWSLADLVTALMAMRGIDLISAATFLAEIGDLSRFQSPSDLMAYLGLVPSEDSTGDHIKRGPITKAGNRRARRTLVECSWSYQHPPRVGKDKQEKVAAASRAVREIAWKAQSRLNRRYRALIRRGKLKTVAITAVAREFAGFIWAVAREATAARAAAK

SEQ ID NO: 280115 - protein, 315 aa, unidentified
MEALAKCCAGLDVHKALVVCTLLKECLTGEIVKETREYSTFRVELERLAKWLKDAEVELVVMESTGIYWKTVYETLEDSEVKTFIVNARHVKNVPGRKTDVGDSEWLAELARCGLLRASFIPPRDFRQLRLLTRYRRKLSGYLGGEKNRINKVLDDGGIRLGCVVSDIDGVSARNMIKALIEGQEMPKEIAELAVGRLKAKKPEIMMALEGRLSDRHRFLLSRIQSHIGWLERQIKEIDSQVVAAMKPHIKELGLLQTIPGIDKNSAAMLLAEIGVDMSRFGNKDRLSSWAGMCPGNNESAGKKRVVAPVKAMCM

SEQ ID NO: 280116 - protein, 345 aa, unidentified
MTESKIVAFDLAKRIVQACVIDGTGAVIAEERMGPERVLSFTARHPHATVALEACGGAHHWGRALERQGHRVLLLPPQRVKSYGDPACKDDRRDARAIAEAASRSYLRPVPVKSEGQQALQSLDRVAALLARQRTQTVNALHGHLSEFGITLPKGPHLLKRPFTELEASPRWRELPEELGAAMGELFAAFLALEDRLSAIKARLARSAKQSKLGHLLLEIPGIGPMTAVSLEAAIGDDPGRFSSGRQFAAWLGLTPRVSASGERRQLARITKRGSARLRSLLVVCAQAMLRQYRQGRHGDPLACWARHLLARKRWNVAVVALANKLARIVWKVASSGAAYQARTA

SEQ ID NO: 280117 - protein, 352 aa, unidentified
MEAYRTSAQKRNTIFVGVDLHRLSWHVTVRTEDQELFSGTLPGHWEALRSLLHRYRRDPIQVVYEAGYFGFWLHDRLVGYGADCIVTPPSLLPQQYGNRVKTDRRDSRKLAHLLAKGMLSRVWVPTLKERYHRQVIRRRRQLIGDRVRTKNRIKAELRFYGIEICEPHGPWPRWYVEKLWSICFNDPWMQESFQRLLEQYEFLSEQISKQTQLVQKLSDTSCYRGRVAILRSVPGIGLIAAMELLVELQDVARFRRAEQLAAYVGLTPSQYSSAEKIRMGRITGIGKSGLRGTLVEASWKLITKDGAMREKYERIKARSGAKRAIVAIARTLLLRTRRMLLDGNPYAVGLLA

SEQ ID NO: 280118 - protein, 326 aa, unidentified
MNVFKNYVGIDVSSKKLNINIVGNDNNGDYEIPNDKKSLKEFIKSQKISPDNYVVGAESTSRFHLTCQETFVLSGFEFRLLNPILTGKRISGSIRKKKTDISDARIITDLIMRGEGNVISKKQLEIDKRTVLRTRKTIVNHRTSIKILLKNIKLIDHKNDIRIKETIASLTKLVGKMEKTISELEDIADNCTADTTDEKLIKSIPGFATNLAAVVSTEVGDFNRFPSSTQFKAYVGIDPKVTQSGDKLKNGKITKRGNAHLRYAFYLAAQVARCHDPELKAFYEKKKSEGKPTRVAICAVSRKLCERVYAVVTKQTPYEIRQLSFS

SEQ ID NO: 280119 - protein, 338 aa, unidentified
MDTYAGIDLHSSNSFVGVINDEDQRLYGKRHSNRLDDILRALDPFQDTLKAVVVESTFNWYWLVDGLQEHGYQVHLANPSAIQQYEGLKHTDDKWDSFWLAHMQRLGILPEGYIYPKEHRAVRDLLRRRLLFVKHRTSHILSFQSMISRNLGFKMSSNEIKRLKPEDIGDMFECPNLVFMANNSLAAINFLKKIILDIEKKVKSQVKMRKEFLMLLTIPGIGNILGLTISLEVGDIGRFPAAGDYSSYGRCVESKRLSNGKKKGENNKKNGNRYLAWAYVEAAQFCRRYCAKAQSFYQSKEAKKNSIVATKALSNKLSKASYYIMRDQVAFEEEKLFG

SEQ ID NO: 280120 - protein, 408 aa, unidentified
MAHKLAGIDVHKKVVMVVVVDTHSPDSKPERRRFLTMPGELHQLSNWLRDRGVEEAVMESTAQYWRSVWMELEPHMRLDLAQAYSNRAPRGRKHDFKDAERLVRRLIAQELILSFVPGEEQRIWRNLSRMRLQLVRDRVRLHGQIECLLEEMRIKLSVVVADLFGASGLRILHAMAEGETDAESLAKLANERLRCPRERLIEALTGRSHPTHRQMLALQLERLRLIEQQLNSLNTLLAQAMMPHQEAVLRLAQVPGFGIDSAQQVIAEVGVTASSFASPAEFTSWVGTCPGKEESAEENRSSRSAKGNKYMRRILCQTAHAAARSKGTHFQTVFRRLLPRLGYQSAIWAIAHRLCRLVWKILHEGVHYIEQGVGLEPQVLMNRARYLARQLRKFGYDLHVTTTNPSPA

SEQ ID NO: 280121 - protein, 416 aa, unidentified
MSNKAARSGPIKPDIVVVGIDVAKRRHVAAIRQIDGRVARPFGFGNDRAGFEMLVGRAEAAVRASGARRAYFALEATGHYGHVLQQYLLDRGFVVIGINPAHTKKIKEVFDGSPEKSDAKDAVLISELAAQGRGRPVFQPEGVYADLRRLGKLREQLTNERTRCLNRYTGLVDLVFPELVDLVYDVTCPTIRKLFMEFPTAEAIGRRQYRVIGRRLRDWSIGHFDAARCRAIHEAARTSVGMRPGLDAFALQMRQILCSLKLVESQIAEVEAAQTALLAQVPYAGHLITIPEVSTVTVATVLGEAGDLRQYSTAEALIKLAGLNLYSISSGTFQGRTRISKRGRPLLRRIVFLAALRMSKEGRPLAEFHGRLGERLAKPQVAVAGARKLLRMMYALARDGVDFREEMLAVKRSEAA

SEQ ID NO: 280122 - protein, 412 aa, unidentified
MDIIYPRCAAIDVHKRTAVATIGVVEAPGQPRKHTRTFSTMLADLERLAGWLCEHGVTHVALESTGVYWRPIFNVLEERGLAAVLANAAHVKAVPGRKTDVRDSEWLLELMQHGLIRGSFIPPAPIRVLRELTRYRASLVEEHTREVNRIQKLLEDMNIKLAMVATDTLGVSGRRMLEALASGETDPQALAALAKGRLRRKHPDLVRALAGRVKAHHRLLLRELLDHLAYLERAIGRLSAEIARRLQPFAAAVELLCSIAGIQQRTAEVIVAEVGTDLGAWPSARHLCSWAALCPGNDESAGKRRSGRTRKGNRWLRAALLQAAWAATKVKGGYFGAQFRRIAKRRGEKRAAVAVAHSLLTTVYHVLTRGVAYAEAGAGFFARLEQGKLAHYHRRRLEELGYEVRLELRPTG

SEQ ID NO: 280123 - protein, 428 aa, unidentified
MKKTENIVSAAEELKFAAFVGIDWADRKHLWCLQEAGSDQRETRELEHTPENVDIWASQLCQRFPGRPIAVALEQSRGALVFLLSKYEQLQLYPVLPQMVARIREALYPSKAKDDPRDTELILDILLQHGKHLRRLSPDTEATRVVQGLVEERRTLVDEKTALSNRLTAKLKIYFPQMLDWFPGLDSVVAYALLQQWPSLSQMQQVSSGRLRTFLRKHRCYQEKIIERRIQQIREAKPALGDQAVAQVQAEIVPVLAGLLRQLSLGLDELERKIAKVSAEHPDFSLFADLPGAGAALAPRLLAAFGSQRERYQSAKEISSFSGIAPVTQSSGKKHWVHIRKACPKFLRQSFHEWAGQTIRFCPWARAFYQLQRNRGKGHHAAVRALAAKWIRILYRCWKDRVPYDESIYTAALARRQSPLVPAAVKIL

SEQ ID NO: 280124 - protein, 305 aa, unidentified
MKSYLGIDISKHHLDLSHPAPAKRLANTEKAILPWLKSLPPETTLVCEASGGYEALLLSLAHATRRPIIQLNARQVRDFARAQNRLAKTDRIDAGLIADFAQTFQPKPLPPPDPLQEQLLVLVKHRSHLLTQITQNNNLTQTLSDKHLLRLIAKTVAFLHKQVAQLEALMQTKIAASPDLLAKVNRLQQVQGIGVLTATSLVALMPELGSLSDTQAAALAGVAPFNHDSGQFRGQRHIFGGRSQVRSVLYMAALVASRHNPILRVLYLRLLERGKAKKLALTALMRKLIVLANHLLKYPEFTLAI

SEQ ID NO: 280125 - protein, 461 aa, unidentified
MARKRKNPKRPVRSLETIQPHAAGIDLGSREHWVAGPPREDKTPNVACFGTTTPELFRLADWLKEQGVETVAMESTGVYWIPLFEILDSRGFEVVLANARQITHVPGRKTDMIDCQWIQLLHACGLLRGSFRPSDDICRLRALIRERNTMVEQRSDWVRRMQKSLNQMNVCVHHAVSDITGVTGMAIIRAIIAGERDPNTLACLRDRRCRKSQQQIAAELTGNWRPEHLFNLRQALKMYDQFCTVIADYDGEILAYIQTLQPPDDNDTSAPPPASTSKANNIAKRGQEPLRQALYQLSGFDLTTIDGIGVDIASEIVSELGLDFTAFPDENHFVSYLRLAPNLSISAGKKVANKSKANTCTRVATALRMAAVTLRNSKTALGAFYRRVAWRKGASVAVFATARKLAQLIYRLVRYGQAYFDTGAQAYEARFNHRRLKYYTKALNAMGYNVEPLSTAKAILT

SEQ ID NO: 280126 - protein, 385 aa, unidentified
MTIQVPGAKFVPREYDVFAGLDVDKKSMAVVFTDHAGAMRSLRMAHSSGPLLNYVRKHFAEQRVAFAYEAGPTGFGLHDELVMQAYTCVVVAPSKVPRAPGEQVKTNRLDGRKLSESLRGGQLHSIHVPTRAYRDLRHLVQLRDTHVRQLTASKLRIKSLLLYEGIAFPDPQEKWTAPAMRELQTLPCSETVRFKLDDLLNTLHFHFQAAASAIKQIRRSCLNDPELQQSINVLQSLPGIGWIVASHLVARLGDPQQITNGRQIAGFLGIVSSEHSTGEKENRGEITRSGDSRLRNKLIQSAWTAIKKDPELRAFYRRIYQRHPQKVAARKAIVAVARKLTTRVYVVLKEQRPYVMRPDSSIAPLTAEETVGPRERLDGAQNDQP

SEQ ID NO: 280127 - protein, 310 aa, unidentified
MENIIVGIDVSKDRLDVAVRPSGEIFAVERNSAGLDLLVARLKELSPRIVALEATGGFETVAVAALAAAGLPVVIVNPANVRSFAKAIGQRAKSDPIDAAVIAHFAEATKPEPRPLPDEATRLLADLTARRRQIIEMMVSERQRERRLTAPRLKKSIARVLKALQKELTSVDADIDDAVRGSPAWREKEDLLTSVPGVGSIIARTLLAELPELGQLDRKEIAALAGLAPFTRQSGQWRGHSFIGGGRTVVRTTVFMGAMVAKKHNPTLKVFFERLVAAGKPKMVALIAVARKLLTILNAILRDNRPWQNA

SEQ ID NO: 280128 - protein, 376 aa, unidentified
MDTARLFGARGPSEPNGIDVPKWSFETDHLRNGGSEMNATTYGLDVAKSVFQMYWVEAETGEILNRRFGRDELIRFLAQRPAGRVGLEACGSAHWWARKIKMLGHEVVLLHAKFIRPFVQTNKTDTADARAIWTAVQQPGMRTVAPKTEDQQAMLGLHRMRALLVKFRTMQVNQLRGLLYEFGASFRAGRAAGLAEIRSRIAELEAVLPGTLMRCLHDQLRRIDELQREIELLEKQIGVAQKEDAACCAISAVPGIGRLTATALVATIGDAKTFRSGREFAAFLGLVPRQTGTGGKVRLGSIAKRGDPYLRTLLIHGARSVLCNAKEPTRWQTDLKARRPANVAAVALASKIARTAWAILARGQEYQPNYVSVRPA

SEQ ID NO: 280129 - protein, 388 aa, unidentified
MQTVADRSEAPNAIRTDLGAIFVSLELSRSRWLITSLSPDGGEKMSKHAVRGGDVARLLERFAQLRKKALARTGKVFPFVVIQEAGLDGFWIDRVLRKEGIESHVVDPASITTSRRRRRAKTDGIDGEALVRALLAHKRGEPRVCAMVKAPTPEEEDRRRLCRERKVLIGERVQHVNRVKGLLFSQGISGYEPLRRDRRERLDTLQTGDGRLLPDHLKAQVCRELDRLELLLEQIKAVEAERDVLLAAQQVAAPAPAAMLLDIKGIGPEFAAILWSEGLFRHFDNRRQVASYAGLAPTPWQSGSVDREQGVSKAGNPRLRTTLIQLAWLWLRNQPQSALALWFKERVNRNGGRLKKTTIVALARKLLVALWKYVTAGVVIEGAIVKSA

SEQ ID NO: 280130 - protein, 356 aa, unidentified
MVDKVTEAAVVGGVDTHKDLHVAAVVDQNNKVLGTQYFSTTRQGYRQMLAWMTSFGTLKRIGVECTGTYGSGLLRYFQNAGLEVLEVTAPDRMERRKRGKSDTIDAECAAHAAFSGIRTVTPKTRDGMIESLRVLKTCRKTAISARRVALQIIHSNIISAPDELREQLRNMTRMQLIRTLGSWRPDASEYRNVTNVYRISLKSLARRYLELHDEIADLDVMIAAIVDELAPELIKRNAIGYESASQLLITAGDNPQRLRSESGFAALCGVSPVPVSSGKTNRYRLNRGGDRAANSALHIIAIGRLRTDAKTKEYVARRVAEGHTKMEADTLSKAIYLPRSLHVTAQSKTGGSTVSR

SEQ ID NO: 280131 - protein, 398 aa, unidentified
MTESSDYESVQVFIAVDVGKDTHHAVAINRSGKRLFDKALPNDENKLRSLISDLKQHGQILLVVDQPATIGALPVAVARSEGVLVGYLPGLAMRRIADLHAGEAKTDARDAAIIAEAARTLPHALRTLKLADEQIAELSMLCGFDDDLAAQTTQASNRIRGLLTQIHPALERVLGPRLEHPAVLDLLQRYPSPEKLASLGEKKLAAQLCKLAPRLGKRLAADIAQALAEQTVVVPGTNAAAVVLPRLALQLITLRKQRDEVALEVEQRVLAHPLYPVLTSMPGVGVRTAARLLTEVACRAFASAAHLAAYAGLAPVTRRSGSSIRGEHPSRRGNKALKRALFLSAFAALRDPLSRAYYTRKMSQGKRHNQALIALARRRCDVLFAMMRDGTFYTPQGS

SEQ ID NO: 280132 - protein, 439 aa, unidentified
MQVELPLHVRLIPQEIESAMRNAGIHADSLLEVRRMYNAVGIDVSKGKSTVAVLQPGGTVIRKPFDVSHTSQNLNELADYLSSLDGTTKIVMECTGRYHEPMIKALSEAGLFISIVNPHLIKNFGNNSLRKVKSDPADARKIARYTLDNWTELRQYSGMDNTRTQLKTLNSQFSFFMKQKVAAKANLIALLDNTYPGVNKLFDSPTREDGSEKWVDYAYSFWHADCVRKIGLKAFTERYMSFCKKHHYIFQQDKPEKLFNASKELVAVFPKEKTYKLLIQQSIQQLNLASEHVERLRREMNELASTLPEYSTVMGIYGVGKTYGPQLIAEIGDVSRFTHREALTAFAGVDPGVDESGQHKSKSNRASKVGSARLRKTLFQIMTTLLQNAPEADPVYRFLDKKRSQGKPYYVYMTAGANKFLRIYYGKVKECLRNLEQTE

SEQ ID NO: 280133 - protein, 356 aa, unidentified
MQYLKDIEKFVNGKTVFCGIDVHLNSWDCCFHCDGEVIERLRIPGNYPSLEAQLKKYNDISSAVHAVYEAGFTGFSLYRKLRDSGYNCIVTPPNRIPEEGGKIKTDRRDAEKLSRYLAAGLLKTVHVPPADIEADRRIIRQRENTVRKMTRIKNQIKSFLYLHSIQVPVDVGRSWSKSFVLWLKDLKFFHVNDRFYLDQLLVEYHFMREHLIRQTQYLRELSRSPQYKAQFQCLLACRGVGLITAMTFLLEIFDFRRFPNDSKFSAYLGLTPGQNSSGEHVRLGHITREGNTAVRSALVKSAWTVIRHDPQLRDKYDRIKNRGTNGKKAIVAVARSLAIRLRRCLLDGVPYDVSVA

SEQ ID NO: 280134 - protein, 343 aa, unidentified
MDATTVGIDLAKNVFEIALADERGHIVERQRLSRARFDRFFANRSTCRIVMEACGSAHHHARRLSSQGHSVVLLPAQYARAYVRRNKTDAADAAALIEASRCPDIRPVPIKSVDQQAIQQLHRLRSQWMAARTSRINFLRGCLREFGVGIPVGAKRAIQAVRDTLSSCNGAVPALLHSSLLELLAEIDALEQRCKQIDRELARLNENDPVVERLLQIPGVGPLTATALRASVVDVQRFPSARHFASWLGLTSREHSSGERRRLGRISKQGDPYLRTLLIHGARAVLLAARSSQRRGSSLDRLRTWALDLQERRGHNKAAVALANKLARIVWATWRFERDFSSN

SEQ ID NO: 280135 - protein, 335 aa, unidentified
MDNFYFIGVDVSKKKLDFCVLFEGKVLREEQVSNHQQAVARLIGELKNDLEMDNEQFLICAEHTGQYTFPLVCACKSVECKLWLENPSQIKYSSGMQRGKNDKVDAKRIAIYASRFGDKVKYYDRPTEEIERLKQLERERALYVTDLAKYKGQMYDQKDFMPAALYRKKTKRMKGLIQELQAAIDAITAEMEKIIGSTEVLARQMELLMSIDGVGKVVALNVIIETEAFSRFDNPRKFCCHAGVAPFSYTSGSSQHSKNKVSHRANKNIKKLLHMAAVSVTHRKEGELKAYYMRKVEEGKNKMSVINALRAKIVARMFAVIKSCLLYTSPSPRDA

SEQ ID NO: 280136 - protein, 360 aa, unidentified
MPTKINENLFNDQSFYVGIDYHKKSWKVTILGEQYEHKTMSQDPKPKILANYLQRNFPGGNFQAVYEAGFSGFESCRELNELGINCIVIHPADVPTSQQEKLQKTDKADSRKLARSLRSNEFEAIHVPERKLEADRALARQRFRFMKDVVRTKNRVRSLLFQFGIEIPERFTVAQTRYWSKVYINWLKELSLQEGSLRQTLDNYLRIGELQRKELLEANRQIRILSQTDTYRNNFNLLVSIPGIGLTTAISYLVQIGDIHRFKTFDDMCNYIGLVPSMHGSGEKMQTGKMIKRGRKELKIMLIEASWDAVRLDPALMLKFNELQKRMNKNKAIIRIARSLLNRMRLVLKSQQPYVIGVVK

SEQ ID NO: 280137 - protein, 403 aa, unidentified
MNSVGIDISKGRSTVAVMRPFGEVVISPFEVHHTDSELSALARRLKSLNGETRVVMEATGNYHAPVAKLLHDAGLYVSVVNAKLVHGYGNNELRRVKTDKKDAVKLANYGLDRWLTLPRYVPEEGARLLLKNCYRQYRQYSKVQTVLKNNLISLLDTVFPNVNRLFSSPLRGDGSEKWVDFVAEFWHCRCVSEKSEKAFANKYQRWCKKHGYNFSVAKAHTIHAEASGHIGVMPKSETTKLLVEQAVAQLRATSVALTALKREMLTLAAQLPEYPVVMGMFGVGPTLGPQLIAEIGDVRRFYSKKALVAYAGLDAPPNDSGDVTGKHKSMSKIGASSLRRTLFLVMSVYLRSAPLDESVYQFMDRKRAEGKPYHVYMMASANKFLRIYYATVKAYLESLEHTT

SEQ ID NO: 280138 - protein, 346 aa, unidentified
MEHYVGLDVSLKQTSICVVNQTGSVVREGVVDSDPEAIAAFVRSNVPGVVRIGLETGPTSTWLWTELRRLSLPAICIDARHAKAVLKMQINKSDRNDAAGIARIMQTGWFKEVCVKHLDSHAIKALLVSRALLVKIKRDIENQVRGLLKNLGLVIGRAKMNVFAMRAAELADARPELAAAVEPLLKAREAVGEQIADLDRKVMQMARNDAQVRRFMTAPGVGPITALCFLATIDDPTRFKKSRSVGAYVGLTTRRYASGEVDWTGRISKCGDKMLRSYLYEAANVLLTRVAKWSALKAWGVRLAKRSGLRKAKVAVARKLAVILHRMWIEGSEFKWSSKQAASQSA

SEQ ID NO: 280139 - protein, 372 aa, unidentified
MDYNTVYVGMDVHKDSFTLCAYTVDADKGSYHRKTPADYREVLKYLDFLRTVYGNDVGFVCGYEAGCLGYCLYHQLTDRNVNCVILAPTTMLEQRSKKRIKTDKRDADIIGRCLAQRNYSPVHVPTAGDEETKEFLRMRSDHKLALKKIKQQILAFCLRHNYRYEGKSNWTDRHMKWLRSLKPAALYKEILDEYLMTYTVLSEKIERLDTRIEELASEDKYSESVKKLCCFIGVKTHIALSVLVEVGDFNRFATAEKFASYIGLVPGEDSSGDEQVKLGITKAGNRHLRILLTEAAQCYGRSKTGYKSKELKTRQAGNPPQVISYADKANDRLKRRFYKMVLGKNKKHNVAKVAIARELACFMWGMMTDNIA

SEQ ID NO: 280140 - protein, 455 aa, unidentified
MAHRKKKIPAQLVEDEDCQLRCERVAGIDVAKAKADVCTRLPPSRDGGRRRSRTEEVPATAREVTALGGRLLADGVEVVVMESTSDYWRIWFYLLEAAGLRVQLVNARQARQLAGRPKTDRLDAQWLARLAETGLLRPSFVPPPEIRALRDLTRTRLQLVRDRTREWQRLEKLLEGALVKLSSVVSSLAKVASARVILEAVAGGQRDPKALAALADSRVKGGRAAVEAALEGMRLADHHPMLIRLHLDRITDLDRRAAGLEDEIEAALSAVPAAWGVTAGGEPSPDPGPGAGALDAAARLAEIPGVTLELARAIIAETGLDMTRFPTAGHLASWAGLAPAARQSGPRTRKPKKGQGNDYLKGYCTQAATGAARTSTFLGERYRRLHKRAGGLRARCAVGRSILIIVWHLLSDPAARFTDLGPGWHARKTDRDRKIRTHLRQLEALGLHVTVTPAA

SEQ ID NO: 280141 - protein, 412 aa, unidentified
MQDILTCVMGLDVHRDIIVACLVKGAVDAEPEAETRTFSTLIPEMQKLRDWVIESECRNIAMESTGIYWQPIYEMLESCFDGEISILVVNARHMKNVPGRKTDMKDAQWIATLLRAGLLKGSFIPDKAFRELRHLTRYRKSVVHDITAQKNRIDKFLQSSGFRFTAFLSDTFGASGRNIIRHLIEHGSIDREALDKCLKTKTRNRIDEILVALNGSLSEHQRRFLNMVFRHLEDLEAHKHTVEDEITEEVLKHTDTLNLLCSIPGIDVTAAAAIIAEIGTDMSSFPDSQHICSWAGLSPGNNESAGKRKSVHINKGNPYLKSMLCEVAWIMASHRKLYLSGWYWKVKQRKGAKRATIALARKILSIIYTMLKTGTPYNEECFEQRRQRCERKRANRMVNELQKLGYTVVAPD

SEQ ID NO: 280142 - protein, 325 aa, unidentified
MAKRITVCAGIDTGKRKLDVAIDGGCEPLQVENTAEGHKVLVEWLQRHKVKRIGIEASGGYEQPVVAALRRKRFVVIVFQPAQVRAYAKFHLQRAKNDKIDAALIAACTAAVKKIYPAPDPRLSPFAEQLTMIDQIGEDIMKLKNRIETCRNERIRAVWKEDIARLTKRERTELKALVAAIRQYPDLAERFELIYSVGGAGVPTAVAILVRMPEIGQLTREQAAALAGLAPYDDDSGGQVGARHIDGGRERLRRALYLAALPASMRWNPQLIALYQRLRAAGKEHKRALIACARKLLIFVNTVVARGTPWQSEPPAASTANPSAA

SEQ ID NO: 280143 - protein, 309 aa, unidentified
MDAQYVGIDVSKARLDVHVRPSGDAFVVARDDKGLAELVERLRAIAPRLIAVEATGGYETVVAAAIGGAGLPLAVVNPAQVRHYAQALGKRAKTDPVDAEVIARFAEATHPEPRALPDEASQALAELVTRRRQIITMMVAERQRATRLPKRLRKSCERVVRMLEKELAALDIDIDTTVRGSPAWRATEDLLASVPGVGSITARALIAELPELGRLDRRCIASLVGVAPFTRQSGQWRGKSFIAGGRRSVRAALFVATMAAVRHNSIIRHFRQRLLAAGKPKMVAMIACMRKLLTILNAIARDQKPWQPA

SEQ ID NO: 280144 - protein, 317 aa, unidentified
MAQNRTIVGIDVSKAKVDVALHSGAEATFPNTPPGRRQLVKWVKQHQVDKAVMEASGGYERSWARLLQDGGLEVWIVDPKRVRRFAQSAGQLAKTDRIDARMIAWFGETFADGIGRQPDAAREELDRLVSARTDLMDLRTRLAHLGEDDQPDEVRRCYRKIEKHVTDQVSALEAAIEARVEANARFAELARFICSVPNLGKISSAGLIAFLPELGLVSNKQASALVGVVPYEDSSGKHQGRRFIQGGRRKLRNLLYLPIVGAATRGNPVLKAYYKRLRAKGKEPKVALIACMRKLIVILNTMVARGEMWDPQKHAIP

SEQ ID NO: 280145 - protein, 385 aa, unidentified
MNRELCLKTDSSPYLDTLAFLNGDLYKKLTFLLLRFLGDVQYPFPLQIAKHKDMENFYFIGVDVSKKKLDFCVLLNGTIVLEEVVNNNIPSIRRFLETFLVDFKTSIDNLLVCAEHTGQYTFPLSIACQSFSCGLWLENPARIKYSSGFSRGKNDKVDAHRIARYASRFSDNARYYQRPREEIERLKQLRNEQDLYKSDLAKYKGQLSDQREFMLDRVYQEKAQRLERLIEELEKLIKDIDLLVETIIRSCRVLWRQRELLLSVEGVGPSVALCLIIETEAFTRFDDPRKFACHAGVAPFRYTSGSSQHSRNKVSQRANKQIKTLLHMAALSITGRKSGELKAYYERKVKEGKNKMTVINAIRAKLIARMFAVIKKDQFYTPVYS

SEQ ID NO: 280146 - protein, 345 aa, unidentified
MEPMYYIGLDVHKRKISYCVKDASGQLHSEGSLPAARFDLDCWMKTLPRPWSAAMEATMFTGWIYDHLKPHAAALKVAHPLMLRAIAAAKKKNDRIDANKICDCLRCDFLPECYRASTAIRERRRTLRYRNLLMRQMVQMKIKTGSLLMEAGVSYNKERLHKAAYFRELLATNPDIDDSLRSLLRQCREMVVRLSKTENALIYSLQHDRLLAERVERLMSIPAIGPITALTWALEIGDVQRFSSAKKAVSYCGLCGAEKSSGSTVRRTPLSKQRNKHLQTTLIEAAKMAPRYSPSLARLYDREKQRSNANRATLAVARKLVAYLVAVDRGKTHFLVRDRESSVAA

SEQ ID NO: 280147 - protein, 411 aa, unidentified
MQIVYERCAGLDVHKKSVVACLLFPEHGHQRKERQTFSTMTPDVVRLRDWLKEHDCTCAAMESTGGFWKPIYNVLEEHLQVFVVNAQHIKAVPGRKTDIKDAEWIADLLQHGLLRPSFIPPAWQRRLRDLTRSRSRLIEERSRVIARLQKVLEDANIKLASVASDVMGTSAQHMLHALVKGELSPSAMAELARGRMRAKRAQLAQALTGHLQPHHGFLIAEHLAHMDSLEEAIHRLSAEIAQRLGPYEEILVRLETIPGVKRRLAEIILAEIGPEMSRFPSAGHLASWAGMCPGNHESAGKRLSGKTRKGSQWLRTALVEAAHAASHCKECYLSAHYHHIAVRRGKKRAAVALGHTLLVIIYHVIAENKEYEELGGDYLDQLDRHGKEKRLVRQLEKLGFQVSLTPTSPAA

SEQ ID NO: 280148 - protein, 413 aa, unidentified
MSKRRKRAQSQSFKLQSLPKQLQHINLKAAGIDIGSERHMVAVPEGRAEVAVREFGAFTADLIALADWLRQCGVTTVAMESTGVYWIPLFELLERRGFEVKLVDARQVKNVTGRKSDILDCQWIQQLHTYGLLAGAFRPADELCVLRSYLRQREMLTQTASMHIQHMQKALQQMNLLLHNVVSDITGVTGMKIIKAILAGERDPQVLANHRDNKCHHDRATIAKSLVGNYRIEHLFALRQAVDLYEIYQTEIGDCDEAIVTQVSAQPDLTDELPPPEQKRTSARDRQRGGVNVRDLLFQKSGVDLFAIPGLAADTLLVLSSEVGFDLSPWKTVKHFSSWLSLCPGTKISGGKVLSRRVKRNPNRAAQALRMAAATLSRSKSALGAFYRRIKARSGGKPAITATAHKIARIYLC

SEQ ID NO: 280149 - protein, 349 aa, unidentified
MLADEVDYVVGVDTHRDQHVLAVVAAPTGVVVAQRSVFASARGYAEALRFAQTHAAGGRVWAVEGAGHYGVGLTRHLSGRGETVLEIGRGPRDERRLRGKDDQLDAIRAARTALASETLALPRAGQRREALRLLLLARRSAVDVRRQALVQLRSVIVTCPDQLREQLRGLPVRRLIVRCSRLRHPPSCTPDELASRLVLRSLARRVEAATAEAAELEHEILAHVRALAPQLLDEPGVGPIVAAQLIVTWSHQSRVRSEAAFARLAGTAPIPVSSGQTIRHRLSRGGDRQLNRALHTVILHRRLHDPATKTYIARRLAEGKTTRDATRLLKRYLARHMYRVLQNQTPLMT

SEQ ID NO: 280150 - protein, 345 aa, unidentified
MGPMYYIGLDVHKQKISYCVKDVGGRIHVEGWIPATRFDLDRWMKTLPQPWSAALEATMFSGWIYDHLKPHAAELKVAHPLMLRAIAAAKKKNDRIDANKICDCLRCDFLPECYMAPTAIRERRRTLRYRNLLVRQMVQMKIKISTLLMEAGVSYNKQKLHKAGYFRELLASNPDIDESLRSLLRQCREMVVRLGKMETALIHSLQQDPLLVERVERLMSIPAIGPITALTWALEIGEVQRFSSIKKAISYCGLCGDEQRSANSVQRTPISKQRNKHLQTTLIEAAKMAPRYSPTLAQLYDREMQKGNANRATLAVARKLVAYLMAVDRGQTHFLVIDQETRTAA

SEQ ID NO: 280151 - protein, 369 aa, unidentified
MPHVTSIGLDVHARSVAAAAFNPFTGEVVHRDFGTDAAEIAEWALGFEGPRACYESGPTGFHMARELRALGLDCAVAGGSKMQRPAADARRKNDRRDAEFIARMLATHNIVEVPLPDAAVEAARDLDRALDDATAEYRRARQRLNMFLIRLGHVWDERNADGTRKGSWTRAHWRWISGIRLEGPQRDVLEYYVTAARCAESDRRQLEKKVLALARTDRWRPAVEALSCIKGIDTLTAFRLAAEAGSFTRFRTAPAFASWCGLVPSERSSGETERRGGITKTGNRLARTALVESAWHYLTCPPRPKAPAPGADVPAAIRARADDCTARLCRRREALAAAGKSSCKANAAVARELACWVWEIGRRAEGTLG

SEQ ID NO: 280152 - protein, 414 aa, unidentified
MRLFVGIDVSSEQLEACFMNMDGDKLDTLLVNNNLAGAQYLRDRIVSQADKLPASEIHIGLEATSVYSWHPAMFLHEDEALKARKAKVFTINPKLINKFREAYADLDKTDRLDAWIIADRLRFGRLTTTIVMQERYLALQRITRMRFHLVHNLTREKQYFLQNLFYKCNAFRSEVESSVFGNAIMELLSEKYSLDEIASMEVAALADYLKDKGKNRFPDPENVAACIQKAARASYRLSKVMEDSIDLVLGASIQSIRSIQAQLKELDKAIEKMLDGLPGAKCLRSIPGIDLVYAAGILSEIGDIERFDDQAAVAKYAGLVWRKHQSGPFEAEDTKRIRSGNRFLRYYLVEAANSVKNRDPEFGEFYRKKYKEVPKHQHKRALVLTARKLVRLVDVLLRNDQLYAPRRKVTNTKD

SEQ ID NO: 280153 - protein, 444 aa, unidentified
MARKSKKQRLKIVHPNCAGIDIGSKEHWVAVDPDQCEEPVRCFSTFTDSLNHLADWLESLDVEIIAMEATGVYWIPLFELLDKRGFDVQLVNSRATRQVSGRKSDVLDCQWIWQLMSHGLLKGAFRPADSICILRSLVRQRDNKVKEQSRCIAHMQKALTQMNIQLDNVVSDLMGKTGTAILRAIVAGERDPQKLASLRNSRLRADEETVARSLEGNWREEHLFALTQALAHYDFISQQIHEVDLAIEQQLVALPSLTDESREPVKPLRNPHRTAAQQKALHQALNHVMGVDLTAIPTIGIETVLVLASEIGPDLSRFPTCAHFCSWLALAPPTRISGGKQLPGRPPKVFNRAGQALRQAASNARSSQSFIGASHRARLARMDGSYAVKATAHQLARLIYAMLTKGQPYVEQGMEAFEARSQDRQLRALQHKARKLGLQLVEAA

SEQ ID NO: 280154 - protein, 342 aa, unidentified
MRIVMLGIDLGKNLCSLAGLDETGAVVLRRRMKRASVLPFTAQLEICTVAMEACCGAHHLGRQLVAQGHVVRLMSPAYVQPYVKAQKNDERDAEAIAEAATRPTMRYVEIKSEAQLEVQSLHRVRGRLVAERTALINQLRALMLERGIAVPQGRCKLARYLPEILADERNGLGPRLRQLIEDIREEWRSIDQRIKGYDDELAEQVRNEDTAKRLISIPGIGVLTATALVAAVGNAQTFRCGRDLAAWLGLVPRQATTGGKPRLLHISKRGNGYLRMLLIHGARTALPGLAKKDTPLGRWVKALLARAHRNVVTVALANKLARIAWAVLARDRQYVTVQAIGK

SEQ ID NO: 280155 - protein, 363 aa, unidentified
MQVRHIFVGIDLGDKNSVARIGVDREKSERFGFVNTRAGRARLIGDLKRRGEQAGGAVIVMAYEASSCGFVLRDEAWAAGIECKVLAPTKMEKSVEQKKNKNDDRDADDVLEKLRGHVMAGNRLPTVWVPDLETRDDREVLRTRLALSERQTQVKAQIQMLLKRHGLEKPSDLGSTRSKQYRKWLESLSESKYLGWGTRQSLTSLLSQLKGIEAEMENLDKLVKQLGGQQRHKPIVEALMKEKGVGLLTALVYRTEIGQASRFRRGRHVGKFVGLTPTSHESGQQSDRKGHISRQGPPRLRRVLCQASWVHVRHDPHSREVYQRLVAKNPKKKKIALVAVMRRLAVRLWHRMRESELQQQTQA

SEQ ID NO: 280156 - protein, 410 aa, unidentified
MVKENFIYVGIDLHKETHTAVMIDCYNQKLGEITFPNRPAAFPKLVTKVKKCNTDGKEVVYGLENAYGYGRALAVWLIDKGYLVKDVNTAISHRQAKHRGAMYRNSDSDDAKAIALATLNMLDKLPDACPNDAYWSLGQLVHRRDNIMKQRTRLVNQLHEQLCIAYPSYKQFFNDISRPTALYFWEHYPSRKYLKGKSVEDLRAELVPVSHNKCSTKTCEKILDAVASDKVKNNAYQDARDMVTLSIVSDLQHYDSQLTEVDKMLEQMYKMLGCTLTTIPGVNVITAVKILAEIGDIKRFSNANKLAQFAGIAPLHLSSSGKGKDVATKQGNRRLQATIYFLAIQMVQISSKGTPRNPVVRAYYEKRKAEGKTSQQALICISRRLISVIYGMLKNGTEYRMPVVENAGEK

SEQ ID NO: 280157 - protein, 399 aa, unidentified
MGHHSEAFIGFDTSKSRNAVAIAEGDRGGEVRYLGEFPTTEVATRKLVAKFAAKYDKLTFCYEAGPTGYGLYRLITSIDHECVVVAPSLTPKKPGDRVKTNRRDAVSLARLLRAGELTAVWVPDERHEAMRDLSRARQAAKKDLQGKRQQISSLMLRLGRCYPGKKTWGSAHMTWLRLQKLEHREQRMALEELLEGVRQEGERVERLEQAIREAIPEWSLVELVTAVQAMRGFDLIAAVGVMAETGDLSRFQNPRELMGYLGLTPTESSTGDSVKRGGITKAGNGRARRILVEAAWAYRHPARVSREKQAKVAAAPRRVREIAWKAQTRLCRRFRFLERKGKRRTVAATAVARELAAFVWAINREVMRNRQPTSSGAVGRSSRERARPAHSPSNAIQIK

SEQ ID NO: 280158 - protein, 382 aa, unidentified
MEPNLTAGTLPKPIGPVLYLALELSEREWELGFTIGFAQNPRLRNITGRDIDSLKKEIRLAKHRFRLPETTVVISCYEAGREGFWLHRCLTSLGILNLVVDSSSVEVKRRARWNKTDRLDAKKLVSMLMRYHHGEYKVWSVINIPSSSIEDYRQLHRELRALKKERTQHTNRIDGLLATQGLSISISPSFPDHLEKLRTWDGRLLSPYLLTRLEREYRRILLIQEQIKEIDDLRHTLLRTSEDPAIEQIRRLMKLKGIGINSAWIFVMELFAWRNLRNRRQVGAIVGLTPTVSQSGDSSRQQGISKAGNTFVRDIIIEIAWGWLRYQPQAKSSRWFQERFGHGSKRLRRIGIVALARRLLIDLWRYLETGALPEGAVLLDPS

SEQ ID NO: 280159 - protein, 387 aa, unidentified
MMYCGIDVAKLKHAVSLMDDKGQTLKAAFTITNTRSGFDQLLTELHNLTGEVSVGLEATGHYWLALYDELTRKGYPVIVLNPMQVAAYRKSGIRKIKSDVTDAVWIADYIRIANLPASELNLPAFLQLRELSRFRFRLTEQVGNLKRKLLTILDRVFPEYERLFSNVFLQASRSVLQEAVSAQEFADFNLQELTDILAEASRGRFGQEKAEKIQEQARNSVGVGFLTNAVHLEMQCLLAQLELLDDQRDQIDLAIAELMNQIPQHITSIPGIGPVTGAAILAEIGDIQRFESVDKLVAYAGIDPSVYQTGQFEASETHMSKRGSPYLRHALWLAATAALLHDPSLKEYYQKKRNEGKHHGTALGAVCHKLLARIFVVLKEQRAYVIR

SEQ ID NO: 280160 - protein, 345 aa, unidentified
MNIIRVGVDIAKSVFHVHGVDRHGQTQWQGKYARNKWLTALSRKVPAGAEIGMEACASSHYWARELQKRGYFVRLIAAQFVKPYVKSNKNDRVDAEAICEAMSRPNMRYVAPKTVAQQDVQAAHRIREELVGQRTAKANQIRGLVGEYGVVAPVGIQQLRHALPEWLEDAENGLSESFRVLLHGLADDLRYLDDRITALDERITESVKQDPVARRLMTLRGVGPLTASALSGALGDGKAFRKGRDFAASLGLTPRQHSTGGRDRLLGISKRGDSYLRKLLVHGARAVLRHIGGKDDGLSHWLQALVSRKHVNVATVALANKTARIAWALVHNETAYDDKLAAVGT

SEQ ID NO: 280161 - protein, 330 aa, unidentified
MEPKYIGIDLHKEFFQACAIDGQGTRVWEGRFPRTDGGLTLLRAHCAPATAVAVEASGPTWAFVDALMPSGARICVVDPRKTKLKAGYAAKTDRLDARRLADALRRDSVVSVYVPPPAIRELREVCRGRHQVIRVRTRVAQMIRALLLRSGVGDVPVRRVFSPRGLAWLETVRLPPEAQASLTRLRHMLVAIHAEAVEADARLTIRAQADPIAVVLDTLVGIGPVLGLTIRAEVGDMGRFPRGRELASYAGLVPRVDASADRYWSGRITREGAPWLRWALVEAAMHARRRQDALGRWARQLAVRKGIFKARIAFARRLCDEIVEVWPRER

SEQ ID NO: 280162 - protein, 335 aa, unidentified
MNQARMHIGVDVGKESLDICYPNGNKEHIKNTKRCRAKLIKEAKRLGAIISFEATGPYEESLEVDCLSAGVPAVRLDAWKTRKYAESQGILEKTDAIDCEMIRDYATSLRLEKLHFVREMSEGYRRLKRASGVRRNLIKAKVLIANQLESVVDADIKASIVRLVDSIDRQIEKMDDACSAAIASDEEMNALSKRFEQVVGIGPVLINTVFATCPDIGSFTAKGIAKFAGVAPLENKSCTIKKKPKPRRGRRDLRNALYMAAVSACHSNHLLQSMYKGLLARGVPKRVALVALARHIIILMNYIAKYPDFNPAIDPKKAAILASPKRKPGRPRKNP

SEQ ID NO: 280163 - protein, 342 aa, unidentified
MDHFAGLDVSVKETSVCIVDDTGRIVREVKVASEPEALLSVLKNPAYHFKRIGLEAGPLSQWLFSALAEAGLPVICVETRHMRAVLKAQINKTDRNDARGMAQMMRAGLYRPVHVKTLRSQKLRMLLTHRKLLQSKAIAIDNDLRGTLRNFGLKVGMVGKVRFEARIKELVENLPDLAAMVEPLLIVRRTLREQFCVLHRRLLAIVRDDEVCRRLMTTPGVGPVVSLTYRATVDVPARFRKSKSVGAVFGLTCSKYQSGEVEWSGRISRCGDEMMRVMLYEAAQSMLRSKKWSWLKAWAMQIARRRGMKKAIVALARRLAVIMHRIWVDGTEFRWTREVAAA

SEQ ID NO: 280164 - protein, 320 aa, unidentified
MNGILGLDLAKGSFESLVIKADGQRQTEQFANNRQGYEQLQDWMLKQGVEQVHACMEATNIYWEELAYYLVEQGHQVSVVNPAQIKGFAQSQLQRSKTDKQDSQVIAEFCAQTKPAVWQPPTANQRQLRAWVRHRDALVKTRTQQLNRLDSCPDELVRSSLQSLIATLEQQIAAMQSQIDALIAQTPELQVAYGLLLSIKGLGPTTVIKLLAEFYDLAAYSSARAAAADAGLTPAHHQSGTSVYRRPRMSKIGKRAVRAALYWPAITAIRYNPLVKELADRLRAKGKANKVIIGAAMRKLMHLAYGVLKNQTPFDPAYAH

SEQ ID NO: 280165 - protein, 344 aa, unidentified
MNYYAGIDVSLECSSVCVVDGAGKIVRESKVASEPEALIGWFRELGLNVTRIGLEAGPLSQWLYAALRQAGLAVELLETRHVRNALKTMPVKTDRNDARGIAQLMRLGWFRPVHCKSMEAQETRALLTARRLVKSKLHDVEMSLRGILRGFGLKVGSTAKTSFEARIRELVAGHPTLQAIAEPLLAVRGVLRRELAGFEKTVRALARSDLRARLLMTTPGVGAVISLTYASAIDDPARFKSSKIVGAFFGMTPTRYQSGETDVSGRISKIGDAGVRAVLFEGAHVILTKPVKGCTALKSWAMRIADRAGMKKAKVALARKLAVIMHRMLVDGTPFIDAAKAAAA

SEQ ID NO: 280166 - protein, 350 aa, unidentified
MEKPRYYVGIDIASLNFYAAAGSLVNNEWQLIIQPKSFDNDYDSLPKFLHWLQQHQIKPGNAIICMEATGVYNEVVAHFLVANGYSVAIQPPLEVKRAFKPVGHKTDPVDSQQIAEYAYRFFDELRLWAPREQILEQIKTLLATREQFCMQKTAHMNALKALQRKYVRTPLAEKLHEDTIIHLKTDITAIEQEIERLIDQDPTYRQLVGLMMTIPGVGLLLASHLLVTFQSSPQPYNPKSLAAFIGICPYQKQSGTSVRGLATSRHYGPPGLRRLLYLAAMSVRMHHPYFRHYFTRKVQEGKSKKLVINNIANKLLRIICAVLRTQTPFIFGYHSVHPQLLNLKQPLTMS

SEQ ID NO: 280167 - protein, 368 aa, unidentified
MKHDTTYVGVDAHKKDLFIAMLIGDRSTPVTWTVANEPNAVRRLVRKLEREAPGPVRCCYEAGPCGYALQRQVTTPRVSCQVIAPALIPRKPGERIKTNRRDARKLAELLRAGLLTEVRPPTLAEEAVRDLCRARDDAREDLQRCRHRLGKLLLRRGLHYSGRNWTRAHRRWIDSLEWTQPSERIVVDDYLLAIDHVEARLIELDTQLTKLAQTEPYREPVGWLRCFRGIDTLTAMLILAELHDFRRFPNARALMAYLGLVPSEDSTGEHHRRGPITRTGNALVRRLMIETAWHYKHRPSVGVALTRRRKGQPGRVIAIADKAQQRLCRRFRSLAEHHKPAPKIVVAIARELAGFLWAALQPAPTLTS

SEQ ID NO: 280168 - protein, 425 aa, unidentified
MPNAPAVSCAMIVVERTRVTTSTPESPDVPARNGFNGFFRALVSAKSARMCERAVLNNRPSLDLSPFALEGHRACRGAWDRSGVFLNPNSCMGLEPGPSKEGSWMMAQNDLVVAGIDVAKDKVDVCIRSLSLRRTFASTAEGRRELASWLRRKKVGKAVMEASGGYEREWAKALRDARIEVRIVDPKRVRSFAQSAGRLAKNDTIDAEMIAWFAETFDEARGQTYDAVREQLHQMVHARQALKDMQSKLASQGEHAVPAAVQRIHARISKTIAAELVTIEIAISALIQATPHFTELAEIIESVPGLGRTTSAALIAAMPELGQANNKIVAALLGVAPFDDDSGRRRGERHIKGGRRRTRNVFYMACLGAATRHNPVLKAFYDRPVAKGKLKKVALTACMRKLISILNIMIERRQKWDAKCYAVTC

SEQ ID NO: 280169 - protein, 348 aa, unidentified
MRFYTQQHRFYCGVDLHARTLALCVLDAQGQVVARPSVPASPQAVLDALAPFRDDLALACECMFAWYWLADLCQEQQIPFVLGHALYMKAIHGGKAKNDPIDAEKIARLLRGGNLPVAYVYPKAMRATRDLLRRRTFLVRRSAELLAHVVNTNSQYNLPPLSKKLSYAANRAALDLSRFADPSVRKAVEADLALADACDEQIRDLELYLTRTAKVDDPQAYQRLRSVPGVGPVLALVLLYEIHDVRRFPSAGDFLSYARLVRCAHESAGKKKGSGGSKIGNAHLKWAFSEATCLLLRQSEQAKAWLARREKKRGKARALGALAARLGRAVYHLLRKGEAFDAQRFFAS

SEQ ID NO: 280170 - protein, 349 aa, unidentified
MRTKPKAEAIAYGIDIGKKVFHVVALDQSGVPIQRAKFSRETFLRFFAEAPASLIGMEACQGSQWLARKLVEHGHDARIIPARFVKPYVKSNKTDTVDAEAIAEAVTRPTMRFVQLRSEEQVDLQALHRIRDRLIRNRTGLMNQARAFCFEYGLAMRKGAGGFHADIRRNLGDLDNDLTPVMRKLLSDLLEDLAQLECRIAKLSREIEAIADRDETVRRLLTIPGIGPLGATAIVAAAGDGRQFRKARDMAAWLGLVPAERSSGGKQTLLGISKRGNGYVRRLVIHGARSCFLHLDREAHALGQWLSRLEARTHRNKAVVALANKIVRIVWAILTRPGQLYLRSKGAAA

SEQ ID NO: 280171 - protein, 418 aa, unidentified
MQTELSNYTAIIGIDWADKKHDVCIHVTATGKQELLEIPHRSEKIDEWARSLHRKHGGPMAVALELSKGPIVAALQKYDFFVLYPVNPSSLVSYRRAFTPSGAKDDPTDAAYILELLLRHPDQFHPLQPQSVEMRALMTLTEQRRRLMNDRVRLTNRLRNALKQYYPQALEWFDRIDTRLFCDFIKRWPTVVQARRARKATLETFFRAHNMNRKPLLEKRITAIKSAVPLTTDDGVVIAYRLLALTLVEQLETMLACLGHFDEEIAALAPQHPDYELFGGLPGAGPVYTPRLMAAFGEQRERFNNAAEVQKYGGIAPVTERSGQQLWIHWRWQAPTFLRQTFVEWAAQTINKSYWAGLYYYQQRAKGCSYQAAVRALAFKWIRILYRCWKTRTPYDEARYLKALQERGSSLLKTAEAA

SEQ ID NO: 280172 - protein, 427 aa, unidentified
MSVTQNDKIRQVTDTTMVIGVDIASEFHWARAFDWRGLELGKAVKFENSAEGFNFFLRWVSELTVEQKKDSVMVGLEPTGHYWFTLAAHLQGGDFKLVLVNPYHVKRSKELDDGHPSKSDKKDPKTIAKLVLEGRYVYPYIPQGLYAELRVTMNCRWRIRKELASLQNQIQRWLKIYFPEHSKVFGRFTGAGSMALLHSAPFPSDLISLGVEGISGIWKQMKLRGIGRKRAQRIYEAAQTSVGCTTGMEAARMELQILLEDYDAKLQQYERVMQVVENLCSQIPAVAELLKIQGLGLVTVTGLFAEIGDIRRFESPRQIQKLAGLAITENSSGKHKGPTEISRRGRSRLRAILFRAAIPLLAKNREIQLLHRYYTTRQNNPLQKIQSVIAICCKLLRVFYALATKDCAYSPEKVLADIQRNQPLKAA

SEQ ID NO: 280173 - protein, 423 aa, unidentified
MLEETHDREEIIQRVAALDIGKAELVCCVRVPSPDAPGRRLQEVRTYATVTRSLLAMSDRLRQLGVTRVVMEATSEYWKPAFYLLEAHGFETWLVNARDVKHLPGRPKTDRLDAVWLAKVAERQMLRPSFVPPPEIRRLRDLTRYRADLVAARTAEKNRVEKLLEDAQIKLSVVAADSFGVSGRAMMAALIAGERDPKVLAQLARGRLRAKLGVLEEALTGHFSDHHAFLLATMLARIDQISIDIATLEAKLDQEIAPFAATVDQLDEISGVGRTAAHVLIAEIGVDMGRFPTPAHLAAWARFAPGVTESAGKRKGTAATGHGNPYLARVLGEAAVTAGKTNTFLGERYRRIARRRGTKRAIVAVGRSILVIVWHLLADPDARFHDLGPGFYDTRNNADRTKRNHIRQLQALGYKVTLEPAAT

SEQ ID NO: 280174 - protein, 358 aa, unidentified
MQRNKKTFKGQNIYIGIDVHKKNWQVAVITESGYTERLSTAADAKALFKFLKSHYPDGNYRAVYESGFSGFATHYALSELGISCVVAHAADIPSSQYELTMKSDRIDAEKLARALRAGLVRGIYVHPKDNLDDRGVLRIRKTIQIQVGGYKTRIKHLLHSNGVELPERFSRSGTHWSRAFIAWLREDVRLLSDTRRSLDLLLLQVETLRANLLEATRRVRALSMTDRYREDCALLMGIPGIGLTVAMTILTEVCDIGRFGNERQFASYLGLVPTSHSSGERVSHGEMTFRGNKHIGPLLVEASWVLIVRDRELGRMYTEYRWRMAGQKAIIKIARKLSNIIFAVLKTRKAYEPYRRDA

SEQ ID NO: 280175 - protein, 422 aa, unidentified
MLEQAQDDEQIIARVAALDIGKAEVMCCIRVPGDAPARRRRQEVQAYSTMTRSLLVMADRLRELRVTRVVMEATSDYWKPVFYLLEAHGFDPWLVNAKDVKHLPGRPKTDRLDAVWLCKIAERQMIRPSFIPPPPIRQLRDLTRYRVDLVSARTAEKNRAEKLLEDAQIKLSVVATNIFGVSGRDMMAALIAGERDPRVLAQMARVRLRAKMSQLEEAFHGHFSDHHAFLLAKMLARVDAITADIAEIDERIEAQLRPFADAVTTLQQIPGIGPVAAAVLIAEIGTDMARFPTAGHLASWARFTPTVKQSAGRNKGNGSTGRGNPYLARILGEAVVAAGRTSTFLGERYRRLARRRGKQKAIVAVGRSMLTITWHLLSNPTTQFTDLGPGFYDSRIQPDRKKREHIRQLEALGYKVNLEPAA

SEQ ID NO: 280176 - protein, 352 aa, unidentified
MNFIGIDLHKQTISVCVKNQERKVRKRQSLNCAEPDKIVAFFRQWGEFQAVVEATASYEWLWQLLEPLAQRLVLAHPKKLRVIAESKNKSDRLDAEVLADFLVLDMIPEAYRPSLRQRQHRALIRQRCFVQKNLTRVRNKIRRVLSNYNADRRDLFTRAGLQYLQEAKQQLSEADRFVLNQLLAQWNYHRQQFQAVGRRLKTFAQKASIKEKEIRAVLGSMPAVGPTTIEVVLSEIGDIERFRSQKKVVAYAGLAPGHRESAGHKKDLGITKEGSGLLRWVLIQTAWRMVRCTLRWRSVYENLKKRRGSKRAIVAVARRLLTVMAALWRTGQRYRLDRGGPPLAQAVPAPAK

SEQ ID NO: 280177 - protein, 312 aa, unidentified
MDAIYVGIDVSKDRLDVAVRPNGESFFVSRNGAGIDELIGRLKTVSPRLAAIEATGGFETVVAAGLAGAGLPVVVVNPAQVRAFAQALGRRAKTDPIDAAVIAHFAEATKPQVRQLPDETTQMLADLVSRRRQIVEMIASESQRARRVTSARLKKSIARLHKALEKELSDLDGEIGDHVRGTPAWAEKEDLLASVPGIGPTIARSLIAELPELGSLDRRQIAALAGLAPWTRQSGQWRGKSFIGGGRANVRRVLFMGAMVAARFNPELKRFRDRLVAAGKPKLVAIIAVARKLLTILNAILRDKTPWQLKNA

SEQ ID NO: 280178 - protein, 369 aa, unidentified
MSVLSAADRLHEATRHGTYSGSAPMTHPPQLVLGVDTHKDVHVAVLLDQLGRHLATASFGTTDAANRDLMAWTLRHGQVTTAGVEGTGSYGYRLAQHLADQGISVVEVNRPDRARRRRKGKNDPVDAEAAARAVLAGDAHAVPKDRNGAVGQLRALMVARRSAIKARTQATNQLRALLVDGDDELRRRLQPLRKAHLAHACTQLAPAVGLQLALASLGRRWLALNDEITSLDAAITKALRRTAPRLLERHSVGVQTAAQLLVTAGDNPDRLHSEAAFAAVCGASPVEASSGKTIRHRLNRGGDRAANSALWTIANNRLMHDPRSRAYAAKRTAMGNSRKEVLRCLKRAIARELYPLILDALTPTAQSLT

SEQ ID NO: 280179 - protein, 376 aa, unidentified
MDRPSKVCGGTEAEEGSSSLGCGRNETLMEGQPMTNSPHMGRFRMTYCRGVDVSKQSLELWDGTQEGEVPNERGLKTLKKLLKKRYGGEWNQAVRFIYEPTGPYSNYLRAFAAEHEVRVVEVNPTKSANFAKVLGNRSKTDAVDAKMLSTFHALLTEEDFRIPEIDERAEQLGAYLGSYEIIQKTRTMLSNHVQSLEYKSGVTRKLKDSLEKELGRLGTMEEQLEKEMETYAEDHEETREALHNLLSMNGTLVISAMNLLYLFRKYPGANRNEITALAGLDPVRRQSGSSLNGGRKISRAGDPMLRKVLYLACMNSIQHNECIRTFYKHLVSDNHKKPKVALVACMRKLLLIAHHLYVTKFKYRTLEHDANPCLTS

SEQ ID NO: 280180 - protein, 392 aa, unidentified
MYIVGIDIGKNHHEASIVSPKGKQIGRSLRFATTHKGADSLMSFIFKNIGNSPCVFGMEATGHYWYPIYSFLKAKGYTIYVINPIQSDSLRKMYIRQTKNDSIDSFLIAEVIRFGQFGTTSMADENILAMRQLCRYRDSVISSRTEIKLRIGTIMEQIFPEYEKQFSSLWVSTSMGILEKYLTPENIENTPIDELFEIIKDKSHNRLTRAKAISIKEAAADTFGIKIAQDAFSFQLKQLIDRMNFLDKQIEALDIEIMKYYEQFDCYLHTIPGIGIIGAATILAEIGDISRFKNSSSLIAFAGIDPTVRQSGEFNSTHNHMSKRGSPYLRHAIFLAATTCSFHNSPLNAYYKKKRDQGKHHLTATGAVARKLTTVIYAVLRDSKPYEPKKFC

SEQ ID NO: 280181 - protein, 282 aa, unidentified
MQGIRTYAGVDVSAKSLSTRRCRDGNEDEGSFPNDESGHKALIKWLGRQARVCLEATGVYHLQLALALRSVGVEVMVVNPRVAKDYGKALSNRSKNDRVDAATLLSYVQRMKFVPWEAPSQAVLELRELGRRLGELVQVGTDEKNRLHARKASKISARVIADLKQHIAQIDKRIKQIETAAVAVISADADLREQFDLVRKARGFGRRSAVLLLTELAVLDPTMTGREMVAYAGLDPRVYESGTSVQKVVRISKVGNARIRAILFMNALSFATTGEDGCSQPV

SEQ ID NO: 280182 - protein, 421 aa, unidentified
MPNIEIGVDSMVKENFIYVGIDLHKETHTAVMIDCYNQKLGEITFPNRPAAFPKLVTKVKKCNTDGKEVVYGLENAYGYGRALAVWLIDKGYLVKDVNTAISHRQAKHRGAMYRKSDSDDAEAIALATLNMLDKLPDAYPNDAYWSLGQLVHRRDNIMKQRTRLVNQLHEQLCIAYPSYKQFFNDISRPTALYFWEHYPSRKYLKGKSVEDLRAELVPVSHNKCSTKTCEKILDAVASDKVKNNAYQDARDMVTLSIVSDLQYYDKQLAEVDKMLEQMYKMLGCTLTTIPGVNVITAVKILAEIGDIKRFSNANKLAQFAGIAPLHLSSSGKGKDVATKQGNRRLQATIYFLAIQMVQLSSKGTPRNPVVRAYYEKRKAEGKTSQQALICISRRLISIIYGMLKNGTEYRMPVVENAGEKL

SEQ ID NO: 280183 - protein, 340 aa, unidentified
MEKRHIGIDLHRNRFTCCIRLENERTYVTEWELEDLGKFVKRLRPTDEIAVEITGNTRLFHDAVAQHVARVVVVNTNQFKVIRQSVKKTDPNDARTLALYLSKNMLPEVRMKDKEHAQLASLTQTRDTLVKLRTALKNKINNILSARGLNLPKEALSSEKRLNEVVSLPFDEIVQIELRVIVEQIRSLNKSIADLEKTIGDAGSKLEGHKGLSSIKGIGKITGAILLSVIGDVNDFADEAHLASYFGIVPRVSNSNASEHSGRIHKRGSKLGRTALVQSALIAANYSPYLKRFYEQVKARRGAGKAIIALAKKFLGIIYRTLKNQWVFEDFPNFVLAEAS

SEQ ID NO: 280184 - protein, 352 aa, unidentified
MIIGCDFHPSFQQIAYVDQETGEYGERRLNHREEAVRFYGSLAGRKAVVGLEATGNDRWFRKLVMESGHELVVGDASAIHASAPRQQRTDKRDARHILRLLVENRFPAVWQPSVGNEEQRQLLMHRCRLVRMRTRIKNQLDSIAKSEGLTDSRSWSDRRRGQIEALPLAGWYAERRADLLLLLDGLEQRIKPLDKAVEAAASQDAQARLLMTHPGVGPVVSLAYVLIVGNWERFPRGKQVGSYLGLIPSEASSGKRQQQMGHITKQGNTLLRWLLVEAAVTAQRHDASWHRQYVRLSMTKHHGVAKVAIAHKLAVRLYWMLRSGQDYGQMMERGSHARQSECPVGRSTRPIE

SEQ ID NO: 280185 - protein, 342 aa, unidentified
MDGLTGEVWQQKLAPDPAGILAWVSGLPGPVKVAYEAGPTGYGLYRHLTGHGVGCVVAAPSKLHRPSGDRVKTDARDAELLARLLKLDEIAEVTVPSVGQEAARDLVRAREDVRGDLMRARHRLSKMLLRQGIVYTGGNPWTGVHDSWLRSQRFDHTGQQLAFDSAYETMIMTGDRRDRLDAAITEMAADSEYTAVTRRLCCLRGVSTLTGFGLAVEIGDWTRFTGSTIGAFVGLVPTEHSSGGSRSQGSITKTGNTHARRLLVEAAWHHAKPYRVPGKTMRDRWEQAPAAARLRGHDGNRRLHQRWQSFTARKKKPVIANVAIARELAGWAWSLAVLDETP

SEQ ID NO: 280186 - protein, 309 aa, unidentified
MDTIVVGIDVSKDRLDVAVRPAGTTLSCSRDAAGIEGLIGELGRLGAQLIAVEATGGFETVVAASLAAASLPVVVVNPAQVRAFARAIGQRAKTDPLDARVIAHFAEAPKPQVRPLPDAATQALADLVARRRQIIQLIVAEGQRAKRAAPRAKRSIGRLLEALRRELSEIDADIDETVRGSPAWWEKENLLTSVPGVGSGTARTMLADLPELGSLDRRQIAALAGLAPFTRQSGKWCGKSFIGGGRASVRTALFMAAMTAVRWNPALRAFHHRLRAAGKPKMVALIAVARKLLTILNAILRDKIKWQTA

SEQ ID NO: 280187 - protein, 344 aa, unidentified
MSIIHYIGFDIHKKVISFCEKMVDGTIVDQGVIRATRASLTEWAEKRTAEWIGAMEATLFTGWIYDYLLPYALELKVAHPEMLKAITAAKKKNDAADAEKIADLLRCNLLPECYMAQEEYRNLRRILRYRNFLVREAVKMKNKTAGLLMEVGAEYNKARLHGAKYFRELLDHLDYVPESVLNLLQMTGSNMESFAKMEKSLISALRLNPQLKNRVELLMSIQGVGEVTALTWVLEIGEVERFSRINQAASYCGLCSAQKESAGKNYRGPISKKRNKQLQTVLIEAAKPAPRWNPRLAELYERECAKGNRNRATLAVARKPVAYMMAVDKKKIPFESREKLPKAA

SEQ ID NO: 280188 - protein, 419 aa, unidentified
MSFKIIKNNCCGLDVHKTWIFACIGITDSNNRTEYKQARFSSFTKGLNELCDWLAKYNCKDVCMESTGKYWIPVFNILEQHNLWVTLSHPKYTKPMKGNKTDRKDAKWICDLYMCGMVKPSFIPSADIRELRDLVRYRYKLTCMITGEKNRAQNCLTVSNLKLDEVFSDVFGKSSRSITEQILQHPGEAFDVAHFVHGRCKPPIEVIQAAVDGAISKEQAVKLRQCLDHIDELNKHISEIEQEILRLSDKYETALNLIRTVPGFDKNPLTAVQVLSEIGGDMSVFPTAKHLVSWAGCCPRNDQSNQKIKSTRISRAGSYFKPILVQVANALIKSKKHPEFTTRYKRIKARRGHKKAIIAICRMILTAIWHILSDLEPYTPEGFLESRPVKEEKVLSTSQALNLLKQRGYIIKDEPLAVS

SEQ ID NO: 280189 - protein, 370 aa, unidentified
MREASTFVGLDVHKKDIAVAVLMPGSGTPLDWRVAHEPTAVRRLARRLQREGGPQVHCVYEAGPCGYALQRQLVGLGLECDVVAPSLIPIRPGERVKTDRRDARKLAELGRAGLLTVVRPPTEDEEAVRDLCRGRDDARLDLLRARHRLGKFLMRHGRVFGTGQQSAWSQAHRWWLGQQTFERVAERVMFEDYLLAVEQTEARRRSLELHLKDVAREPRYAEAVGWLRCFQGIDTITAITLLAELHDFRRFRSPSQLMAYLGLVPSEYSSGTHQHRGAITRTGNRHVRRLLVEAAWHYRHKPRVGIRLAQRRHGQPVNVIALADRAQLRLCRRYRRMERQGKHPSKIVVAVARELVGYLWAALTPGATKA

SEQ ID NO: 280190 - protein, 390 aa, unidentified
MRYFIGIDVAKSKHTACVIDTYGTVLVESFDFTNDIIGFQSLLKNIKPFLKKKHLVGMEDTGHYGDNLRNFLLEKQYKVVMLNPIVTSHIRKASNKAKNDRIDCFVIANTMMNPNFYRDQHAQSIDYATVRQLTRMHHTHTEEINRYKCQLQKSIDIVFPEFNSLLNTKYSKTYLEILDTYHSAHTIANTDIRLLRNTLKNVGVGRSVSISAEQLKKAAKESIGQHNLAIEMDIPFLISLIRRLTSILGEIDKKIEEFSHQLNSPILDISGISHFSAMSIISELGDITYFSSEKKLIKFAGVNPCVYESGTYSMTHTRLEKNGSKYLRKTLYQIIDVVIRFNPIFQAFYQKKISQGKSYRCAQGHCIRKLLRVIYKILSTGERFNPEKLK

SEQ ID NO: 280191 - protein, 329 aa, unidentified
MRTVCGLDVHKDSVYLCILSSTGEIYEKKFGVLTTELIEMRDLMLSHHVLEVGMESTSVYWVPIWRVLEPHFKLKLINPYFIKQLPGHKSDVKDAQWIAECMLKDLVNGSFVPPERIQQLRHYDRRIYDLDDEIIRKLAKSDAAVQRCNIRLSNYVSNTDSVSYKAVIDKICEGVTDPNVLVEEIHGRIINHHGKETIIASLTGSITECDIDIMQQLKAEIDLAEQHKQECMDKMLAICENEYSTQLHNLQTIPGVKMRAATSLIAEIGTDMSHFETANHLASWSGLKPRNDQSNKTIKSRRITYGNRYLRRTIIQCSWGASRTKNCFF

SEQ ID NO: 280192 - protein, 347 aa, unidentified
MKHYAGLDVSLKETTICVVDDGGAVVGRGTVATDPDAIAAFFAGAAARGVARMVHESGQLSIWLDRALKARGLPVVCIDARRASKALSARVNKSDRGDAEGLAQLARTGWFSPVHVRSEPAERLRALIGSREQLMRLRVQLEGHARGMLKSFGHRLGSVAPGKDRAGFRAQLTAAADGDPVLEVIAESLAQAHATICAAASALEEELVAIARTSPLAGRLMTVPGVGPLVALGFIATIDDAGRFRRAADVGAYFGLTSRRWQSGEVDYSGRISKCGDARMRSLLFEAATCLILRVRRFSPLKAWAMRLAARKGLRKAAVATARKLAVILFVLWRDATTFRWKSEAKA

SEQ ID NO: 280193 - protein, 363 aa, unidentified
MKDSITTAERNKLTAGLDVGDRYTQMCVLDEDGEIVEEARVTTTPKAFRQRFATMPPARLVLEAGAHSHWASRLLGELGHEVIVANPRMLRFIYGNDSKNDRADAGYLARVGKLDPDLLHPITHRSEENQANLVLVRSRDILVHSRSRLVSYARGLVKPFGIKLPRCSTTVFARKAHEHLPAILAPALDPVLGIISALTEQIRELDEKIEALARETYQETALLRQVPGVGTLTTLAYVLTIEDPSRFPKARVVGSYLGLRPRQKDSGDKQPQLHITKAGDKLLRGLLVECAHYMLSSRGADTDLKRWGLALAERGGKGAKKRAIVAVARKLSVLLLHLWVTGEKYEPLSNATRRGDPVPASSG

SEQ ID NO: 280194 - protein, 373 aa, unidentified
MNTIYIGVDFHARQQTICYLTTETGELVTTALKHEPKTAVRTFYEQFSGEVIVGLEASGYSPWFERLLEELGHQVWLGDATEIRRRARWRQKNDRRDAELILDLMLHDEFPRLHRPAIQSREVMRMLRYRQKLIKMRTMSKNSLQSLALQSGIARRGRLFTREGKAELDAAVMSPAMEWQRAHWWQLLEPLNQQVLEAMTWLKAASQNDVSIARLRTHPGIGLLTSLCLVHTLQPVARFRNPRKVAAYAGFDPMERSSAERKHFLGISKAGSRVLRYLLVEAANIAVRKDEDLKRFYQRLAHRRGRPKAKVAAARKLLIRAYIMMRDEIDYAEFRRRAVAARLARLRQGPQIPAALIGQPASTERQEPPPRGK

SEQ ID NO: 280195 - protein, 329 aa, unidentified
MACVPADNSKQPIMNPISSSVERPAAVLGLDIAKDNVVLHDAATNSTRTIANTSTALKQALAPYADYQLMVCEATGGYERAALEAARSVGLPAHKADAARVKAFIAAMGGAAKTDAIDARWLARYGIARGGSLPRWTPPSPEREQLAMLVRHRQDLLQSRTRAKNRKAAPNALPLTAFLDAEIAFLSDQVATIDKAIAALIESNQALQQAERTLRRIAGIGPIAARTLLALLPELGTLSRRQIAALAGLAPHPRHSGTVKRHRRMVGGRNGLKPVLFMAALGAARRHPTLAVFYQRLVAAGKAKRLVLAAIARKLVTIANAVLKQPQLT

SEQ ID NO: 280196 - protein, 370 aa, unidentified
MKEYIIVGCDLHDKTMLLKIARGRSAADKVTWANNVAGRRAMLKDLKRRSAEADRAAVVFAYEASGLGFRLHDLLTENGIACYVLAPTKMPKSLKHRRSKCDERDADQILEMLRAYVLAGNALPKVWIPDIETRDDREVVRARLDAKAKASKVKTQIQTLLKRNGIDRPKDTGKGWTVSFRLWLRGLAGPSSELSHGRRLGLHTLQRQLMLLEDEAEMLNVAIWKLSEKERYALAVKRMTGSAGVGILTAMVFLTEMGDLTRFGSRKEIGAYIGLVPSSDDTADSDRKGHITRQGPYRVRWILCQAVWTILRTNPEEAEYYERIVRKNPKHKKIAVVACMRRLAVRLWHIGSEAQQEQELLGRSLAAVAG

SEQ ID NO: 280197 - protein, 397 aa, unidentified
MYIVGIDIAKRKHEAAVIDGEGTVIIKPFSFTNNCSGYNRLLAMLTKAKLPLDEVSFAMEATGHYWLALFTRLQKEGFRVQVINPVQTNSIRSFYIRQAKTDPRDALLIAEVIRFGHFSESTLHPENIYELRELCRGRHAIVSMQADVKRKVVALLDQVFPEYETAFANMFGDTSMAILQTCPTPKELSEMRLEELCHLIEVSSHKRFRMAKAQELQALARNSFGFAMAGDVFSTMIRLYAKHLDFLKQQVREMDRKIAEIMETLDTPITTITGIGPTLGAYILSEIGDISRFSSAAKLAAYAGIDPTMRQSGEYNGVRNRMSKRGSPYLRHAIWLAASSAVLHDPALKLYFQKKRDEGKPYMASVGHACRKMVSIIYAVMRDNKAYTPYIPNEISA

SEQ ID NO: 280198 - protein, 427 aa, unidentified
MNCNTQNEKIEMLTDEWLIVGIDVGSEKHFARMFNNRKVELSRKALGFENDEKGFTQLEGWISNQLRTSGKKFIMCAMEPTGHYWYNLAAYLQAHGMVVVHVSPSHVKKSKELDDNNPNKNDRKDPKTIAGLVTEGRYMIPYMPNGIYASIRELNNMRMRATESLVVVKNRLARWFSIYFPEFTAVFGDLKAKSSRLLLAEAPLPEDVINLGAEGVNRIFRNAKLRSVGMKKALQIVEAAEHSIGRKENPWAAREEISELLEDLDRYLAREEKLMARLHEEVMKVPNVERILEIKGIGIRTVSGFIAEVGDISRFEDAKSIQKLSGYAIVANESGKHNGQSSISYRGRKILRYFLFQAAISVIGKNPEFAVIHEYYTTRKKNPLKKMQSVVAVACKLIRVFYTILTKGIRYDGQKMLNDIVRPETIA

SEQ ID NO: 280199 - protein, 478 aa, unidentified
MEQQEAGQPPRRLVGIDLGIASRHSVRVLETGGQVVCRSSCVPAVESLAAVERAALAGAPEGTTLAVVFEPTGPAWMPIAVFFARRGHAVYRVSSAKAADLRRFLRRHAKSNGIDAETLARMPLADPGGLQQLELPGPGAAALDRRVRACGRLTEAASKHKVRIKDLVRQLMPMTPLTGDLGKADLAVLERYADPRLLLAAGDGELTRLITTASGHQQGPQRAGQWRAAAAAAVELYGDHPAVPYDELAAEVATEIRLLRAIQAELASHAAAREQHYRQVDPGQLARSLPGFAQISAPVLVAAMGRPGRFRDGTKFKSYVGLAPRASETGETGRKGQPMSKAGPSQLRSAFVRAADTARRQDPQLARIYYLQMTERGATHLKACCVVAGHLAERAWAVLSRGTPYVICDNNGNPVTPEQAKQIIADKWTVPEDIRKRRRSRKTAGKAPQTASTRPDKRGDPPRPRSSRPGGKAVNPIT

SEQ ID NO: 280200 - protein, 325 aa, unidentified
MKALKSHVAGIDVHKEMLAITVLIGELDGEPKEYQFESSTFTDDLMALGLKLKEMGVTDVAMESSGIYWKPVFNVFNPLGLKVVVANAAHIKNVPGRKTDMNDSRWIAELHRFGLIRASFIPDGEFQRMRLLSRHRTNLTEDLARVKNRIQKVLEDGNIKLSIVVSDIFGVSGLKVLKQIAGGYTHPNILITEVTTKIKRMEEMKKALTNCLTTEHCFVINVLMKQYEELKNRIEEVENELCKKVEPYAHLVEELDKIPGIDAILAMGIIAEASANMSSFKDERAFAAWSGVASGNNESAGKKKRAKCRFFDSSTWIISFEHRIS

SEQ ID NO: 280201 - protein, 326 aa, unidentified
MTSLAYLGLDIAKRKFDAALLQQGSCPHKQFPNNQEGFAQLIVWLQRHAAGSPHACMEATGSYGDALALFLHQNGYRVSVVNPARIKAFGQSELSRTKTDKADAALIARFAQSAKAKLRPWAPLPPEQRQLQALVRRLEAVQRMRQQERNRLDLESADSPVAESLRQHVAYLDGHIRQIQQQLRAHVRAHHALQQNSQLLQSIPGIGATTALAVLAEIPNLAQWPSARQAAAYAGLTPRHRQSGSSVRGRPHLSKLGNPRLRRALYLPAVVAMRANPILRAFAARLLAAGKPKMAVVAALMRKLLHQAYGVLKHATPFNPNLEITP

SEQ ID NO: 280202 - protein, 346 aa, unidentified
MKKLKQVVGIDVGSKELVVCFGKIFSNLDKKLCQYGNFRNSDKGLIKLYEWVQIHTCEDSPLHFVMEATGVYHEKLAYFLESKGCNISIVLPNKISNYFRTLEIKTITDSTCSEAITLFGLERNLELWRKPDPTYKRLKQLTRERDQLVQERTAVKNQLHAEQAEAEPNENSIGRIKERIAVLQRQEKEIMTELKLIVKESSLLKKQTDNLTTIPGIGLLTAVTVLAETNGFEMIRNKKQLVSYAGLDIKEKQSGTSIQSKPTISKRGNRYLRKSLHLPALAAIRHDEHYSNTFTRLVSRNGIKMKAAVAVQRKLLELMFIIYKNEQRYDPQYHLQKYQNEKVDTN

SEQ ID NO: 280203 - protein, 416 aa, unidentified
MSEYAALVAIDWADQKHAVCLLDPSSGKREHSIVKHTPQALQEWALSLRQRFAGPIAVGLEQSRGPLIYALLQYDFFVLYPINPATLAKYRQAFSTAHGKDDPSDADYLLDLLEHHRNRLRPWRPDDEKTRTLRLLVEQRRRLVSDQTRFSNRLTALLKGYFPQVLGWFEDIRTVLVCDFLERWPELAALQRARPDTLNKFFRSHHSTSNSTNQRRLAEIKTALPLTNDAAVMTSSVINVKALVAQMKTVIAAIAEYDRHIEALCQTHDDYHLFAALPAAGAVHAARLTAALGSDRSRWPSADELVTFAGIAPLIERSGKQFRIRWRYFCPKFFRQTFHEYAAQSIQDSFWARAYYSSQRAKGKDHHAAVRALAFKWMRVIWKCWQTRTPYNEVIYLESLRKKGSSLLKFAADHQK

SEQ ID NO: 280204 - protein, 391 aa, unidentified
MINIGIDVGKIKHCAAVLDDKTGEVLIKPFFFDNDQKGFDLFYSKAKQYIRRKHAVGMEDTGHYMTNLTNFLLEKKFTVKYINPRSTSLRRKELGMSAKNDRKDALLIAEMLSEKKFWRSVSALSLETDKLREITRLYHQLQEQQNQDMNRLQRALDIVFPEVNTLSWTRYSKAYMQFLAAYSSASSIAGEDIRNLRKALKIEGRGRQCKVTAEEIKTLAKCSVGDDNIAVELEVKSVIAIINTRAEQIHVLEKKIEEFSHQLNSPIISIPGISHITGMTILAEIGDIKDFPEAAKLISYAGMEPLVHQSGKYDAAHMPISKHGSRYLRKALYQAVFTVCKYDPTFQSYYTKKRNQGKSHRCAQGHCVRKLLRVIYNLLSSDILFDTANLN

SEQ ID NO: 280205 - protein, 338 aa, unidentified
METYAGIDLHSSNNFVGVINVKDKILYGKRHANRLDDVLKALDPFKDSLQGVVVESTFNWYWLVDGLQEHGYPVHLANPSAIQQYEGLKHTDDPWDSFWLAHMHRLGILPEGYIYPKEHRPVRDLVRRRLLFVRQRTAQILSLQSMISRNLGFKMSNNDIKKLKSEDIEQLFDCSNLVFMATSSWATIEFLKHIIIGIEKRVKSQVKLRKEFEMLRTIPGIGDILGLTIMLEVGDIGRFAKVGDYSSYCRCVESKRLSNGKKKGENNKKNGNKYLAWAYVEAAQFARRYCVKAQSFYQSKEAKTKPVVAIKALSNKLSKASYYIMRDQVAFDEDKLFS

SEQ ID NO: 280206 - protein, 487 aa, unidentified
MKLTREQPKPKQKKNVRSALSPESASWNQMNRKQRREMARKIQAEDLSLTVVHPNAAGIDIGNESHYVAVPSDRDEQPVRRFGCTTAELKAMAAWLKQCGIGTVALQSTGVYWIAVYDILEAAGLEVYLVNARETKNLPGRKTDVQESQWLMKLHTYGLLRNSFRPSQEIRTMRTYWRQRQDLVRSAGRHIQRMQKALTQMNIQLANMLSDISGKSGQAIIHAILEGERDPHELAALCNYNVKASEAEIARSLEGNWQEDLLFLLQQEQTGYEFCQKQMAECDAQLQYYLTQRKDRSAGASLREEKSQRRHKSKKNYPQFNLREQLFRTTGTDLTQIDGIDVLTAMTVVGEAGWDMSKWPSEDHFVSWLRLSPDNPVSGDRVIGKGRLPTNNRLNVTLRMAAISLRQSDSYLGAQFRRLKRRLDTPVAIKAMAAKLARLIYRMLRFGMQFVDRGAEAYEAAHHQREIQHLKRKAASLGFQIIEAPAS

SEQ ID NO: 280207 - protein, 320 aa, unidentified
MLSFCGIDVSKDRLDVMVLPEEQCCSVPNDASGWAALVERLRNFSIMAIGLEASGGYERGVMRALLAAGMSVRQVNPFKLRQFARASGVLAKNDPLDARMIASFVGIMPTRPAQRPTPATEQLVETLAVRRQLSAEKVAAENASRLLEETILRRLSRRRIRRLAADVEVLDERLLEIVATDAVLARRYRLLTSMPGVGSLLACTLIALLPELGRMNRKQVAALAGVAPYAFESGTLRGRRCIWGGRANVRQVLYMAALSASNWNPALKAFHDRLEAAGKKPKVTIVAVMRKMITTLNAMVRDDVVWADRHSGRNSVTTAR

SEQ ID NO: 280208 - protein, 396 aa, unidentified
MAVYSKFVGMDVHKETIAVSLAEPFGGEVRYLGEFRNTPEAVVKLIRQLRKGDASLSCCYEAGPCGYGLHRQLVKMGITNQVVAPSLIPRKAGDRIKTDRRDSQALARLLRAGELTAVWVPDEAQEALRDLTRGREDLKHLERQAKQRLQAFLLRHGRVYEPEKKWTRMHFHWLENVKFDRPVQQVVFQDYLDTLQMLTRRVQALEGQLETAGAASGFGPMIEALMALRGISRIAATTTMAEIGDLHRFRTAPQLMAYLGMVPSEHSSGATRCRGGITKTGNGHVRRVLVEAAWTYHHPARKTTHLQRKAERAPEMVQEIAWKAQVRLCARYQKLESKGKLKVKVCTAVARELVGFIWAIGHAFPAPGANASEPAPSSQCVGSRTGNGGRILETPM

SEQ ID NO: 280209 - protein, 371 aa, unidentified
MEWSPPALTGRSTPQTRGLNVRHCWFGNPAAKENQVEPTSIAIDLAKRVFQIHYVDPETGAIHSKVLKRAQLVPFFANRPASRVVMEACGSAHHWARVLARLGHDVRLIAAQFARPFVKLNKNDAADAAANWEAAQRPGMRFVAVKTEDQQAMLAMHRIRQQLVRIRVMQVNQLRGLLYEFGVVLPQGRRASIEAAKVALASLADQLPAMLTDNLQDQLSRLRVLDEQIAPIEQRILEWRRNDDACRRISEIPGVGVLTATAAVSVIGQAKTFRSGREFAAYLGLVPRQNSSGGKTKLCGISKRGDVYLRTLLIHGARSVIAASKHLPERVRALLMRRPTNVVAVALANKMARTIWALLAYGRTYQLASVQ

SEQ ID NO: 280210 - protein, 428 aa, unidentified
MNKVERTRLEEFRQLKKEIRGSEGYLIVGIDIAKDKHNAFFGTATGKTLLKRLVFENTIEGFGRLRARTEAMKVQHCLNKVVYGMEPTANYHKPLAEYLIKCGHHVVLVSGMAVNKNRELLDGWWDKHDTKDSANVADLISQAKCLYYDYPSTRLRDLRNLLSLKRRLKKQEHGTRVRIRNHLLAQYFPEFDRYIGKGCSESLEIVKWCLNPSMIAGMEYDEFVQLVAPRMKTIGQEKRLKSIWGMAIDSIGCEVGHEIDFEAKLMVEDLQQIKDSIRAVEDHIEDICLGFPEYSYLLTIPGFGPDISSKVLGAIGDPFRFDNGKQVLKLAGYDLCAHRSGKTSYSAVPVISKRGKAYLRYALYQAAFIASTSNRHFIIYYTNKLCDREREKGIKTKMKVKLAAKMLIIAWTLMKKKEPFDPEYLNTE

SEQ ID NO: 280211 - protein, 378 aa, unidentified
MKRILKIGMDVHTTNYTLCAMEPIIGEDDRVFATIKVTPDYKNILLFIENLKTKLGLNDEYDIQCGYEAGCLGYSLYKQLTAAGVKCVILAPTTMLTPQGVRIKTDMRDAYMIAQCLSYGGYHAVYIPTEADDSVKEYLRMRNDHKLALKKIKQQINAFCIRHGFCYDGTKWTQAHLKWLKKLEITNQLYRETLDEYMASYEEQEAKIERYDKRIEEIAEQTRYHDKVKKLECFLGIKTHTALSLIVETGDFERFAKGNQYASYLGLAPGENSSSDSIHRLGITKAGNSHLRQLLIEASGGICKGAVGHKSKDLRARQNGNTAEVIAYADKANTRLRSRYYKFIRHGKKRNVAVAAIARELACFVWGMMTDNIEMKAV

SEQ ID NO: 280212 - protein, 340 aa, unidentified
MNDYTGIDVSLEYSSVCVLDSNGKIVREAKVLSEPEALIAWFGSLGFSVERIGLEAGPLSQWLYAAMKEAGLAVELLETRHVRDAFKAMPVKSDRNDARGIAQLMRLGWFRPVHCKSMEAQETRSLLTARKLVQSKLFDVKNSLRGILRGFGLKVGKTTELEFAGRIKELVAGHPHLEKIANSLLAVHEVLRNEFKKIEKQVNTIVRSDTRARLLMSTPGVGPIVALTYASAIDDPGRFKSSKRVGAHFGLTPKKYQSGETDYTGRVSKIGDSSVRTALYEAAHVILTKPLKGCSALKSWATRIARRAGMSKAKVALARKLAVIMHRMLAEGKPFNAAMA

SEQ ID NO: 280213 - protein, 424 aa, unidentified
MMHEERKWFVGIDWASQDHVVTLGDGQGKKIGQRKFAHGGTGLSDMIAWLLKASGGEAGQIHVAIETPHGPIVEALLERGFNVYSINPKQLDRFRDRFTVAGAKDDSLDADVLTDSLRTDMHLFRKLTVTDPLIVELREWSRIDEELKVERVRLANRLRDQLWRYYPQMLDLATDDLAHDWFLELWEAAPTPEKAARVRETTVTRILKNYRIRRFDAAHVISELRKPALSVAQGTTEAATAHIRVVVAQLRLVNRQLADAGLQLDSFCKKLAEPVAGKDGENVSGQKQEHRDVTILDSLPGVGRTVLVTMLADAPDALQRRDYHALRNLCGSAPVTRRSGKSCVVTRRRACSQRLSNAAFNWGRTAIQCDPTSKAKYEALRARGHGHARALRSVIDRLLYVACAMLENGTLFDPAFEAKKTAAA

SEQ ID NO: 280214 - protein, 373 aa, unidentified
MKEHTSKKQDARKNNQKACKETKEKFAFHVGMDLGDKNADVCVLDPDGEVSEEFRLPMKGADFQAYFVTIPRSRVALEAGGQSRWAAEVIEKCGHKVYVSNTRKVPYIHQSDDKDDPGDAYKLAELVYLKPRLLHPIQHRSQEAQADLSWIRAREALVESRTQLINTVRGISKAFGERLPKCSVEAFTGKLAGQIPAAIRGAVAPLLETIDHLNERIHGYDQMEEHLARERYPKYWLLDQVNGVGVHTALAFMLTIGDPGRFEKSRQVGCFLGMRPKKQESGESKPQLGITKAGDIYLRKTLVNCAHYILGPNGKDSDLRRFGQRISARGGKNAKKRAVVAVARKLAVLLHRLWVTGEKYEPLRNSQKRRVAA

SEQ ID NO: 280215 - protein, 385 aa, unidentified
MYQLSGSTQAALDYNSTIIGALELSEKKWVLAVQLPGVSRHSRHVLEACGDGLASFVERLKARCAAAGREIARVILTHEAGRDGFWLARFLARRGIEVHVIQPSSLPVDRRARRAKTDIIDVEMLLRTLMAWLRGEPRVCSMVPIPSEADEEARRAYREREDLTGERRSIVNKIDGILATLGVKGYKALRRDRREQLTAVRQPDGDPIPQKARARIERLLDRLDLVLKLIEQVESARGAVLKKDAPADEAERMIRSLTDLRSIGPDFATLLVREAFVRQFRNRRALGGYVGLGGTPFSSGGSEREQGIGKDGNRRVRAAMVELAWTWLRWQSDSALSVWFRARVGAMGGRIKKIMIVALARKLLVALWRYVMDGVIPDGAKMKAA

SEQ ID NO: 280216 - protein, 403 aa, unidentified
MTVRPLVWVGIDVGKTSHHACAVDETGKVLWNQKVSNEQRAIEQLIARAHKGADEARWAIDLTSPMALMLITVLLGAKQSVVYVPGHVVNTMTGAFRGEGKTDAKDARVIAETARMRSDLSTVAMPDELVVELAQLTGYRTDVMADWVRGVNRLRSLLGSIFPGLEAAFDYSNRTPLILVAHLCTPAEIRAAGIKGVTAYLSDNGGWPTAIAKTAATAVAAAKQQPLALPGEAGTAALVKRLARKLLDLDHEIKDIDKTITERFRDHPYAHIIESLPGFGPGLGAEFVVITGGDLASFATAGRLASYAGLVPVPRDSGRISGNLHRPKRYNRRLRRVFYMAALSSIRGDGPSRQFYDRKRGERLIHSQALLALARRLVDVLWALLRDGREFTPDKPTPATAAA

SEQ ID NO: 280217 - protein, 397 aa, unidentified
MYIVGIDIAKRKHEAAVIDGDGAVIIKPFSFTNNCSGYNRLLAMLTKAKLPLDEVSFAMEATGHYWLALFTRLQKEGFRVQVINPVQTNSIRSFYIRQAKTDPRDALLIAEVIRFGHFSESTLHPENIYELRELCRGRHAIVSMQADVKRKVVALLDQVFPEYETAFTNMFGDTSMAILQACPTPKELSEMPLEEFCHLIEVPSRKRFRTEKAQELQALARNSFGFAMAGDVFSTMIRLYAKHLDFLKQQVREMDRKIAEIMETLDTPITTITGIGPTLGAYILSEIGDISRFSSAAKLAAYAGIDPTMRQSGEYNGVRNRMSKRGSPYLRHAIWLAASSAVLHDPALKLYFQKKRDEGKPYMASVGHACRKMVSIIYAVMRDNKAYTPCIPNEISA

SEQ ID NO: 280218 - protein, 346 aa, unidentified
MNQIIRIGMDTSKYFFQLHGVDTSERPVLRRKLRRNEVLAFFARLPPTVIGMEACAAGHYWARELRRLGHEVKLIAPQHVRAYIKRNKNDGRDAEGLCEAMSRPTMQFVPVKTDEQQAALMLMGVRQQLMTRRTQLSNAIRGYAAEFGLITAKGLDKIEPLLARIAQDESLPALAREMFTLQGRDYARLQVELKAVEARLMAWHRANADSRRLAKIPGIGPIGATALVMKAPDPGLFPSGRHFAAWIGLTPKDHSTAGKTRIGKITRAGDEMLRSVLVAGATAVIQQAKNGRGRPSPWLLALLARKPPKLAAVALANKTARIAWKLLTTGESYDGARMPVASALAA

SEQ ID NO: 280219 - protein, 402 aa, unidentified
MWYVGLDWSDTHHDVVVLDEAGHRVGMQRFAHSHQGLQELQHFLLAIASRPEDLAGSVEPNHGLLITFLLEAGIPVYPVNPKTANKLRKTAGAKMDRIDAYLLAKTGRFDLAELRRLSPDSPIVAELKTLTRDQDALIQTQTRLVNQLTACLKEYYPAALKLFGKLHQRSTLLFLQAYPTPQAAAAASLEEITALLKTCRYPNAKGAARRILEELHHPQLVANEVIVRAKSRLLLSLVRQLLPVIEDSKSYDQEIRTLFLKHPDHELWQSLPRAAQRLAPRRLSEWGDDRARYQDAQSVQELAGTAPVPFQSGNFAKAHKRFACLKPLRNALYQFAWQTTLGETWAAAYYQRKRMEGKSHSMAIRALANVWVRIIFRMWQDRTCYHPAIFEAAQLAHARRAA

SEQ ID NO: 280220 - protein, 366 aa, unidentified
MAEVYFRQEKILREALMETISFDSHKRYTLCSVEDGQGRILAEGRIPHERGAIRGYLGRFTPGSTVAVETIGNWYWIVDEIEEAGMKPKLVHARKAKLMMGCVNKTDRLDVRGLNRLQRSGTLPAVWIPPGDLRDKRDLPRTRMYFVNQRTKLKNRIHATLAKYALDIRGVSDVFGKRSRPALDERLRLLPDHTRFATKLQLGQIGDLDNAIAALDARLEEVFGETGEMRLLRTMPGIGFIFGLVISLEVGDVGRFAGPDRLASYAGTTPRVHSSGGKTRYGRLRSDVNRYLKWSYCEAANTISMNRENWPHRHVCRLYERVRGRKGHAKAVGAVARHLAEATYWILKKREEYREPNAKRVSPTGA

SEQ ID NO: 280221 - protein, 352 aa, unidentified
MSERYAPKRFIKPNQLSLMKKRYFMGIDVAKATFDFCLFSSNGSRLWKGHFSNNSTGIEEYLSQLQARPLKLKQIHFGLEATGVYGKALVGALHQAGLAVSVLNPAQVRFFALSVLRRTKNDTLDAEIIARFCLERKPPATRPLRSIEEQLKVLVHERDSRVAEQGRERNRAKQDPFQLELPKLVSRQRQKRLTQLKKEISQLNNAIFELIEADQSLGRQSQLLCSIPGIAQLTAAKLLAEFAGKEFASARQLAAYAGLSPAERRSGGTFYGQTHLSKIGNAFLRKALYMPAAVARRWCAALKPWVALLERRKLHDLAIRGAIMRKLLHIAFGVLKHQQPFNPALVFIPKTV

SEQ ID NO: 280222 - protein, 334 aa, unidentified
MEQVTTVGIDLAKRIFALHGMNGAGRVVLRRTVRREQLMELVASLSPCLIGMETGGGAHEWARRFERLGHTVRLMAPKFVSPYRRNAKNDGNDAEAICEAVTRPGMRFVPIKSLEQQAALTLHRVRQGFIEERTATINRIRGLLSEFGVVLPLRSDTVRRQTFAALEELPTLARRAIEDLRAHLRELDAKVLAYDREIHLQARQSEPAQRLMKIRGVGALSALAIVATVGNAREFRSGRQFAAWLGLTPRQHSSGGKNRLGSITKQGDTYLRTLLVLGARSVLQNAAHHKDRVSRWISAVESRRGYHRTLVAIANKNARIAWALLYRNQEFRTA

SEQ ID NO: 280223 - protein, 347 aa, unidentified
MAAVMIGVDPPKGSHTAVAISPAEEPLGELRVRACAAQAQRLLAWAAAWPQRTWAIEGARGLGHLLAQQLLAAGEQVVDVQPKLGARVRLLATGAVNKNDPNDARSVAIAALRSPAQRQVQPDDHAAVLKVWAKRHRDLGRMRTQVVCRLHAVLCELVPGGVSKAITAGHAARLLESITPAGAVEAARCELAAAFLDDLRRIDAQLREAKKKLDAAVRASGTSVTGIFGVGPVVAATVIGAVRNVSRFPDRDHFAACNGTAPIEVSSGPRKIYRLSRRGNRRLNHVIHMAAVTQIRYRHSEGRAYYERKLAEGKTPKEALRALKRRIGDAIFARLQADARQAATGPR

SEQ ID NO: 280224 - protein, 404 aa, unidentified
MSQPVLHGWAGIDVGKGHHWVCLTDEAGTTVWSSKVINDEGAILEAISGVLSRANQVVWGVDVTGTMSGLLLALLAAHGQQVKYAPGRTVNQMAGAYRGEAKTDARDAYVIAETVRHRGDLAKVEVSTALVSELRLLVTHRTDLVGDRVRMVNRLRDVLSGYFPALERSFDYAHSRSALTLLTGYQTPQAIRRIGETRLRAWLVKRKVRSAEKIAAAAVAAAKTQYTVVPGQDVAASIVADLATQLLAIGARIGELDTRITTTFRAHPQAEIIESLPGMGPILGAELIAVAGDLNGYANAGRLASAAGLVPVPRDSGRRTGNLHRPTRYSRKLRRVFYLSASAAMMREGPNRDYYLKKRGQGQKHVQALIALARRRVDVLWALLRDNRPFELAPPTREQMAQTA

SEQ ID NO: 280225 - protein, 437 aa, unidentified
MEEVTDEPLYRDRVCGIDIGKAGMAATIRVPSDKDPARRAAEARSFGTTRREVLALADWLRCWQVPAVVMEASGDYWKGPFYRLEAEGFECVLADAKQVKNLPGRPKHDPGDSRWLAACLERGAVTSCFVATPEFRIIRLHTRYRRDLTEERTREKQRAEKLLESAAIKLSSVVTDLHGVTGRDIMDHLIAGERSPKVLAQLARARARRKISELEEALEGAEFFTAEHAALLAAMLARIDRVNAEIARLSEVIETLLEPYEEQLQQAESMPGWGRRAAEDALAETGTDMTRFRTGAHLASWAGRTPLDNSSGKRKGKAKSKKGNRYLGGLLGETAIAAGKTQTREGARYRRLSRRRGKAKALVAVGNTQLKVYHALLSSPGTRYEDLGPDYYERRAEVSRQVRHHVGKLGALGFDVTLCRIPEPGPEPGGTGNSQTA

SEQ ID NO: 280226 - protein, 320 aa, unidentified
MQTPSAVLNIGADVGKDEIVVACAEESFSPRKITNRRAEIMAWLKTLPPGSRLGMESTGSYHELLAETAHQLDFVVYVLNPKDTRHYAKAMGLRGKTDRVDARLIARLIGREHEQLHPWIMPTAEQRQIERMIKRRAKLSAIRASLSQSLKGLAGFAAELKALRRRLDKLIARIDVRIKALIEANADRKQDYARLRKIPGVGSVVGGSLVNTLERVPFKKGDAFVAFTGLDPRPDESGHHIGRRRLSKRGPAELRRLLYLGAMAAAKTKTWKPLYERQRAKGLSTTEALVILARHIARTAWSIYTHKTDFDPQRLTPGLT

SEQ ID NO: 280227 - protein, 374 aa, unidentified
MTPNVDRTGPLPLRCETALDQAAPRFTEDDCDYKVVSHRRRFPQEAQKNIPSMKTPSLGIDIAQHSFVAALWVERRSLGKMQFENHSGGFRKLRRWLKSHGLGTLTVGLESTNTYAEALAHWLHAAGHRVYLLNPERTACYARCRGQRNKTDPVDAVTIAAFVAEHAGTPWQPPSPEQKTLRSLTRTRAQLVEHGKKLRNQLKTADPLAQTHLKPVLQAVTRQLTAVARDLAQHLKAHPVLGAQVRRLMTVKGVGLITAAITVAELPPITPQSDPRALSAWAGLTPHRHQSGKIELPAHLSRKGNVYLRQALFMPALVAKKHNPLLRDFAHRLAAKGKRPGAILGAVAHKLLRILVGLLRSHTDFDPHWSFKKT

SEQ ID NO: 280228 - protein, 340 aa, unidentified
MGEVTTIGLDLAKHVFQVHGVDAEGATVLRKQLRRAQVLAFFSRLPPCLVGLEACATAHYWARELRALGHEVRLMPAQYVKAYVRRNKHDAADAEAICEAVVRPTMRFVPVKTADQQAAVLLHRGRERLVRQRTGLVNALRGHLAEFGVIAPQGLRNVGKLIAIVRDEGDARLPELARQVLQVLAAQIEQLEAAVAAIEKQLMAWHKSNPVSQRLASVPGIGPIIATAIAATVVEPSGFRSGREFAAWLGLVPRQNSTGGKHRLGGISKRGNQYLRRLLINGASANLLRSKATNADPWVIGLRQRRPSLVVAVALANKTARIAWAVMHRHENYQRVAAAA

SEQ ID NO: 280229 - protein, 420 aa, unidentified
MKAYNTVDFAALIGIDWADTKHDICEHPINTEKYHYCIINSKPEALHDWAMSLKQRYPNQQIAVACELKKGPLIYALAKYSHLTLFTINPSSVANYRKAFTPSNAKDDPSDALIQVEILTLHMGKLTVIEPESAAMRSLAQLVEYRRSLVQDSVDLSNKITATLKNYYPQVLEWFKEKDTFIFCDFISKWPSLAHAKRAKKQTLLDFFNSHNSHYAQVNEARILSIKSAMPLTEDIGVIEPNQMLVEVLIKQYRALLKGIETLDKAIKPAYKSQDDKVIFDSLPGAGPQLAPRLLVAFGSNRERYNDAAELQKYAGIAPVIERSGKKMWTHWRYSCPTFLRQTFVEWAGFSIRYSFWAKAYYEQQKSKGKPHNSIIRSLAFKWIRILFRCWKTSTPYDESKYLEALKRRGSPLLKFAVNS

SEQ ID NO: 280230 - protein, 357 aa, unidentified
MASRSMAQPDWGVIVGVDTHGDAHVAAAFTSDLGRPLGHLTIATTPAGYRRLLEWARGLGREPRFGVEGTGSYGAGLARFLIAAGCTVIEVNRPNRQTRYARGKSDPVDAEAAARAVLSGEATGLAKVDTDHIGMIRALRVARRSAVKMRTQTYQQMKALIVTAPADLREQVRALSRDRLVDTAACLRPGPVITPAAAVKLALKCLAQRHQLLSAEVATLDRDLARLVAAAAPALCALKGVGTDVAGAVLVAAGDHPERLRSEGAFANLCGVAPLPASSGKTSGRHRLNRGGDRHANCALWRIVIVRLATDAPTKQYMARRTQEGMSTPEIIRCLKRYVAREIYRELIPRAALATAA

SEQ ID NO: 280231 - protein, 392 aa, unidentified
MLFVGIDVASKKHDIAITSSEGDIIVRPFTISSDLEGFKKLRMVITSHTESVEDVRIGIEETGIYSKNISEFLALHGFIVHMINPVLTNYSRKSQSLRPAKTDKIDALAICRYIQSNFKHLNSYTPSLYIHTELKSLTRARFDILKNQIKAKTEWTRLLDLVFPEFRQHFKQHSKWVYNLFSKYPTVEQISRMHPSTLQRIIKVQGERVLAAQTIKLLAMNTIGHPSDTNGVLFTNTLCDIMHYASQLKRIEKQIKSIVAENFAFLLTVPGIGDITGATIIGEIGDINRFHSSSALVAFAGMDPAIHESGDFRANTMHISKRGSRYLRAAVFLSTRAAIINPNIQDNKFREKYLKKIAQGKHHNSAICSASKNMINVIYSLMKSHESFNYFV

SEQ ID NO: 280232 - protein, 345 aa, unidentified
MKYYAGLDVSIKEKSICILDETGKVCRETKVMSHPEDIIQALNCPALRLERIGLEAGPLSQWLFSCLAEAGLPVVCIETRQAKAFLKAQVNKSDRNDARGIAQMMRVNLFRPVHVKTLTSQKRRALLTARKLLQEKAIALENDIRGVLRNFGLKVGVVGAVKFEERISELVEGARELAEIMTCLLAARRTLREQAAKLHRMLLSIVRDDDVCRRLMTIPGIGPVVSLAFVATIDIPARFKNSRSVGPALGLTPILNQSGESSRIGRISQCGDAMMRALLYEAAHVMLTRTIKWSWLKAWAMNVAKRRGKQKAVVALARRLAVVMHRMWSDGTTFRWTRQQEQHTA

SEQ ID NO: 280233 - protein, 343 aa, unidentified
MAIVNRIALDLAKDFIQVLALDENEQEVFNKKLRSNKVLAKLATLKRTDDCEVAVESCGMSHYWRRECEKLGYKTVALPPRFVKAYLQGEKNDANDARAIAEAASRPNRQTVRLKSIEQQDLALMVNQREGFVQTRTQFSNRLRGQLAEYGIILPKRVSTILQRVPEILEDDSNALTLQSRDLINRLYQMLRAVDEEVKALDKRLAAQADNNEDSRRLMTIPGIGPITATSLLALIGDVNEFKRGRNLSEYLGLVPRQNSSGGKDRLGGITKKGNTKLRTLLVHGARSALRVAQQRDDRLSLWAQDVAKRRGNNVAAVALANKHARIIWAMLKNKEDYRMAAA

SEQ ID NO: 280234 - protein, 340 aa, unidentified
MDITTLGIDIAKSVFQLHGIDADGAVVVQKKLRRGAVLNFLGKVGPCLIGMEACATSHYWAREIAALGHEVRLIPPAYVKPYVKRQKNDAADAEAICEAVTRPNMRFVPIKTEEQQSVLVLHRARDLLMRQRTMILNAIRGHLAEFGIIAAQGPRQVMGMIARLRDDGDASLPEIARSALLALGAHLEALAGEIRTLERQLMVWHRADPTSQRLETIPGVGLITATALAASVSDPSVFKSGREFAAFLGLVPRQNSSGGKDRLGRISKMGDRYLRKLLVVGATSVIRRAGSNPTKTGAWVRSLMERKPARVVTVAMANKTARIAWAVMTRGEAYRASPIA

SEQ ID NO: 280235 - protein, 389 aa, unidentified
MLLDHPSDGLTAIRTHIGAIFVSLELSRSNWLVTSLSPGKGEKMSKHSATAGDVAGLMKLFAELRRKAEVRTEQSYPIITIQEAGLDGFWLHRVLQQEGIESHVVDPASIATPRRRRRAKTDRLDGETLLRALLAYKRGEPRVCAMVVAPSPEEEDRRRLCRERATLIAERVTHVNRIKGLLFSQGISDYAPLRRDRRSRLEMLRTGDGRELPSHLRAQIGRELDRIELLLEQIKAVETGRDALLAAARKPASEQAAPDAVTMLLALKGMGANFAAVLWSEAFYRQFANRRQVAAYAGLAATPWQSGGIRHEQGVSKAGNPRLRTTMIQVAWLWTRHQPQSALTRWFKERSPQGRKRAIVALARKLLVALWKYVNQGVVIEGAVMKPAA

SEQ ID NO: 280236 - protein, 457 aa, unidentified
MKWYLGIDVSKGYADFVLLSEYLEKMEETFQLDDTRSGHEKLKSWLESTFKRHPGLQIDSAVESTGGFENNWYSLIVGLSSKLALRVARLNPSVVKNASKALLNANKTDSESARDIASYLKRYEDQVDYTCSESQYSAFRSLDNHLQLVTKQKTQVINELKQLLYSSFPELQRFCKQSIPNWVLDILQRYPSPSKLAKIKPEKLSKLKGVTMEKAEKLIERAKASVSSRATLTDEFLITGMAADIAQKQQTVKKLKAYLAENCKGRETELLESIIGIGAYSAAAIMIQIEDVKRFTSPKELASYFGLHPLIKISGDKKMESRMSKQGRPAIRAILFMCANSAVLADPHMRSIYARHRAKGKSHKHTIGIIMHKMIRITWGVLHHQQPYDSKVDAINQQKNLDQPVHAETKEMKSKRRIQDFDNEAPISRIATKKRKVHATSQAGDAGLVRDLVHEPG

SEQ ID NO: 280237 - protein, 530 aa, unidentified
MACFKDEETRNCQRERSFSSDDLKSLTLDDGTKIVTAPVNDIKRPLCGGIDVHKKILMAAACVTDKTSLNATFYVKEFTTSNSDIRKMAEWFKKYGVTDVCMESTGKYWIPVYDILEQSGMKPVLTHPKYVKQAKGKKTDFRDAVHIANLFRMDLVVASFIPPSDIRDLRELCRYRLKLTYIRTSEKNRFQNSMTISKLRLDSVFSDPFGTSASKIMDYLIHTPKENVQDDAILSLVDKRVKASPDKILDSIRGYEFIGAQRDKLEVISKHLEDINKCIALIDNKLDYYREKYAGIIRHLITVPGISEEAALYILGEIGADMSVWRDSKSLTCWGGLTPANNESAKKKKTTSIGKGGHYLKPLLVQCALASIKSTRKHPYFYRKYQTLAKRRGHKKAIIAIARKMLVSIYHMIKSDSDFKPIDYDKVAAQKQNTTELSMKKVIEFLWEQGIDSAVIRKIESQCPKGQSTGQGEIRKEAPKIMAQKKQPESIARKLVSIGHRKRLANIPKRSSRPKRMLPRINGAVATAQD

SEQ ID NO: 280238 - protein, 416 aa, unidentified
MKVIRPICCGMDVHKDIIVATIAITNQDGIAEYHQRQFNSQNYSLYQLKAWLKNHNCFDVAMESTGKYWIPIFNVLEDEINVCIAHPKYTKAIKGKKTDKKDSKWIADLFRHDLIRSSFIPPKEIRQLREISRYRIKLIGMRSSEKNRYQNAMTVSNIGLASILSDPFGKSAKAVMREVLNSKTIDEEVIKSLLKKSAKKKTEEVLKSLEGSHIEPDQKLKMTIATTHMNELDKHIEETELEMVKRCMPYNSLIECLIKIPGISYISAMSVIAEIGVDMSQFETDKQLCCWAGLAPANNESANKKKSVKISKAGSYIKPLLVQCALSAIKSNSQPYYKIKYNNIKKRRGHKKAIIAIARMILVAIYHILLSGETFNPSDLEETNKPKTSKNKLTTETALAFLQAQGFDVSSIRLAV

SEQ ID NO: 280239 - protein, 341 aa, unidentified
MSIVATHVGLDYHDETVRTCVLAEDGKMLFNRDLANDPQIVAFEVMRFGPPRGVVIEACCGAADFAAKLQEQTGWRVRLAHPGYVKRLKQGPDKTDHGDAWLLADLDRVGYVPVVWLADETTRQLRRLVCYREGLKKERKNVKLRIRSLLREERIPAPAARPWTKAWRDWLRSAELGPESRWVMDRLIDQFERLQADLRGVETRMREATADDALTQRLLEEKGVGLITAVALRAEVGRFDRFGTGKQLARFCGVTPCNASSGKRQADAGLIKAGSRELRALLIETAKRLPRCDPHFKEMKERLRRTKPANVVTCAIANRWLRGLFHRMLTVEGEVNSQTAA

SEQ ID NO: 280240 - protein, 359 aa, unidentified
MTINAGVDLHKTQFTVFVKQSGNQFEQYSTEEDGYKKFLTRIQRWKKSGMTVRIGVESTGNTRYFKTRMEQAGAEVVVINTLKFKVVNESVKKTDRHDAATIAEFLEKDMLPESRLCSEESEQLRRLLKVRTTLVRTMVTVKNQIHALLTGLGMKDSRATLQSKRGRQKILDALRKADSELVVQPLFETIEQLEKSVKSIESELEKLTEGDRTVELLMTIPGCGKIGAWTIRAFTDDINRFASAKKYSAYAGLVPWVQNSNETVRHGKITKRGPEELRTALVQLVMGMRRCRSTVSWRLMERYTEMKRNKGSGKSIIATARKLSTIIWCMLSTGQEFDPSLMIDRQLIRKADSMRTTAS

SEQ ID NO: 280241 - protein, 340 aa, unidentified
MPLYGGIDLHANNSVIVLLNEQDEVIYRKRLANDLPTILEQLAPYHTEMKGLVVESTYNWYWLVDGLMEADYRVHLANPAAIQQYSGLKYTDDHSDARWLAHLLRLGVVPEGYIYPKAARAVRDLLRKRAHLVRQHTANVLSVQNIMARNTGARFSVKRIQELTKQELTTLLAEETQVLAVTSSLVVLDCLRQQIKMLEQSVHKRLHHTPSYEQLLTVQGIGTILAQTITLETGAISRFPTVGNYASYCRCVDSTKLSNGKRKGTGNVKNGHPYLAWAYMEAAQFAMRFQPEAQRFYQRKLAKSRNNTVLARKAVAHKLSRACYYLMRDLVPFEATKAFG

SEQ ID NO: 280242 - protein, 451 aa, unidentified
MSKDRTRSRPSGLPIIHPFAAGIDIGSRFHVVAVSPDLCDEPVQTFQAFTSDLQRMADWLVATGTKTVVMESTGVYWVAAYEVLESRGLEVILANAREARAVPGKKSDVNDAQWLQRLHACGLLRASFRPGRDIAELRAYLRSREKHTDYAAAHIQHMQKALTFMNIQLHHVIATITGVTGLRIIRAIVAGERDPDRLAAMRDVRCKESPETIRNALVGNYQPEHVFALKQALALYDFYQQCFDECDVEIERAVAILNIAHPIPEAPLPKAKHRNKMPSDPNFDVRTAMYQLAGTDLTQIHGIGPFLALRLIGECGTDLSRWPTAKHFTSWLTLAPGCKISGGKVPSSHMRKTSSRITVALRLAAVSVGRSNTALGAFYRRLAGRIGNAKAVTATARKIAVLFYNAMRYGMDYRDPGADHYEQQYRDRVIKQLHRRAAQFGYSLQPQGSPT

SEQ ID NO: 280243 - protein, 424 aa, unidentified
MLQRKTKPMKQWQELTHYAGFDWAKAHHVVVIVDREGKIVADFEFEHTLEGWKSFVEKTSAWPNLALAIETSQGAAVDQLLQRGYTVYPVHPVAAQSYRQRKAPSGTKTDHIDGWGLADALRVDGQGWKALQPMDPMTQQLRLLCRDEVMLIEQRTALVNQLQQALAEYYPAALEAFDDWTDAFTWEFVPAFPTPQALVQAGKRRWEKFLHTHKLWRPETAEKRLKLFAQADQFKASDPIVRAKSQLALSLAKLLCTLGQQLKLYRKQIEGLFQDHPDHELFGSLPGAKKMLAPRLLAAVGGDPDRYGSHEVLQCIAGTAPVSYQSGRLNKVRVRWACDKFMRHTVHLWADCFRKASVWGQTYYQQKRQEGMTHACALRCLGQRLLKILFRMIVTKKPYDAELHARSQQKHGSWVLKLVKESAA

SEQ ID NO: 280244 - protein, 439 aa, unidentified
MAKPLAILNEKATGIDVGSERMHVSIGGAEPRVFGTMTCDIQELVRWLCDEAVTSVAMEATGVYWMSLYAALTLAGIEVLVVNGRHVRNVPGRKTDMADCQWLATLHCHGLLRSGFVPPADIRRLQDYMRLREDHTSMAASHVQHMQKALERMNIKFHDVISDVTGVSGMRVMRAILDGERDPQKLLAMCDPQIRKKKAKRVVESLHGTWCEEHLFALRQALKAWDFYQQQISECDGAIERVLHDIGGPPDPEADIGRGKSGGTNTPRIDGLHKLMVKICGDIDPTGAPGMADHSLLRLISETGVDLKKWPKAANFTSWMGLAPGTAQSGKRKKSQARPLNRAGRIFCDMARSVTKTKDSALGGFYRRLKARRGGLVALKALARKLAIMFWNTMVHGVEYAEEGLKRYHARAALSEQRALAGLARKHGMQLVPVATAVT

SEQ ID NO: 280245 - protein, 425 aa, unidentified
MLGIGIDWSEEFHLVALGRPGEGVIEVTRVEHTPAAVDALVAEIAGLEPDPGEVRVVIETRHGLLVERLVDAGYVVVPVNPDLVARRRGPAKKKDDAEDARIACLIALDRHERLRPLIPHGEIAGELRAIARDDERAARDERRLGNRLRQDLISTFPAALRIGGQDLGAPTFLRLLERWPTANALEAATRVDLVAFARSCRHGWPERFADRVQASLGNEHFRPKDYLVRAKADTIRLAATQLLLIGRQRRSWERRMGELLLGAPRQGRDRKPKGDGLGKGFPGGGIYLSFPGLGDRLAARIAGEIGDHPEQFDTPNSLQCYAGKAPVTRRSGKSELVVACRLAHNRFLGAAVQQWAFCSLRRSGWAREFYDSQRARGKGHHAALRALGNRWLEILWYCVHNGVLYDEAIHVANRNRALGRATQAA

SEQ ID NO: 280246 - protein, 356 aa, unidentified
MLNKFNNFVDFSGHNVYAGLDVHGKSWTTTIIVDDIEHRRFTQPPEPMALYKYLSSNFPGANLFSAYEAGFCGYHHHRKLIELGIQNIVINAADLPITNKEKVNKNDHIDSRRLAQALQRNELKAIHVFGPEHEQFRSLFRMRWTAAKEHRRTKNRIRSFMYYYGINPPSEFNPEHWSLGFIHWLDLIIMPTQAGTLSLKSLLKAYHNTREQLLEVTRQLRQEVKLHYPELYKLLMTIPGVGPIVAMCLIAEIGDITRFKSYRHLSSYAGFIPNSHQSGEKDPKGRLTYRSNKYIRSMLVEAAWVAMRHDPALLKYYRERIAGKESKYIIIKVAHKLLNRVRQVWISQNPYQAGLA

SEQ ID NO: 280247 - protein, 319 aa, unidentified
MDKPNYVGIDVAKDSMEVTVYEGLEHWSYTNDESGIAKLAARMKKLSPKLIVLEATGGYEVTVAAELQSRDFPVAVVNPRHIRDFARSVGILAKTDILDARIIARYGATVKPSPRVLPAEKTKRLGVVMMRRRQEMAMLTAEKNRWHQADSAVKGRIKEHIIWLEQELDDINQELKQMVEDDPEWKEKSDILKSVPGVGPNLAITLLSDFPELGELDRKQTAALSGVAPFNRDSGKFRGKRAIWGGRSVVRTAAYMSAFAAIRFNPLLKAFFTRLRAAGKPYKVALVACMRKLLCILNAMLKNHTTWNYHAPQLMGVCH

SEQ ID NO: 280248 - protein, 351 aa, unidentified
MTSHRDQPTSTYSSIGIDIGKDVFHIVGFDTSGKLVLRRKFKRLALETELAKLPPSIVGLEACLSAHFVSRTLRRLGHSPRIIPAIYVKPFAKGQKNDYNDAEAIAEAALRPNLHVVREKTQDQLDLQALHRVRARLVSRRPATINQIRAFLIEHGIAVRTGASALRNSVAVILEKRADELSPRMVSIIQGLCDDWSHLDGRIEALTSEIEEISHKEKNCRRLMSVPGIGPMISTAMVAAIGAGDAFERGRDFGAWLGLVPRQYSTGGKPILGRISKRGNKYLRTLFIQAANVILMRPQNWERFSFGAWLSNAATRMHRNKLATALANKLARIAWSVLRHHRKFDEALAAV

SEQ ID NO: 280249 - protein, 311 aa, unidentified
MDKKVFVGIDISKDSFEMVAVPSRQKWSFTNNDKGISEAIACLKKLGPTSIVVESTGGFERELAIAFTESDLPVSVVNPRQVRDYAKAIGIMAKTDILDAQVIASFASVIKPPAKPLADEEARALKAIITRRHQLLEMIGAEKNRAFMTKGVIKERIKEHIAWMEEDLARINKDVEKTIRNSPIWREKDDLLRSVPGVGQVLSATLLAELPELGTLNRRKIAALVGVAPFNRDSGRFRGKRSVWGGRASVRSILYMATLASTRWNPLIRTLYLRLCLKGKAKKVALTACMRKLLTIVNSMIKHKTYWAYSN

SEQ ID NO: 280250 - protein, 342 aa, unidentified
MEIATLGLDLGKRVVHVVGLDRAGSIVLRRRVSRDRVLTLTANLPRCVIGLEACCGAHHLGRNLTAQGHEVRLMPPEYVRPYVKNNKNDYRDGEAAAEAAGRPTMRFVPLKGEAQLDLQSLHRIREGLVARRTALINQVRALLLERGIAMPQGRRKLEQRLPEILADETAGLSPRMRHLVADLQAEWRALDRRIAELDAEFVAYARQDEACRRLIEIPGIGATIATALVAAVGRGRAFEAGRDMAAWLGLVPRQRSTGGVPRLLGISKRGNKYLRKLLVHGARAALPHLAQQPHPLGRWLAGLLARAHRNVAVVALANKLARIAWAVLSGNRRYAARAAAAA

SEQ ID NO: 280251 - protein, 353 aa, unidentified
MIVVGVDPHKETHTAVVVDELGRKQAQLTVRARRDGHRELIGWARDVAPAGRLRAVEDVRHVAGGLIRELLAAGEMVVFVPPKLMAGVRRGGRERGKSDPIDALAIARAALREDAHLPAARLDKQVLEVRRLVDHRDDLVAERTRVINRLRWMVHDLAPELAPAPRALASARGRAKLEAGLRALPDSAGRRIALSQLARIIALTAEAGQAERELASLVRHLVPALLQVAGVGVITAAKILGEIGDIRRFRSLAAFARHNGTAPIPASSGTGKDGPHRLNRAGNRQLNAALHRIAIVQARCHDGARILLQRRGETAHETRKASLRVLKRHLSDVVYRALAADAWRLDDPAQQAA

SEQ ID NO: 280252 - protein, 348 aa, unidentified
MQVTTLGIDLAKDVFCVHGCDANGKPVLRKQLLRRQLLSFVANLPRCLVAMEACASAHYWAREIEKLGHQVRLIAPRFVRPFVKANKNDASDAEAICEAASRPSMRFVAVKSTAQQDVQAVHRVRQQLIKTRTALVNQARGLLAEYGIVVAQGVGRLRRALPAMLEDRDNGLSGVMRELLAEIGERLRFIDDRLRKYDLTIHRLFRQDERCQRVAAVEGVGPLSATALVAAVGNATDFKSGRELAAYLGLVPRHRASGGRTVLLGISKRGDRYLRTLLVHGARSALYRIERHRGARAIWAARLKLRRGANVAAVALANKNARVLWALLSRGQSYRPAPFPARVPQAGG

SEQ ID NO: 280253 - protein, 344 aa, unidentified
MHTTEATGRLYGGADLHGNNVFLSVCDETGATVLKRRVKADLEAVNAVLDPYWARMEALAVEATYNWYWFVDGLRAQQRNVHLANPAKMEQYEGLKDTDDEDDARWLAEQERLGILPQSYIYPEATRPIRDALRRRMLIVRQRTQTLLSLESLFARYGLPCPALRELKGWQSQQVKELGLHEFVNLQIRSLLELVRRQDGLIESIEKAVLKALRPTDEWKRAQQVPGIGPILGLVVTLESGDFKRFADAGNFASYCRAVRSERRSNRKKKGRNNAKNGNPYLAWAFTEAAVFAVRYYPRIAAWYERKKRRRNKPVAVKALACKLAKALWHVMQGKEYQEQMLFG

SEQ ID NO: 280254 - protein, 387 aa, unidentified
MTTRENDMSRSLAAFDQDRTLVAVVEMGWSSWLVAGLIPGVKRQPKKKIEPDAEELLRLLGRWRDEAVKGGRPITRIAVAYEAGRDGFWLARWLESHGIETHVIHSTSVAVSREKRRAKTDRVDAEMLLRVFLGWLRGERGHCSMVAVPTIEAEDARRPGREREALVAERTRIINRMKADIARLGVHAFKPHLRSAPKKLGSVRTPEGVAVPPNTKAELERDMARLAVLREQIAAIEKARLERIKNTPDNGPHAMIRLLARVLGLGIETADMLVNEVMTRRLRDRRAVARYAGITGSPDESGSRRREKGLAKAGNARVRRGMIQLAWRWLTFQKESALALWFKARVDGAPRLRKTMIVALARKLLIALWRMATIGEIPEGVVLRPAA

SEQ ID NO: 280255 - protein, 353 aa, unidentified
MKYVGVDWAYRQAQWCALTAGGEVAGEGRIAADRDGLARLVLELGDEVKACLEMMSGALWVRDELVACGWQVEVADARKVKTVAPLAAKTDKVDARLLAELSRRELVSALWLPSLDERALRERLRRRLHLVRLRTSAKGRIFGLQTQWGVRVSLARLRRADGLSLLERAGVPEVWRRSVDECLALIDFLDARIAPLDAELRPFAKADPRAVLLDTIPGVAELLALTIAVEIGEIGRFTRPEKLVSYGRLAPRVRQSGDGRARSGPLSKSGSRLLGWAAVEAAQQAWRESNPWHELYLDVGRRSRHTNAAKAAVARKILIAAWHMLSRNEPFKPAPRTTTGTSVPASSRLALAA

SEQ ID NO: 280256 - protein, 356 aa, unidentified
MATYYIGADVHSNSIEMAIRKRKKIVKRYSVPASISAVVQVLDSLPGKKYMVIEEGPMAGWLYRNLHQRVERFGIADPRRNKLISSDGDHDDKIDSAKLAMLLAGGYLREVYHSDYDQRVELKHWVGLYHDRIRDAVRNINKIRARCRMYGVTIPRKVLRQPEHRAVWLLKLKNTALSNQLLMLWIGYDATSKQARMARQQLINLSKKYPVIRLWTELAGIGIIRAVTIFAYLDTPWRFKKKNKLWKYCGIGLQRTASGTDKNGKPKPARLQLPWAANRVLKNAILGAALTAINQRRNSFRADYERMVQNGIIPSNARHTVARKLLTVMWGIWKRNCQFDLGKVTSPKPAAGYVYV

SEQ ID NO: 280257 - protein, 455 aa, unidentified
MPRRAVKTTKALPVLNPNAAGIDVGATTVYVAVPKDRDECPVRCFATFTHDLHALADWLHACSVHTVAMESTGVYWLPLFQILESRGLEVCLVNSRHVKNVPGRKSDVADCQWLQYLHAVGLLRASFRPPQTVCAVRSLLRHRDTLVTYAASHIQHMQKALTQMNLQLHHVISDLTGKTGLAILEAILAGERDPHKLAELRDFRIKASAETIAKALVGDWRDEHLFTLRQALSAYRHYQQLLAECDQEIERLLARFDSQVDPTQVPLPPLTTSHRQPQRNEIRCHHTDLRTELYRILGVDLTQVPGLQTPTIHTLFTELGPELSAFPTAKHFASWLGLCPDNRVSGGRVLSAKTRKVKSRAATALRLAAHSLHHSHSALGDFYRRMRARLGAPKAITATAHKLARLLYHLLTTGQAYDESVFARNEERYRQRRVKRLYREAAALGFTLAPNAVVS

SEQ ID NO: 280258 - protein, 344 aa, unidentified
MELHTIGIDLGKTVFHLVGLNLRGEVVVRKKFSRKQLLHFTANRQVHLIGMEACGGSHFLGRALQEQGHEVRLMPAQYVKPYVKTNKSDYIDAEAIAEAVARPTMRFVPIKSDDQLDLQSLHRVRERWVTRRTAVINQIRGLLLERGITMRKGRCHVDAALPGILEDATTKLSGALRMLLAQLRLELDHLDMRIDEADAVIKKTAGENEACQRLVAIPGIGPVTATAVIAAIGNGAAFRKGREFAAWMGLVPREHSTGGKQKLLGISKRGNSYLRRLFVQGARAVLQQRTKQSSGLSVWLAQLTSRTHRNVVGVALANKLARMAWAVLAKNEAYRPPRLAAATA

SEQ ID NO: 280259 - protein, 279 aa, unidentified
MSDPIEVQSAPIKKLQMIGVDVAKQKLDVSVDDNTALTIDNHEESFKNLLKIIPENGSACFVMEATGGYERKLVAFLQAREIAVAVVNPKRVRDYANAMGAYAKNDRIDANMIRHYAQTAYDKKRLQLRESLTEAARRRESLLRRRNQLVGQRSMEKQHLESATDKDTVRSIKRIMKQLDKEIEKIEAMIQTDINADEHLKKSMKQLLQVPGLGDVTVLTLLTQLPELGKLSNKEISALVGLAPYARDSGKKTGRRAIFGGANADTINALHGDLKRNPF

SEQ ID NO: 280260 - protein, 340 aa, unidentified
MDDYIGLDVSLKETAVSIRRGGKRVWRGKCPSDPQAIAALIRERAPAAKRVVFETGPLSVWFFHALSAEGVPAICIDARHAKAALDMAANKTDANDADGLAHLAEVGFYKVVRVKSFNSMLTRTLVAARTRLVRIGTELSNQIRGLMKTFGLVVPLVTGGKFERQVEALLADHADLGRIIRPLMEAWRAVRLRTAELSRTLLADARGSDACQLLMSIPGVGVVTATSFAAAIEEPENFKRSRSVGAWVGLTTRRYQSGEVDYDGHISRRGDGHLRGLLYEAATSLLTRCRVQSDLRTWGLKLRERLGFKRAAVAVARKLAVIMHTMLTTGEPFRSTPATT

SEQ ID NO: 280261 - protein, 405 aa, unidentified
MAAVMIGVDPHKGSHTAMAVGADEGPLGQVRVRACAAQAQQLLAWAAAWPERTWAVEGAGGLGHLLAQQLVSAGERVLDVQPKLAARVRLLAAGAVNKNDPNDARSVAIVALRSAACLPVRPDDHAAVLKIWAKRHRDLSRARTQVACRLHAVLCELVPGGVSKEIYAAHAAKIVEETEPGGAVQQARLELAAEFVADLRRIDAQLLETRKKLAVAVRASGTTLTEVFGIGPVIAAMVIGDVRGVSRFAGRDRFAAYNGTAPIEVSSGNRIIYRLSLRGNRRLNHAIHMAAITQIRYKHSEGRVYYDKKLAEGKTPKEALRALKRQISDAIYKHLKADAARAAAAGAQGPGGQPGNDSVASAAGSHPEHQLFGQATPGPATTLRHPADQQKRASSRARKKTARTT

SEQ ID NO: 280262 - protein, 405 aa, unidentified
MREYMGVDWADAEHAVWVEDEQGAKVAELTVKQTAEGLSEFGQWLYERQAQGIELWAAIEKPEGRIVDFLLDHGVVVYPVNPKALDRARDRFRMSGKSDPFDARVLAGFLRTDHAHLRPLVPNSEPAQELKLLTRDYQRLVRQQTRLVNQLTITLKEYYPRPLEVFEDLKSALARDFLSAYPTPQAVAGLTLAQWNKFARAHRLSGVRTQELWDALRRPQVPVPAHVVRAKARLVRVLVQELAMAVQAVEEYRQTVADFFASLPAAEWARTLPGGQGGATVPTLWAELGDVSGRWQSFQHLQGYAGAVPVTDRSGKQQVVKFRFACNTHLRYAVHQLAWLSLQHSEWARAYYKQYRKRGHDHHEALRALGAKWLKIIFVMWTRQVPYDETHHLATMARQQLRQVA

SEQ ID NO: 280263 - protein, 321 aa, unidentified
MLPSLGIDISKSNFHVELSLGDNKLRHRKFANRKEGFAELAAWLTKHKTQPVHACMEATGPYSEDLALYLQQQGHTVSVVNPAQIKAFGQSELLRNKDDKPDAGLIRRFCEKQQPAAWVPPPAHLRQLQALTRHLENLAETKQQQVNRLESTKAKDVVKSLRKLIAYLDTEIERTEKQIQNHIDTHPDLKEQFELLDSISGIGTRTAATLLGEINFKQYRTARQLAAFVGLTPKNNRSGTFSGRTRLSKIGNQRVRKALFMPAIVAKQHNPIVRAFCQRLARRGKPKMAIIGAAMRKLIHIAFGVVKTGRAFNPDHELFLS

SEQ ID NO: 280264 - protein, 355 aa, unidentified
MDSKKYIGMDVHKESISIAVMNGAGKIVMECVIETKASMILQFFDGLRGDLQVTFEEGTSAAWLYDLLKPHVTKVVVCDPRKNAAMKEGNKSDKIDARRLAELLRLNHLNPVYHGEHGLRSLKELVRSYLTIAKDLGRVMSRVKAIYRSWAIPCTGKQVYAPRHRAEWLEKITEPGVRRRAEFYYQQLDALRTVRQEVRRELLAEGKKHQSWQRLCQIPSIGPIRAAVLLGILQTPHRFRTKRQLWTYSGFGIETHSSADHRSVDGQLQRAKKQISIRGLNRNCNHDLKNLFKGAAIVASSKPGPFQEFYSALLTKGIRPEMARLTLARKIATIVLIVWKRGVCFDAQHLKPQTA

SEQ ID NO: 280265 - protein, 343 aa, unidentified
MEYYVGLDVSLKQTSICVVSGTGSVVREGVVDSNPDAIAAFVRSKAPGAIRVGLETGPTSTWLWTELKRLGLPVICIDARHAKAVLKMQINKSDRNDAAGIARIMQTGWFKEVRVKDLHNHTVKALLASRALLVKIKRDLENQIRGLLKNVGLVIGRAKFNVFAVRAEELIEDRPELIPVVGPLLKARQAIEQQTEDLDRKVLRLTRNDAQVRRFMSVPVSARSLRSGFKATIDDPTRFKRSRSVGAYVGLTTRRHASGEIDWTGRISKCGDTMLRSYLFEAAGVLLTRVPKWSALKAWGMRLAKRNGLRKATVAVARKLAVILHRMWIDGTEFNWSTKQAAA

SEQ ID NO: 280266 - protein, 423 aa, unidentified
MMKLKYSICCGLDVHKNVIVATIVTTNKDGISEYLQKSFSTINSDIQRFHNWLIENNCYHVCMESTGKYWIPIFNYLENDIDVCLTHPKYVKAIKGKKTDKKDSKWIADLYKFDLVRCPFIPPKDFRQLRELSSYRFKLVCMKSSEKNRIQNCMTISNVGIASVLSDPFGKTATEIISYLLEHTADSMDEKAVRKLIKKGAKSKSDEIIEAIKGYTIETDQAKKLELARGHLEYLDDMITQTEVELYVRIKPYYEFVEFVSTMPGMTELSSTIVLAETGVDMDIFDDAKHLCSWCGLSPANNESAGKKKSVRIAKAGDYLKPMMVQCALAAIKSKKQPYFAIKYGRIKKRRGHKKAIIAIARMMMVCIYHMVSEKKPFTPTDYEELMDPQNHVESVVLNENNVFAYLESLGYDSSKLVKRNDN

SEQ ID NO: 280267 - protein, 456 aa, unidentified
MSRKRKSSKKIGAPVLHCLNPNAAGVDVGATEIYIAVPPDRDEQPVRHFATFTEDLQAAAAWLKSCHIETVAMESTGVYWIPLFQILEEQGFTVFLVNARYVKNVPGRKSDVSDCQWLQYLHSVGLLRGSFRPEQAVCTVRSILRHRDSLVQMASSHVQHMQKALDQMNLQLHHVISDITGVTGLTIIEAVLRGERNPHTLAALRDGRIKASEGTIAKSLIGDYRREHLFTLRQSLEAFRHYQKLISACDTEIEQYLEAFESKVDPPEGSTPTSREEQKPKGGESTFNLQSHLHRIFAVDLTKVPGIHVLTTQTLLAEIGPDLSRFANGPAFTSWLGLCPDNRVSGGKVLSVKTRKVKNRAATALRMAAQSLHHSQSYLGHFYRRMRAKLGAPKAITATAHKLARIIYHMVTTGQAYDETICAQNEKHNRWRLELKLRKQARELGFEVVAAKPVAI

SEQ ID NO: 280268 - protein, 393 aa, unidentified
MRLAIGVDVAKDMHWVTALTELGDVVLDQRVANTPDELTALAAELVALGGERTVGIDVVGGIASLVTAVLLDAGERVVHVPGLAVNRARQGTTGGEAKSDPRDARVIAEQVRTRRELRPIAAESAPLVELRLLVGRRRDLVVEQTRRLARLHDLLVTIHPGLERRLDLTTKGALYLLTRYVTPTELRRAGRARLVSFLRTCPHLQRLEALAAAALEAAHEQRLALPGEAVAAVLCRELASDALRTRERLGTLDQQLTELLARHPDGTLILSLPGMGVILACEFFVEAGSLARFASPDALAAAAGLAPVLRQSGKVRFLRRPLGGNKNLKRVLYQSAFCSLQHPVSRAFYDRKRREGKRHHQALIALARRRVNVLWAMLRDRHPYQVRPAGQAA

SEQ ID NO: 280269 - protein, 326 aa, unidentified
MNEFKPEASRITTVSARLALPEHGCYAAYVGLDVHKETIAVAVAEPGRQEPRSEGEIANRPKSVEKLVRRLSERFGGGVIQFVYEAGPCGYGLHHQLAGTGHACVVVAPSRIPKAPAERIKTDRRDALKLARHARNGDLTPVWVPGPEQEAMRDLTRARGDMKVQERKARQQLSAFVLRHGHAWSAGKTRWTAAHYAWLESLKFAHDWQQVVLQEYVDAAKAATRRVADLRAQMERALASWSMAPVVVALRGIDTLAAMVLLAELGDITRFDSPRQLMAFLGLVPSEHSSGGRRRQGGITLTGNGHAGRIGLELPLPGAPDETPQA

SEQ ID NO: 280270 - protein, 389 aa, unidentified
MKIFVGIDIAKLNHFAAAISSDGEILLEPFKFTNDADGFQLLVSKLESFDKNSIIIGLESTAHYGDNLVRYLVAEFYQVCVLNPIKTCQIRKNNVRKTKTDKVDTFVIAKTLMMQDNLRFVSFFDLDMMDLKALGRFRQKTIKQRTRLKIQLTTYVDQVFPEIQYFFKSGLHQHAVYALLKEAPSPKEIASMHMTHLANLLKVNSHGHFTKEQAKELRVLAQKSVGANDSAISIQITQTIQQIELLDSQLEKIEAEMTDIMKFNDSVIMTIPGIGYINGGMILGEIGDIHRFSNPNKLLAFAGLDPSVYQSGNFQAKTTRMSKRGSRVLRYALVNAAWNVVRNNATFKAYYDAKRAEGRSHYNALGHCSGKLVRVIWKMLTDNVEFNLK

SEQ ID NO: 280271 - protein, 326 aa, unidentified
MPIVTIGIDLAKNIFAIHGVDEAGKAMLIKPRVPRDQLVTLIAQLPACLIGMEACSGAHHWARVFQQHGHTVKLMAPNLVAPYRMSGKRGKNDAADAAAICEAVTRPSMRFVPLKDEHQQATLCLHRTRQGFVEERTATYNRLRGLRGHITEHLDTLPGWAKRSISDLLEHAGNIEDRLLEYDRAIAEIAREDARSKRLMQLRGIGPTTASALLASIGAGHDFRNGRQVAAWIGLTPGQYSSGGKARLGSITKAGDAYLRGLLVNGARAVIASLGEKQDRFSRWVRTLVERRGYWRAAIAIAAKNARLAWASLKYGDDFKLEPVAD

SEQ ID NO: 280272 - protein, 457 aa, unidentified
MMKTKRRREQRSMLPVHPDAAAIDIGATVHVAAVGPARDPEPVRSFGTFTGDLHRLADWFAQCGIKTVVMESTGVYWIPIYEILEQRGFEVWVVNARDAKHVPGRKTDVSDAAWLQRLHEFGLLRGSFRPQGAIAALRAYLRQRERLLDYAAGHIQHMQKALTQMNLQIHHVISDITGATGMRIIRAIVAGERDPDTLASYRDIRCHSSADTVRRALIGNYREEHLFALAQAVELYEVYQAKVATCDEKIEGVLERLKQPCRAPAKPLRAARHKTRQPNAPAFDARGALYSLLGVDLTQIHGLGPYLALKLISECGTDLSAWPSAKHFTSWLSLAPGNKISGGKILSSRTRPSGNRAAALLRLAATTVGRTETALGAFYRRLSARIGKAKAVTATARKIAVLFYNAVRHGMDYADPGASYYEERYRQRVLTNLQRRAKAFGYVLQPTEIKAVSMAVS

SEQ ID NO: 280273 - protein, 355 aa, unidentified
MSNEKYIGLDVHQATISVAVMDSQGKVVMESILETKASTLLEFFAGLRGSLFVTFEEGTWAAWLYDLLKPHVTEVLVCNPRKIPLLKQGNKSDKIDARKLAERLRLHDLKPVYHGETGIRMLRELARSYLTVVKDLSRVMNRLKALYRSWAIPCAGRDVYYRRHRSEWLEKIPEAGTRRRAEQLYQQLDLLQHLRQQARRELLAESRKHAITAKLRKIPSLGPIRSALAVALIQTPHRFRSKRQLWTYSGLGLETRDSGEYHFIKGQVRRRKKQATIRGLNKDYNHDLKGLFKGAATRASVKPGPFQEFYQRSLAKGIKPTMVRLTLARKIAAITLTLWKKGEDFDINKLNSQAA

SEQ ID NO: 280274 - protein, 343 aa, unidentified
MEEFNIVGIDLAKNAFQVHASDEIGRRLFSKKVLRGQLLKLMSTIKPCVVALEACASAHYWGRQIAELGHEVKLIPPIYVKPFVKRQKNDAADAEAIVEAASRPTMRFVAVKSADQQAAGMAFKPRDLFVRQRTQLTNALRGHLAEHGVVAPQGIVHLKRLKAALSDEKSQLPATVVIHAELILDQIATLQSHIEALEKEILAVSRKEELATRLMTIPGVGPITAAALLAFAPDPATFKRGRYFSAWMGLTPKQHSSGGKDKMGRTSKMGQRDLRRLLITGAMAVVRWAARKGAQEGSWLARMIDRKPKMLIAVALANKMGRIIWALMAHGDTYNSHRGKAQA

SEQ ID NO: 280275 - protein, 341 aa, unidentified
MSKVPSCPAAWCGIDVSALQLVVALQRGELPVQQRTFSNRSSGHRELLRWLQRSNVTVRVCLEATRVYSLDLALSLHACSSIELAVLNPKAVCRFAETLRRSKTDPADALVLLDYSRRMPWQPWQPPSATAMTLRSITRRCAALTRQHTMEANRLHAAQASGTVPRCVQQDLKQSLQQIERRLKRLQHAAREMVAQTAESEQRYTLLRSIPGIGESSALQLLGELGTLPPDLDVRQWVAHSGLDPLHHESGSSVHRPAHISRAGNRHLRRALYMPALVGVRFDPYLHAFYERLLARHKTKLQAIIAAARKILHAIFGMFRSRSHYEGSRLFPQLKPVITAA

SEQ ID NO: 280276 - protein, 405 aa, unidentified
MAVMIGVDPHKASHTAAAIGPAEEPLGQVRIQACASQVQQLVAWAAAWPERTWAVEGATGLGGLLARQLVAAGERVLDVQPKLAARVRLLEAGNTNKNDANDARSVAVAALRSAARREVVADGHAAVLTVWPGRYRDLGRARAQAACRLHALLAGLVPGGFAGEITAGQAAGLLARITPADPAARARCELAAEFLADLRYLDTQIRGTRDRITAAVRASSTTLTEIFGVGPVIAAAIVGAVGEVSRFADRNRFAAYNGTAPVEVSSGGRKIHRLSLRGNRRLNHAIHMAAITQIRYQHSPGRAYFDRKIAEGKTGKEALRALKRQLSDAIYARLVADAARRGATTQAEGPGGQSGNGSVSSAAGSHPGRRLFGQATPGPQPSLRPTAPGRPRTPATASANSLRTT

SEQ ID NO: 280277 - protein, 401 aa, unidentified
MDPQIRVGIDVGCKAHRVGIANPDGKVLEEFDISHTAAGFCDFFRRIDHHKQELDLPVAVAMEGFNGYARPLDRMIQEHGYTLYNVNNLKLARFKEVFPGAAKTDAIDARKILELFHLKDHLPLAKDALQKVVSAPLVNDKLKRLSRRRRQLVKEKVRVASRIQSDMQAVCPELLAITNNASNLKFLRFLTYRDDLTQLARLQSTTLLKIPGVGQNYARIIQEWQRKASFSAEVEYVGPMIITDARRILELLDQVHILDEAMAALADQSELARRIGSMQGFGKTCIAELAGEIGTTERFASERSLALYVGMSPLSKDSGQHHGSKCPRSVNHRAKAAMMTAVAHHIRCVPESRAYYDKKRADGKKHNQAIRALGRQLVRVLWSMLKNERDYELREVIPRVT

SEQ ID NO: 280278 - protein, 315 aa, unidentified
MEVGKGMYIGIDVSKEHLDVSIGEEGEYLVFGNNEEGISKIIERLRPLEPALIVIESTGGLEKMIVAELYARQLPVALVEPGRVRHFAKSDGQLAKTDKLDARILAKYAKALTPAAVHLPTEEEQYLSALMTRRRQVLAMLTSEKNHLLSTPSKVRPLVERMITSLQQQLEELNQAIDEFIDHNDAFHQKEDLLRSAPGVGPVTAAILLSDLPEIGHLDRKKIAALVGVAPFNNDSGRRSGKRRVKGGRESVRHVLYMATLAATRFNPVIQRFYQHLLKLGKPHKVALVACMHKLLTILNAMIRTLRPWQPVGTS

SEQ ID NO: 280279 - protein, 361 aa, unidentified
MTKVSTMTDRAATTDFIGLDLSDKTGTYVVLSAEGQVVGDGKLRLTSAGISKVFAARPPARIAIEVGGHSPWVSRALTQLGYEVTVANPRQVKLISHGPKKNDKLDAENLARLLRLDPIMLRPICHRGATAQADLALLRSRDAVVRARTRLINSARSMVKAAGGRLPKCSADSFHHKVQGRLPEMLKPALEPLIEVIAGLTQQIITATRQLEKLADERYPETRILRQPKGVGVITSLGYVLTLEEPQRFGRSRSVGAFVGLTARQYDSGESQPQLRITKAGDPFLRRLLVQSAQYMLGPFGEDCDLRRWGLKLMRGGNNKILKKKAVVAVARKLAVLRHHLWLTGEVYEPLRQAALEEEAA

SEQ ID NO: 280280 - protein, 338 aa, unidentified
MRTSQTAQTYTLFVGVDIAATTAAVSIQRAGAPASRSFTIDQTPEGHTKLMHQLQATGHVPSRILVVMEATGSYWISLATHLVHEGFVVSVINPAQAHYFAKALLKRAKTDAIDAQTLAQLAMVLQPEPWRPPPPIYHALQQRLAQRDDLLNLRQQVDNQLHALRQHPEVIPEVRARMEHLLVIFETQLAEVEAEITAALRQDSAWAAAAQRLQSIIGVGWVTAAWTLVSTLNFTTCDTVEALTAYAGLAPMPRQSGTSVWYRPAIGHTGNSRLRTALYMATLSAVQHNPIIKTFYGRLRAAGKPEKVARCAAARKLLHIAWALVKKDQAFDPRYARG

SEQ ID NO: 280281 - protein, 317 aa, unidentified
MEKTSMIVAGIDTAKDKLDVAICGQTQRLQVANSMRGWKQLRLELTKAGVERVGIEATGGYERGVVRHLQAAGFVVLVLQPIQVRAFARMHRQRAKNDALDAALIAACATAIKSHEIGPDQRLTALADSLTFVEQIEEDIARFKTRLEHIAEPRLKRMVLADIARLKVRRLAQLRLIAKQLRAHHDLAVRLDLVMSVPGIGERTALALIIRMPELGRISREQASALAGLAPFDDDSGKYKGQRHIAGGRARLRRSLYAAALPAAFRWNKALINLYSRLTAAGKAHNVAMVACARKLLIYANTVVARGTPWRENAVPT

SEQ ID NO: 280282 - protein, 346 aa, unidentified
MKKIFIGIDFSKEKFDATVIKAEGVEERAERQHEVFDNKVSGFRRLLRWVKSVADEPDAGLWLFCGENTGGYSRALCNYLYGSGYDMWLENALSIRRSSVLQRAKSDKADAGAIAEYAMRNYDQMRLYKPLEKNLERLREVFLYRHNLVKLKASMTTRRGEKRLTQEKSDISRFMAQSSRHLISEFNKKIAECNRRIQEIIAGDEDLRRNFEIITSVPGVGTQNAVCLMVYTDNFGRFDYDSRKIACYYGVAPFGRQSGTSVNTPPHVSPFANKLIKALLTQAALASVNFCPQMAVYYRRLVDAGKKKPVAVNNVKNKLLHIITAMIRKGERYNPDHDYYAALKVA

SEQ ID NO: 280283 - protein, 321 aa, unidentified
MTRIVCGVDISSASLEARIGQQGATGSFANTPQGISALAAFCQAHQVELVAMEATGGYEQQPFALLSEHHLPVAILNPRSVRRFAEGMGLTEKTDAIDAGLIAWFAQVKQSKPQTLAAASQRQLRALVTRLRQITQLRTAQLNQSRLVADPTLIAYFNKMLDFLATQIEELETDIARLIAADPLWQQLDQAFRSIKGVAGRTVARLMADLPEIGTIPNKSISKLAGLAPLANDSGKHQGKRSIGGGRATVREILFVVAGLAARYEPDFAAFQQRLAAAGKPKKVIRIALAHKLLIRLNAKAREIRQQKTGELSQPLAMPLT

SEQ ID NO: 280284 - protein, 345 aa, unidentified
MSTVTLVGIDLGKHSFHLHGQDKAGREVFRKKTTRRQMMRLLGNLPSCTVVMEACAGSHFLARQLMAFGHEARLISPQFVRPFVKGNKNDFIDAEAICEAASRPAMRFVTPKTETQQTLSVLHRMRESLVRDRTKTANQAHGFLLEFGISLPKGLSLVRRLPCTLDEHELPPRLTMLLKRLHEHFCYLDEQIKALDKEMDSQLAADDLGSRLLSIPCVGPITASLLCAEMGDGKQYGGSRDFAASVGLVPRQYSTGGRANLLGISKRGDKNLRRLLVQCARVYLQRLAFQQGALADWVRSLRERRHSNVVVCALANKFARIAWAIAANHSEFEAGPSAFAACPRV

SEQ ID NO: 280285 - protein, 426 aa, unidentified
MKNFNVLDTLFVGIDVSSKSNVCTAINFNSNVLFTINVANNQLGADELKSKLIHTICENKFKTTVVALESTSFYGIHIANFLSADKELLAYNIYVYCLNPKMISNYKKSFIGLGKTDPIDAFVIADFARVGRINTDPWRGSQYLALQRLTRHRLHLVELITKEKTYMVSNIFLKFSELAVLKNDEHPFCNNYISTAEAILTEMLSLEDIANLSSEDLIDFVCKHSKNKFSNPEEVSVLLKKAARNSYRLDALLYEPLTVSIASSFNCIKAYQNEIKKINKAIDKTLRGLNPNAVTILESIPGIGPVFASGILAEIGDIHSFHSADSLAKYAGIYWNKHQSGNYSADNTPMSKAGNKYLRYYLIEATDSIRKHDSNFSTYYKKKFDESITHKHKRALALTSRKTIRLIYGLLTKNQLYAPNGVSVTS

SEQ ID NO: 280286 - protein, 372 aa, unidentified
MEERSKIHVGLDVHKDSISVAAAEPGRAPARLIGKLAHDLSKLLKVLIKVGPAEQLHIVYEAGPTGFGLQRTLAEKGYVCEVIAPSQIPRRPGDRVKTDGRDCRQLAECSRAGQLSAVWIPDPSDEAIRDLARAREDAVNSRVQARHQLKGFLLRHGVRYTGKTSWSIAYYRWLSTLNFGAGATQTAFTEYWKAVEAADERVERLTKALEGSITDWRFEPVVRALQALRGVAAITAISLTAEIGDLARFSHPRKLMGYLGLVPSERSSGERTSRGSITKTGNAHARRLLTEAAWNYRFKARIGREALARQEGLPAGIRNAAWKAQLRLTQRFAALQSRGVQLNKACVAVARELAGFVWAIGLQAQREKAPTT

SEQ ID NO: 280287 - protein, 338 aa, unidentified
MKLYGGIDLHSNNSVVALLDEEDREVYRKRLANEATGVLEALVPYREAIVGLVVESTYNWYWLVDALMEAGYRVHLANTAAIVQYSGLKYRDDDSDARWLAKLLRLGVLPEGYIYPKEERPVRDLLRRRSRLVQQHTANLLSVQNLFARNRGKSLSANEIKRLTPEAVSRLLPDVNHALAVQSTLLVMRAQEAAIDLLERTACARIKPRPAYRHLLSVSGVGTVLGLTIMLETGPLARFAQVGNYASYSRCVGSTRLSNGKRKGRGNTKSGNKYLAWAYLEAANFAVRYNPTIKRYYQRKRAKTNGVVAIKTVAHKLARACYYILRDGTDFEVSRAFA

SEQ ID NO: 280288 - protein, 336 aa, unidentified
MIAVGVDTHKHEHLARALDGLGQILGGLTIRANPHGYVELAQWLRTLGEGVVVGIEGAGSYGAGLCEYLLAEGIDVVEVERPRRQDRRRGKSDEIDALAAAKKVLAQDGLSRPRAGGTRQALAALVIAQRSCISERTRLINQLQSLHTTAPVALRERIGPGNGRKLAARLVKMRARSDAPRSEQLIFTVLRDLAHRAQELATEADAYKHELAELISSLDPTLLEEYGVGPISAAKLLVCDPARLQGEAAFARCNGTAPKPASSGQTIRHRLSRGGDRQANNALHTIARIRACHDEQTRAYLDRRISEGKTPREAMRVLKRHLSRSLYKRLITVPLT

SEQ ID NO: 280289 - protein, 344 aa, unidentified
MNKKWFIGIDVSKKTLDASIFVAGELINRFPHVQVRNDGQGFRDLLRWAKDQGVKANDALFGLEFTGYYSDALEQFLSGKSISYAMLPTTAVKHYQRGTRDKNDKTDSAKIADYLFRFYGTECIKLRVLPSRAMQQLKALKSERKFYVQQRVACENRQKVARSDQEREGLQRMIDGFSGEVERVEKQIEEVVASDKEIYANYRLLTSIPGIGFVNAVNTIANTQNFTAFETARQYAKYVGVAPSEHSSGTSVHWRRRPSPHADLQAKADLSMAALHAIELSAEMRQLYERKLGNRPKDKDIQKKALNAVKFKLIREMFSVVKQARNFELRGLDKAQDETHNTEE

SEQ ID NO: 280290 - protein, 414 aa, unidentified
MAEEETISWFAGVDWGSERHQVCLLDARGGTVGEREFPHSGEGLAELGDWLLSMASAAGTVAVAIEVPHGPVVDVLIDRGFVVYAINPKQLDRLRDRFSVAGAKDDRRDAYVQADSLRTDRRLFRRLQVADPRLIELRAWSRLAEELGAERVRLSNRMRHQLWRYYPQMQKLTKDLAAPWFLELWAIASTPAKAGRLRKSTVERLLKQHRIRRMDAETVLRILREPAIKVAEGVAEAASIHIRSLVARLGIVNRELREAERKLDELCTAVSEIEQTSGESLQRRDVAILRSMPGIGRINLGTLLSEASGPLSRRDYEGLRTLSGAAPVTKRSGKSLIVVRRYAAHVRLRNTVYHWARVATQRDPRCRARYTALRKRGHSRGRALRGVADRLLALVCVLLQRQTLFDPYFGRPTA

SEQ ID NO: 280291 - protein, 392 aa, unidentified
MLYVGIDVAKNKHDFCIIDSDGVIHFHHQTISNSLDGFKFLVSSIRSALSESDSLYAKIGLESTGHYSINITNYLQHSGFEIITLNPLSTSLFRKAHTLRKTKTDKTDAMVIATMLITDDSKSYSPISYQIQELKSLTRHRYRLVGYRSKLKLSMSRLVDIIFPELPSAVWSIHQASVLAFLTAFPHPKALSVAHLTKLTNLLKKASRGKYSKDKAQELKTLASSSIGLSNDALAFELRQNIRLIQNVQEEIKLLDQRIKEILQSLDTPILSIPGISFTLAAIIISEIGDITRFSSPAKLLAYAGMEPSTYQSGNFRASSTPMVKRGSTYLRWAIMQAARLVAMKDSTFSSYMKKKTSEGKHYYVALSHTGKKLIRVIFYLLKNNQQFAPQA

SEQ ID NO: 280292 - protein, 324 aa, unidentified
MSGTQAHFNHFIGADVGKHTVMIYDSRTETSQEIANTHKALTRFFSKHPDHLETTLVVCETTGGYETVLLDVLQTVHIAVHRANTFRVKSFIRSLGIQGKTDAIDARALMHYGRERHAQLTHWVEPPAYAQQLKKLMHRRQDLVQMRTQEKNRLQAPNEDPLVQKSIRAMLRLLDQQITQIDHHMAMLVQSVPALAHKERIMTAITGVGTHTARTLLAAMPELGQCTRRQVASLAGLAPHPRDSGTLSGRRIIRGGRREVRTALFMAAMSARCHHPALRQFYLRLVQNGKRPIVAITAIMRKLITIINARIRDALYNPSPIQQS

SEQ ID NO: 280293 - protein, 322 aa, unidentified
MHPLQLGIDVAKAKLDCALRLASGKFRHKVVDNTPAGFKALDTWLAKEGAAALQVCMEATGIYWEAVAEHLAARPETTVSVINPAQIKAFGASRMVRTKTDKVDAKLIAQFCAERTPEPWQAPTPAEKTLRALVLRLDALQAMRIQESNRLEVARESVAEGIAQHLTWLDDEIARISKAIRDHIDNDPTLRDKHRLLDSIPGLGERTTAVLLAFLAEPARFENARQAVAFAGLDPRQHESGSSVRGKPRLSKVGHSFLRKALYMPAMVALYRTDWGKLFRDRLASKGKPPMLIIGAMMRKLVQVSYGMLKSGQTFQPALHGA

SEQ ID NO: 280294 - protein, 315 aa, unidentified
MERLAASPSFVGIDVSKDRLDVNVRPSGQAFAVVRDGKGLDQLVIELRSLAPALIVLEATGGFEITVAAALASAGLPLAVVNPRQIRDFARATGRLAKTDVLDAQVIALFAERIRPEPRPLADADSQSLTELIARRRQVVEMIGMETNRLYQARNSRVQRMLRTTLKTLKVQLAELDRDIDDTIKRSPIWRAADDLLTSVPGVGDVTAHTLIADLPELGQLDRRRVAALVGVAPVNRDSGQRRGKRTIAGGRTDVRNALYMATLSAIRWNPVISKHYKCLVDRGRPKKVALVACMRRLLGILNAIMRTRTPWQCA

SEQ ID NO: 280295 - protein, 414 aa, unidentified
MLYLGIDWAADSHTVTLLAATGEVLASIAIDNRLSGFLVLIEAIRKHLHKLEPAATPDSVSFAIEDQNQRLTDFLLAQGFQGYLIEPSRMKGYRLRYRSSGNKTDPDDSFILADVLYRDHNQLPRMAPDSEVIGALKTLLRDREGFVRDSTRLTNRLTACLRQYYPEALGFFEDVAGKTALNFIAAFPDFTAASQLSRREVQRFLAEHHCNRATQLERILTALGSGPTPVPAVVVRTKRQQALAIIQQLRTVQTAVAEYDAEIERLGKENDDVKRFRSIPGGGPIIGAGLSTLFGDDRTRFSRAMAVQSLAGTAPKTIQSGQFRSACFRFGCNRFYRMLLQQMAMGALRSSAWAKQYYRKKRREGKTHQHSLRYLANLLLKIAYAIWRDGTEYNEDRHLAQVMRHHLRPTSNSV

SEQ ID NO: 280296 - protein, 344 aa, unidentified
MEHFAGLDVSVNETSVCIVDDTGRIIREVKVASEPEALLAVLGNPACQFKRIGLESGPLSQWLYSALAETNLPVICVETRHMRAVLKAQINKTDRNDARGIAQMMRAGLYRPVHVKTLRSQKLRMLLTHRKLLQSKAIAIENDLRGTLRTFGLKVGVVGMVKFETRIRELVDKLPDLRTLVEPLLVVRRVLREQIAVLHRRVLAIVRNDEVCRRLMSIPGVGPVVALTYRATVDVPARFRNSRAVGAGLGLTPCKYQSGESDYTGGISKCGDAMLRVMLYEAAQILLIRSTRWSWLKAWAMRIARRRGMKKAIVALARRLAVIMHRIWVDGTEFCWTRQQAAAA

SEQ ID NO: 280297 - protein, 381 aa, unidentified
MTATTRSEFRSVNDPTLYVAFELGKKDWKLAMTSGFGVKPWLRTVASGDLGAVARELARGRQRFGLPPTAVVVSCYEAGRDGFWIHRALTQRGLHHRVVDSSSIEVNRRARRTKTDRIDALKLVTMLVRVCCGEGRVWHEVRVPSVADEAARHVSRERTALTKEQTRLSNQIGGWLATWGCQVSVRAQRTAGWWTRARDWSDAPLPAAVQARIARAAERLTVLAAQIAALETHQESAVATAPGDSALGRLVQLKGVATTSASVLLDEGLVWRGFRNRREIGGLLGFAPAKYDSGDSEHDQGISRAGNAHLQAISIQLAWNWVRWQPTSALTRWYREHFGPRRRARRIGIVAVARKLLIALWRYVMTGVVPSGAILTRRSHA

SEQ ID NO: 280298 - protein, 352 aa, unidentified
MQQINRIGLDIAKRWFQVHAVSADGMMVLSRKLSRDAVLAFFASVTPCDVAMEASGSAHYWAREIGKSGHRVRLIPPIYVKPYVKRGKNDAHDARAICEAASRPDMRFVPIKSEEQQAALMQHTTRQLMIERRTALINSLRGQLAEFGMVANKGIQNARELVTMVDDGTDGKLSYLPAVVLEVLKLIVRQLRETEAAIGALDEQIRAWHEKSPLAQVLTSIPGIGPLIGAAIAATAPDHSVFRSGRDFAAWIGLVPRQHSSGGKERLGRISKQGNPYLRKLLVLAATSHLRWLHKRSGPLTDWLRDLLKRRPARLVTIALANKLARICWALMSTGELYRTDSANAEARAATI

SEQ ID NO: 280299 - protein, 410 aa, unidentified
MAERFVGIDVALREHRIAVLDRDGEAVGPSFTIAASPDGVTTLLRTLAARGATTAQTLIGLEASGHLWENLEAALGGAGYRVLVLNPLQTRRYRDVVRRKAKTDDIDAHVIAGLLRSGAAQASYVPDEQIQSLRELARLRARLLADRQDYQRQLIAQLDVVLPEHRVVLGDLLTARARGILAQFPTAQHLAHASPRAIRRAAEDAGARGFSLDDATGVRDHARRSLYSGKAAVARAHVVRTLVSQLERLTSAMDEVDHAATTLLPPSEPGTSPSDAELLQTIPGIGPQTAATLLGEFGALTRFTDARALVAYVGFYPVISESGDRAAPPRLSRVGPRIARHSLYLAAVNAVRHSREWRTIYLRKKAQGKTAKQALVVVAVKLLHAVYAMLKHRQPYNPSRLLVAPATIGS

SEQ ID NO: 280300 - protein, 326 aa, unidentified
MQGKEAPEQQANVKSSAGVDVSKDWLDAHVWPCEEPLRVANTKEGIQKLKRWLQRYDLKVVIIEATGKWHRELYRSLYQSNIPAVVIDPYKARMFAQALGILAKTDQIDASVLSRYGYMVGPAVRPPKPEVIEQVAELVTGRDTAVKEQTRLQNQLSAATDGFFRKHLRQRLARIAKDIAALEQEIIARIGADPELTRRYEILISIPGVGPTTAATLIARMGELGALPDKEITMLAGLAPIANQSGNHDGKRLIWGGRKPVRRMLYLAAVSASRWNPSLKLFYDRLEEKGKEAKVALIAVARKLIILANTLIAEDRLWLKIPPKHA

SEQ ID NO: 280301 - protein, 340 aa, unidentified
MKLFGAIDLHSNNSVMVLIDEKDEVVYQKRLANDLRMIVEQLAPYQASLEGIVVESTYNWYWLIDGLMEQGYRVHLANVAAIQQYSGLKYTDDDSDARWLAHLLRLGVLPEGYIYPRATRPVRDLLRKRSQMVRQPTVNVLSIGNLYARNSAQSLSAKRIKGLEDKEVEEYFANGDLALAIKANLAVLRSAEEQVEILERTVIKRVKLRKEFKNLKSAPGIGQILALTIMLETGEIKRFGSVGNFASYCRCVGSQKISNGKRKGKGNSKNGNKYLSWAFIEAANFAIRYYAPIKSFYQRKKAKSHGVVAIKAVAHKLCRACYYIMRDGVSFDMSKAFGPK

SEQ ID NO: 280302 - protein, 397 aa, unidentified
MYYLGIDIAKTNHVASLIDNEGNIRIRAIKFTNSTEGFSKLLESIFSVTDDLSEFAVSMEATGSYWLSLYSALLDKQFNVSVFNPYQIKSYRSAYNNRKQKNDIIDSIIIADYLRVFGSNTTTLPKEDLLSLKQLTRFRVNIVDNVSSLKTQVIGILDKVFPEYSKAFTDIFCNTSKQILLNYPTPEDILKISSTKLLNLISKHSKGRLNSSDKATVLKSLAKNSFGVQFTNDACSFEIKQIVNQIIFLEKQIDELNVKIKEIYDKLDNHLLSVPGVGKTLAPVILAEIGDINTFDKPSKLTAFAGIDPSQNQSGNKQSSNEKLSKRGSPYLRHAIYTASLVAISNDKTLRSYYDKKVSEGKHHFVAMAGISRKLLTIIFYVLKEDRDYVSYDKKRS

SEQ ID NO: 280303 - protein, 310 aa, unidentified
MDSITVGIDVSKDRLDVAVRPSGELLTVERNAAGLELLAARLRELSPHLVALEATGGFEIIAAAALAAAGLPVVVVNPAQIRAFAKAVGQRAKSDPIDAAVIAHFAEATRPEVRPLPDEATRLLADLVARRRQIVEMIGAERQRERRMTVPHLRKSIARLLKALEKELASLDADIDDAVRGSPAWREKEDLLVSVPGIGPTIARTLIAELPELGQLGRRQIAALAGLAPFTRQSGQWRGRSFIGGGRTVVRTVLFMGAMVAKRHNPVLKLFFDRLVATGKPKMVALIAVARKLLTILNAILRDNRTWQNA

SEQ ID NO: 280304 - protein, 350 aa, unidentified
MIIGVDYHPSFQTIAFFVEETGECGEQELNHSEGQAEKFYRDLKQRGICVRVGMEATGYSRWFERLLAELGFELWIGHPAQIKAKRVKKQKYDREDARLLLRLMRENNFPQVWVPNPENRDLRQLLWHRHRMVQMRTRIMNQLQALAMNEGYRWKKKLFSESGRAQLEKLALAPWASRRRQELLELLDRMNPTIEELTAAVEREARKRPEVLRLMTHPGVGPLTALAYVLIIGTPTRFERGKQIGTYVGMIPSEDSSAGKQRLGHISKQGSSLLRFLLVEAAQTAARIHPDWRRRYMHLAMRRHKNIAKVAMGRRLAIKLYWMWRNGCEYSPSLGFGSYAGQLGTGHGVK

SEQ ID NO: 280305 - protein, 411 aa, unidentified
MRRRVSPVPADTFVVGIDIAKRRFVAVVQAGDGAVSKAKSFAMSRDGFESLQTYVARSTAGAPWVGAVEPTGHYGEPLVHWLHDGGHRVFQVQPLHTKRSKELYDGTRRKTDAKDAAVVADLCRRGICTPSVHLESPFAELRVLCRHREQLVKRKAQLQNRIHWQLDVVFPELIPLFNRVDAAGFRCVLELAPTPQDALRADPHVLAKALRRATHGSQGEETVQQIMDAAASSVGVDRALDARRLTLRHLLGELASVQRLLDEVGEAMKTGLERIEYAPRLVAIPRLGWLTVAILLAEMGDLRGYRFSKQVIAMAGLDLVEQSSGERQGHRHISRRGRRYVRQILYLAVLRMGWNILSEPRRRLVEENKLPPTKAAIANICRLLRIVHAMVRDGTTFNASLVAAKGETAVA

SEQ ID NO: 280306 - protein, 421 aa, unidentified
MPDDRCRLGSDDVVIGLDLASAEHQVVVLTATGQRLTRFRISHSRAGLAELLRRTTPAVLGRAGGARVFAFEATGHVWEAVAYVLRARGEQYVVVNPLATFRVREARQLSREKTDLTDAEQIAELCRTGLVTRTQLEPRPYLALRRAWGEYVRLREERARLKVLVAHQLYGLFPEFLRVWADLLQPGALAVLRTGLTPAAIAALSLTEFVAQARAHGAGHRLWRDKLAQVHREAAQTIACPDGLEVLAREVQRAVARMDMLTAHMTAVAAEIDSVLVELEEVPYLRTIPGLGWASVAGLLAHVGTISKYHHGRQLIKLAGTNPSRRDSGQTVGHGQRMSHRGRAGLREVLYLATLSCLQHNPRIRAHYDRLIQRADRPLPKMQALGACMNKLLLYAFAVMHRREAFQLDHDWQRTTLARVA

SEQ ID NO: 280307 - protein, 456 aa, unidentified
MRKPQVIPDEDHVVVYERVAAVDVAKASGVVCMRTPDPARPGRCQNQVWHDVTATRARITELGRELLRNKVQMVTLESTSDYWRIWYYVLESIGLAVQLVSASQAKNLKGRPKTDKLDAMWLARLTQWGMLRPSFVPPAAIRALRDFTRARLDLVRERTRCLQRLEKLLEDAMVKITSVASDGLKAKSVVAMVQALIAGERDTAKIADLAKGPLRGKRAQLAEALNGMFDSHHGVIAQALLDQVAFLDQRIARMEDGAIEALAQIPQSWGVDATGETGPQAGKTPDSPVLAAAWRLAEIPGISLMLAIAIIAEIGLDMARFPTADHLVSWIGLCRAASQSGTRQGKGKQKKGNSYARCLAGQAAIGASRTSSFLGERYARVGRRRGGAIAQVAVARSIMIIVWHLLSDPQARYRDLGADWYERRTDKDKKIRNHIRQLEALGLSVTITADPQETAA

SEQ ID NO: 280308 - protein, 416 aa, unidentified
MNAVGIDVSSRKSTVAVLRPLGEVVCLPFDVTHDIAGLASLVEKLKALDGETRVVMEHTGRYYEAVAKALHEAGFFVCAVNPLLIKEYGANSLRRVKTDKADAVKIARYALDNWADLRDFTPMDAIRYDLKTLNRQFQLASKQRTASANNLIALLEQSFPGIRKCFDSPVRSDGTQKWVDFAHSFWHVDCVRKQPFAAFCERYRKWCKRHAYLFKLSNAEEVYALAKRAVVLTPKSKVVKVLVQEAANQLISISRSVEVYRAEMDRLAAMLPEYPVVMAMYGVGKSYGPQLMAEIGDVRRFERKQALVAFAGIDPMPNQSGDKNVRSNKSSKRGSPYLRKTLFNVIRTYLQCAPQDEPVFQFLNRKRAEGKPFYVYMLAAANKFLRRYYAKLRDYFASLDTLQPVAPIPTILKATL

SEQ ID NO: 280309 - protein, 444 aa, unidentified
MKYQKVLMMLESIPYLSVGLDVGADFTWMSIMLPNGILSGKPFKIIHSDPQSREQAVAKIKEAQEMYSLESRCFLESTGIYHIPLLYFLRDKGFDCSVINPIITKNSTNMNVRKLHNDKFDSKKAAKVGLDASLKTSIIPDDEVIDLRNLVRDYYYFKDLQSAVVLKLTAELKVSFPAYRKVFSKVTTQTSLKLLEAYPLAADMLAAPKDILVETIRKTARFGEKYAVSKYDAIRAAAKDAAVFGRALQSSALRIRLYIKTYREYQEHLDNILEDLHKAVDKLEGTPVYDRIFLLQSLRGVGFLSAAVLIAEMGSFDLFSSPKKLYAYFGLDPAVKQSGKFNGDKVHMSKRGSSLARRILHMVAINNLKVDKGTKTPVNPVIHGYYTDKCKSKKKNVAVGAVMHKICNIIFAMLRDNKPFEIITPQEHCERYLAAQPDKVRNAA

SEQ ID NO: 280310 - protein, 448 aa, unidentified
MDVMFTHCAGLDVHKKTVTACRVTPDLTGQQADGIMELKDFGTMTADLLALSDWLAEAGITHVAMESTGEYWKPVYNILEGDCRVFLVNAAHVKQVPGRKTDKADARWLAKLMRYGLLQASFIPPAGQRDLRDLTRYRTKLVQERSRAVNRLQGVLERANIKLAAVATDIMGVSGRAMLAALIAGRADPGTMAELAKGRMRTKLPLLEQALTGLMRDHHRRLLTLQLAHIDFLDEQIDTLSADITRGLGELEAEAPPPLPADLAGATGEMGSAGNREAPLLPMPFAQAIAVLDTIPGVDQRGAELLVAEWGTDMRRFGTASRLAAWTGVAPGNDESAGKQRSGKTRRGNRTLRTGLTQMAHAAARTKGTYVAAFYQRLAARRGKKRAIMAVAHAIVVSAFHMLSRHELYRELGPTYFDEQRRAHLVDRLTRRIERLGDRVSLEPAPAV

SEQ ID NO: 280311 - protein, 347 aa, unidentified
MNFYHSTHRHYCGIDLHARTLYVCILDQQGEVLLHKEIKAQPELLLARLEPFRDDLVVGVECMHCWYWISDLCEEHGIHFILGHALYMKAIHGGKTKNDRIDSFKIAMLMRGGNFPLAYVYPKEMRATRDLLRRRTRIVRHGAMLKAHAVNTLGQYNLPPSKANLNNPGGRSQLTAAFSDPDVQRNIDLDLAIVDCYQHELKKLEWHLEQQAKQHDPASLNVLKTIPGVGRILALTILYEVGDIQRFESVQKFASYARLVKCKAESAGKVYGTQGNKIGNAHLKWAFSEAAVLFIRNNDKAKRYVEKLQKRMNKPKALSALAHKLGRAVYFMLKDKRVFDEQRFLKG

SEQ ID NO: 280312 - protein, 326 aa, unidentified
MLEGVNGKEDWIVEESVFVGIDVSKGTLDIVMRPGGSRESIPNQEAQIGELVRRLSTLRVTLLVVEATGGVERRVVRALAAAELPVIVVNPRQVRDFAKATGRLAKTDKIDAEVLAHFGEAVRPALRTLPAPASEELRAQIARRRQVTEMLTAETNRLAHSAKAVRKRIEAHIRWLEAELDRVDNELDQSIQQSPIWREQEALLKSVPGIGAVISRTLLAELPELGKLNRKQIAALVGVAPLNWDSGMMRGRRAIWGGRATVRAALYMAALVASRCNPNIREFHRRLRAGGKAPKVALVACMRKLLTILNAMIKHRTRWSVIVEAQ

SEQ ID NO: 280313 - protein, 318 aa, unidentified
MDKEKVYVGIDIAKERIDVAVHSSEQRWSFSNDDVGITKAVSCISGVCPVLVVLEATENFQASLVAALVVAGITPAVVNPRQVRDFAKATGSLAKTDVIDAHVIVHFAAAIHPTPRSLPDTQAQELKDILARRRQVSEMLTAERNRFGSGHKTVRDRIQAHITWLQQELDEIDDTLRRVIRESPVWREKDDLLQSVPGVGPIVSATLLAQLPELGTLNRRQIAALVGVAPFNRDSCTLRGKRTIWGGRSRVRAALYMAVIVATRYNPIIRNFYERLCNAGKAKKVALTACMRKLLTILNAMSKHRVPWNYKPPMAEVS

SEQ ID NO: 280314 - protein, 398 aa, unidentified
MTESSDYESVQVFIGVDVGKDTHHAVAINRSGKRLFDKALPNDENKLRSLISDLKQHGQILLVVDQPATIGALPVTVARSEGVLVGYLPGLAMRRIADLHAGEAKTDARDAAIIAEAARTLPHALRTLKLADEQIAELSMLCGFDDDLAAQTTQASNRIRGLLTQIHPALERVLGPRLDHPAVLDLLQRYPSPEKLASLGEKKLAAQLCKLAPRLGKRLAADIAQALAEQTVVVPGTNAAAVVLPRLALQLITLRKQRDEVALAVEQRVLAHPLYPVLTSMPGVGVRTAARLLTEVACRAFASVAHLAAYAGLAPVTRRSGSSIRGEHPSRRGNKALKRALFLSAFAALRDPLSRAYYTRKMSQGKRHNQALIALARRRCDVLFAMMRDGTFYTPQAS

SEQ ID NO: 280315 - protein, 377 aa, unidentified
MYYVGIDVSKHHHDATVIDATGRVVIAPFRFLNTRQGVATLLSRLRPLNPVCIAMEATGHYWLPLYEALTDRGYSVSIFNPFQIKAYRQIGLRKTKTDAVDSFWIADFLRIGRGQPMVVPTPLVRQMRELARFRFSLLQRQGNIRRRALTILDRVFPEYLTLFPRPFSPTSRALLRRAVTASSFAAWPLEDLAQTLSRASRGHFGLREAGKLQCLAQDSLGIRSLGPVAYLEMQLLLDQLALLDDQIATLDEELARLLQRTGTYLTTIPGLSTTLAATILGEIGDIHRFANLKQLVAYAGLDPTVHQSGQFQASHSRLSKRGSTYLRWALWMAASIARQHDPDLKALYQRKRSQRKHPSCCHGCCLPSAPGPHLCGS

SEQ ID NO: 280316 - protein, 348 aa, unidentified
MLIIGCDYHPGFQQIALVDTETGECGERRLTHRKEAEEFYDTIKERKVRVGMEASGHARWFERLLNGLGFELWVGDAAEIRTKRVRKQKTDRQDAQLLLRLMVEGRFPRIWVADAANRDLRQLLWHRHRLVQMRTRIMNQLHVVALNEGVRRKKGLWRPAGRNELESLNLAPWASRRRQDLLDLLDQLTPKIQESTRALEEEAEKRPVARQLMTHPGVGVLTALAFELVIGTPDRFHCGKQIASYVGLVPSEESSGDRRRLGHISKQGNSLLRFLLVEAAQVTVRSQVQWRSKFFHLAMRRGRKIAKVAMARKLAVHLYWMWRQGWDYGQLEKLGSHAGEPGNRHGVQ

SEQ ID NO: 280317 - protein, 437 aa, unidentified
MSEKKSVEIRVSVDVGYRRHSVAIGLPSGEVLEEFEIAHRPEGFAEFFSRIEKHQKVRDCEVAVAMEGFNGCARPLDAMVRRRGYRLYNINNLKLARFKEIFPGAAKSDRIDARKGLELFQLSDHLPMAKEVLQEVKGTPRENEVLKRLTRRRRRLVDERVRVISNLQTDIQAVCAGLLEITKNAGNQWFLNFLVSAPTLSQLARLRPATLRKIPAVGRKYAGLIEDWQKRAHFSEEVEWVGEMIQEDAKRCLELDEKIKALRAKIKEVAKDSKIAKTLLSIPGFGTICTAELAGEIGTIERFSKEGSLALYLGMSTLDNSSGKYQGSKQPKHVNTRAKAAMMVALDRHRKYVPESQRYYEKKRSEGKKHNQAIRALGRHLCRIIYKLLKEEREYEIRPEKGNTKSKVSPRSLIKRQIRKPKISDKGKNNKIYHQGA

SEQ ID NO: 280318 - protein, 417 aa, unidentified
MGGGISSFWAGIDWSEHLNDVAVVDRTGAVVATARVEESPAGVRQVLQLLSGLRASHQHSRKAVPIAIETRHGLLVAALRQAGQPVVVISPTTVARYRGRANPGNSKKSDAQDAELLANILRTDAHLHRPLPANSGPAEALAVLTRAQLRSVYTRQHHVFQLRSQLRNVHPAALTAWAHLPGGILRGEARAVLALAPTSGHAARLTKRQIYNALATGGRTRLLDDHATRLRDLFRAPTLRQAVDIESALGQYVLTLLGLVNESVRAVNELTEQAIALFDQHPHASVYRSFPGVGGLTGARLLGEIGDDPTRFASAKGLRAYAGANPFTWASGTSRSVLHRRIAANKRLAAFGHHWAFSTLTRSPGCRAHYDRRRQQGERHTAALRNLYGRLLSCLYHCLQHGVDYQEEVAWPTPSTE

SEQ ID NO: 280319 - protein, 340 aa, unidentified
MGEVTTIGLDLAKHVFQVHGVDAEGATVLRKQLRRAQVLAFFSRLPPCLVGLEACATAHYWARELRALGHEVRLMPAQYVKAYIKRNKHDAADAEAICEAVSRPTMRFVPVKTADQQAAVLLHRGRERLVRQRTGLVNALRGHLAEFGVIAPQGLRNVGKLIAIVRDEGDARLPDLARQVLQVLAAQIEQLEAAVAALERQLLAWHKTNPMSQRLASIPGIGPIIATAIATTVTDPNVFRSGREFAAWLGLVPRQNSTGGKTRLGGITKRGNRYLRRLLINGASANLLRSKATKADPWVIGLRRRRPALVVAVALANKTARIAWAVMLRQKEYQPRAVAA

SEQ ID NO: 280320 - protein, 389 aa, unidentified
MIYVGIDVAKDKHDCCILGSEADKLFPVFTLPNNKAGFDELYEKMFSVTDDKTKIKVGLEATGHYSLNLLGSLIDKGLPTCVINPLHTNLYRKGLSLRKTKTDKVDARSIAMMLMTNKTLKPYSDISYHNEELKSLTRYRFDKVQERAKLKSSVARLVNILFPALEKLVPSLHMASVYSLLSKLPGASYITECHLTHLKNLLETASKGHYGQDMAITLRNTARDSIGSVIPAKSMELKHTIHLIKVMTEEIDEIEDSIKSIMDTCNSPIMTIPGISYRMGAMILAEIGDFTRFNYADQILAFAGLSPSTYQSGQLDSSYSHMEKRGSRYLRYALFNAAKFVCKWDENFGAYLSKKIGEGKHYNVAIGHATKKLVRTIYRMELTGEAYRR

SEQ ID NO: 280321 - protein, 341 aa, unidentified
MSIVFAGLDVHRSQITFDALDTETGEIATGRISATPEAVEKWTERFSGRDLHVALEACTGWYFVVRALERAGAVAHLAEVTETRALRGRKRRAKTDRADAHWLRTLLAEGRLPEAWIAPDHICWLRIRTRLRKTLSDESTSWRQRLQATLFHLGLPSLPERLKGEQARLWLAELELPAAAAERVEVCLAMMQAIEAQLAPIDAELRAYSRRQPGCRALCRHFGIAGATAPTILAELGDVSRLRRSRQAVRLAGIDIGVDRSDRRSRVGKLTKQGSPELRWALYEAAQSACRSTSPDHAQYLELKERGLSHTRASLTISRKLARRCYHTLRELGPAALQEAA

SEQ ID NO: 280322 - protein, 309 aa, unidentified
MDVVVGIDVSKDRLDAHVLSSGESFAVANDDEGLDGLAARLLSLKAEIVALEATGGYERLAVAALSAAGLAVIVINPAQVRSYANALGKRAKTDPIDAQVIAAFVAATKPEIRPLPDEKNQALGALLSRRRQIIAMIAAEESRMRMALAKEAQKSIRRLLGALRRELDSLDADLDDHIRKSPVWRVREALLTSVPGVGRVTARTLLAEMPELGSLDRRQVASLAGLAPWTRQSGKWKGKSFIGGGRATVRSVLFMATLVACRHNPALKAFRDRLVASGKSKIVATVAAMRKLLTILNAMIRDQKAWQND

SEQ ID NO: 280323 - protein, 423 aa, unidentified
MDILYERVAGLDVHKDTVVACVRMVADGKTTRECRTFATTTEQLVALRAWLEECRCTHVAMEATGVYWMPVFRLLDAGKFKLIVANAAHIKNVPGRKTDMNDAMWIADLLACGLIEASFVPNEEVQELRALTRTRKQLVREQTRHVQRIEKTLAEANIKLSSVISDIVGASGRRMIQAMIDGVRQPNKLAELAGRQIKATPKELYDALHGRLTDHHRFLLALHLKQWDSIDEMIRKLDVEIDQRIGRMTAEAEGNETPFRALIGLLTTIPGVSAVAAPAILSEIGPDMSRFRTAGHLVAWAGLCPGQNESAGKRKSSRLRKGAPWLKTMLVQCAWAAKRTKDSYYRAQFFRLQAKRGPQKAICAVAASILTAIYHILKHGTEHHDLGSDYFDRRPVELKASRLVARLKKLGFTVQLQPIAEAA

SEQ ID NO: 280324 - protein, 352 aa, unidentified
MDRYVGLDAHAQTCTLAVMGPTGKRLSSSVVETNGHALLEAIAQIPGRIHLCLEEGTQSAWLYEILEPQVAEITVTVPEKSKGSKDDLKDAWKRANEIRMGAIGTRVYKAPKHLTVLRSAATAYRMATQDVVRVKNRLKTVFRSRGILADSDVYVARSRTKWLKQLPGGHRELAEWLGRELDTLVPLREEAEERLLKEAKTHPITRTLATAPGLGPVRTAQLVAIVVTPHRFRTSRQFWSYCGLSVVTESSSDWVADRRGQWVRADVQQTRGLTRKRQPVLKAIFKGAATTVIKQLVDHPLHADYHRRLQAGIKPNLAKLTLARRIAAIVLSMWKHEEVFDPARLKVATDKP

SEQ ID NO: 280325 - protein, 374 aa, unidentified
MRNFSTFIGMDVHKETIAVAIAGEEGGPRYYGDIMNTPEALAKLIKKVAGKKEQTAFCYEAGPCGYGVYRQITGLGYRCDVVAPSLIPKKAGERVKTDRRDAVMLTRLYRAGELTSVWVPGLEQEAIRDLTRAREDIKGMERHARQRLNGFLLRHGKRYHGKSKWTPGYFRWLATVSFESSVQQIVFQEYVDMVKQLQKRVASIEEEMRKALTGWSLRVVVEALMALRGVNLVTAMTVVAEIGDMSRFESPRQLMAHLGLVPSEHSSGSRQKRGGITKTGNGHVRRVLTEASWSYRLPARKTAHLQRKAEKTTEAVQAIAWKAQKRLCKRYWYLIHKGKLTVQTCTAIARELVGFIWAIACEVMGKNIVCGVAA

SEQ ID NO: 280326 - protein, 414 aa, unidentified
MELLHERCAALDIGKKDLKACVRTPNPAGKRSRRQEIRTYATTTNSLLELRDWLVAEQVTLVVLEATGDYWRGAFYLLEDDLNVILVNAAHAKGLPGRKTDVCDAAWLCQLGECGLLRASFVPPEPIRQLRDLTRYRTTLTAERSREAQRLEKELEDAGIKLSSVATDILGVSGRAMLAALIDGERDVRVLAEMAKARMRSKIPQLVEALTGNFGEHHAFLCRLHLERIDQLSASILALSSRIEEQMRPFSRRLDQLATIPGVGQSVAEVIIAETGGDMSRFRTAAHLASWAGVCPGHHESAGKRKSGKTRHGNRWLIGALGTAAMAAARTKDTTYLGARYQRLAHRIGKKKAIVAVEHSILTAVWHMLTNDVDYTDLGGDYFARLDPERAMRRIVRQANTLGFTVRFDPIQAA

SEQ ID NO: 280327 - protein, 343 aa, unidentified
MKHYAGLDVSLKETSICILDEAGKICREIRVASHPEDLLRILQDPAWHLERIGLEAGLLSQWLFNGLAEAGLPVVCIETRHTKAFLKAQVNKSDRSDARGIAQMMRVNLFRPVHVKTLTSQKRRVLLTARKLLQEKAIAFENEIRGLLANFGLKVGAVSAVKFEERIHELVADMPDLAEIMVPLLDARRRLREHFATLHRKLLELARGDDVCRRLMSIPGVGPVVSLAFVATIDTPARFRTSKAVGPALGLAPVRNQSGDNERIGRISLCGDAMMRTLLFEAAQTMLRPTTRWSWLKAWAMKVAQRRGGGKAVVALARRLAVIMHRMWRDGTQFRWTREVPAA

SEQ ID NO: 280328 - protein, 379 aa, unidentified
MSETTHVSRQVTPPVLKTPPLTINPLEFDLFAGLDVDKRSIVVTYVDHANVLQSRKLPYDAHNLLTYTRKQFSDKRVAFVYEAGPTGYGLYDALTAAQVTCLVTPPSQVPVARGTRVKTNRVDSQRLAEGLRGAELHGVRVPTGAYRELRHLTRLRNQYIEEVRATKCRIKALLLHEGLIFPEAPPGSQWSQKIVRQLRAMEASPAVRFRLHSLLDTLQFIQRQALTTQEEVRRLCSEDAEIAASIGFLMSIPGIGWIIASNLMARIGDHRNLKNGRELGGFLGLTPCEDSTGDDVRRGSITHSGDATLRNMLIEGAWTAIRKDPDLAEFYRRICQRHPRDRAARIAIVAVARKLTTRMHTVLTQRRDYVPSQTKSQDK

SEQ ID NO: 280329 - protein, 409 aa, unidentified
MRIVGLDIHRVFAEAVMLDEGKVVRLGRVGMTRDHLVDFARNVLTHDDHVVVEATGNATAVAQVLAPHVGRVVIANPRQVRLIAEARIKTDVIDATVLARLYASGFLPAVWVPDARTEALRRQVTRRMQIVRQRARLKTMIQSILHAHLVPPCPHADLVGPKGRAWLLTQVLPEDEAEAVARHLREHDRLSEDLRVIEREIARDALADPDAKRLMTIPGIDMVVAVGLLAAIGPIVRFERPDKLVSYLGLNPTVHQSGEAKSRHGRISKQGRTHARSMLVEAAWQAVRGPGPLRAFYERVARHRGVHIAAVAVARKLAIIIWQLLRKGEDYAWVRPALHAKKLRDLELRSGQPARRGQRGPAYAYNLTHARHEERKRGEQAELAYRRQTEGWTRRGPKVPTGAAKEERP

SEQ ID NO: 280330 - protein, 358 aa, unidentified
MAKSIKGSGTVMAAIGLDLADVWSDWVGLDEQGEVVGRDRVKTTESELRKVFGAMKPTTIAIEVATHSAWVSRVLGSLGHTVIVANARKVALIHRNKRKTNRIDAEFLARLVRADKTLLFPIKHRDERSQADLAVLRARDLLVSARTKLINHVRGASKAFGKPLPKCSAPAFVSRCSDQVPTELLTALNPLLEQLAEMTGAIKAFDREISAMVKRHPEATKLMQISGVGELTALAYVLTVEDPNRIVRSRSAGAYFGLVPGSDDSGEKHEQRRITKEGDRFCRRLLVSAAQYILGQHSKVDSDLRRHGLAIASRGGKNAKKRAVVAVARKLAVVMHRLWITGEAYVPLFNASREQVAA

SEQ ID NO: 280331 - protein, 402 aa, unidentified
MAEGPTRFFGLDIHKEYFVAVGVNTQREVVFGPQRVSNYQLDDWVSRVLTTQDSVVLEMTTNTYLFYDTLLPQVHSVIAVHPPSVTLVTNAQVKTDKKAALTLAQLHAAGMLTGVWIPPHEVRDLRALIARREKMVRLSTMAKNRLHSILHRNHLTLPEKPFSPEQRTWWESLPLSATEQFLVRSDLDTLAFAQKQVEQAEECLKKESAQDERIPLLVQLPGVAMLTAITILAAIGDITRFPTAKKLVGYTGLGTRVHDSGMTHNTGRITKAGRKDLRRAMVNAANHAIEHHPHWKKEFERLEPHLGRSKAVVAIARKLLVAVWHVLSEKTADRFADPDNVARSFFAHAYRVGVRNLPEGQSALAFTREQLDRLGIGKGLQEIPWGSKRHKLPPSKLLLEKE

SEQ ID NO: 280332 - protein, 416 aa, unidentified
MKKHSNSGKKSEPTTNRAKSRGSVQRDTKVVLAELVGKLKEKLHPKKVAATSAGEKHQRGELRPNLDRLTVGVDLGDQWSNYCILGLEGETLAEGQLRTTQEDIAEFFQALNAARVVIEVGTHSAWVQEVIGGYGHEVLVANPRLMDGSKRRKRKNDRIDANKLARLGRVDPESLYPIQHRSREVRQDLVMLRARDALVAARTEIINTTRGLVKSMGTRLPKCSSRSFAKKGEEAVAVEMQEALLPLVRLAATLSADIKEYDKKIEELGREKYGHTALLRQVKGVGPITALAYVLTLANPQRFVKSRDVGPYLGLVPKQEDSGESQPQLGISKAGDTMVRKLLVGSAHYILGPFGPDTDLRRYGLGLCERGGKNAKKRAAVAVARKLAVLLHRLWVSGEVYEPLHNAMSAPIAAAA

SEQ ID NO: 280333 - protein, 428 aa, unidentified
MAKSKAQSVVQADDDALYYERCAGIDVHKKLLVVCLRIGRKTESREFGTTTGEIREIVAWLKANGCQMAAMESTGSYWKPLYNIFEQEQLPAMVCNAYHIKNVPGRKTDWNDAFWIAKCLAQGLLKPSFVPGREQRELRDMTRFRKSQIEERSRNINRLQKFLEGGNIKIGSWLSDIEGKSAGELLELVIGKPDFTLDDIKARMHGRMKSTPEEIFASLDGYLTDTQRVFFRHIVEIIRQQTEQIEKTDAMVKASLSEGQKAAVKALDVLPGIGVVSAEQIIAETGTDMGHFRNQHAFSNWTGTAPGNNESAGKRKSGKTTHGNKTLKSTLTQCAKSAAKNKNSFFSAQYSRLVSHRGKNRATMAVAHSMAIAIFFVLSGVEFKDLGADYYTQFNREKKIGSHIKQLSKLGVTIPDDVLRAAVEHPPD

SEQ ID NO: 280334 - protein, 348 aa, unidentified
MNQSTLIALDIAKQVFHIVMFGCHGQVTTRKKVKRGSLLKFIAQQPCSKIVMEACGTSHHWARQFQSLGHSVVLLPPQHVKAYVRGQKNDYNDALAIGEACLHNRIRPVPIKSVSQQDDQSFQRLRKHWIQARGNIVRQLRGLLAEYGIVFSRGIGSAKKHLRWILDDPSNGLSESMRALIARQYERLLEVEKECDWYDQQLKHKVKQDDVCQRLKCVPGYGDTNSFAAKHWMGDGLQFRRGREASSAMGVVPRQHTSGDKQKLMGITKKGDKEVRALIVHGARSVVSRAKNKNDKLSQWINAIVARRGFNKAVIAYANKMVRIAWVIIARGEHYQADVTPSGASVCH

SEQ ID NO: 280335 - protein, 422 aa, unidentified
MEILYAICCGLDVHKDTITACLRRLVAPGQVTQELRPFGTTTAELLMFRDWLVAAGCTHVAMESTGVYWKPVFNILEGSVEQILVVNAQHIKALPGRKTDMLDAEWIAQLLQHGLLRGSFVPPAPIRDLRECTRYRKQLIRARADEANRLQKLLEGANLKLGSVATDILGVSGRAMLAALVHGETDAAALADLAKGRLRQKQPQLVAALTGRITPVQRALLGHQLAHGEYLDGAIAALDALIGTLMAPYQAEAARLCTVTGIETRTAEALIAELGVDMAVFPSAGHCASWAGMCPGPKESAGKRRSGKTRKGSQWLRTALTEAAWAASHTRSSLGAQDPSVRSPAGQEEGRGGRGPQHPRDRLPHPEGRHHLSRPRPGLLRQAGHRPPPTAPDRPPGSAGSQGNGGTDRSGCLGSHSHDSFS

SEQ ID NO: 280336 - protein, 386 aa, unidentified
MKRNDLSRSLVAFEQNSTLVAVIELSLKSWLVAGLVPGLGRRPLKKQDPDANALLRLLHRWRDEAIKAGSKIERIAVAFEAGRDGFWLARWLRARGIEADVIHPTSIPVSREHRRAKTDRLDTSLLMRAFLGWLRGEPKHCSMAAIPMLAEEDARRPNREHQHLVKERGRIVCRLQAVMARHGVRNFNVKLRKALERLGELRTPEGAPLPPNTLAELRRDMARLRLIRDQIKEIERTRLERLQRAPQEGAHPMLLLLAKVMGIGVETADMLVHEVLSRNLRDERAVGRYGGLTGAPDESGSKRREKGLARAGNARVRRGMIQLAWRWLMFQKESALAQWYRARTADARGDLRKTMIVALARKLLIALWRYVTTGEVPAGAKLRPAI

SEQ ID NO: 280337 - protein, 326 aa, unidentified
MTESNSLPPPTVFVGIDVALDKLDLARSDSSQVMTVANNPEGIAQIVQLLKPLAPSTIVVEATGGLERDVLAALLDAGLPVALANPGRVRQFAKGLGRLAKTDAIDAHVLVEYARLAAPRLAEKRSENQQELDGLVTCRRQFTQVRTEQSNRRRQTRSKLALKAIDAVLKTIEKQIKNLDAQIAKLIESDEDFNACDAMLRSVPGVGPVLSATIMAELSELGSTGRRQISALAGVAPFNQDSGRRKGTRAIRGGRTAVRSVLYMGAIAAIRFNPIIKAFAKRLKQTGKKNKIVIVACMRKLLTLLNAMLRDNLSWNQLNLVKALDL

SEQ ID NO: 280338 - protein, 356 aa, unidentified
MAIYVGIDVHKRFCQAAMMDEAGRIQRELRFDNTLEGTSCLVNLARSIDPHVKAVVEPSANYWIKVYDRLEDEGVEVTLSNPLRTKAIAEAKVKMDKLDAKMLAYLLRGDLVAESYVPTRKNRERRTLIRHRAGLLKMRVEVKNRIHAILDKHDLPYDYSDLFGKEGLEWLRNLNLPSIDQQILRSNLQILQTLNSEIQNTDIQIAKDAVNEEQAKLLMTMPGVDYYAAMILLSEIGDIKRFASPEKLASWVGLAPQVHQSGETSWTGHITRRGSKRARWILTQCAQSARQHDPRMREFYERIEERHGSSKAVVAVARKMLSIMHVMLTRNEPYQGENRQLTEQKHKRLERIANST

SEQ ID NO: 280339 - protein, 356 aa, unidentified
MDNRKYIGMDVHQASTSIAVSDAAGKVLMECIIETKAATVLEFIQGLRGSLWVTFEEGTSAAWLYDLLKPHVTKVVVCDPRRNALLKAGNKNDRVDARKLSDLLRAGLLTPVYHGESGVRTLRELSRSYLAASKDLTRVMNRLKALYRSWAIPCAGQQVYSPRHRAAWLEKLREAGVRRRAEQTYQQLDFLMGIRKETRKELLAESRKHPARKLLEQIPRLGPIRVALLIALIQTPHRFRTKRQLWNYCGLGLRTRSSGEYRYTGGQLQQARKPPALRGLNVNHNHDLKNLFKSAATQAGACKDDPLGEFYQNLLATGMQPQMARLTLARKIAAIALKIWKKGERFDPAKLKQQAA

SEQ ID NO: 280340 - protein, 334 aa, unidentified
MKQEVIKQNVGVDVAKDDMKVAFSVMTAEHRVSVRATRTFPNTTTGFKRLQEWVMSKKQPEMSLHFTMEATGVYYEGLAYFLYAQSYSLHIVLPNYFKKYAQSLGIKSKTDKIDAGALAQMGLERELRLWQPVSPHLLELKQLTRERDALVRNRTTAANHLHAYRHQGKPNKDSIGRSAKHISFLDKHIKQIEKEIKNFIQQDKELKIKIEYLLSIPGVALITAATIVAETNGFATFESIKQLTSYAGLDVRIAESGKWKGKSKISKRGNSHIRKALFMPSLSKIRCNQPTKQFHQRLKEKKGIGMIATIAVERKLLGLMFSLWKKEEMYCPAK

SEQ ID NO: 280341 - protein, 386 aa, unidentified
MPDCDHHHSVTADGGAVFIAAELSKSSWLLAAQGMPSGKASSHRLEAGDVGGLLALIARLRLREERIAGAPVPVVLGYEAGYDGFWLQRRLAEEGVACFVMDAASLQVDRRARRAKTDGLDAAMLLRALAAWCRGERAACRMVRVPTVEREDARRTHRERQRLIAERVQHVNRVKGLLSGQGIYDYQPLRRDRWARLDGVRTGDGRPLPPCLRLEIGRELRRLELVLGQVEAVEAERDAAVARPAAGDVDAAKVAQLARLGGIGTELATVLVREALFRPFANRREVASYAGLTPSPYASGGLRREQGISKAGNPLLRKSMVELAWLWLRYQPGSALSRWFAERTGTAAGRIRKIAAVALARKLLVALWRYVGTGLVPEAARLKGAA

SEQ ID NO: 280342 - protein, 340 aa, unidentified
MVDVSIIGLDLAKTVFQVHGSDADGLPLFNKRLSRSSVLQFFSEKPPCLVAMEACASAHYWGREIGKLGHEVKLIPPIYVKPFVKRQKNDAADAEAISEAASRPTMRFVAVKGEDQQAACMVFKTRDLFVRQKTQLANALRGHLAEFGVIAPKGIVHLKRLAVVIEEDTGLLPASVLEYAGMILAQISALQEKIDRLEKRVQEHARGNDITARLMTIPGIGPITASALCAFAPPAETFSKGRDFSAWLGLTPKQHSSGGKERLGRTSKMGQRDLRRLLITGAMAVVRWAVRRGPEEGSWLARMLERKPRMLVAVALANRMARIAWALMANGGSYKEPVAV

SEQ ID NO: 280343 - protein, 350 aa, unidentified
MLIIGCDFHTRYQQIAMMEEATGELVERRLEHESGEAHTFYRSLPAPVRVGIEATGPMHWFERLLSELGHELWIGDSAKIRAAAVRLQKTDQRDALHLLDLLLANRFPRIWVPTPAERDLRQLLWHRHKLVRMRTMLGNQLHFLAMSQGLCRKKKLFTRKGRTELGELSLGPWASRRRTELLRLLDQLDPSIAELDKAVLEEAKRRQDATRLMTHPGIGPVNALAFVLTIGPVTRFRRSKQIASYLGLNPSEHSSGGKQRLGAISKQGNTMVRWLLIEAAQHTSRFDSELRQDYQRLKFRRGGAVAKVAIARKLAVRMYWMLRSGADYARLVRMQGSPGATLVNESSSLG

SEQ ID NO: 280344 - protein, 465 aa, unidentified
MKSKTSKNKKQSKKISIDAGWDPINHHAAGVDIGSREHWAAAPPQVGKPSVRKFGAFTDDLEAMAEWFKECGVTSVAMESTGIYWIPLFQILERKGFQVILVNARQIKNVSGRKSDVQDCQWIQRLHTYGLLQGSFRPEDPYCVLRTYLRYRDELVAARTTQCQHMQKALLQMNIQLSHVLSDVTGVSGLAIIAAILEGKRDPVKLAALVDRRVRASQPIIVKALVGDYRAEHLFVLRQACELYHTYEAKINACDEQIGREMASLQIKVDPVLKPLPARKAGRQPSLDKMAGVDMRPELYKRFGVDLTAIEGIGVLTGLIILTEVGPDLSRFRSEKHFCSWLGLCPDNRISGGKVLSSRTRRVVNRISDALRMAASTLDRSQSALGGFARRMKARLGSAEGITATAHKLARIIYRLIKHGEAYVRQGLEDYEKKFAARKLNALQKTAQAFGFELVQKQVLTQSVS

SEQ ID NO: 280345 - protein, 472 aa, unidentified
MTHSKNSKKQATKKRKARRRKKGFCFQDRPIVEPNAAGVDVGAREMYVAIPPDRDAEPVRVFQTFTADLEALADWLIDRGITTVAMESTGVYWIPLYQILEDRGFRPCLVDARHMRNVPGRRTDWHECQWLQYLHTSGLLRAAFRPQQDVCAVRTLVRHRHEMVQMACQHIQHMQKALTQMNFQVQHVIDDITGVTGTAILDAILAGERDPGKLAKLRHGRIKADEDTLRKSLEGDWRAEHLFTLRQSREMYDAYRKQIEACDQELIQYLGDFEAKVDVVEKPLPKPSGPSRKRRTKRTGDYRFDARQQAYRLYGVDVTRIPGIDGMALSLFSELGSNLTIKFPNSGEFSSWLGLCPDNDKTGGKVVWRGVRKIKNRAGQMFRQAASALHRSRSPLGDLLRRMKAKLGPEAGIIATAHKIAIIFYTLVTKQVEYDDSAWAERDRQRQQRFEQKLKRQARYLGYQLVPIQASA

SEQ ID NO: 280346 - protein, 413 aa, unidentified
MVKREKIELVKRQRIFVGIDIAGSKHRARFIDNMGEEQIKPLSFFNDREGLEKLERRVNEIPGIGDDIIFGLEPTGDYWKPVAQYLREKGYPVVLINPYHLKRTKEIIDNSQDKTDDKDSYLIADLTKQSKYFFPVIPEGVYAELREVSINWKRTSQQLARLKCHLSNFLAKYFPEYKGIFSDILGKTSLYILKHFPLPEDIERLGINKLYRVMKKVSKGSIKEGKIQLLYEKARTSIGLKGGSQTAKVLLKEVLSDIEILKKRKEKLTKMMDELLYQSGYLKNLLSIPGVGIVTGSLFLGEIGDPDNYERASQIEKMAGLNLVENSSGSMKGEKKISKRGRSTLRYVGHLVATVAIGKSPEIKALYRYKVEECKKEKMKALTGLSAKMLRIMFAVCKNKTFYKHEEITRYFR

SEQ ID NO: 280347 - protein, 440 aa, unidentified
MMQPSWFVGVDLGSQEHAVAIVGADGRRLRELAIPANPLGILQLLGVLGGAPGGVAVAVESPHNQLVEVLLDRQVPVWAINPKQLDRLRDRHTVAGSKNDRLDAYVLADSLRTDRPLFQPLAVDLPEVRALRELSRTLEELDKKRRQAANQLWQLLLGYFPGLLKLCSGADEPWLWELLRLAPTPRRAGALSPATLAPLLRRHRITRVTAADLQRCLAEAVTGLPAAAETVCGQHARRLVEQLVLFQAQLKEVTQQIEKTVPKPKPGEPADPSPPPAPAAAADSSPPPADEPAPDAEFRTICRLVASMKGIGPKTGATLIGEAYPALREGNYAALRGRCGVAPVTRQSGKKQVVLMRRACARRLRNAMHYAANVAVQQVPAWGSLYARIRSRGGSHSRALRQVADKMLKVLTAMIRTGTMFDLEKMKCRSTDFAGTASAK

SEQ ID NO: 280348 - protein, 407 aa, unidentified
MDVVIERACGMDVHKDNITACILTPEGKEIQTFSTKTVFLLQLVDWIKQHNYTHVAMESTSVYWKPIVNLLEAEDIEFLVVNAQHMKAVPGRKTDVKDAEWIAKLLRHGLLKASYIPDRNQRELRELVRYRRSIIEERARQHNRIQKVLEGANIKLGSVVSDVLGVSARDMLDAIADGEEDPEKLANFARRSMKKKKEELELALKGYINSHQRLMLKTILGHIDFLTEQIEMLDKEVADRVSSHQEDISRLDSIPGIATRMAEQILSEIGTDVKNQFPTAAHMCSWAGLVPGQNESAGKRKSAKTKKGNKYLRSALTEAAHSVRGSKNYLGALYRRTASRKGKKRAGIVVAHAMLRISYYLLTRKEMYVDLGEDYFDKQRQESIVRHSLRRLESLGYTVTLEEPKAS

SEQ ID NO: 280349 - protein, 362 aa, unidentified
MCQIEVVQISSEGGPSVEKIIRIGLDTSKHVYQLHGVDSEEEPVLRKKLRRKEMVAFCQKLAPTVIAIEACGGSHHLARSLATFGHEVKLIPPHYVKPYVKRGKNDAANAEALCEAMSRPSMRFVPVKTAEQQAALMLVGLRERLIRNRTQLANSIRGYAAEFGVIAARGLCRIGPLLERIAADVSLPALARELFAIQGKEYALIEAELKVIDAKLMAWHRDNACSRRLSQIPGVGLIGASMLVMKTPDPRLFRSGRQFAAWLGLTPKDHSTAGKVRLGVITRAGDEALRSTLIVGATALLRRVREGSNRKSSAWLLDLLRRKPPKLVAVAMANKIARIAWKLMVSGETYRANAASFVAAAA

SEQ ID NO: 280350 - protein, 385 aa, unidentified
MQKLNDLSRSLAPLEPDGTLIAVIEMSQSSWLVAGIVPGVERQPLKKLAADEIALLKLLHRWREEAEKAGHRIERTAVAFEAGRDGFWLARWLRTRSIEAHVIHASSVAVSREHRRAKTDRLDTELLKRAFLGWLRGERDHCKMVAIPTSKDEDAKRPNRERESLVGEQTRIVNRMKAALIRLGIRGFNPKLKKAAGRLEDLRTPEGEPIPPNTLAELRRDMERRRLLSDHIRQIEEARLERMEQAPGDGPHAMVRLLARVIGIGIETSDMLVHEVLSRRLRDRRAVARYAGLTGAPDESGSKRREKGLAKAGNARVRRGMIQLAWRFLLFQKDSALAQWYRTRTEGAGKKRKTMIVALARKLLIALWRLVTTGEVPAGVVLRAA

SEQ ID NO: 280351 - protein, 407 aa, unidentified
MEPIHERVAGMDVHRMEHVVTVLVEQEDGTLLKDTRKFGGFKRDMRALIDWLRSHRIQQVVMESTGIYWKSVFSHLEAAGIPALVVNAFHVKSVPGRKTDVTDSEWLAQLARFGLLRGSFIPPKDLRELRVVSRYRRKLGQSLAGEKNRLHKLLDDAGIKLGGVVSDINGVCARKMVEGLLAGGTPAELAALGRGKLKRPSEVLEAAMDGDLSPRHRLVLSTVLNHLHYLEREVARLDRYLIEAMKPYAWAWRLLQTIPGIDEISAALILIEIGDDMRRFASPSRLAKPCRSSSVSRSRIRAPSRRRRSFGTENLLQTNRIRMRLAAREMPSSCRPRSRFPQEITARGWRLRFGWTRGTHCADLHHARKVRRLAIRQCHLLSLSLGRAPFALTSRAIMEDPWPPGSR

SEQ ID NO: 280352 - protein, 362 aa, unidentified
MTAMSIVSHCHPYVVGVDTHARNHVYAILDATNGALLDKQSFPTTGSGINRAIRWVARRTNADASTLWVIEGAASYGAILAGTVATHGFSVAEAPRMDSKKNRGVGKSDALDAHRLAMSALPLPVEKLRRPRLNEGIRQGLRILVTSRESMSKDRTRSINALNALVRTNDLSIDARRKLTPSQVVEISRWREREEELALVIAWSEAVRLAKHVMGLDEQLKSNEQKLDELVKVSEASLLLEEKGFGAVTAAKCLVAWSHEGRVRSEAAFACLAGVNPIPASSGNTVRHRLNRGGDRRLNSALHLAAITRMTYDSETCLYVEKRRAEGKTDKEIWRCVKRYLTRRIFRILTSASQTKNVQEAA

SEQ ID NO: 280353 - protein, 320 aa, unidentified
MSKKKSRPFIGIDVSKQWLDVAGHECDFKFHCPNKTSSFGELIAELSVLRPALIVLEATGGLEIPLVNALHGAGLPVVVVNPRQVRDFAKALGQLAKTDPLDARVLAHFAAAIKPPLRPIKSKEEKELDDLTARRGQLVGMLTDEKNRRSSATSDSMRDQIKEHIDWLEDCIAEIDQQLKALLKTSACWQAIDKILQSVPGIGPVTSFSTIADLPELGKLDRQKISKLVGVAPLNDDSGQHRGSRHIYGGRAQLRRVLYMATMTAARHNPVIKEFYQRLIAKQKPHKVAITACMRKLLTIINVMVRDNTCWKSSDAKVSA

SEQ ID NO: 280354 - protein, 300 aa, unidentified
MNLTPVGIDIAKTVFQVHYVDHDTGEVVNKPIRRAAFLEHFANWSACLIGMEACGGAHHWARKLVQMGHQVKLMPGEFVKAFNIRNKNDAADARAIWLAVQQPGKAVAVKTEMQQAMLALHRAREQLVKFRTMQINGLRGLLAEYGEVSAKGRTSLDKAIPEILARVAERLPAVLIDTLREQWAGLTKLDEQIAAIERRMREWKKDDHAVKAISEIPGVGLLTATAAVAMMGDAKVFRSGREFAAWAGLVPRQTGSGGKVNLHGISKRGDTYLRTLLIHGARSVLTHANDPGPWVEQLQK

SEQ ID NO: 280355 - protein, 332 aa, unidentified
MSAVFCGLDVHKESTYATVLDSTGQVVTQRRMKNEEISEFLEPLKVDRVAMEASTYIIPMYRRLIEEGYDVTVSHPKKTRYIAEARIKSDRVDSKALAELLRLDSLPESYIPPPEVAELRERVRRRAFLVRQRAKLKVKIRDVLAYEGVKPPTSHGLFTRKGVEWLKGLGLEPVDCYLRLMAPLSKEILLLSKELRGMARDDADVRLLMTVPGVGYYIALLVKAEIGDISRFSSGDHLASYAGLVPSTRSSGGVERHGRITREGSRWLRWAMVEAAMVHLRYDTPVTRFYHRVAERRGRKPALVAAARKLVTVCYSVLVNRRPYYNPLHAQA

SEQ ID NO: 280356 - protein, 363 aa, unidentified
MRIMTGIDLHSNSAVCGLMEENGRRLVHQKLPCDLPSILRLLDPYKERIATVAIESTYNWYWLADGLQDHGYSVVLANPARMKPYDGLKHTDDVSDAFFLTELLRLGILPTGHLYDRKTRPVRDLLRRRLLLVRQRTSLILSFKSLNERTLGQRLSLARVKTLSAAQAQARFTEPADQLWSGQQIELMGHLQRSIAKIERHVLGVAGKWTPYQRLQSLPGIGKILGLTVALETGDARRFADAGHLASYGRCVNSLRQSNGKKKGENNRKCGNRYLAWALVEAAHFACRYDERCRRFYDRKKQQTNPVIATKALACKLAKAARHVMREDVPYDADRVFGPRRKQDFGETRREPAKGSGRTSPQN

SEQ ID NO: 280357 - protein, 349 aa, unidentified
MIWIGVDAHKRVHQAVAIAEVGIQGERTISNTPAEWAALLEWARQWPERIWAVEGAWYLGRGLAQYLAEQGERVHEVSGRLTAARRGRAVRRGKSDRLDAHAVAQLLREEAERLPRVLALDDETAQVQLWSRTQAELTKDMTRLVNRLHDLLLLCDPQYARGLPDLTTTAAIGALLGYHAPGEGGLARERERIVRGTAAQLGLLHDQDRELRSKLERASTARFSPLRQIEGVGPIIACAIVAELGRPRPHFAEEQLAALAAVAPLEASSAGAVRHRLNRGGNRRLNMLFHVISLTQGRIYPPARSYLERRRTEGLTAREARRALKRHLVRRVFRAWLSSFDQHIEAVAA

SEQ ID NO: 280358 - protein, 462 aa, unidentified
MKKQEAEGSTSKRRQLQGLPLIRTDVAGIDIGSERHWVCAPTIDGQGREIASFGATTAELIRLAEWLQARHVKSVAMESTGVYWIAPHEVLEAKGLEMRLVDTRQLARVPGRDKKTDPTDCEWIQRLHSCGLLRGCFRPPEAICKLRTLVRDKGVLVAESGDWLRRMQKSLDQMNVRVHRAVSDINGTTGRAIIRAIASGERDVQKLAELRDPRCHKSVEEIAEQLRGHWREDHVFSLCQALKMYDAIAERITAYEKEIQGKLEAMEQPGQSGQTAPPLSSGNKAKKIKSRGQEDKRQALFRMSGVDVTQIDAVGVETVEVVISEYGCDLSRFPSEDEFASHATLAPHVPKSGGHPIKKKKRRNSASTRVAGALRMAAQSLRQSNTALGAYFRRLAQRKGADIATFATARKISKLIYRLLRWGQPYIDEGASAYEKRHKEQTFKNMASKAKRMGYRLVPADV

SEQ ID NO: 280359 - protein, 340 aa, unidentified
MGDITTIGLDLAKSVFQVHAVDAMGSVVMRKRLRRSQVLAFFAEIPPCLIGLEACATAHYWARELIALGHEARLMPPNYVKAYVKRNKHDVADAEAICEAVRRPSMRFVPIKTAEQQSPLMMHRARDLLVRQRTMLVNALRGHLAEFGLIEAQGLHKVAKLIAIVTDENDGRVPYIARQVLQVMINHIEDIQVRIVGLEKQLLAWHKSNPVSQRLATIPGIGPIIATAIAATVADPNTFRSGREFAAWLGLVPRQNSTGGKARLGGISKRGDSYLRRLLVNSAHTVLLCSKQAKTDPWLTSLLTRKPRLVAAVALANKTARLVWALMSRQDTYRHAAATA

SEQ ID NO: 280360 - protein, 427 aa, unidentified
MHMAAVSPETAKNPIRSFGTFTSDLHTLAEWFRACNITSVAMESTGVYWIPVYEILEQHGFEVILVNARYAKNVPGRKTDVSDAAWLQQLHSYGLLRGSFRPQADIAALRAYLRQRERLVEYAAAHIQHMQKALMEMNLQLHHVVSDITGVTGIQIIRAIVGGERDPDTLAANRDIRCRSSAEVISAALMGNYRDERVFALTQALELYDIYQERIVACDRRMEGLLLRLSHKSAKPAADLPKPRIRTKQVSAPSFDVRSILYRLLGVDLTQIHGIGVSLPFKLVAECGTDLRAWPSAKHFTSWLCLAPGNKISGGRLLSSRTRRSSSRAAALLRLAATTLGRSDTALGAFYRRLSARVGKAKAVTATARKIAVLFYNTLRHGMAYADPGAGYYDEIHRKRVVSNLHRRAQSLGFILQPISEDPQPDS

SEQ ID NO: 280361 - protein, 345 aa, unidentified
MLDTETGEVVNLTVMHEGDKVREFYTQLPRPVLVGIEATGSMHWFLNLMEELGIKCRVGHPATIRAAAPRKQKNDRLDADLILRLLVENRFPAIWLPTKELLDLRALVLHRHQWVRIRTRIQNALQAIALANGLRRGPSLWSYDGQAKIAFLPLQPHASYRRSMLQEMYRKMEEEIDNLTQRVAEQAGQRCGARLLMTHPGVGPVTALATEVFLGDPRRFVDGKALASYVGLIPREYSSGARQRFGGVTKQGSPLLRFLWCEAGAHAVRRDPELKRFYRRKLVQKGLGKARVAVARKLGIRLWIMLRDEIDYQEFCRRGQKQHSGAACAGMPEVAYGANSHRPVD

SEQ ID NO: 280362 - protein, 344 aa, unidentified
MKIVGCDFHPSFQQIAILDTVSGEIEERRLVHKDGAAEQFYGALEAPALIGMEAVGNSLWFEQLVTRLGHELWIGDAAQIRASYVRRQKTDRRDAGHILRLLVEKRFPRIWVPSEAERDRRQLLLHRHKLVQIRTRIKTELQHLAMNQGMQKKRRLWGVRGRADFKNLSLGGWTAQRREDLLSLLSLVQGQVDKLDEAVKEMAAGDAQAQLLMTQPGVGPVTSLAFVLIIGDVKRFKRSKQVASYLGLIPSEHSSGSKRRLGAISKQGNVFLRTLLVEAAQSACRYDEQFRREYGHRCHHKPTGVAKVAAARKLAVRLYWMLRTQTPYRPAVHNGGSPSHPVVG

SEQ ID NO: 280363 - protein, 350 aa, unidentified
MVTIGVDPHKRMLSAVAVDEVGRELSRRTERAVGDGFGALLVWAGTLGQERVWVIEDCRHVSGPLERFLLDHGQTVARLAPRLMSEARKRVRERGKSDPIDALAVARAALREGLDTLPVARLSGPELEIRLLSVHRQRLVDARTRLINELRWQLHDLWPDWQIPKRALVRPGWQLKAARRLQSAEPTVRVRIAHDEITRIRDLTRTINELHQQLAELVAEVAPQLLAERGLGVLIAAKLIGEIAGIDRFASDSKLARLAACAPIPVQSGRTDRHRLDPGGNRQLNHAIHMLAITKIIHDPQTAIYIAKQRNRGKTNREAIRCLKRHLVRRVYHLLHNPNSIPIAIHDTHT

SEQ ID NO: 280364 - protein, 347 aa, unidentified
MKHYAGIDVSLNSSSVCVVDESGKIVREVKVASEPVALINWFKSLCTRMERIGLEAGPLSQWLYGALRESGLPVELLETRHVKAALSAMPVKTDRNDARGLAQLMRLGWFRPVHCKSIAAQEVRALLTARKLVQSKLYDIEMSLRGILRGFGLKVGPTTSQSFAARINHLVAGQASLETVAQALLSVHAAALREFKILEKQVRQIGRADERVRLLMSAPGVGPLVALTYVSAIDDPKRFTSSKAVGAHFGLTPKKYQSGETDITGRISKIGDSMVRAVLYEAAHIILTRPIHGGALKSWAMRLAKRAGMKKAKVALARKLAVVLHRMWVSASTFDFEKANGCMRAAA

SEQ ID NO: 280365 - protein, 408 aa, unidentified
MYNAVGIEASKLKSTITIIQPAGVVIRKPFDVLHTSDELNTLVTYLKSLVGETRAVIECTGRYHEPVVKSLSEAGIFISAVNPKLIKGQKQNTLLKVKSDPADARKIAKYALDNWAELREYSSMDTTREQLKTLNSQFTFFMKQKVAAKPNLISLLDNTYPGVNKLFDSTTRDDGSEKWVDYAYSFWHVDCVRKIGLKAFTERYEAFCKKHHYNYQKNKPALLFEESKQLVAVFPKEKSYKLLIQQSIQQLRLASEHIEIIRKEMNGLASTLPEYETVMSMYGVGETYGPQLIAEIGDVSRFTHREAITAFAGVDPGVNESGQFMQRSNRASKNGSTRLRKTLFQVMSTYLKNKPVNEPVYQFLDRKRAEGKPYLVYMTAGANKFLRIYYGKVKECLRNLEQSQIEEF

SEQ ID NO: 280366 - protein, 358 aa, unidentified
MRSITPQDAAIIEVAGGVDTHSDTHTAAVIDQVGRVLGTEQFPADTAGYAALLDWMRSFGQLVGVGVEGTGAYGAGLARLLHRQEVLVIEVDRPDRKTRRFQGKSDPIDAVQAAKTALAGERTGVPEQRDGRIEALRNLRVARRSAVDQRADAQRRIKTLIVTAPDDLRERLRSLGVKDLIITCANLRPDRTGAASPATAVKIALRSLARRHQQLTAEIADLDELLEPLVAAINPGLVAANGVGTDVAGQLLVTIGDNHDRLRSEAAFAMLCGAAPIPASSGKTSRHRLNRGGDRQANKALYRVVICRLRWDPRTRAYMERRTKDGLSKKEIIRCLKRYVARELYQLITTPNDLELAA

SEQ ID NO: 280367 - protein, 356 aa, unidentified
MKDLSSGTAKRICGLDLGDKKSQVCLCNLQGEVLEQVRVNTTEQGLARVFQNCAPIKIALETGTHSPWVSRLLRKWGHEVVVANPRKVRLIGNSRRKNDRIDALTLADLVSFRPRLLHPIQHVSAQAQADRGVLRARDALVKARSGLINHARGLVKALAGRLPSCSAEAFARKAVLAIPPELASALMPLIEQIDQINKTIQLYDRQIAELMRTRYPETQKLRQINGVGPITALAYVLCLEDPHRFRKSRSVGAYLGLVPAQQDSGEANPQLGISKEGNPFVRRLLVQCAQYTLGPFGKDSDLRRFGLRIAANRGKNAKKRALVAVARKLSVVMHRLLVNDEPYQALRGEAQLQPAA

SEQ ID NO: 280368 - protein, 476 aa, unidentified
MGRQSTFDRSERRREDRRGKKNAKPAVLTPRDLEIVHPDAAGIDIGSRTNYVAVPPARDTEHVRAFGTTTPQLHALADWLQQCAIRHVAMEATGVYWIPLYEILEERGFVVCLANPHEAKSKPGRKSDVLDCQWLLQLHTFGLLNASFRPKDVIVELRSYMRLRTTHVRQQSDEIRRMQKALHLMNLQLHNVLSDVTGTTGMQIIRAIVAGERDPKKLAANRDYRCHASSEEIEAALTGNYRPDHLLSLTHSLKLWDHLQTLIQECDQAAQDLLARTIQSRGDCAPEIEVATKKRGGKPTTKAPFASQLTTLTSVNIAAIPGFDNLSACKLISEIGMDMSPWPDAHHFVAWLRLAPGSSITGGRVLRSRKGQPSRSRAAEILRQAAVNTRSTQTWIGGFYRRMKARKDSGVAVAATAAKLARILYRLLKTGEQYIERGIDAFEAAGRDRSLKYLQKKAKRLGFALVELPKAAPAAA

SEQ ID NO: 280369 - protein, 447 aa, unidentified
MTDLKTHGHAFAAYIGLDWADKKHNLTMQTADGRRSRGELKHTPEAIDAWAAELAQRFGGRPVAIALEQARGALVAMLSKYAHLHLFIVDPSRLDHYRKSVSPSGAKSDPVDGDLILDFLLKHPELIRCLAPDTVETRSLQFLAEQRRQLVNQHTSQVQVMQSWLKQVFPQILEWFGDVSTPLVGDLLQRWPQLAKLQRARPETLLQFFHDHNCRSAELNQQRLEGIRTAVAATHDAALLKTAHLMIQTCIQMLESLRTAIEKFDGEIAAVYATHPDRFLIESLPGAGSALEPRLLAALGTDRGRFRSAGDMACCFGIAPVTASSGNSRWVHWRWACSKFVRQTFHEWAACTVRKDGWARDHYERQRAKGKGHHAAVRSVAYKWIRILYRCWRDRVPYSEQRYLEALRTHGAAKSKPTTNAAVPSSTPLTVQWKNCGSFSKPSKLSS

SEQ ID NO: 280370 - protein, 347 aa, unidentified
MNYYAGIDVSLECSSVCVVDGNGKIIREGKVASEAEALIAWLCSLKLPLERIGLEAGPLSQWLYAALREGGLAVELLETRHVKAALSAMPVKTDRNDARGIAQLMRLGWFRPVHCKSAEAQEVRALLTARKLVQSKFYDVEMSLRGILRGFGLKVGRTTPKRFAGRIRELVAGHASLAAIAEALLSVHEVLLRQLNGFEKRVREIARCDARVRLLMSTPGVGAIVGLTYVSAIDDPARFKSSKSVGAHFGLTPTKYQSGETDVTGRISKIGDASVRTALYEAAHIILTRSLRGSGLKSWAMKLAKRAGMKKAKVALARKLAVVLHRMLADASKFVANKASGCIRAAA

SEQ ID NO: 280371 - protein, 395 aa, unidentified
MERFMQKLNDLSRSLTPLESDGTLIAVIEMSLSSWLVAGIVPGVERQPLKKLEGDESALLKLLNRWREEAKKAGHRIERIAVAFEAGRDGFWLARWLRARGIEAHVIHASSVAVSREHRRAKTDRLDTELLKRAFLGWLRGERDHCKMVAIPTIKDEDAKRPNRERESLVGEQSRIVNRMKAALIRLGIRGFNPKLKKAAGRLEDLRTPEDEPIPPNTLAELRRDMERRRLVSDQIRQIEEARRERLKQAPYDGPHAMVRLLARVIGIGIETADTLVQEVLSRNMRDRRAVARYAGLTGSPDESGRKRREKGLARSGNARVRRGMIQLAWRFLMFQKDSALAQWFRARTENARGTRKTMIVALARKLLIALWRLVREGIVPEGIVLASGTMNGGR

SEQ ID NO: 280372 - protein, 344 aa, unidentified
MTYYAALDSSLESTAICVLDERGRIVKEAVCATSPAAIFAVLEGFLPSLTRVGLEAGAQSAWLYGGLRDRGLPVVVIDAVHASAMLKGGFRNKTDRNDARGLADMIRVAKYRPVWVKSPAGRQGRALLAAREQLVKTRTALANCLRGLLRGAGLELAADGGDFAARVRAAAGGERALRATVEPLLATLATVERQVTRYDLWIKQLAERDEVCRLLMTCPGVGPQTAFGFRVTIDDPHRFRRARDVGAYLGLTPRRHQSGALDYSGRISRMGDAAMRRLLYMAALGCQNEGPRDSLRAWALNLAKRRGAKRARVALARRLAVILHRMWCERVPYHATVRGTAKAA

SEQ ID NO: 280373 - protein, 374 aa, unidentified
MREKLRFLDVHAETIAVAIAETNGETRSLGTIANREDSIRKFIKKLGSSEQLRACYEAGPTGFVLYWQLTQLGVDCAVVAPSLVPKKPGDRVKTDRRDALKLAHCHRNGDLTAVCVPDDASEALRDLVRQREAAKQDQLRARHRLTKFLLRTGQGPPLGLKPWTERYMRWLAQVRYAQPAQEVTRLDCMNEFEHMSARVKRLEEAILEVVKQAPQAMQELIRGLQALRGVAHISAVTIAAELGNISSRFETARKLMGYSGAFPSEDSSGNRIRKGGITKAGNAHLRRIVMESAWCYRHLPRVGEKLRKRHQGVPAEIIEISWKAQNRLYKRYRKLTMAGKDQRKVITAVGRELLGFIWAIAIKAEGISTQPIAA

SEQ ID NO: 280374 - protein, 337 aa, unidentified
MTIIRIGLDTSKHVFQVHGVDEAEQPVLRRQVRRSEMGKFFGKLAPTRIGIEACGASHHWARMLRGLGHAVVLMPPQYIKPYVKRGKNDAIDAAAICEAMSRPGMRFVPIKSAEQQAGLMVLKVRDLLVKQRTMLINAIRGHAAEFGVTAAKGPVKVAELLQRADAEAAGVPALAREMLGVLSRQLDALDAQLKALEIRLMALHKADPISQCLVTQPGIGPIGAVSFSLKVSDPKAFRSGRHFAAALGITPREHSTAGRHRPGRISRQGDESLRRLLVLGAMAQIRFAKPGRTSPWLLNLLARKPKKLAAIALANKMARTVWAMMVSGETYRQPKAA

SEQ ID NO: 280375 - protein, 362 aa, unidentified
MFRPHTLYIRIRIDRKVHEPVFAMRDQDVSDVIKTKNRTAMQYIGIDVSKATFVVAYSSDKGGEIRTFNNTTAGIKQFIGTLPKDGSIHCVMEATGNYSALLLYMLNVAGITVSMENPLKVKNFARAMLSTVKTDKIDARLIALYGEKMNPQPFKVQGEAILRLRQKRTVIRQLTKQITAMSNLRGSLACLPVPDKGATHTVDETIKFLEKRRDRLQSELTDLVEVEFSRQLALLTTIKGIGITLATALILTTGGFTYFQNAKQVSRYLGICPTYEQSGTSVNIRGHINRNGDAYTRGLLYIAAWPASRFNAQCKETYTRLRQNGKPGKLAMIAVANKLVRQAFAVVAHDKEYIDGFVSNRP

SEQ ID NO: 280376 - protein, 399 aa, unidentified
MDNITYVGLDVHKATVCVAIAEGGRGGEVRQVGVFENRPDILCKLAARLDKGNRRLSFCYEAGPCGYGLQRLLTSRGHDCIVVAPSLIPVKSGDRVKTDRRDAMMLAKLHRAGELTAVWVPDAAHEAMRDLVRARATAGRVLAKARQHLQGFLLRHERIYRGPRAWTLAYRRWLTTVRLDHPAQQIVLQDYIHAVEDAEARRDRLTRQIEELLPSWSMAPVVEALQAMRGVGLVVAVTVAAEVGDFRRFANARQLMAYLGLVPSEHSSGAAIRRGGITKAGNALARRVLIEGAWTYRMKARVSRKLHDRLEPPSTEIRDIAWKAQVRLCARYRRLAALGKPSVVATTAIAREMVGFIWAIARRVQSAVEDQRTHSAHAEAPMLTAAAKPCGFAAALGRR

SEQ ID NO: 280377 - protein, 364 aa, unidentified
MQQARLSRLIGRVEQANPEQQRVVFGLEATSHYWLGLYSHLRKSGHEVVTLNPLQTSAYRRLQIRPVKNDRRDAWCIAEVLRLEPIVQTALASDAVLGLRHLSRLRSELVDQMADQKRRVLGVLDQVFPEFETLFGDIFGTTAAALLQEHPTPEEIAELDLDQLTSLLHKHSRGRFGRAKAEQIQEAARTSFGVTLALDALTAQLQILLAQIRFLGEQVAELEDRIAAYLEQLPQHLTSIPGIGAVLAAAILGEIGDIRRFKNGSALVAYAGIDPIVFQTGEFRARSTRMSKRGSHYLRRALWQAALVAALHDPVLKLLYEEKKRAGKHHIVAVGAVANKLVHIIYAVLRDNKPYVPAVREIAP

SEQ ID NO: 280378 - protein, 347 aa, unidentified
MNFYNNMHPYYCGIDLHAKTLYVCIIDQDGNTCLHKEIPASPKKLQALLEPYTGNVVVGVECMHCWYWVSDFCETLDIDFILGHALYMKAIHGGKAKNDRIDSFKIANLIRGGNFPLAYVYPKEMRATRDLLRRRMKIVRHGANLKAHVGNTTSQYNLPPHKVNLKNVSAREQLRSTFPDPVVQRNIDLDMAVLECYAKELSKIEWFLEQQARQHNPVHLHLLRSIAGIGRILALTIIYEVGDINRFESVQKFASYARLVKCKAESAGKSYGTQGNKIGNAHLKWAFSEAAVLYLRGNQKAQRYLLKLQRRMTKAKALSVLAHKLGRCVYFMMKNETVFDESQFLKG

SEQ ID NO: 280379 - protein, 486 aa, unidentified
MAKRKMSTFERLRRGERLGRRERKALERCLQAEGPELEIVHPHAAGIDVGNKSHFVGIKPGSGEPAVQEFGSWTADLKRMVGWLKSQGVESVAMQSTGVYWIALYEELEQAGFEVYLVNARGTRNLPGRKSDVQECQWLRKLHTYGLLRNSFRPAEEIRALRTLWRLRERHVREAGRAIEQMQKALTTMNVQLANAVSDLSGATGLAIIRGILAGERDPWRLAKLRDRRVEASEAEIAHSLEGNWRDDVLFELQQVLEGYDFLGRQIARCDAELQKYMAALPSREVLPTSPLTSTPAVEAGPARKKARPKRKSKNAPSFDLAAELRRTTGVDLLSIDGINVMTAQTILSELGTDLRAFPSESHFSAWLGLAPQREISGGKVIRHQSRRVKNRVANALRMAAEALSHSDSYLGARYRHLRARLGGLKAVKAMARYLACLVHRLFTHGQAWVDRGSAEYERKRKGRELTALQRKASQMGLRLVPVQVG

SEQ ID NO: 280380 - protein, 343 aa, unidentified
MQSVTTIGLDIAKSVFQVHGIDAKGKVVIRQQLRRSRVLGFFGKLSPCVVGIEACASSHHWSRELQALGHAVRLMPPAYVKPYVKRQKNDAADAEAICEAVQRPTMRFVPTKTADQQACLMLHRTRHLFIRQQTALINSMRAHLAEFGIVAPVGRNGVEKLLDVVADPDDERVPDIARECLRALGSQLQGLKVRILEFDRRIKAWHRSSETSRRLDDLPGVGPALATALVASVPDPKVFRSGRDFSAWIGLVPKQHSSGSREKLGNITKQGDRYLRSLFFTGALAVIRYAKIHGSKHRPWLAKLLERRPTKVAAIALANKLARMAWAMMARGQSYKEPVALAR

SEQ ID NO: 280381 - protein, 358 aa, unidentified
MKVEASLAGYRRLLRWAGGFSERRWAVENARGLGRHLAQWLVARGEVVDDVASTATARVPELSRGGRRKNDVIDAAAAASVAALQGEANPVLAEDLTTVLALLDERRNNVVTQRTRLVNQLHALFRELVPGGAPTGLTATIASRLLAGVRPAGPVEAARKQLARDLVAEIRDADQRLKALTAHIADTVATTGSRVTQVAGVGPVVAARLLARTRRASRFASASAFANYAGVAPVEVSSAERVRHRLPRGGDRQLNFTLHIVALTQVRMPLSSGRAYYDTKIAAGKTHNEAMRCLKRRLADHMWRAMIRDERQQSAGPGGHQGATLQSSAAGSTPTTSSSDKSLPEPATPDSTTGQTTA

SEQ ID NO: 280382 - protein, 328 aa, unidentified
MHKQNQFILGIDISKNHFDVALLLPSGKRKNKKFRNQPSGFEELGTWLDKWGVESLHACLEATNIYGHRLAEFLHDQGFDVSMVNPARVKGYAQGELLRTKTDKQDAALIARFCQAMSPSLWVPEPKNVRELKALVRRLDALIEMKQQEVNRLDVADDVVLQDIEGHIAVLSERINQLRDAIRQHIDNDPGLREQRELLLSIPGIGEKTVATVLSYFAAIEQFSSAKNLAAFCGVTPREVQSGTSINRYGRMSKVGPARLRKALFFPAMVALKYNPLLLAMRDRLLAAGKPKMVIIGAAMRKLIHLIYGVLKSRTPFDPNLVKISLAC

SEQ ID NO: 280383 - protein, 332 aa, unidentified
MENFYFIGVDVLKKKLNFCVMFEGKVVHEEETSNHQGAIMSLLHHLEEDYGIASGQMLVCAEHTGQYTFPLACACKAVECRLWLENAAEIKYSSGVQRGKSDKVDAKRIAIYASRFQDKVRYYERPTEDIERLKQLESERTLYVTDFAKYKGQMKDQKEYMPKSLYERKMKRLQALMDDLEEAIQSITGEMDEVIASCPVLFRQRELLMSIDGVGRVVATNMIIATEAFTRFDDPRKFNCYAGVAPFSYSSGSSQHSKARVSHRADKVMKRLLHLAAVAVTHRIGGELKKYYERKVAEGKNKMSVINALRAKIVARMFAVIKRNERYKPILS

SEQ ID NO: 280384 - protein, 350 aa, unidentified
MIIIGCDYHPGFQQIAFVDTDSGEWNERKLGHREEAEQFYRQLQVRGKKVRVGMEASGHARWFERLLTELQFELWIGDAAEIRTKRVRKQKTDRQDAELLLRLLIEDRFPRIWVADGENRDLRQLLWHRHRLVQMRTRIMNQLHVLALNEGVRRKKALRRPAGRAQLQSLVLARWASRRRQDLLELLDQLTLKIQELTRALEQEVEKRPVARRLMTHPGVGPLTALAFELVIGTPKRFGCGKQIASYVGLVPSEESSGDRRRLGHISKQGNSLLRFLLVEAAQVTVRSNPDWRRHFLHLAMRRERRIAKVAMARKLAVRLYWMWRKEWDYEQMRKFGSHVGEPGNRQGVS

SEQ ID NO: 280385 - protein, 337 aa, unidentified
MKVVRIGLDIAKTIFQIHGVDQHGKTVLKKTLSRGEMLPFFANTPVSLIGIEACAGSHYWARELIKLGHDARLMAAQFVSPYRKSGKNDANDAEAICEAVGRPNMRFVPVKSEEAQAVLAVHRARSLTVSERTALVNQVRGLLGEFGIVVGQGIAQARRLLADIGAGGRQLPILARETIGELHDRLRTLDERILAYDRKISALAKACEPARRLMAIEGVGPVTATALVASVGNASAFKSGRQFAAWLGLTPRQNSSGGKTKLGSISKRGDVTLRTLLIHGTRSVLRLTTDKTDRKSVWAEALKGRSCANVAAVALAAKNARIIWAMLSRGTEYQVAS

SEQ ID NO: 280386 - protein, 342 aa, unidentified
MKISRVGVDLAKNVFQLHGVDRRGETVLKRRLSRDKWISVLTNSADPGCEIGMEACGGAHHWARLLMAKGYRVKIIAPQFVKPFVKSNKNDANDAEAICEAMSRPNMRYVKAKTVAQQDIQATHRIRSELMGHRTAKVNHIRGLVTEYGLVAPIKVASLRAAIPRWLEDAENGLTDRFRALLNGLWEDLMTLDNRIDSLNKEIESIAKCDPVAQRLQQLRGVGPLIATALIATVGTGEQFDKGRQMSASLGLTPRQHSSGDKRRLLGISKRGDAYLRSILIHGARAVVAQAKQKDDRLSRWVTELAQRRHPNVAAVALANKTVRMAWAMMKHVDYDPEFVVG

SEQ ID NO: 280387 - protein, 412 aa, unidentified
MDVIHERCAGIDISKVDVKVTIRTPGAGKRRRKETRTFSSMTSGLLAMRDWLLAEGITVAGMEATGAYWKPVFYLLEHDMECWLLNARHMKAVPGRKTDVKDSEWIARLVEHGLVRPSFVPPEPIRQLRDLTRYRTEVIRERTREAQRLEKLLEDTGIKLSAVVSDLLGVSSRAMLAALITGTRDPHLLADLAKGSMRRKTDALIEALTGHFTDHHAFLARAMLDRIDACTAMEKRLDHRIDEQIAPFHHRIDLLVTVPGINTRTAQVILAEIGDAIARFPTAADLASWAGVCPGNNESGGRKGPARTRHGDPWLKAALGQAAVSASRTKDTYLAARYRRITARRGKKRALVALQHSILISVWHMFTRDTEYADLGGRYFIERTGRARQTRRLVSQLNQLGYHVTLQTEGAV

SEQ ID NO: 280388 - protein, 336 aa, unidentified
MGLLSLLEKIRSRASQKLDAAPVVVSCYEAGYDGFWLHRLLTAAGIRSHVFDPASIAVEQRGRRAKTDRIDGELLLRTLMAYCRGEPRVVRIVRPPSPEQEDARRETRERDRLVKEQVGHTNRIKALLRLLGMAVGNPRRRDWLKWLSAQRDWQGEAAPPHIKAEIEREHARLMLLREQLAALERRSAQAQPTPAVAEMARRRNTLFRLKALGPAFSGTLGNEVFYKDFDNRRQVGAYVGLAPSPWQSGGTDREQGISKAGNPRARKAAVELGWLWIRHQPNSALTHWFLARTVKASKRIKRIAIVALARKLIVALWRYVMTGLVPVGAVLKPVEA

SEQ ID NO: 280389 - protein, 339 aa, unidentified
MDEYDGRQVVGIDLHRRRSVIVRMSEAGQRLEAVRIDNDPVALAREVAKAGESPEVVLEATYGWYWAVDALQAAGARVYLAHPLGVKGFAYRRVKNDVRDASDLADLLRMGRLPQAWIAPPRVRALREAVRHRAKLVALRSGLKAQVHAVLAKQGVTVAVSDLFGVGGQQLLDTLDLDPPYAARVSSLRRLIDALDFEIDTVTRRTSADLAAHPGFRAVQAVDGVGPVLAAVFVAEIGEVHRFARPEQLCSWAGLTPRHRESDTKVRRGRITKQGNALVRWAAVEAVQRIRSGQLGRTRTRLAEHRGANVAKVATARRLLTLVYYGLRDGHIRCLARPA

SEQ ID NO: 280390 - protein, 422 aa, unidentified
MNDRQDFELAACVGIDWADQQHVICLQSTGSEKTESRELEQKPDALHDWVAQLRVRFEGRRVGIAIEQSRGAVIHALMMYDFLALYPINPKALARYREAFRVSGAKDDPLDAELLLDFLRLHRSRLRAWLPDTVETRRLQMLAEYRRKLVNNRIRHTNRTTSLLKMYFPQALDWAGELGTVQSCDFLEKWPALSTVQHARPSHLRKFYLQHHGRNLDLIEERLRQISTARSLTDDPAIVDALSLAVQAEAAQLRPIIDWIARFDQILAQQFASHPEHQLYESFPGAGPVYAPRLLTALGTDRSRWESAADLQCHSGIAPVTEKSGKSCWVHRRLACSNFVRQTFHEFAAQSIRYSTWARAYYDQMRGRGLRHPAAVRTLAFKWIRIIYRCWRDQKPYDEHIHLKSLRAKQSPLLKDVKDDSD

SEQ ID NO: 280391 - protein, 313 aa, unidentified
MKDLLERCCGIDIHKDTAVTCIMIGFGKKMKKEIKTFGTMTDNIEDLRLWLRKNKIKKVAIESTGIYWKPIFNILEDDCEIILANAKHIKNVPGRKTDVKDSEWLCKLLKNGLIEKSFIPPEDIRHLRELTRYRKSLLSGLTAAKNRIVKTLESANVKLASVLSNIHGATGWKIIKELAIGEQSIKKLTKNLHPQIKASKEDFEKALKNTLKPHDRELLKVKIRHIESLQLLISEVEEQIKTHLQKYTSEINLLKTIPGMGDTIAAITLAEIGADMDQFPSDMHIASWAGLAPGNNESAGKKKVLGSPREIKI

SEQ ID NO: 280392 - protein, 419 aa, unidentified
MVLKKEIPIVEVIHPICCGMDVHKESISACLISVDSDGKEGLQIREFGTFFSDLIALRNWLVANQCPIVAMESTGVYWRPIYNVLEGSIELVLANARHIKNVPGRKTDISDCKWLAGLLRHGLIKASFIPEKIVRQWRDLTTLRKSHVQTVGDYKRRVHKLFETANVKIDSVVSDLFGATGRNLINLLCSEKTRFSVEDIAKCAKGSLRSKVQELQTSLEGFFEEHHRFQLKGILVIIESLEREIQSITARLTQLMEPHEEVLNRLDALPGINMVAAQAVLSRIGITLEEFPTEAAFCSWSGLCPGNNESAGKRKSGRHFVHSHPFKTLIIEIAWAAIKKKGSYYKEKYYRLKARLGPKKAITAIGHRIAKAIYHIIKDGQSFKELGEDYLNKNDKVRKLSNLRKHARKLGFELVAVEA

SEQ ID NO: 280393 - protein, 343 aa, unidentified
MEIRTIGIDLGKTVFHLVGVNARGEVVVRKKCSRTQLLRFTSNLRECLIGMEACGGSHFLGRALREQGHDVRLMPAQYVKPYVKTNKNDYIDAEAIAEAVTRPTMRFVPIKSDDQLDLQSLHRVRERWVVRRTAVINQIRGLLLERGITMRKGRKHLEASLPRILEDGENKLSGALRALLTQLQIEMQYLHRQIEGSDQLIVRIAGELEPCRRLVAIPGIGPLIATATIAAIGNGAAFRKGRGFAAWLGVVPGEHSTGGKQQLTGTSRRGNKYLRKLFVLGAHTVLLQRTKQSLGLRTWLASLTARKRKQVATVALANKMARMVWAVLFKGEAYRPPLQIVAA

SEQ ID NO: 280394 - protein, 352 aa, unidentified
MEKYIGIDVHSESCTIAVMNSAGRQLRQQVVDTQAKVLIEFLKGLAGDRHVCIEEGQLAEWLVETLEPYAKEMAVVQPKAHQGHKSDAADAWALAEQLRVRAKGVYVFKPTRQYRPLREAVRTYGVAVKDMTRAKNRFRSLLRARGVANFDSSIYEPEQRSAWIRKLPAAYRRRAEWFGRQIDSMSEAHEIAQSWLEEEAEKCPEVERLQTLPGFGPIRAAQVVALVVTPHRFRTTRQFWNYCGLAVVTRASSEWKRDSSRDGWQHVRGNVQTRGLNRNCCSQLKAVFKGAATTVIAKPNPLREHFEQLVANGTKVHLARLTIARRIAAATLAIWKKKEDYDPTKHQSIKPA

SEQ ID NO: 280395 - protein, 348 aa, unidentified
MLIIGCDYHPGFQQIAFVDTETGEFGERRLTHREEAEQFYDTLRERSVRVGMEASGHARWFERLLRDLQFELWIGDAAEIRTKRVRKQKTDRQDAQLLLRLMVEDRFPRIWVAGAENRDLRQLLWHRHRVVQMRTRVMNQLHVVALNEGLRCKKALWRPAGRNELESLILAPWASRRRRDLLDLLDQLTPKIQELTRALEDEVEKRPVTRRLMTHPGVGPLTALAFELVIGTPERFHCGKQIASYVGLVPSEESSGDRRRLGHISKQGNSLLRYLLVEAAQVTVRSQPHWRSKFFHLAMRRGRKIAKVAMARKLAVRLYWMWRQGCDYAHFEKLGSHAGEPGNRHGVE

SEQ ID NO: 280396 - protein, 387 aa, unidentified
MKTFQVFYIGLIKSGGANAYVALRLIQPICIMYTHVYIGLDAHTRNCVLGTIDADANVVSVHDFPTSETGLIRHVKALPATFKYLALEESSLAGWIAGVLTPHVTELIVCDPVQNALISRGGSKDDVRDSLKLARLLRLEELKPVYHNHDPSRVDFKMVAQQYLSITNEIVALKNQIKSKYYQGGVLKISGSLVYRKAHRHSYLKHVESEAMKKVILNFYDPLDCMVRVRENALLLMQELGKKYGEIEQFQRIPGIGVVGAHVFSAFIQTPHRFATKQQLWKYCQLGIRVRQGGGKKLSGECLDRSGISVLKAISYQCWMSSLRTKEPNEVSMFYHASAKRTQDLTRARLNTQRNVLATLWTIWRKNVDDHPHLFYRPPVSARKAKQ

SEQ ID NO: 280397 - protein, 315 aa, unidentified
MECHRATPSFVGIDVSKDRLDVHVVPSGRTFTAQRDGKGLEQLAGDLRQLAPALVVLEATGGFEITVAAALASANLPVAVVNPRQIRDFARATGRLAKTDALDAEAIARFAERIRPEPRPLADAESLSLGELVARRRQVVEMIGMETNRLHQARNLRVQRMLKATLKTLSAQLAELDHDIDDTVRRSPIWRAADDLLTSVPGIGDVTAHTLIADLPELGQLDRRRLAALVGVAPINRDSGQMRGKRTIAGGRVEVRNALYMATLAATRWNPVINKHYHGLVDRGRPKKVALVACMRRLLGILNAIMRTKTPWQCA

SEQ ID NO: 280398 - protein, 380 aa, unidentified
MAEPITWVGLDAHSKSIEVARLVGTATGVDRWQVENTPKAVGRLARKLRREAGDGEIRCCYEAGPLGFTLQRQLESSGEGIVCEVIAPSLIPVKPGERIKTDRRDGIKLAMNLRAGTLTEVRAPSAAEEAVRDLCRCREDARVDLLRARHRVSKFLLRRGRIWTQGRGWTLQHRMWLRSLRFELPADEIVYQNYLTVVDQAEERVRQLDQAVEKASTHEPYRTPVSWLRCFRGIDTITALTVVTEIHGIQRFTNARALMAYLGLTPSVHASGEKTRRGAITKTGNAHVRRVLIEAAWCQWRRPVVGLALRKRREGQPDWVIAHADRAMRRLHRRHTKMLHENKPAGKITVAVARELAGFLWATLTEAANPTRNQDQTRTH

SEQ ID NO: 280399 - protein, 382 aa, unidentified
MKGNVCGLDVHKDNVFVCILKENGEKILQRVGILTPELDALRDMLVSHGVGEVCMESTSIYWMPVWRVLESDFHLWLVNPLAIKQLPGRKSDVKDAEWIATCLKKDLVRGSYVPEEVIQQLRQYNRRVFDINKETVFLHNKLDASLQRCNIRLSNYVSNVDTKAYREVVEDLSKGVTDPGTLLGHIHKRTKNKWGEDVLRSALTGVVSEVDTELIGMYREELELLRTQKAKCLSRMREICQKHFPKQMKDLQTMPGVREQSATQIIAEIGVDMRTFLTAAMLVGWAGFKPRNDESNKKLKSRSITHGNKYLKKLMVECAWGATRTQGCFYSQFSYHQTQVRKKNAMKVRVAVARKQLVGIWHILSEGCTYKEYSEKKEEGES

SEQ ID NO: 280400 - protein, 343 aa, unidentified
MAHFAGLDVSVKETSVCIVDDAGKIVREVRVASEPEALLQVLTNTIYRFKRVGLEAGPLSQWLYSVLAEAGLPVICVETRHMRAVLKAQINKTDRNDARGIAQMMRVGLYRPVHVKTLRSQKLRMLLTHRKLLQSKAIAIENDLRGSLRNFGLKVGMVGTVKFEARIKELVENLPDLAELVEPLLIVRRVVREQLGILHRRLLAIVRDDDVCRRLMTVPGVGPVVALTYRVTVDVPARFRNSKAVGAVFGLTPAKYQSGEIDRTGAISRCGDEMMRMMLYEAAQSMLVRAAKWSWLKAWAMKIARHRGMKKAIVALARRLAVIMHRIWVDGTDFRWTREVAAA

SEQ ID NO: 280401 - protein, 321 aa, unidentified
METWIGIDISKDTFDAAWIFNGRKNHIKLENNPKGYRKLLSEVPDGAHFALEATGEYHLNCARFLFQKDKPVSVLNPFAVKMHMQSDLRRCKSDKADAYSIAKFASEKTVEPWLCPSDDDIRLKHLDAVVDNLQKQIRQSKNVLHSLSQVCLKDDLAVAVIKKTIRSLEELMEKAKAKQSDIIMANRSEEVSLACTIPGIGMETSLKFFTHVGDVTKFNSSRGLISWIGLSPRNAQSGTSIHRNGGISRMGCVRLRGQLYMCAVVASRVNPDCSAFYHRLKELGKPSKVALIAVANKLLRQLYAVLTKKEAYVPNFCTKAS

SEQ ID NO: 280402 - protein, 393 aa, unidentified
MPTMTHPDRVEQAPVEQAPVELICSTVTGGVDTHKDTHTAAALDQTGRLLGHRQFPTTSAGYAALLGWLRSFGLLIVVGMEGTGVYGAGLAQFLQGAGVKLVEVDRPDRKARRWQGKSDPVDAEAAARAAQAGRATGTPKTRGGQVDALRALRTARRSAVAARADAQRRVKALIVTAPDTLRTTLRGLGDRELIAHCATRCPDRATAGDPVTATVLALRALARRHQHLTVEITELDTLIGPLVTAINPALLELTGVGVDVAGQLLVTAGDNPARLRSEAAFAMLCGAAPLPASSGRTVRHRLNRGGDRQANAALYRIVLCRLRWDPRTRAYAARRTAQGMSKPEIIRCLKRYIAREVYTALLNPDPSSVLASPCAVPEESTCSARSASEDERR

SEQ ID NO: 280403 - protein, 356 aa, unidentified
MQTQVTKKIDFTGKNLFIGLDVHKKSWSVTIIFNGMEHRTFTQPPEPQLLVNYLQRMFPGGSYNSAYEAGFCGYGIHRELNSLGIKNIVINAADIPSSQKDQLDKRDPIDSRKIARALEKGLLRPIHIFDRDIEELRSLNRTRFYLMRDYRRSKTRIKSFLQYYGEPIPVEFDNNQWTLKFLSWLKQVKMQTRSGQDAFYNLISSYEYHRSQLLTLSRQIRERIREYDKELYTLLKSVSGIGPLTASALITELGDINRFPHRDHLSSFVGMIPRVKQSGESSYSGGITFRCNEYLRTMLIESSWQAIRQDPALMQYYHEHLINNKGQKVIIKVARKLLNRIRYVMKNRKPYVTGVA

SEQ ID NO: 280404 - protein, 343 aa, unidentified
MHSISTIGLDIAKSVFQVHGVDAAGQVVVRRQLRRGHVLAFFQKLPPCLVGIEACASSHHWSRELQELGHTVRLMPPAYVKPYVKRQKNDATDAEAICEAVTRPNMRFVPTKTVEQQSCLMLHRARHLFIRQQTAVINSIRAYLAEFGIVAPVGRRGVEQLLEVVADTADYRLPEVARACLTALGSQLRALKAQILEFDRHIIAWHRSSATSKRLDAIPGVGPALATALVASIADPKVFRSGRDFSAWVGLVPKQNSSGGKDKLGSISKQGDRYLRSLFTAGALAVIRYAKIHGTGHRPWLTALLARRPTKVAAIALANKLARMAWAMMARNERYKEPAALAA

SEQ ID NO: 280405 - protein, 364 aa, unidentified
MVYVGVDLHRKRSQVAVVNEAGEVLANRAVPTDGMEIMRVFGEVAPRPTPISVAFEATFGWGWFADLLQDAGVEAHMSHPLMTKAIACARVKNDAVDARTLAHLLRTGMLPEAWMAPPEVREARRLVRMRVSLVRIRSRIRNQVHALLAEHGVVNPVSDLFGKRGRQILEELRLPERSQNRVEACLRLVDDLDTEIEIADTEILGLYETDPRTQRLLPIPGIGPTTAAIVLAEIGDIARFPDADRLCAWAGLTPTERSSADHTRRGHISKQGSRWLRWIMVEAATHALGNRQLGMFFTGIEKRRGTKIARVALARRLLTLAYYALRDEGGCRAFPVPDKPRSTRGRARSLQVMASSRGDGRPSD

SEQ ID NO: 280406 - protein, 392 aa, unidentified
MFYIGIDVSKDKHDCFCCNDDLQPVFQFQFSNDSIGFNLLFEAIKSLDSSFDNIKIALEATGHYSYNITSFILDNDLPLAIINPLHSNLFRKSISLRKTKTDKVDANVLARMLIAYPDLKFSTSLDDNDIILSELKSLTRFRLSLVKDLSKLKTSLSRIINIVFPEIEKVFSSTNSLYELLYNFPSAKEIANAHLTKLTNVLIKASRGHFSKEKAIQIKELAKNTVGNSSCASTFELKHTINLINEYNYSIDKIDKEITTIMDKIASPITSIPGIGITLASIIIAEIGNFDNFDSPDKILAFAGMSPTIYQSGKYVASSAKMEKRGSKALRYALYNAARLTSIYCPVFKEHLARKRSQGKHFNVAISHVVKKLVRVIYHLQTKNELFKNIIN

SEQ ID NO: 280407 - protein, 370 aa, unidentified
MLDTTTFIGLDVHARSIKAVSLDVMTGEVRCATFGYDAGAVAEWVRSVDPKARCVYESGVTGFDLQKRLSGLGVDCVVGAVSKMIKPSADRRRKNDRNDAEFLARMLSVGNVVEVWVPDDECEAARDLTRALEDARDDLSRSKQRLSKFLLRHGLVFDERTPTGRRKGNWTRAHWSWIESIRFAEGADNDVLAYYVDAVRRAAEEKARLEGLVEAEARKPRWRRRVDSLRCLKGVDTATAADLVFEAGEFSRFRNARSFAAWVGLTPSEHSSGESDRRGAITKAGNKHLRKALVEAAWHYLTCSGRPKDLAKGQAPDRVARRHAAKGVRRLVERREALLARGVHNNKANVATARELACWVWAVGLMAEEA

SEQ ID NO: 280408 - protein, 326 aa, unidentified
MTALCASDNTFIGIDVGGASFEAARHRGDCTRYANRPEAIAAFVERLRAGPSIERIVIEPTGGYEKPLVQALRRAGFAVELIHTSRFKAYRELMGVRAKSDTSDARLLAAYAAAPDEVRGRKTSHVVLPDDAGREQLAELAARRDQLKQMIHAESCRLTTVRNEEIRREIALHLEALQASAANIHGAMMRLVRQRHDLDRARSLLRTIKAIGDKSALTMLALLPELGHIDNKAAAALVGVAPFVRKSGTMNAPARIYGGRAPVRNAIYMAAVTAARHNPVLRPFYERLIAAGKPVKVALVAVMRRLVVFANAVLKSGQPWKDAIAA

SEQ ID NO: 280409 - protein, 347 aa, unidentified
MNHYAGLDVSLEETAICVVDSTGQIVKEARAASEPETLIAALREIDLPLARVGLEACSLTAWLHDELRSAGLPAICIETRQANAAMKTMPNKTDRNDARALAQIMRTGWYRQVHVKSRQCRLWRSLLVARRTVLNEMRSIENVVRAVLREGGLKLGTPSRAAFAERVRDLMAEDASVKPLVDPLLTILVTMLDQFARLTKQVLDIVRREKVCRRLMSVPGVGPITALAFRATIDRPDRFRRSRDVGAHLGLTPARYQSGETDVSGRISRCGDELARTALYEAAHTLLVRSRKWSSLRAWGMKVAKTRGMARARVAVARKLAVILHRMWSDETEFRFGRNPAAALAAA

SEQ ID NO: 280410 - protein, 335 aa, unidentified
MGYSVYEDEARISKDGRSRMKQPGSATYIGIDVSKATLDIGVIPTGETWSIANQSDDIATLVQKLRRLKPEKIVIEPTARLELPVVGALAATGLQIVVVNPRQVRDFARASGILAKTDRLDALVLARFGQAVAPEVRPLKDEQTRALDALMTRRRQLGNMLITEKNRLGNAPAPVQEDIKDHIVWIEKRLKDLDDDLDGTLRNSPVWREKDALLQSVPGVGRVLSLSMLSQLPELGQLDRRQIAALVGVAPFNCDSGSFRGRRRVWGGRSHLRSVLFMATLASTRYNPVIKTFYERLRASGKPSKVALTACMRKLLVILNAMIKSQTPWRYQVAD

SEQ ID NO: 280411 - protein, 326 aa, unidentified
MEHELHYIGIDTAKEKLDVDVLRPDGRHRTKKFANTTKGHDELVSWLKGHKIDHAHICIEATGTYMEPVAECLYDAGYIVSVINPALGKAFAQSEGLRNKTDTVDARMLAEFCRQKRPAAWEAPHPLERALRALVVRHQALTDMHTQELNRTETAREVQRPSIDAHLLWLEAELKRLEKQIKDLTDDDPDMKHRRKLLESIPGIGEKTSAVLLAYIGLKDRFAHARQFAAFAGLTPRRYESGSSVRGASRMSKAGHVSLRRALYMPAMVAASKTEWGRAFRDRLAANGKKGKVILGAMMRKLAQVAYGVLKSGVPFNASRHNPVAA

SEQ ID NO: 280412 - protein, 343 aa, unidentified
MKLHVLGIDLGKTVFHLVGLDSTGRAVIRKRCSRRQLLAFTANLEVQLIGMEACSGAHFLGRTLREQGHEVRLMPAQYVKPYVQTNKSDYRDAEAIAETVQRPRMRFVPIKTEEQLDLQALHRVRERWVMRRTAVVNQIRSLLLERGLTLPKGRSHLDKQLPRILEDAELHLSDSFRVLLAQLQLELQQLAARIEEMDRVIQNTARENEACQRLTEIPGVGPVTATALIAAVGNASAFGKGRKLSAWMGIVPGEYTTGGKQKLLGISKRGNKYLRRLFIQGARSVLQQRHQQAPGLSEWLAQLLARTHQNVVVVALANKLVRMSWAVLCKNERYRAPVFAGTA

SEQ ID NO: 280413 - protein, 430 aa, unidentified
MQVSRNVDAEPLPPQDMPTLNFRLTNSGRFALIKNHEDIDIFIGVDVGKSDHHAVAIDRTGKKLLDRALPQDETKLRAIIKAVAGKGSVLLVVDQPSTIGALPVAVAQAEGIMVGYIPGLAMRRIADLHPGEAKTDARDAAIIAEAARSLPHTLRSIVVADEQAAELSMLCGFDDDLAKQATATSNRIRGLLTQIHPALERVIGKHLDHPAMAELLIKYPSPDRLRKAGLSRVTTLLTKHAPRAGKRWATEIFTALDQQTVVVAGTGAAGVVLPQLAAMLKQLRTARDELLAQVEALVEAHPLHLVLTSIPAVGVRTEARIITEVAGKEFKTAGHLASYAGLAPVTWRSGTSIRGDHPSKKGNKSLKRVFFLSAFAALKDPLSRAYYDRKRSEGKRHNQALIALARRRCDVLFAMLRDGTFYEAPTPKTT

SEQ ID NO: 280414 - protein, 398 aa, unidentified
MLSIGIDVSKGKSTVCGMKPGGEIVYAPFEVQHTREGMSELVSLLRGSGEEVRAVLESTGSYHCPVVAALLENGIFVSVVNSLRMKRFCSQSIRKVKTDRIDAMQIALYGLAYWQELQPTKLPEDTYRELQLLARQYYQMTSMLIKAKVDFNALCDQVLPGMQELMNDHAGRHKLSDFVLRYRHTTHILEMGETRFRKDYCKWAEKKGYRNCERMAVLIFATAQNGIPVLPNAPSTQIVITEAIRVLHTVEASRDAILTQMQALAKTLPEYSLVREMPCIGDTLAPRLIAEIGDVRRFHSKRALIAYAGIDAPPYQSGKFCANNRHISKRGNRYLRKTGYEVMQSYVMHKPANDPIFTFIEKKRSEGKSGKLAMVAGLNKFLRVYYGKVTELYRSLPQ

SEQ ID NO: 280415 - protein, 359 aa, unidentified
MEQITRIGLDTSKSVFQVHGVDGAERTVVKRRLTRAKMLAFFERLPPCLVVLEACGASHHWARVLRGLGHEVRLIAPQLVKPYVMRGKNDASDAAALCEAASRPRMRFVPVKTPEQQAGLMLAGLRDKLIRRRTQLANGIRGYAAEFGLVAAKGLERIEELLLRTQTEPGVPDLARRLFAGLAQDYAVAQARVSEVEAELQAWHRTSEQSRRLAEMPGIGPVGAALLTMKIPDPAAFRSGRDVAAWLGLTPRNHSTAGRQKLGVITRAGDEALRSVLVAGAMSVIRQAKLGRGQPSVWLLGMLARKPLKLVAVALANKMARAAWRLMRTGQSYDPDRAAGPARPAPTAAHPTPAAAQPA

SEQ ID NO: 280416 - protein, 440 aa, unidentified
MKKEKTTKAFPIIYPNAAGIDISSKEHYVAVNPKNKEPIRSFGCFTENLKEIAMWLKQCKVNTVAMEATGIYWVSLFLILEQEGFDVVLVNAKHVKNVRGKKTDMSDAEWIRQLHSCGLLSASFQPDAFTRKLRTYMRHRKNLIEMAATHIRMMHKALEQLNIKLQHVITDITGKSGQDIIQAIILGEQNPEKLASFCDGRIRANKKEMIIKSLEGIWKEEHIFELEQSFSLYHFYQRKIKECDAQIEQHLRDKTGIPKDPNEKLKVQSNKNNINFQAKEILKQITGTDLPEIFGITESNALEIISEIGLNMKKWPTEKHFTSWLNLAPNNKISGGRILSSRIPKKKNIAGQVFKMAAFSVQRSENWLAVFFHRIKVKKGTAKAVVATARKIAVIFYKMMQDKVLFTPIPIEKYNEVFKDNQIKRLKRQAQKLGYQIIGE

SEQ ID NO: 280417 - protein, 328 aa, unidentified
MFEHYIGVDLHQAFFQACAVTASGDRAWEGRFPRTDAGMTALLARCDQRTAMAVEASTPTWHFADAVFPRVGALRIVDPVKTKLKAGYAAKTDRLAARRLADALRRDSVVGIYYPPVAIRELRELCRFRHAVVQVRTALINRVRAVLLRQGLVDRRRLARTVSDAWLETLTLPPRAAASVAGLRRVLAAVRTEAAAADREVLTLAAADPIAIALQQIPGIGPVLALLIRAEVGDMRRFPTPGHLASYAGLVPRVDASAGRVRYGRITRRGSPWLRWALVEAAMHGTRRRDRIGRWGRSLAIRKGALKARVALARALCDEIYRQWLAVV

SEQ ID NO: 280418 - protein, 370 aa, unidentified
MEKSVLYVGLDVHKMSVDVAIAEPGTAGETRYYGRIGGDPEALDKVTRKLLAKGAELRFAYEAGPCGYQVYRHLTAQGYRCLVAAPALIPRRPGDRLKNDRRDALALARLLRAGELTAVQVPETDDEAMRDLTRAREDAISVERRAKQRTAALLLRHGRIYPGKTTWGRGHWRWLTQQVMDHPAQQIVLQEYLDAVREASARVLRLTGQIRELIPPWRRAPFVAAYQALRGVSLIVATTMVAEVGDLSRFKNPKELMAYLGLVPSEHSSGASVRRGQITKTGNGHARRVLVEAAWAYRWRARVTRPLLQRQEGLPENLRQLAWKAQLRLCARYRRLLGRGKHKNTIVTAIARELAAFIWAIGRAVEPVTA

SEQ ID NO: 280419 - protein, 387 aa, unidentified
MDQTSSSAISTNTLHCALELSRNSWLLAIQFPDREQPSLYPIEGGNTEKLMAKLTAALDCWAKVSGSPPAITLCYEVGYDAFWLARFLMGRGIECLVIDPGSLQVNRRGRPVKTDRVDVKMLLRTLIAWCRGERHVWSLVRIPSIDEEDLRRSHRERGRLVRERTAHINRIKGLLFGQGIRGINVKSKYKTLAVDNLVTGDGHRLPPRLACEIARQIQKLAMVQEQIAKIERERDTAPTPCEATERKRHLLLQLKSIGPAISALLSREVYYRQFANRRQVGSFLGLTPSPYNSGAEERCQGISRAGSGHVRAIMIETAWLWIRHQPKSALTRWFVERTAGQTTRVRKIMIVAVARKLAIALWRYVEHGMVPQGDPQPTNDGERKMTG

SEQ ID NO: 280420 - protein, 370 aa, unidentified
MVLRHNRHYEEEVSMNTITLGVDLAKSVFSVCEVEASGRVMRRLDLKRDAFATWLAQCAAGTVVAMEACSGAHHWARRCEEYGLQPRLMAAQLVKPYRKSQRSKNDRNDAEAIATAARQGNMRFVSIKSIDQQARLSWHRVREGYKAESLAIGNRLRGLLAEFGIVMAKSDKALREVLADLEAHTALPAEFKELIRSVDAHWTQVRTAFDACDARIEAHARDDQRCVRLRAIVGVGALTADAMIATLGNAQEFRNGRQLAAWLGMVPTQHSSGGHTRLGAISCRGDGYLRTLLIQGARSSLQRAKAVATEKATPEQLWIRSLAARLSFGKVLVAVANKHARQLWVMLAHDVDYDPSACQRHPMHRPTQLA

SEQ ID NO: 280421 - protein, 320 aa, unidentified
MTSRGVEKMQNDTIGVDVSKDHLDAYRLADGATRRFANDKRGHGALIKWLAETPADRVVFEPTGPYHRAVERALGIAGVPFVKVNPRQARRFAEATGKLAKTDRLDAAMLARMGALLELQARPARSEVLLELKELYVAREALVKDRTAAKNRGKALSLPLLKRHNAQRLEQIDRQIATVEAAILQIVEADANLATRFAILTSIPGVSNITAFALLIEMPELGALEAGQAANLAGLAPIARQSGRWTGRSFIRGGRADVRQALYMPALVAARFNPDMKAKYALLIKAGKPAKVALTAIMRKLVVLANALLKANRPWTPKTA

SEQ ID NO: 280422 - protein, 395 aa, unidentified
MKYNTQNAKIKSITEKTLIVGIDVGSETHFARAFDWRNYEYSKKPLEFSNTEAGFMTLKAWMADFAEKYGKNVVIPGMEPTGHYWFNLGAYLQDNGMKPVHVNPHHVKKSKKLDDNNPTKIDRKDPKTIAALVNEGRFSYPYIPTGIYAEIRSLSNLRLQTQEEITRIKNRIARWFSIYFPEIKDVYRNPDSVSGLMILKEAPLPQDIVKLGVDGINKIWRDAKLRAAGLKRAKTLVTAAEHSIGSQEAPDSARIELKNLLNDYEIYKNREEDLMSLTEEKLSEIPHIDKLLEIKGVGLKTVSGFVAEVGDITRFDNPKQLQKLAGYAIVECSSGKHKGESHISYRGRKRLRYVLYEAAISLIARNEEFKEVHRYYRTRKENPTKEDAVSHSSCV

SEQ ID NO: 280423 - protein, 399 aa, unidentified
MFYGLDVHKEFIQVCEIDAKATNRKEYRIGGSAEEIDRWAQGLGSRDQVVLETTFHSWAIHSIVSQYAGRVVVANALQVKAIAYAKIKTDKVDAYTLARLLQADFLPSVELPDEKTWGMRQLVSHRRLLVKQRVAIKNTILATFHRCLICTPEGDAFSARGRRWMRSRELPPAERFLVDNALDLLEAIEARLDATDQQLLKTAAIEEQAQLLMTIPGVGVTVAMGLLAAIGDIRRFPSPGQLASYFGLVPRVSQSAGRCHHGKITKAGPGNARSLAIEAAQMLARSPSPIATTFYRVRRKKGHNVAVTALARKLIVLVWYMLQNGEPYRYASVETTRRKLRSLVPKQERTRALHPPRTLEHVYQEAGLPSLPPPSDAERRAAASNRRTRTRLTRIQAKT

SEQ ID NO: 280424 - protein, 395 aa, unidentified
MYSTFVGIDISKSSFDVCILDQSKIKPVHFKYNMDSDDFSELRLKLSEYDKQNVLIVMESTGSYHYTLLSFFLLQDFHVSVVNPQLINNFIRSETLRKTKNDKKDAHSIAKYAEKSSPGIKIVPEKTLDSLRVILRERESLSQDKAKLKTDMKAMLNYMFPELLTETDIFTQSNLEVLRVFPSAKSVRKYNLKKLEKELNKATANKTRISTELLFELAAKSIGIDAEYSEITLVSKADRLLYIMKEIRRFDRIIEEEINKNNNDDHTILSSVDGIGKSTSSAFIAEVGDIDKFESAKQLIAFAGTDPSVKQSGTSIHSNGKITKRGNAHLRRTIWLMAICVIRCNPYFKTYFQKKSDEGMKYKKAVIATANKLLRVLFALLKNRTHFVYPATAQP

SEQ ID NO: 280425 - protein, 355 aa, unidentified
MKQFIGCDAHRRYSVFVAREESGKTNRPVRVVHDGFALKAYLQGLPAGSEIAVESTSNWSWLIDAMEAAGHVPHLVHSYRARKRMPSPNRTDERDAEALANLLYDGTIGEVETWIPSGPLRDLRSLMRTRLAFVALRTKLKNRVLAAVNRHGLRADELSDLFVGKGRVQLSVYVGSLPPETRQAATLEWQMIDELRKQIEQLEERLQERLGRLGWVRLLKSLPGVGDVLGATIWLEVGDVTRFPSAAHLASYAGLVPTVRSSGGRSRPGGVSRQANHYLKWAFVEAANAIVCHQKKLAGEHVMRLYRRLKQKKCHGLAAVAVARHLAEATWWILKRKQPYRAPQASAAKASSPHG

SEQ ID NO: 280426 - protein, 423 aa, unidentified
MTHSTLCVGADIHLDQIVLCAVDKAEGHEVCERFHVTNNLPGAQAAATTIAAIAASLGCTRIEIGWEATGMLWIPFHRYLNDCSQLQPFERELVCFNPQLVSKFKDGLVLRRPKNDKLSASTIAARLRIGELPLSYVPGDFWQGVRRLTRYRFHLSRNLSREKMRFQAYAFLKCSDWKRVKAFSDVFGATSIALLTEFTTAELSHMSHDQLVDLICHRGRGRFEDPTGTARKVREVLRTSYPIDPQLDEMVTAALAVAWDHIRFIKRSMKRLDKHIARLIDPVPNPIITIKGLGAVITAGLLAEIVDIRRFAEHKHLAQYCGLTWEKRSSGNFVSQNTRLTKVGNKYLRYYLVLGANTLRQFNLEYKAFYWRKHGEVSKYQHKRALVLTARKLVRLVHALLTKNVPYVRPQALASVEEAGSLQ

SEQ ID NO: 280427 - protein, 402 aa, unidentified
MQEQKSYRRFWGLDVGKNVHTLCIIDAQQNTLAPARSFRNDRRGFEQLLVSLQQTGRKHTVLIGMEATGHYWYSLHHTLTQQGYTVKVLNPIQTARQAEREVRKRKTDKLDAHRIAVLLKNGNYRSALIPGELAMTCRQATRLHCRLIHQQTRLKQLIQAQLHPVWPEYETLFTDPFSVTSRKLLAQSPVPADLLTWDEDRLREFLHKTSRGKHGPQQAQDIRQAAQDSVGMQRGLPGTRLAIQILLEQMENAEPLLHKLKEQIEALAQQIPAYLQTLPGSTRPSTVSLYGEVDPIATFQTPSQLVAFAGLDPHVYQSGQYDAPQRRISKRGSPFLRRTIWQMAYRAIYQEGDLRQFWLRKRAQQKHHLAAVTAVAGKLCHIIWRIMTDERDYVPEGRPSQP

SEQ ID NO: 280428 - protein, 302 aa, unidentified
MGVDIAKSYLDGALGNEKRRFSNDTIGHRELIKWVKQLKVPVQVICESSGGYERAFVQAFAGAGLKISLVQANRVRQFARAAGILAKTDRIDAEVLCAFGKVMGPQAVTAAKLEQEHLRELESQRRHLTHLLVMELNRGARVSDACVQRLNRRLIKQIKNQIEQLDLLIKGHINQSHELSAKAAKLMSISGVGTCTAALLLARLPELGELNRREIAALVGVAPFNRDSGRMCGKRAIYGGRKPVRHGLYMAALVAAHHNPFLRDFYLRLRAAGKPAKLALTATMRKLLIALNSALKTDPTYA

SEQ ID NO: 280429 - protein, 389 aa, unidentified
MEARTVSSLPTAAPHHDAVRCLLAIELSKARWVVAVHTPLSDKISRYTLEGCDWKGLLELIERIRERVARELGPSVEMISCYEAGYDGFWLHRLLEAHGVRNHVIDAASLQVDRRVRRAKTDRIDARRLLRSLMAHLRGEPKVWSVVRVPSIAEEDDRRLHRERDRLINERGQHINRIKGLCAVHGIYDYEPTHPKRMLLVERLRTASGDQLPPRLKEEIKRELRRLELVLQMIKAIETERDAIASAKVPTHTNAMKIQKLVKLKGIGAEFATVLVGEVFFRPFTNRQQLASYVGLTPSPFQSGSMSRDQGISKAGNPKARTTMVELAWMWLRHQPGSSLSAWFRERVGTRKGRIRRITIVAMARKLLISLWRYLEAGVLPTDIAVKKG

SEQ ID NO: 280430 - protein, 407 aa, unidentified
MPEQVVTTHVVGIDIGMESCTMSCLTMDKRQMIKATLFANTLQGFDWLFERLEGLGVARKQILVGLEATSRYGENLLQALLKRGYQVCLLHPAQMHAFAQQRGLRAKTDQLDAVTIARALLSGEARFGYVPSEQVETYRELMRLQKQLSDDVVRYKNEIHALLVVLFPEFTQVFADPTRPTALAVLKRYPSAQAIAQTEVETLGKFLRELAPRHYGRPTAQELVGLAKASISSGVAVAARSSSLRILCDQLDHTQKNLEQLQREIDQLLDQDRKATGMLGVPEFGPTTVAVLRAELGDLARFTRIDQVVAYVGLDLQVKQSGKWKGQTKLSKHGSGRVRRILYLAALRSIHLEASPFGAYYQRLVARGMKKGMAVVAVMRKMLIVAVHLIQTEESYDPGKVGVQAGS

SEQ ID NO: 280431 - protein, 344 aa, unidentified
MTIVTLGIDLGKNLNRVVGLNSEGQGVLRRRVRRATLVDLADSLPPCTVALEACCGAHHVGRLFAAKGHDVRLMSPEYVRPYVRAQKNDDNDAAGIAEAATRPTMRFVELKSQDRLDLQTLHRARSRLVAARKALLNQLRAILLERGHTFRQGRKVLEREIDPFLAEPPSDLSPRILTLIDDMRTEWRSLDERIDALNDDLTQHARADEAASRLTTIPGIGVLGATALVAAVGDGEAFRRARDVPAWLGLVPKQMTTGGKPRLLSITKRGNIYLRMLLIHGARAALPSLSKQATPLGEWLRGLLSRAHRNVVIVALAAKLARIAWATLRRDRGFDPEMGATVTA

SEQ ID NO: 280432 - protein, 357 aa, unidentified
MRRPKAKSNDKLIAGIDLHGNNLVIGVINQDGTRLMHRKLDCRLEQVEEFLRPLKLRLQSMAVESTFNWYWLVDGLRARGYQIDLANPAKIEQYSGLKHADDKDDAFHLADLQRLNILPKAHVYDPELRPVRDLLRRRTNLVHQHTALLLSLQSLYARTTGQRLDLGEAKKMEPKQAPKLYEHPANQLIAQVQVEHIGALAKSIHRIEKAVLDCAREIPLYEKLLTLPGVGRILGMTITMEVGDISRFKTAGDFASYCRMVDAKRLSNGKCKADNNRKCGNKYLAWAFVEAANFARRYDESCRRWYDRKAAKAGKIVATKALGCKLAKAAWHVMAQQCNYDEKRMFPELANKPMKTS

SEQ ID NO: 280433 - protein, 347 aa, unidentified
MLHAGLDLSRKKLDVCLLSDEGEHLDQLAVPPDVDSLRRLARRVVEVHRQPVCAVIESMTGARIVHDTLEQQGWSVEIADAQKVKGLAPLACKTDKIDSMVLAVLSHRDLVPAIWLPDPRVREERELARFRLHLVKHKSALKCRIHSTLINFGRACPVTDLFGVEGRRLLERLEVPEPWCSNVTASVELIDDLEEQIAGINRRLKDGHADHRYIPLLMSVPGIRWVLAFTIAGEIGEIERFSSPERLAGYTGLCPRVNQSGEKDRRGPLTKHGPTYLRWALLEATMHALRHPAYAERYQRNKRRLGKQRGAKVAQIDIARRLAHAIWHMLTRNQPFAPRGAAFRLAA

SEQ ID NO: 280434 - protein, 355 aa, unidentified
MQSMTVPTAPVTVGVDTHLDLHVAAVLDHTGRLLDTQEFPASTRGYVALVTWAERFGPVERIGVEGTGTYGAGLTRFVRAYGLEAVEVNRPDRSLRRRRGKSDPIDAQAAARATQAGVAATAPKTREGQVEMIRVLRVARRGALKARVAAAEQLYGVLYSAPEELRQPLLGLKTKALVAACAALRPGQVTSTTAATKTALRILARRWQQLQAELTQLDAQLQELVSAVAPTLVALPGVGVDTAGQLLVTAGDNPQRLRGEAAFAHLCGTAPIPASSGRTHRHRLNRGGDRHANNALWRIALVRMRCHPPTKAYVERRTKQGLSKLDIMRCLKRYIAREVYHHLTDPAITPSTCPK

SEQ ID NO: 280435 - protein, 356 aa, unidentified
MQTQVTKKIDFKDKDLFIGLDVHKKSWSVTILVEGMEHRTFTQPPDPRTLYNYLQKMFQGGTYYSAYEAGFCGYRIHRELNDLGIKNIVINAADIPASQKDQLQKRDPIDSRKIARALGRGLLRPIHIFDRDMEELRSLNRTRFYLMRDLRRSKNRIKSFLLYYGVSIPFEYDNNLWTLKYIAWLKQIQMKTLSGQDAFANLIRSYEYHREQILILSRQIRIRIREYDNELYSLLKTISGIGPLTSSALITEIGDINRFPHINHLSSFVGLVPRVKQSGETSYTGGITFRCNEYLRTLLIESSWQAIRQDPALMQYYHQHVINNKGQKVIIKVARKLLNRIRYVMKNRQPYVVGIA

SEQ ID NO: 280436 - protein, 378 aa, unidentified
MIEHTPEALDIWLNELHQKVKGRIAIALELKKGPVVYALQKYPFVTVFPVHSLSLARYRQTFWPSGAKDDPQDAELALELMLRYPQKIKAIEPDNADIRLLQQLVEQRRQLVEDKRRFVNRLINTLKQYYPQPLEWFSHRGSLLLCELIIRWPSLQQLKRARRDTIRNFLNAKGGRARSLTEQRVASIESSIPLTTDPVVIDANALMATALAAQIKVVSEIIKTYDERIETLFDTLPDAELFKSLPGMGPCMGPRMLAALGDNRNRFNSAEEIQNYAGIAPVTERSGQKSWVHWRWQCAKFVRQTFVEWTAKTVNSSYWARRYYQGQREKGKSHQSAIRALAFKWIRVIYRCWKTRTRYDEAKYLLALEERKSPLLVP

SEQ ID NO: 280437 - protein, 375 aa, unidentified
MATIARLGIDTSKSLFQLHGVDEREEAVLRKQVRRGQFLGFVAKLAPTKIGVEACGASHYWARQLQALGHEVVLLPPQHVKPYVGRNKNDKIDAAAICEAMSRPRVRERFVAIKSAEQSAAQMLLGTRDGLLHRRTQLGNTIRGHAAEFGLVTARGLAHIKPLLERIAVDQAVPALAKELFATLGEEFTELGPRIARLDKKLKAFQRADELCRRLVEVPTIGPVIASSMVIKIGNPAAFRSGRRCAAWLGLTPKDHSTAGKMRHGGITRAGDEGLRAALVSGATAYIQQVKRGRTRPSPWLAQLLKRKPEKLVAVALANKTARIAWKLMTSGERYDRARAEAREGLGATQYQGSTPSPSLHTHIADHGASTMTGA

SEQ ID NO: 280438 - protein, 329 aa, unidentified
MLFVGVDVSKNRLDCAVITDDTGKLLGQRSFLNASEGIDRLLSWLRRLSGAGGASIHVVVEATARYHELVANVVVAAGVAVSVSNPARVRSFARGIGILSKTDQIDAFVLARYGQLARPKLWHPPERDVAELQALLSRLDDLEGDLRRESNRHEQARARACPEAVARSFLASMQALKAQCHTLRKTIAAHLDASKALRDDLRRLLTIPAVGPKTAARMLVLLRSRHFESARQAAAFLGLVPVERRSGRSVHGRPRLSKAGNPRLRAALYMAAVVATKLNPDVRAQQARLLGRGKAKMSTLGAAMRKLVHLCFGVLKSGGDYRVGVAAPA

SEQ ID NO: 280439 - protein, 417 aa, unidentified
MNTENYAALVALDWGETEHAFAAQVGESPVETGSMPATPECLHGWLEELHKRCGGRPVALALEGGKSAVIHALTAYPWLVVYPVHPATSERFRKAFTPSGAKDDIPDALVLLTILTQHRSQLRPLKLDSAQTRKIEGLVAARRQAVDRRTRISCELGSTLKTYYPQALELCGREPATELMLDFLTRWPELKSLKAARSATLKAFYAAHNSRHADVVAQRLALIAQARALTEDRAVIEPAVLEVKMLVDILRPLQKNIELIEERIAEAFDAHPEAALFQGLPGAGPATAPRLLAAFGTDRSRYPDASSLQKYAGIAPVKQKSGHSLWIHWRWNAPKFLRQTFVEWAGQTVPKCAWAKAFYRQQRAAGKNHQATLRALAFKWIRILWRCWQDQVPYDEARYLAALRQKGSPLAARLAVT

SEQ ID NO: 280440 - protein, 340 aa, unidentified
MVNCKAVGVDIAKNVFQVHYVDQETGEIVNKPIKRAKFLEFFVNLEPCLIGMEACGGAHHWARQLVKMGHEVKLMAAEFVKAFNIRNKNDAADARAIWLAVQQPGKPVAVKTEMQQAMLALHRMRAQLVKFRTMQINGLRGLLTEYGEVMSKSRVKLDKEIPDVLGRIAERLPAVVVDTLREQWNGLAKLDEQVVQIERRLREWKKEDKLVKAISEIPGVGLLTATAAVAMMGDPKAFSSGREFAAWVGIVPKQTGSGGKVNLHGISKRGDTYLRTLLIHGARSVLTNAKEPGEWVEQMQKRRPKNVVIVALANKMARTIWAVLAHERSYQNDYVSVKPA

SEQ ID NO: 280441 - protein, 404 aa, unidentified
MERAEMDYDVYVGVDVGKTKHHAVALDGATGERLLSRPFDQDEASIRELLEEASGHGKVLVTVDQFGNIGRLVVAVAKDMGIDVAHITPKDFKNIAETYKEGKSDAKDAFIIADVSLSTPRLIRTVGTRDDAVAEIKVLNSRRVDIVKERTRYYNRLHDLLLQVSPPLEQLFEGDSLHSDLAIKIFERYGGPRGLKRAGKARVSKWAGSLKYQKTRGPKKVEEVFEALGTMTVELPATEVIEIQIKKLAKRILELDQEESELDAAIEERADAVPETAILKSVPGIGRVYGATIAAEIGDINRFPDANHLASYGGIAPVKEESGTSVKKNKKRKNGNRKLKNAFIESAQKAKRYDPRCKAYYDRKRAEGLQHKQALRALARRRVDLIYALLANGTFYEPSHRATA

SEQ ID NO: 280442 - protein, 389 aa, unidentified
MDYRKTTAPTVMSDVATLYVALELSLRTWLVALRSSASDKVSLKPLPAGDQAALFALIDRMQAELYAAGHREVRVVSCYEAGRDGFWLHRRLVEHGVESLVVDAASVAVPQHARRRKTDRLDVRVLLRELMALMRHESDCRVLRVPTPEDEDERRLGRERNRLMSERVAHTNRIKGLLATQGIADYQPQRRDRRERLAELRTAQNQPLARRLAEEIVRELERLELVLDQLKKVEAERDAIAANPPPDDLNATKIVRLALLKSIANETATTLTREVFYRHFDNRCQVGAFVGFDGSPWRSGQMNREQGISKRGNRRVRALLVEAAQRWVRQQPDSALSQWFLSRVGATKGAHKRKMIVALARKLAVALWRYLETGLVPTGAVLKPEAARA

SEQ ID NO: 280443 - protein, 409 aa, unidentified
MPTTFDCPTGPVAGIDTHTDTHTVAVISDTGRHIATDTFPATNPGYVAISEFMATYGVTTVGVEGTSSYGAGLTRHLRTQKYSVVEVLRPTRAVRRRDGKSDPVDAVAAARQVLTGEALSIPKDTSGPVESLRGLQITRRQLVMTAAKLMTTIKSLLVTAPDEIRRRYSAMSTLVMVEALSRCRPSADLADPRNGVLLALKTLATTYRDLQKQGTQLEKHISILVEMINPHVTSIFGCGSVVAADLIVSVGDNPGRIHSEAALAHLCGVAPIPASSGRTHRHRLNRGGDRRANSALHRIALVRMHHDQRTRDYVAKRTKEGLSKKEILRCLKRAIVREIYRVLCLGQAVLPTGQVEVDELKARRIERQLSQAQVAEKLGCAPARISDIETGKRPLPELRLAYEELLKSA

SEQ ID NO: 280444 - protein, 364 aa, unidentified
MELHHKRCAGIDVGKKFAMVTIRVAGAGRRRTSYSTKKYLATTPAILALRDDLVAAKVSYVVMESTGQYWKPFYYGMEGAGFEQILANAHAVKAIPNEKSDVSDSRRLADLGAFELVRPSFVPPPPIRQLRDLTRDRTAIMRQRAKLLTRVQEVLEDAGIKLTNVASDVNGVSGRRILEAMIAGERDPFTLTELAKGRLRSKRAALADALTGRFTEHHAFRLTQLLEQTDRLQVTADAYTERIDQALGRYRTFRDLICTIPGVGALTADVITAETGADMSVFASPKRLASWGGVSPGSNESAGVAHQASTGHGNKHLKAALGVVAMSISHTRNNYLANRHHRLMARRGKLKALVATEHEVLEII

SEQ ID NO: 280445 - protein, 371 aa, unidentified
MKKHSKKESKQVRRSASKGQPEVTIGIDVGDQYSHFCILDAAGEIVKRGRVSSTQRGLEKEFGKIPAGRIALETGTHCHWMSEVLSQLGHEVIVADARELKSISGSRRKNDPRDAEQLARLARVDVRLLHPVMMRKRKTQQDRSVLRARDLLVASRTQLICAIRGMVKADGSRLAECSAESFPAQVGAAIPEGLRRALAPLLETLDVLNEKIRYYDQLVTHIAEEEYPETCLLRQVPGVGPVTALYFRLVIEEAQRFQHSRDVGSYLGLVPKQQDSGKSTPELRISKAGDEGARRLLVNCAHYILGPFGPDSDVRRWGLRLAARGGKNAKKRAIVAVARKLAVLLHRLLVTGEVYEPLRNSQAAQRAAAAA

SEQ ID NO: 280446 - protein, 436 aa, unidentified
MFVGHRFRTDPDELDTLWARLPKDAEQIEVVMEPTRNAWVALAAWFRRHGATVVMVPPEQSADLRDYYNKHTKTDRLDSKVLARLPLLHPEGLHREDSLGPGDELKRAVKIRSGLVHRRTACMARLDALLEILGPAWIAALGSDMTLTALRFLARYANPVQVKRLGKARLAAFFRRSSRQAWADERADAVIEAAATTLRLWGADGGELDFDALAADIAAEARLALTLTDEINGFDKRIGALYDKADPAGIVRSVPGAGRVCAPQILGRLGDPTRFANLAAVRSFAGLVPAADSSGQADGHRGPTKAGDSCLREALFIAADHARKVDPTLAVRYQRLMLAGKHHDSAVCTLAAVLLTRIAACLRAGTHYLLRDTDGRVITEAQGRAIVAERYTVPPEVRAARRKVTPHRHPRRNERNERAKTGVATRSKASPVPQPA

SEQ ID NO: 280447 - protein, 387 aa, unidentified
MDATGTIADRFTIAHTADGIAMLIRRLAKLADAADVQIAIERPNGRLVDLLLEAGHPVVPVSPNAIKAWRDGEVPSGAKSDAGDAAVIADYLRLRQHRLRVALPYSDQTRALRTVVRTRTDLVEARVAATNQLAALLDDHWPGAKAVFADLESPISLEFLTRYPTPDAARHLGEKRMRAFMTKHGYSGRRPAAVLLQRLRSAPAGARGEALTEALRDAVLGLAAVLKALNAAVKDLDRSCAAHLGEHPDGEIFTSLPRSGQINAAQILAEWGDCRQAYESPDSVAALAGCTPVTKESGKHRAVHFRWACNKRFRLALTTFADNSRHASPWAAKIYTQARKAGKDHPHAVRVLARAWIRVIWRCWLDGVVYDPAKHGAAAALMEPIAA

SEQ ID NO: 280448 - protein, 410 aa, unidentified
MDVFLERCAGLDVHQASVVCCVLIGAPGRKPQKLLRSFGTTTRDLKALRAWLAEHGVTHVGMESTGVYWKPVYAVLEGHVDLTVGNAHHIKNVPGRKTDVKDAEWIAQLVRHGLVAKSFVPPPAIRDLREMVRHRRTLIETRTAVRNRVLKLLEGANIKLSGVASDVFGVSGMAMLQALAAGTSDASEMAGLARGRMRRKHAALEAALDGRMREHQCFLLGMHLRNLKAIDQDLEALDARIGTQLEPYQAQHQLLTQIPGVDWVTAASIIAEIGTDMDVFASARRLAAWAGVAPGNYESAGKPKGAGTRRGNVFLKSALFAAASAAVRTKGSYYRDKYNRLRARRGPVRAIMAIAHKLLLAAFHMLSTGEAFRDLGEGYLDQVARKRSTTKLVQRLSNLGYDVMLVPKAA

SEQ ID NO: 280449 - protein, 397 aa, unidentified
MYIVGIDIAKRKHEAAVIDGEGTVIIKPFSFTNNCSGYNRLLAMLAKAKLPLDEVSFAMEATGHYWLALFTRLQKEGFRVQVINPVQTNSIRSFYIRQAKTDPRDALLIAEVIRFGHFSESTLHPENIYELRELCRGRHAIVSMQADVKRKVVALLDQVFPEYETAFTNLFGDTSMAILQTCPTPKELSEMPLEELCHLIEVSSHKRFRMAKAQELQALARNSFGFAMAGDVFSTMIRLYAKHLDFLKQQVREMDRKIAEIMDTLDTPITTITGIGPTLGAYILSEIGDISRFSSAAKLAAYAGIDPTMRQSGEYNGVRNRMSKRGSPYLRHAIWLAASSAVLHDPALKFYFQKKRDEGKPYMASVGHACRKMVSIIYAVMRDNKAYTPYIPNEISA

SEQ ID NO: 280450 - protein, 343 aa, unidentified
MQTITTIGLDIAKSVFQVHGVDADGNVVLRRQLKRRYVLAFFQKLPPCLVGIEACASSHHWSCGIQALGHTVRLMPPAYVKPYVKRQKNDSADAEAICEAVTRPNMRFVPTKSPEQQSCLTLHRTRHLFIRQQTATINSIRAHLAEFGIVAPVGRRGVEQLLEIVADPNDDRLPEVARACVAALGSQLLALKAQILAFDRHIMAWHRSNETSRRLDAIPGVGPALATALVASIADPKAFRSGRDFSAWIGLVPKQNSSGGKDRLGNISKQGDRYLRSLFTAGALAVIRYAKLHGTKHRPWLTALLARRPTKVAAIALANKIARMAWAMMTRDERYKEPAALAA

SEQ ID NO: 280451 - protein, 473 aa, unidentified
MSKGSGNGTTRGDRRRNARRERLRGLLPRDGAVIGIDLAEDKQALAVVDHDVRVLARKTVKVKAFRLGEALDWAVAQAKVKGFKQVAVACEPTGPRWMQVQRLCAERGLPLVCIQPLVSHIAREQQDYTPHKTDESDCVLIGRLAAELHCYIPEELDETWAQLRHLGRRRAQLITAATASVQRIGDFLSVTWPVVTEVCAQPFKSVTWLAALQVVTSRCGGDPARLAVMGPEEFTAVVRAAVPAWGGKKGWGTICGRVFAALTDTEGVVAWSRRGLLRRVAGELGDLARTRAQLRAVAADMVMVLSELGLSRLGDIPGLTAVGAAAILAETGDPRRYDSSSSLVKHAGLSPSENASGAFAGQARISRRGRPGLRLTAWRAVWPMLRLNPVMAAKYAAMTQAADAAVASDAGSQPARAAASAARARRAKARVACAASLLRWIYSMVVHGTSWDAAVASGAAACQHAPRCQPEAA

SEQ ID NO: 280452 - protein, 402 aa, unidentified
MIYAGIDIAKSSHVIGAVDERGKDAAKPMQFANSAEGFGKCAAYLEGLGAPAEEMLVGMEATGHYWLPLFSFLHAQGYDVVVINPVRTDAMRRFKGSSRVKTDLVDCILIADTLRLGEFRPSKLGDESMVELRQLTRLHQGLKESVADLKRQVIVALDQVFPEYDSIFSDTFGESSKAFLKKCPTPEECRGVRVDALGNTLSRASRGKLGREKAEEIKGIAKESCGIDRGTRALSFQIKLLVEQIDFIEGQIEEVEARIEEGIETTEPLILTIPGIGHILGAQIASEIGDIHRFRNASAVVSYAGINPSVSQSGKFSSSENHITKQGSPYLRRALYLAATAQLRLSTPFRDYYDKKRADGKSHREALIAVARKLVHVIYAVLSKQEPYRSDAVNANPVSRSE

SEQ ID NO: 280453 - protein, 412 aa, unidentified
MQAIIERCCGLDVHQETVVACLLTGAADARARKEVRTFRTVMRELEALRDWLKAAGVTHVGMESTGVYWRPVYAVLEGHVELIVGNARHIRNVPGRKTDVKDAEWIADLVRHGLIAKSFVPPAPLRELRELLRYRRKLIEAQAAERNRLLRLLETANIKLASVMSDVFGVSGRAMLKALIAGSAAPEEMAALARGQLRRKRAELIEALTGGVEEHHRFLLAMQLGRIEAIEADVAALDARIAERLLPYSAEMALLMTIPGVNWLVGAVIIAEIGTDMSVFLSVHHLAAWAGVCPGSYESAGKQKSGRARKGNVHLRTILVGAAISAARTKGSYLRDKFHRLKARRGALRAALAIAHKIVVAAYHMLARGVVYRDLGEAYLDQIGERRIVANLKRRLERLGYQVTLEPKAEAA

SEQ ID NO: 280454 - protein, 376 aa, unidentified
MKYCGIDLHKKTIVVCVMNKERTVLMRKKFFCVDVKGILAWFGSLGEFSFVVEATATYEWLVQLLEPLASDWKLVNPGKMRVIAESTKKSDKLDAQVLAEFLALGMIPESYRPTARQREHRKLVRYRAQCQQRLTRLKCQIRYMAASYNADHRQLFQAERLEEFRARPDLTEGDRFILRERLQDYDEALKRLQAAKAELKAFTAKGSAAEQKAREILRSAPGVGVVVSEILLAEVGDGNRFGSLKDAAAYAGLAPGKRESDGKRKDLPITKKGSRLLRWAMVEAAWAAVAHSARWRGVYEALKRRRQAKRAIIAVARRLLTVLVSMLKSGTMYRASLAELREKEALAVLRANKKRAAKSKKEAAKAAKGAKEATMV

SEQ ID NO: 280455 - protein, 391 aa, unidentified
MERNPMQKLNDLSRSLTPLKPDGTPIAVIEMSLSSWLVAGIVPGVERQPLKKLEVDESTLLKLLIRWQEEAKKSGHSIERIAVAFEAGRDGFWLARWLRARDIEAHIIHASSVAVSREHRRAKTDRLDTELLKRAFLGWLRGERDHCKMVAIPTIKDEDAKRPNRERESLVGEQSRIVNRMKAALVRLGIRGFNPKLKKAVERLDGLRTPEGEPIPPNTLAELRRDMARRRLVSDQIRQIEDARLERLEQAPRDGPHAMARLLARVIGVGIETADMLVQEVLSRNMRDRRAIARYAGLTGSPDESGRKRREKGLARSGNARVRRGMIQLAWRFLMFQKDSTLAQWFRARTENARSTRKTMIVALARKLLIGLWRLVREGVVPDGVVLRPVS

SEQ ID NO: 280456 - protein, 476 aa, unidentified
MVVPNEEPKTPTKPKTPTKPRKSRERSVPVPVPASATALNIINPDAAGIDVHSNMHMVCVPADRDANPVRRFGANTADLQELAAWLKKCRIKTIALESTGVYWIPLFELLESQGFEVNLVEPGQLSRCGARPKTDVLDAQWIQRLHSYGLLRASFRPPDSVLALRAYWRQRQMQVRYAASHAQHMQKAMEQINVKLTQVVSDITGVTGMLIIGAILEGERDPVKLAQLRDERCQHSEQQIALALQGTWRPEHLFELRQAYELYQFHHRQITECDQQVEAELANLPNRAGEKTHSVKPRKRGRKSNDVRFEATGPLFQALGVDLTLIDGIEVGTALVILGEIGVDVSRFPTEKHFASWLRLCPPQNQSNKTNRSRRHRQGTSRVTIGLRMAAQSVGRTMTPLGLFYRRIRSRIGGLGAVKATAHKLACLVYRMLKYGQEYVTQSMEEYEAKVRANILKSLKRKAAALGFQLSPLPTQ

SEQ ID NO: 280457 - protein, 353 aa, unidentified
MNRSANLSEQIYCVDLAKNKFQVHAFSPGGECLQRLTLSRGKFDAFFKNAAHAGAWVVMEACASGHYWSRCFQARGYRTKLVPAQFVARQRIGNKTDGNDADAIFAVHRDPRVRPVPVKSPEQQDLCALHRVRELLVRQRTQYINQARGLLAERGCVAARGEGGMAHLLAQIARSTSADITPPLAELIQLLAAQIHALNAQIGGLETRLQDALAHSAVAQRVDSIFGVGTLTATAFAAEYDANLARFADARQFAASLGVTPSEDSSGERRRLGAITRRGNPYLRKLLVQCAQVILMHAATRQDALCVFARRLMERHKRRHTVIVALANRLARIIYAVIKHDTDYHPHGRAQPV

SEQ ID NO: 280458 - protein, 311 aa, unidentified
MQDIIGIDISKDRLDAFRLSDRQHNAFGNDKAGFKALLKWIGSAEGLRIVYEPTGPYHRGMEAALADGGHALVKVNPRQARRFAEATGTQAKTDRVDAMLLARMGLALDLPPRPVRGELMNELRELHVARLALIKDRTATGNRADTATIGLIRRQAKARLAIIEKQLAEVDEAITARIADDPDLAERLGILTSIPGIGAVTACMLLIEMPELGTLEPKQAASLAGLAPFTRRSGKWKGKEMIRGGRASLRAAIFMPALVAIRFNADLKRKYQQLIDGGKAPKLAITAVMRKLILLANALLRDGRKWADRPT

SEQ ID NO: 280459 - protein, 432 aa, unidentified
MAKRKKSTFERLSRGGLNRKQRRDLGRRLAGNDPGLTIIHPNAGGIDVGNESHFVAVPPDRDANPVQEFGCWTADLKRMAEWLKSCRIDTVAMQATGVYSIPLYDILTGHGIQVVLVNAQHSKNVPGRKSDVQECQWLMKLHTYGLLRDSFRLEESMEGVRTIWRLRDRHVKDASRAVQHMQKALTKMNIQLANVLSDITGVSGQAIIAAILEGERDPWKLADLKHEMVKASREEVARSLEGNWRDDLLFELQQAVDSYHFVHQQMRACDRLIESFLASLPTKILERPPQPDGPPAATAKKAKKPRKPKKARHNQPTVDLTTQLKRICGVDLTSIDGIDVITAQTIVSEIGTDISKFKTEDHFASWLGLTPAKDITGGKIIGPGRRKVQNRIAIALRMAASCSGVGMMISLFPVFLISASASSFSLADWPLP

SEQ ID NO: 280460 - protein, 413 aa, unidentified
MNRYCGIDWAEGHHDIAIVDQDGALVSKKRIGDDPAGFAALTEMLTAAGDTAEEPIPVAIETTRGLMVAALRATGRPVYAINPMAVARYRERHTLARTKSDHADAMTLANILRVDAHVHRTMPADSELAQAIAVLARAQQDAVWRRTKASNELRSLLREFYPVFLATFADRSSTNLAKPEVRAVLAIAPTPTSAAKLTKTRVAAALRRAGRKRGIDERAAEIVKQLRRPGLRQPTPVETAMGRHVLVLLAALNAACVGADELEEAAAEEFRKHPDHAIITSFPGLADLAGARVLAEIGDDRNRFATARSLKAYAGSAPVTRASGRSISITHRRIKNDRLAATGWVWAFAAAINRGPAREHYLRRRAHGDRHSAALRHLFNKMLGQLHYCLRTDQTFDPVKAFPGPKVREPLAA

SEQ ID NO: 280461 - protein, 405 aa, unidentified
MAAIEAGRTDVVVNEVAGRGLAHNIRGLPAGRPCWPIQHLWEAPVFTERTSVGLDVHARSVAAAAIDAVTGELVRAKLTPSHEHIRSWLGGLPGPVAVAYEAGPTGFGLCRALRANGIRCEVIAPSKVTRPAGDRVKTDAKDAMLLARLLRMDELTSVSVPTAEQEAARDLVRAREDCRTDLMRARNRLSKLLLRHGIVYSDGAAWTDKHERWLRRDAYGQLTGTATRSVFDADYEAVLVVTARRDRLDTQIEAMAADCEFAPLVRRLCCLRGIATLTGFALAVEIGDWTRFTGASIGSFIGLVPTEHSSGASRAQGRITKTGNGHVRRLLVEAAWHHRTRYVIGKTMQDRWDGRVPWSGVTRRVCSASESDYAVAAISFRWLVFLGSRKVRAGGLSSAMDSSLR

SEQ ID NO: 280462 - protein, 409 aa, unidentified
MQVVHEVCCGLDVHKKTVTACVLWAVGRRRQIREFGTFTRELLELADWLRSSGVTHVALESTGVYWKPVWNLLEGQFEVLLVNAQHIKAVPGRKTDQKDSAWIADLLQHGLLRPSFVPPTPTRELRDWTRYRASLVQEINRIANGIQKVLEDANIKLASVATDALGASGRAMLEAMVKGEQDSQRLAEMSRGLLRNKIPELQQALEGRVTGHHRFLLRELLDHLYFVESKIRRIEQEVEERLRPFQSEMARLCTIPGVDRVTAWGLLAEIGWNRKQFPDAQHLASWAGLCPGSHESAGKRKSGKIRKGSLWLRRCLCQAAWAVSTKKNNYLSALYRRLATRRGVKRATIALAHNLLVIAYYILRDQTCYQDLGPDYFDRLNPEGLRRRLTKRLEGLGFKVTLQPLAQVA

SEQ ID NO: 280463 - protein, 412 aa, unidentified
MKYYTSTTEYNCGIDLHARQMYVCVMDRQGKKLVHTNVLNNDFEYFLKLIEPYKHDLTVCCECMFGWYWLSDACHKAGLPFVLAHALYVKAIHGGKNKNDRIDSEKLTHLLRSNLIPPAYVYPADKRPLRALLRQRVFFVWRRSELLARIYSHQLAHNRTPARQTRRVRDSWEEALLAAEDHPLRQITLKNDLAMIKHFDHQIFQLEEELQRQTKKVAGRDYELLQTVPGIGESLGQTILYEIGDIQRFPTVKDFLSYCRLVKGTVASAGKIKGLRGAKLGNPYLRWAFGEAAVIAKRDHYLVGPLSQRLEQQMGGNKFKSNTVVAIKLARAVYFMLKNKTVFDPERLVTSMQKCFSPGRRQPAGLTGCAKKARPLPAADHASCASSTPVCVGPASNPAASIGTCGQALPPI

SEQ ID NO: 280464 - protein, 370 aa, unidentified
MLDTTTFVGLDVHARSIKAVSLDVMTGEVRCATFGYDAGAVAEWVRSVDPGARCVYESGVTGFDLQKRLSGLGVDCVVGAVSKMIKPSADRRRKNDRNDAEFLARMLSVGNVVEVWVPDDECEAARDLTRALEDARDDLSRSKQRLSKFLLRHGLVFDERTPTGRRKGNWTRAHWSWIESIRFAEGADEEVLAYYVEAVRRAAEEKARLEGLVGAEARKPRWRRRVESLRCLKGVDTASAADLVFEAGEFSRFRNARSFAAWVGLTPSEHSSGESDRRGAITKAGNKHLRKTLVEAAWHYMTCSGRPKDLAKGQVPDRSARRHAAKGVRRLVDRREALLARGVHGSKANVATARELACWVWAVGLMAEGA

SEQ ID NO: 280465 - protein, 475 aa, unidentified
MNVKGTKKKNQVVTANIFEQQELLKKAEAIKESLTASTWRELETNGKFDKNEKLSFISDDMLILGCDVGSETHYMRAIDTRGRELSKSVYSFNNDSEGFRSAKEWAVQIAAEHNKSQIVLGLEPTGHYWFCLAAWMISNGISVVQVNPYAVKQTKEVEDNSQMKDDRKDPKLIANLVKDGNFGMPYLPEKLYAELRRLSMFRDQLNEDRTRTINRMHREMKIYFPEYKDALGKVDGAFSLELLRQAPFPDDLISLGEDGIRKIWHDARLRGRGYSRAGEILQYAKVSVGIKDGAIAGKAAVKWFVQKILELDAELAVIENQINQKCQEIPHAGNILEISGIGENILSGILAEMGDISRFDDVKEIQKLSGLGLVACSSGKHKGETRISHRGRKRLRYWLFQAAKSAVAHAEEFKELHIYYTTRADNPLKKMQSLIVIACKLLRIIYTILKKGIVYDPKKMLMDIRRVEKKEAIVA

SEQ ID NO: 280466 - protein, 396 aa, unidentified
MTKHATDQPGRLTRSLTQIESALLPDSLELSDFKQKEGAATMRSTAIQYVGIDVHQATLVCVVKDETGQTTMESKVATRREAIESFIRGLGGRVRIAFEEGSQAQWLYELLRPMSERVIVCDPRKIATKGNKDDQRDAERICELLRLNALQPVYHDHADQKLKELVRCYEALVDDSLRVMLRIRAIYRSRAISVKARSVYHPARRAEWLEQITDGCGRFRAEQLYIQLDHLLELRRRARTMVLRQACNQRAYRLLRTVPGIGPLRAAEIIAIIGDPHRFRTKRQLWAYAGLGVITRSSGEWIADSRTGRIRRSSRPPLTRGLNRNFNRPLKKIFKMAAHDVTGRPGELDQSYERMISRGMRPEMAYLTLARKIAAIVLAVWKKGASFDSRLIAQSV

SEQ ID NO: 280467 - protein, 384 aa, unidentified
MGNQTFIPRDYDVFAGLDVDKRSIAVTFTDHQGLVKSLRMPYNVEHLVNHVRKHFPNQKVAFAYEAGPTGYGLYDGLVAQDFRCLIASPSMIPKAPGQRVKTNRLDSVGLSENLRGGQLKGIHVPTPLYRELRHLTQLRDTFVSEMVGMKQRIKSLLLMEGMEFPPAPAGSQWSFMVKDKLRKLPCFSIVRFKLDQLLDSLEFNEKQVFKTTREIRHFCQNDPELSQCIEYTMSVSGIGWIVASQLLARIGDWRELKNIRQLAGFLGLVPTEHSTGERTDRGSITHTGDERLRSKMIQASWSAIRKDAELREFFRLICHRHPRRQGPRVAIVAVARKLSVRISVVLMKQRPYVVREKVHSAPLTQEETSSQGTTRRQAEPGDNS

SEQ ID NO: 280468 - protein, 437 aa, unidentified
MEGRAKRGKNQKQQQKTMNESDQWQQPRAFGALDWASEKHSVIIVDQAGKVSEQFEIEHSALGWKKFREKLQPYGSIPFAIETSQGAAVEQLLEAGMIVYPLNPKSAQAYRERKAPSGAKDDWLDAWSFADALRVDGQGWKPLRPEGPLIKELRLLCRDEVSLIEQRTAFINQLRHALAEYYPAALEAFEDWTSVSAWMFLQRFPSPELLAQAGKRQWQKFLHSRRLWGSDQGPRRMEIFAHATEFAGSPPTVKAKSLLALSLVQMLFAIEKQLALYRQRIEALFARHPDHDLFGSLPGAGAKIAPRLLSEIGDDRERFGGEAQNLQCLGGTAPVTKRSGKQRKYWPVHQRWACDKHLRHAIHLFAEQSLSRCVWANIYYQHHRQKNQSHANTIRRLGHRWLKIIHKMWIDRTPYNAELHHRNQLQHGSWIFQLNQS

SEQ ID NO: 280469 - protein, 356 aa, unidentified
MEQFIGCDAHKKYSVFVAVNEHGVSGKAIRVDHCREDYRKFLNALPGNSVIALEAGGHYYWLVDEIQRAGHQAKLANPLEAKKRMGHVGKKTDKADAEGLAILLRNGTLPTVWIPPAELRDQRELLRLRMFLVRQRTQWKNRIHGALARYNVALASKDVFTQIGREELGGRLDDLPRHTRASVESHLTTLDFLELQIQDVEHQLSAIMAPCSEADLLKTMPYVGRILSAVMALEIGAVDRFPSPAHLASYAGLVPRVHSSGGHTRLGQVCGNVNRYLKWAFVEAANVIVMHQQRLGDSHAVGLYQRVKRKQNHAKAAVAVARHLAEAAYWILTKQQPYQEPRKAPRAAQCSTSTHG

SEQ ID NO: 280470 - protein, 468 aa, unidentified
MSRKGKRTKGSEQAHPFAGLSKVNPHAAGVDIGAEEIVVCVAANESTQLVRGFGNYTVDLHAIADWLSEHEVKTVAMESTGVYWIPLFEVLEGRGFECLLTLAPHASAGVSSRSLRRVSGRKSDITDAQWIQTLHSYGLLESSFRPQADLVGLRSLLRHRRSLIDHRSPHVLHMQKALLQMNIQLSQAVSDVTGVTGQAIMRAILAGVRDPQELAALREPGCKKSEEEIGKALTGTWREEHLFVLKQAVALYDFYTQQIQECDEEIERMYAETRPDWDGGELKPLPARKRNSHSKNRHHETEKIRGHLKRISGVDISLVDGMGVSLAQTVILECGTDMLKFPTEKHFGSWLGLAPKHEISGGKVLNNKTLKTKNRAGQAFRMAAQSVKQAECAFGVLYRRLRARLGPAQATVATAYAIARVVYRMLKYKVEYDPLSVNEYQQRYEEQQIKYMKKRAAKFGLQLVPLPA

SEQ ID NO: 280471 - protein, 355 aa, unidentified
MSQEKYIGMDVHKEAVVIAVLNNSGKLVMESIVETKASSLLQFIHGLQGELHVTWEEGTWAAWLYDLLKPHVHQVLVCDPRRNALLKEGNKSDKIDAQKLANLLRTGMLRPVYHGEHGLRTLRELARSYHTISQDLIRVMNRIKALYRGWGIACGGTQVYAPRYREEWLGKIEHVGVRRRAELLYQQLGDLQTLRRTLRPELLAESRKHKATKLLRQIPCIGPIRAARLLALMQTPHRFRSKRQLWTYSGLGIETRDSAQYCFVRGKLQRVKKPQQIRGLNRNHNHEMKDIFKGAATRASCGVGPLRGFYVALLDKGMKPEMARLTLARKIAAIALTLWKKEACFDAEQLKPQAA

SEQ ID NO: 280472 - protein, 321 aa, unidentified
MNKNTEIFGIDISKDVFDVYSHQKGHQSFKNDAQGFKSFLKVITKDALVVMEATGYYHYLFAQFLHKKKVQVSVVNPLSVKRFIQMKLAKVKTDKSDAKAICEYGHMNEVPLYTALTDVQAECLQLFRLLDNYLKKRTQTKNKLHGEEVLGIPSKYVYGSLKRDLKHLDKEIKGIEARLLELVKQDQQHQLTLLKSIPGMGMKTALFLIVVTDGFSKFETASQLCSYVGITPTIRESGSSVRSRSRISKVGNKKLRNLLFLCAFSACKHNKACREIYERIVNKGKSKKLALIAVANKLLKQAFAIAKSGRPYDENFVSKLA

SEQ ID NO: 280473 - protein, 387 aa, unidentified
MSQTIAAPIPAAVDYERTLVLAIEVSNKSWVLAAQVPGLPHTKAKRTINPEAEALLAAITGYRIRAAAAGRSIERVVAVYEAGWSGFWLARRLMSCGVEVYVVQPSSVPIDRRMRRAKSDGIDSELLLRTLLAWLRGEPRVCSMVPVPDEADEDARRCVRERTELISERIGLTNRIGAVLATLGVSDYNPLLRNRYRRLAELRTGLGEPLPANAHAKIKRLLARLELVLTQIAELERERDAVMETEASDKASRMIRQLAGLRGIGVQSATVLVREAFVRRFANGKALGSYAGLASSPYSSGGIDREQGIGKAGNRRVRTVMVELAWLWTRYQPAAAQVCWFRDRVGSTGPRVRKIMVVALARKLLIALWRFVIDGVVPEGAVLKPAA

SEQ ID NO: 280474 - protein, 312 aa, unidentified
MTECCAAGIDVGRDFFDVGLAPSGQVFRTANGAKGVETVVARLRRAGVVRVVLESIGGYAARLVRGLAEAGFEVGVIDPKRIRALRIAEGRKAKTDRLDARLIARFALIMQDAARPVPGAKAFEIRSLSTRRRQLVEMAAMEKVRLKQTLDEAVAASCRQIIAWLTEERARVEDLLQAELLAAADGAARSRLLQTIPGVGPAVSMTLLADLPELGALDRKAVASLAGLAPHPNQSGTRTGQAHISGGRPCVRAALYMAAVSATRSDAGFKREYLALRQAGKPAKVALVAIARKIAVAANSMLKAHQPWSKPA

SEQ ID NO: 280475 - protein, 338 aa, unidentified
MNSVTLLGIDIGKNSFHLHGQDVQGHQVLRKKLNRRQLLPLLAQMPPCKVAMESCGGSQFLAREITKLGHQVQLIAPQHVKAYVTGNKNDFIDAEAICEAASRPRTRSVQVKSVDQQVLSTVHKLRKSLVSRRTGVINQVHGFLLEFGVIFPAGYAALERVPALMEEHNLPLRLRQAINRMLDDIRQLTSEIKALDTEIKQQVNMSDAGKRLQSVPGIGPLIASALVADVGDASMYKSSRDFSASLGLVPRQYSTGGQTTLLGISKRGDRYLRTLLMQGAQTLLYRIDKRNDALGVWARSLLARKPLNKVACALANKMARIVWALLTKGGTYNGHFTA

SEQ ID NO: 280476 - protein, 346 aa, unidentified
MEYYVGLDVSLKQTSICVVNRTGAIALEAVVDSDPEAIASFVRSKAPGTVRIGIETGPTTTWLWTELKRLGLPVICIDARHAKAVLKMQINKSDRNDAAGIARIMQTGWFKEVRVKDLGSHAVKALLASRALLVKIKRDLENQVRGLLKNLGLVIGRAKFNVFAVRAEGLIENRPELVAAVRPLLEARKAIEQQVADLDRKVLKLARHDAQVRRFMTVPGVGPITALCFRATIDDPTRFKRSRSVGAYIGLTTRRHASGEIDWSGRISKCGDAMLRMYLFEAAGVLLTRVPKWSGLKAWGAKLTKRNGLRKAKVAVARKLAVILHRMWIDGTEFNWSTKKAAAEHA

SEQ ID NO: 280477 - protein, 342 aa, unidentified
MSIVYVGLDMGSSGFQQVAIRADGAMMLNRSFTTSEANLHSAFADQRGEIHVHLEAGELAPWAASVIAPLVTRVVCSHPKDNAWIAKDADKCDRVDAYKLAELLRLNRFKEVHYAPDQPRRNFKQLVQHYDELTGQQARLKTKIKARLRMQGVIVTGERPFSSKGRKEVLARVASPDLRTAIAQLYQVLDQSVVAQEQARLLMLRAARAFPEIKLFRTAPGVGPIGACRFSAYIHTPSRFSSKRKLWKYCRLSVSHRSSNGKPLRRPRLDRSGCGRLKDVTRKAFDVAVRSRHDNGFKRTYQRALETTHDKTHARLTVQRKIVSILRAMWITRTPYCDELSR

SEQ ID NO: 280478 - protein, 403 aa, unidentified
MNSVGIDISKGRSTIAVMRPFGEVVISPFEIRHTGSELSKLARQLKSLDGETRVVMEATGNYHAPVAKLLHDAGLYVSVINAKLVHGYGNNDLRRVKTDRKDAVKLANYGLDRWLTLPRYVPEEDTRLLLKNCYRQYRQYSKVQTVLKNNLISLLDTVCPNANRLFSSPIRGDGSEKWVDFVAEFWHCRCVSEKSQKAFTNKYQRWCRKHGYNFSEAKAHTIHAETCGHIDVIPKSETTKLLVEQAVSQLRATSTALAALKHEMQSLASQLPEYPVVMDLFGVGPTLGPQLIAEIGDVRRLYSKKALVAYAGLDAPPNDSGDVTGRHKSMSKIGASSLRRTLFLVMSVYLQTAPLDEPVYQFMDRKRAEGKPYRVYMMASANKFLRIYYATVKAYLESLEHTA

SEQ ID NO: 280479 - protein, 324 aa, unidentified
MIDGILGIDVSKNTLDVSISSCTKVRTKSFANSSDGWHHLLDWLVAQKIQRVHACLESTGRYSLGIACSLYEAGHVVSIINPAQIRDFVRTKLGRNKTDGIDASRIREYCELFKPSPWAPPSEAHRRLGELQTIRAGIIAGLTEWKNRKNSGIVDTEAQALADATILHFTSQLGAVDKAIALTIDNDSDLRSKRDLLLSINGVGDTLAGVVLAELPGPDVLRSSGEVVAYAGLNPRQHQSGTFVDRATRISKIGNAILRAALYMPALSAMRYNPAIVALVTRLKSRGRLKPKQIVVAAMRKLLVLCFGVLKTGKPFDPAITMGC

SEQ ID NO: 280480 - protein, 449 aa, unidentified
MMEPQEIEDEGHEQILERVAAVDVAKASGMVCVRVPREDQPGRRRTRVWQVEATSGAVLELADHLVRERVQKVTLESTSDYWRIWYYLLEAAGLDVQLVRAQDVKQAPGRPKTDKLDCVWQAKCTERGMLRPSFVPPAEIRQLRDYTRLRADLTGERTRHYSRLEKLLEDALIKVSAVASKLDTLSVRDMLEALIAGERDPKVLAGLARGKMKAKHDRLVEALTGKFDDHHAELARMLLDQIDALTAQIGKLTARIEELIAAIPAAQGIDADGTTGPAAGRGEGAPVLPAVDRLDEVTGIGRGGALVILAEIGLDMTRFPSPAHLVSWAKLSPRTIQSGARSRAGRTGKGNPYLKGILGEAAAAAAKTDTFLGERYRRLVKRRGKLKALVAVARSILVIIWHLLADPTARYHDLGSGYYASRIDKQRKIGSHIRQLQALGCTVTITQAA

SEQ ID NO: 280481 - protein, 381 aa, unidentified
MTTAATPHKYSNTTEVTLFVAFELSEKTWKLGFTTGHGQQPRERTVSARQQERVLDEIAQAKRRLGLPDTAPVVSCYEAGREGFWLHRFLQAHEITNHVVDSSAIEVNRRRRRAKSDGLDVRKLLSMLMRYHHGERHVWQVVKVPSVEAEDQRHLHRDLETLKQERASTTTRILGLLSSQGLRVTSLTKLPEQLEALRLWDGSPIPPGLRRRVLRVYAHHTFLSEQIAAVEAERHAQLQASTDASLAKIRQLMLLKGIGINGAWLLVMEFFGWRAFKNRREVGGLAGFTPTPYQSGESAREQGITKSGNRHVRWMTTELAWSWLRFQPDSALSCWFRERFGGGGKRLRRIGIVAVARKLLIALWRFLETGVLPAGAVLKEG

SEQ ID NO: 280482 - protein, 404 aa, unidentified
MMTQPDRNVTGGVDTHLDDHVAAVVDGIGRILATRSFPATSRGYCSLYRWIGSFGTIDKIGVEGTGSYGAGLTRLLQDCGVEVIEVNRPNRQARRRRGKSDTADAEAAARAALNGEATAVPKAGDGAVESIRMLRLTRRSAVKARSQAGNQIHNLIVNAPHELRSRLQPLELADCVQTCARFRPADVDSIATAAKTALRSLSRRWQALSDEIAELDIQIDELCATTNPALMGTLGVKGEVAASLLVAAGDNPERMHSPAAFAALCGASPVEASSGKIVRHRLNTGGNRQANNALWRIVMVRLSCCSRTQAFAARKRAEGKATKEIIRILKRYVAREIYHLLTNPPQVPSGTDLRDQRNALNLTLANVAHGLNTNTSRISRLEREENRNNQLAATYQHWLDQQTA

SEQ ID NO: 280483 - protein, 373 aa, unidentified
MKKVSTAATKQSRNFSEQKLTIGLDLGDRSSHYCVLDESGGILVESKVSTSPHAMQGIFGSMPRSRIALETGTHSPWVSRLLSELGHEVIVAHARNVRLIGESRRKDDRLDAQTLARLARIDPQLLCPVKHRSARAQADLTVIRARAGLVRARTALVRARTALVNTARGLAKSYGERLRGCNVRNMNAEKADALSPELQTALQPLLVGIEMLSEQIHEYNEHIEKLAEESYPQVELLKQVKGVGTLIALTFLLTLEDAHRFKKSRDVGCYLGLQPGRRNSGQSEPQMHISKEGDPYLRTLLVQGAQHILGPFGADCDLRRWGLKLAERGGRNAKKRAIIATARKLAVLLHHLWISGEVYEPLHNHQCAIAAAA

SEQ ID NO: 280484 - protein, 402 aa, unidentified
MNAVGIDISKGKSTVAVMQPLGVVVAEPFDVFHTDSDLNNLTAFIKSLPGETKVVMECTGTYYEPVANALHNAGIFVSAVNPLLIDDYDTNRVRKVKTDRLDAIKIASYALDKWSKLREYRPAEALRKTLKIMNRQYIEFGKMLVMQKNSLSALMDSLFPGANTLFCSPTRKSDGHEKWVDFVLKFPHVDSVAKLSLSAFKAKYQSWCKKNHYNYSDDKAAQIHAYSRNQVSTLPLTDAVAKIVAEAVKMLNTTLETRSTLRIEMDKLSSQLPEYDTVMSLYGVGKVYCSQLISEIGDIDRLKSAKSIVALAGIDPPPNQSGKADPKSRKISKRGSPALRKILFQIMIVYLENSPADESVYQFIDKKRAEGKPYKVYMIAAARKFLRIYYARVKEALALQNT

SEQ ID NO: 280485 - protein, 343 aa, unidentified
MYFIGIDVSTKESALCILDSNGKIVRETKLPSDPEIIARFITDTGLAIERIGLESGCTAAWLFAGLQRYGWPVICIDARHAAAALQAGFRNKNDRNDARGIADLMRVNKYRPVWVKSPEAQRQGRLLTARATLQSQLVALENTIRGLLRQEGIGLTDRRTAFEAAVREVIAEDRLLHAAVHPLLETRNAVLCQRAALDRQILLIVRADPVCRLLMTAPGVGALISLAFKVAVDDPRRFSRSRNVGAHFGLTPREHSSGELRYQGRISKMGDREVRRLLYVAASRMLRRDAALWCPLKAWAVRLAQRVGIRRARVALARKLAVVLHAMWSDGQVFQWRRTEASA

SEQ ID NO: 280486 - protein, 336 aa, unidentified
MLYVGVDLHRKASQVAVVDEQGKLIFNRHVPSQREELLRIFGEAGPVESMQVAYEATYGWGWFADLLEDVGIPAHMAHPRANKAIASARVKNDAVDAKTLAQLLRTGLLPESWIAPPEIREARRLVRMRTAMVRIRSRLKNQIHALLADRGLHPEGSDIFAGDLTRMSKQLPAVTKQRAEANLRLIEELDKEVDLADSHIHKLFARDEGVRRLLPIPGVGIITAAIVVAEVGDIARFPSARQFSSWCGLTPTEHSSADNIRRGHISKQGSRWLRWVLVEAACHAYRNRELSSFEAGIASRRGDKIARVALARRIATLCYHALRSPQGCRAFPARTR

SEQ ID NO: 280487 - protein, 343 aa, unidentified
MEYYVGLDVSLKQTSICVVDQAGLVVREGVVGSDPEAISVFVRSKAPGAVRIGLETGPTSTWLWTELKRLGLPVICIDARHAKAVLKMQINKNDRNDAIGIARIMQTGWFKEVHVKDIDSHSVRALLASRALLVKIKRDLENHVRGLLKNLGLVIGRATFNVFAVRAEELIEDRPDLVAAVRPLLEARNAVEQQVSELDRKVMKLARRDAQVQRFMTVPGVGPITALAFKATIDDPARFARSRSVGAYVGLTSRRHASGEIDWSGRISKCGDGMPRSYLFEAAGVLLTRVPKWSTVKAWGMRLAKRNGLRKAKVAVARKLAVILHRMWIDGTEFNWSKKEIAA

SEQ ID NO: 280488 - protein, 406 aa, unidentified
MTENSQLLPSQRPVVGIDIGKRRHAAAAVSADGRSFGKPMAFGNDRAGIDRLDERLLIPLKTDAPVLVAIEATGHYWMCLYFELVRRGYDCVVLNAIETNKKQHRRIRKTKTDKIDARGIARFVREGDFGRSRIPDVLTFEMRYLVRHMWRLQGLASQLQLSATSLVDVLFPEFTTVLSTPWLKSSRALIREIGLSPAKLLESPEKTCALITTASRGQISSAKIEKLMDCARHSIGIGRAETVLNGQLRNSLLLIEVIEAQIKDIDVELERRIAALDSTLSTIGLSTHTIATIHAECDPVSDFTNARQLVAYAGLDPTVFQSGSPTQRSGRISKRGSRRLRQALYLAAMGLVFREGVFQDSYRRARKKGKHHVAALVAVAGQLTRIVFRMLRDKQVFDPNRKPTAR

SEQ ID NO: 280489 - protein, 369 aa, unidentified
MNKPITSFVALDTHAESIAIGVAPTGRQEPHFVGTVPAQWGALSKALGRLGKREALQIVYEAGPCGYTLARQLRAHGYACEVIAPSKVPRRPGDRIKTDRRDALLLARAARAGELVSVTIPDERDEAIRDLCRAREDAVRARLKARQQLKAMLLRHGRRYTGRSSWTAAHEMYLASISFKYPAQDIAYAEYRSAVREANQRVENLTQAMSAQLEHWRMRAVVEALMTLRGIDRVAAMTLVGEIGDFTRFAHPRELMGFLGLVPSEYSSGSKRSQGKITKTGNRHARRVLVEAAWNYRFPARMSAILQRRQEGQPTAVRQIAWRAQLRLVKRYRHLSARKLTPNKICVAIARELSGFIWDIARQVKPLAS

SEQ ID NO: 280490 - protein, 344 aa, unidentified
MKHYAGLDVSVRETSLCIVDEAGRICREMKVVSHPEDLLAVLCDPAWRLERVGLEAGPLSQWLFSGLAEAGVPAICIETRHAKAFLKAQVNKSDRNDARGIAQMMRVGLFQPVHVKTLASQKRRALLAARKILQEKALAIENDIRGLLRNFGLKVGIVGVVGFEQRIHDLVEGVPELADIMEPLLAARRVLREKFAKLHRKVLLLARDNEVCQRLMTIPGVGPVVSLAFISTVDVPARFRNSKAVGPSLGLTPVLNQSGESHRVGRISLCGDEAMRALLYEAAQVMLTRVQKWSWLKAWAMNIAKRRGQKKAIVALARRLAVIMHRMWSDGTEFRWTREMAPTI

SEQ ID NO: 280491 - protein, 411 aa, unidentified
MEAIVERVAGLDVHQKTVVACVLSGAAGQRPKKEVRTFGTTLSDLVDLRAWLLAHGVTHVGMESTGVYWKPVYAVLEEAELELIVGNAHHIKNVPGRKTDVKDAEWIGELVRHGLVAKSFVPPKPIRELRDLMRYHRKLVNVRSGERNRLLKLLETANIKLSSVATNVFGKSGMAMLEAIADGQDSGERLAELAQGLLKKKKAALGKALEGRVAEHHRFVLRMQLDRLKALEADLAKLDAYVAQKMEPYQSQERALQEIPGVGRYTARALIAEIGVDMNVFKNEHRLAAWAGVCPGNHESAGKRLSGRTRKGNESLRTALVEASMSAVRKKDSYLRSKYYRLKARLGVKRAAVAIAHKILIAAFHILADGTVYEDLGAGYLDALSKTRTSKHLVRRLEALGFRVAIAPAAA

SEQ ID NO: 280492 - protein, 367 aa, unidentified
MEEVITYVGIDAHKRELHIAMLIGSATVPVTWPVPNEPKAIERLHRKLKREAPGAVRVCYEAGPCGYALQRQLTKGSVSCVVIAPALMPRKPGDRVKTDKRDARKLAELFRAGLLTEVRPPTPAEEAVRDLCRARDDAREDVQRARHRLGKLLLRRGLHFAGRKNWTNAHRQWIRTIQWEHVAERAVVDDYLLAIQQVESRLEDLDARIAETAQTEPYREPVAWLRCFRGIDTLTAMIILAELHDFRRFPNARALMAYLGLVPSESSSGERHRRGRITKTGNTFVRRVLIETSWHYQHRPGVGPGLAARRKGQPTRVIAIADKAQQRLCRRFRRLTAEHKPAPKVVVAVARELAGFIWAALQRPTAA

SEQ ID NO: 280493 - protein, 368 aa, unidentified
MNKVCYIGLDVHKETIVIAVAEEGSAEAQVLGVFPHDVPKIIKRIAKLGGDPSRVRICYEAGPTGFGLCRRLQQAGYDCVVVAPSLVPQQVGLRVKTDRKDALRLAHFLRSGDLTAVWVPDEETEALRDLERLRDDAKNAERAARQQLDKFLLRNERVFRDGRHWTIKHLTWLRQQKFDNPIKQCVLDDSLPAVEGATERVTRLSRDIARFVDQTALAPLVKALQALRGISVLSAVIIAAEIGDLRRFQSARQLMAFLGLVPSEHSSGQTVRRGPLTRTGNVFVRRILVEAAQHYRHRPRLSVALRKRQQGVSTEVCQISWKAQHRLCARLTYLTEKGLPRNKAIVALARELAGFVWAIGQVPEPLAT

SEQ ID NO: 280494 - protein, 337 aa, unidentified
MIVIGVDVHKHSFSAVAVDELGRQLDCLEGSDGEELLAWSKQVGRRRLWAIEDCRHVTRGLERTLQRERQRLVRVPPRLTAPERRRGRTRGKSDLIDALAVARAALREPVLDSPRPEETRLRELKLLVDHRDDLVDERRRAQQRLRWHLHELDPTLQVPLGALDRAVWLERLTRQLARRERTTQVRIACELINRCRSLTRSITALDRELHTHTTPLAPQLLELPGCAALTAAKLLCEIGPIDRFRSDSHLARHAGVAPLDASSGKHQRHRLDRGGNRQLNCALHRIAVTQGRVHPPARAYLERKQAEGKSRREALRCLKRQLARTVYTTLKNDPLLT

SEQ ID NO: 280495 - protein, 424 aa, unidentified
MNLTQNDRLKQVTSDTLIVGVDVGSQTHFCRAFDWRGFELSRRVFKFSNTGMGFLTFLRWTEEIMNKTEMKKVIVGCEPTGCYWLTFQKFLQDHDVQLVTVNPFTVNRSMELDDNSPEKSDLKDPKTIALLVKDGRFSTSYLPSGIYAEIREASVCRDQIMKQHVRLSNQIQGWLQKFFPEYFECYADWDSTSGLMLLRKAPLPQDILKIGAGGINQIWRDAKVRAAGIKRAQTLVEAAQNSVGLEAGEAARLEIWVLVNDYILKAEQLKRLDEYLEEKVKEVPNVEKLLAIKGVGMSTVIGFIAEVGDIGRFTDPKQIQKLAGLEIVKKSSGKKKGQPRISKRGRRKLRRTMYESAKALMLWNPAFQDVFLYYRNRTKNPLGGMQAKIAVACKAIRVFYVVLQTGCDFDEEKFRKDIIRPEAA

SEQ ID NO: 280496 - protein, 394 aa, unidentified
MRFAGIDIASETHALAIVNAEAAVELKPVSFAEDAVGYQRLLSLLGDPAELLVAMEATGHYWKNLFAVLAAAGYSIALLNPLRTHRFAGEDLARTKTDALDALGIARFAAQKRPSPTLLPDAATEELRELVRLRERLLHDFGDRVRQLHRLVDLGFPEFTRHVRTLESELAGAILRDYPTAAAFRGASVRRLAGVRYDGQHQVGLELARSLIDAARCSVGQHHSAAYRIQVRYACDDLAVLRSRLREIDRDIESKLREHEVGRLLTTIDGIGPNTAARIIAAVGDPADFHSAAALAAYVGTIPRLRHSGKRQPARAPLTPIGNASLRAALWMPTLTAVRSNPWLRAHYERLRARGKLPKVALVACMHKLLFAVYSVAKHRQPFVPMLTAPSADV

SEQ ID NO: 280497 - protein, 334 aa, unidentified
MRSLGMDVHRDFCEVAIAEAGSVRAAGRIKTTPAALELFACSLAPDDEVAIEATANALAIARIIEPHVRRVVLANPKAVRETSRRAKTDRIDAKVLAQLLAVGFLDQVWTPDEAARTRRRLISRRCALVRQRTREKNQIHAALQRNLIQRPPMSDAFGVQGRAWLAERIPALPLDERLSVEACLRQIDFVEDELKRLDRIIAADALSDDDALRLMTLPGVSTVTAIALRGAIGDVGRFKTPRHLVAYLGLDPRVRQSGTEPAKHGKISKQGPGEVRGLLVEAAWHAARTAGPLRAFHQRLAARRGADIATVAVARKLVIIARAFCAPAIRADAA

SEQ ID NO: 280498 - protein, 338 aa, unidentified
MTIVMGLDQHRAQITAEWLDTSTGEIARKRIAPADRDGVRRFAARFGGRETEVALEATTGWRFVVEELRAIGARVHLAEPAETAARRGTKKRAKSDRADARHLRELLMVGRLPESWIPPEHLLELRARVRLRHTLVDQRREWQQRIQATLYHHGAPPRSWLLGVESRAWLATLEMPAAAREPITIALALIDAHDAQLTPLDQDLRDYAKRQPGCRALMRHYGIRPLTSITILAELGDARRFSSSREAVRYSGLDITVHQSDARRAPGRLSHQGPSALRWALFEAAQCARRPGSPDHDYYLQTAARLGGNRACLAVAGKLLKRSYHTLRELGEEALQPA

SEQ ID NO: 280499 - protein, 344 aa, unidentified
MDHFAGLDVSVKETSVCIVDDTGKIVREVKVASEPEALLAVLKNPAYHFKRIGLEAGPLSQWLYSALAEVGLPVICVETRHMRAVLKAQINKTDRNDARGMAQMMRVGLYRPVHVKTLRSQKLRMLLTHRKLLQSKAIAIENDLRGTLRNFGLKVGMVGTVKFEARIKELVETLPDLAVLVEPMLVVRRALREQFVILHRRLLAIVRDDEVCRRLITTPGVGPVVALTYRATVDVPARFRKSKSVGAVFGLTCAKYQSGEVDWDGRISRCGDEMMRTMLYEAAQAMMRSKKWSWLKAWAMQIARRRGMKKAIVALARRLAVIMHRIWVDGTEFRWTREQAAAAA

SEQ ID NO: 280500 - protein, 408 aa, unidentified
MATVEFPQIIERGAGLDVHKDTVVATIRGTGLIEETRTFGTFTCDLERLITWLKESGITHAAMESTGVYWKPVYYVLEGHFDIILVNARHIKNVPGHKTDKKDSEWIAQLLLSGLLKRSFVPTEQTRQLRALYRHRKKLINQRSREKNRLQNVLEDANIKLGSVVSDVFSKTGQAIIVELIKGVTDPVTLSNLAKGSLVRKKLDLEKALHGRFSDHHRFMAELIMDTIESINKFIHRIELQIAQCSRSIESDIHLLQTIPGISHQSAIGIVSEIGTDMTVFPSSKHLASWAGVCPGTHESAGKKKSSRVTEGNNYLKTTLIEASWASTHTLNTHLAFKYNKLALRRGRKKAAMAIGHDILAASYHILRDKVPYREPKLKPEILLERKKAEMERLEKRLQKLKTLASNI

SEQ ID NO: 280501 - protein, 296 aa, unidentified
MKKHNSNKQITTKGDQKETFAFYIGIDLGDKMSDVCVLDPAGEVSEQFRLRMKGTDFQAYFTAIPRSRVAVEAGAQSRWVAELVEGCGHQVYVSNTRKVPYIHESDDKNDSGDAYKLAELVHWKPRLLHPIQHRSQQAQADLSWIRAREVLVESRTQMLNAIRGMSKAFGERLRRCSAESFTAQRAEQIPAAIRGAVGPLLEMIDHLNEQINYYDQMIHHVARTRYPKYWLLDQVGGVGVHTALAFMLTIGDPERFAKSRTVGCFLGMRPRKQDSGERKPQLGITKAGDGYLRKLW

SEQ ID NO: 280502 - protein, 350 aa, unidentified
MNVNHYIGFDVHKKSVSYCVKTADGTIVDEGRLRATHDVLRQWAGGRAEPWRGAMEATLFSGWIYDTLQPFAAELQMGHPALMKAIAASKKKNDKLDARKIADMVRCNLLPACYVAPVEIRELRRMLRYRNLVVGQATRMKNRMSGLLMEVGAEYNKQRLHGKQYFTALLDTVAEVPDSVKDLLRLSRGAMETFEATQQQLLARLRKDPLLSRRVMLLESIRGVGEVTALTWALEVGDPHRFSSVAHAVSYCGLTSALVSSADKQQRGPLSKQRNAHLQTVLVEAAKLAPRWNPQLAALHARELERGNRNRATLAVARKLVAYLLAVDKSGQPFEVHTAPASETEAQQVA

SEQ ID NO: 280503 - protein, 411 aa, unidentified
MNHKLKELAFVGVDTHKDEHTCCMSNCFGQSLGVFTVENRPNRIEELLEEIEETAKSHDLKPVFGLEDVMGLGQHLARSLIAGGYELKEVNPIETERKRLRKAHPDKSDPEDTLAISKVLITDFDKLPTIQNLDEVYLAIHQLSNRRDSLVKEKTRIKNKLHILLHREYPYYQSMFKNTFSKGALAFWERFPIASFLKGVGVERLAKYLRANSNNTVSSKKALGILRVVDKDSMPSCLNLVHASLIRNLVKHLRFVEEQIAIARKELEPLVDETGMKLSTLTGVRTVTAAKLIAEIGDVNRFASSDKLAKCAGIAPQQKSSGKKLKFKKSNRGRRQLNTAIYQIALSQIGCDRSGRPKNSRARDYFLRKVSEGKTKKEALTCLQRRLCDIIYAMMKKKTEYRFQRTTNLTI

SEQ ID NO: 280504 - protein, 315 aa, unidentified
MTGKSAEIFVGVDVSKARLDISIGGSTEYWQISNDEKGFVKLIERLRGLHTTLIVLEATGGLELPVVAEILSAGLPIAVVNPKRIRDFARSVGQLAKTDKLDSCIIAQFAQAVRPEVRHLRTKEEEHLTALLTRRMQLIEMLTAEKNRSHSIRKVMRGVLQHHIEWLQDDLKKLDQAIAEYIKQSPIWCEKEKVLRSVPGIGPVTGATMLANLPELGTLNRQQIAALVGVAPVNKDSGRKRGKRRVFGGRAVVRRTLYMAALSATKHNPKIKHFYENLICRGKEKKVALTACMRKLLVILNVMVKNNEVWRCEIA

SEQ ID NO: 280505 - protein, 312 aa, unidentified
MTSGAYIGIDVGKSWLDVNEYGSEEETRYTNERNGWRKLIGSLEKKGVETVTFEATGGYETRAVNALLEAGITVAVVNPTRVRNFARSMGILAKTDKIDARVIAHFASVTHPNPRIRKTEEEERLSACIERRRQLIIMLTAEKNRLSTCPGSMLANIQEHIEYLKEGINRLDNQIHEVILQDPDRKHRVELIESIPGVGPITASTLIAELPEIGTLNRQQIAALAGVAPFNKDSGKKRGRRKTTGGRSTVRRVLYMATLSASKHNPVIRNFYQSLLARGKEKKVALVACMRKLLVIANTILYKDQYWTCTST

SEQ ID NO: 280506 - protein, 351 aa, unidentified
MENIALIGIDLGKNSFHIHCQDHRGKAVYRKKFTRPKLIEFLATCPATTIAMEACGGSHFMARKLEELGHFPKLISPQFVRPFVKSNKNDFVDAEAICEAASRPSMRFVQPRTESQQAMRALHRVRESLVQDKVKTTNQMHAFLLEFGISVPRGAAVISRLSTLLEDSSLPLYLSQLLLKLQQHYHYLVEQIKDLESQLKRKLDEDEVGQRLLSIPCVGTLTASTISTEIGDGKQYASSRDFAAATGLVPRQYSTGGRTTLLGISKRGNKKIRTLLVQCARVFIKTGTPVWQVGRLGQGVVVSEKQLCRHLCSGKQAGQNSLGTDGATANLRSIKAEIHQFKQSFIWFCEY

SEQ ID NO: 280507 - protein, 439 aa, unidentified
MQVELPQYVRLIPQEMESAMRKTGIHAILFWRYIRMYNAVGIDVSKGKSTVTVLQPGGTVIRKPFDVSHTSPNLNELAEYLDSLDGDTRVVMECTGRYHEPILKTLSEAGLFVSVVNPHLIKNFGTNSLRKVKSDPADARKIARYTLDNWNQLRQYSGMDNTRTQLKTLNSQFSFFMKQKVAAKANLIALLDNTYPGVNKLFDSPAREDGSEKWVDYAYSFWHVDCVRGIGLKAFTERYQAFCKRHHYNFQADKPEKLFHASKELVAVFPKEKTYKLLIRQSIQQLNLASAHVERLRREMNELASTLPEYNTVMGIYGVGKTYGPQLIAEIGDVSRFTHREALTAFAGVDPGVNESGQHKSRSNRASKVGSARLRKTLFQIMTTLLQNAPEDDPVYRFLDKKRSEGKPYYVYMTAGANKFLRIYYGKVKECLRNLEQES

SEQ ID NO: 280508 - protein, 387 aa, unidentified
MTVLTVTNLPAATHGETVRCLFAIELSRMSWVIAFNTPLSEKISRRTLIGCKWKKLLELIEEVRARVSRETGRAVEVISCYEAGYDGFWLHRQLSAHGIRNYVIDPASLQVDRRARRVKTDRIDTERLLRSLMAYLRGEPKVWSVVRVPSIAEEDARRLHRERDRLVSERVQHVNRIKGLCALHGIYDYNPLRPQAMARLEQLRTTQGGALPPRLKLEIKRELQRLELVVEMIATLEAERNAIVEDEASTHVNAKKIQNLHKLKAIGPEFAVVLVGEIFHRDFNNRRQLASYVGFAPSPFQSGNVAHDQGISKAGNRKGRTTGIELAWLWLRYQPDSDLSVWFRTRVGTTKGRIRRIAIVALARKLLVALWRYLETGVVPRGAVLKG

SEQ ID NO: 280509 - protein, 413 aa, unidentified
MVPAVAVTARSSGVRLEDFVAVPIDVGKHTAMASVVDFTGAVLEKAFEFALDRRGVDELVARVRAAVPVTVSLVRVGLEAAGHYHLPLAGGALPAEWELRLLNPGHVALQRKANGQRGVKTDRVDLVAITDLLLAGRGTVAPAFADPVMTLAGWVAHRRRRSLVRRRTIQQLTTHVDRCFPGLGRVLWSVALTKSGRLILAELPDPARVARLGPARLRTFAAKRGVRMTMPLAERIVDAARNALPVPGADVARRLLAADLELLDDIDAQIIVAEREIEQLLPATPFAVLRTVPGWGPLRVAAYGAAVGDPDRWPSPKQLYRAAGLTPRLYESAGRRRDGHITREGSVPLRVALVDLGLGLWHTEPAARAHGVAMRARGKPGAVIAIAMAHRANRIAFAMVRDQHPWDGCRWAA

SEQ ID NO: 280510 - protein, 360 aa, unidentified
MTIVAHAHSFVIGVDTHARTHTLAVLLAATGELVATQQFPATAAGMDRAVAWAARHTDGEMATLWVVEGVATYGAHLASAAKRAGFEVVEAAAMNARAHRGTGKSDPFDARRIAASVLSLEPEQLRRPRSDDGIRAALRVLVTARAHMTTERTAAVNALTALLRVAALGIDARKPLTASQIGEVARWRTRVEDLATTTARAEAVRMAKRVVDLNAEITANQAQMIDLIHASKAAALLDKTGIGPVTAAVVYTAWSHAGRIRSEAAFAALAGVNPIPASSGNTLRHRLNRGGDRRLNRALHMAVITRMTHDPETQAYVERRRAEGRTTKEIRRCLKRYLARQLYRTLERLHTELGAHPQAA

SEQ ID NO: 280511 - protein, 343 aa, unidentified
MDHFAGLDVSVKDTSICIVDETGKIVREVKVASEPEVLLTVLKKGGYQLKRIGLEAGPLSQWLFSALGETGLPVICVETRHMRAVLRAQINKTDRNDARGIAQMMRVGLYRPVHVKTLRSQKLRMLLTHRKLLQSKAIAIENDLRGTLRNFGLKVGIVGSSRFETRIKELVEGLPDLALLVEPMLTVRRVLREQIAILHRRLLAVVRDDEVCRRLMTVPGVGPVVALTYRATIDIPARFPKSKSVGAVFGLTCAKYQSGEIVRSGRISRCGDEMMRTMLYEAAHRMLCLAKWSWLEAWAMQIARRCGMKKAIVALARRLAVIMHRIWVDGTEFRWTREATAAA

SEQ ID NO: 280512 - protein, 412 aa, unidentified
MHNRQNYLYVGVDLHKEHHTAVIINCWQEKLGEIQFENKPSAFSEFLLEVETYVSNGLSVVFCLEDVGGYGRALAKYLVDHEQVVKEVNPALSFLERKSQVMIQKNDSWDAECVARILVNKFNQLPDAKPNDLFWSIQQLVSRRNALVKAQSALKNQLHIQLNHHYPSYKKFFSELDGKTALAFWQQYPSPSCLEGTNIKRLTAFLLDVSNNTCSVKKASEILKLVKEDGHTMKEYQETRDFLVRSIVRDIEFKKTEMKYIERELKQLVKLLDYQLETMPGIELVTASALIAEIGDVRRFPNANKLARFAGIAPVYFRSGGKGKVHKSKQGNRALHALFYNLAVQQVQVAKGSKLSRNPVFHAYYQKKLKEGKTKGQALVCIMKRLVNIVYGMMKYKAAYELPVVEEKEVVQ

SEQ ID NO: 280513 - protein, 356 aa, unidentified
MSSNIKYIGLDVHKEAITVAVRNGAGKLVMESIIETKAVTLVQLLQGVRGELHVTLEEGTWAAWLYDVVKPHVHEIVVCNPRRNALLKEGSKNDRVDARKLSELLRAGMLRPVYHGENGLRTLRELARSYQTISKDLRRVMNRLKAIYRSWGIPCAGTQVYAPRYREEWLNKIRESGVRRRAELFYQHLDGLQLVRRQVRAEFLAESRKHKAVKVLRQIPCIGPVRSALLLALMQTPHRFRSKRQLWKYSGLGVETHDSAQHRYVDGQLQRSKKPSQVRGLNQDHNHEMKEIFKSTATSASRCAGPLHDFYGGLLAKGMKPEMARLTLARKIAAITLTLWKKGARFDANQLKSQAA

SEQ ID NO: 280514 - protein, 424 aa, unidentified
MDIMHERVAGLDVHKDMIVACARCVAGGKVNRECRTFGTTTAELLELLAWLVASGCSHVAMEATGVYWKPVWNILSDGTFELIVANARHIKNVPGRKTDVNDATWIADLLACGLIKASFVPEEAFQELRALLRTRKQLTGEQTRHVQRLQKTLEEGNIKLDSVISDIMGVSGRKMIEAMIAGVRNPAKLAQLADKRIKASPKELYDALHGRLTQHHRFMLQLHLDQYDALTAAIDKIDQQTNAAMAQMDEEAKAAGQATFRSLSQLLCTIPGVGALSAPVILAEIGTDMSRFPTAGHLLAWAGLCPGQNESAGKRKRTRLRKGDCWLKTTMVQCAVSAVKKKDSYYRAQFSRLCAKHGAKKAFCAVAASMLTAIYHMLKDGVEHKDLGASYFDKRSTDIKAKRLVAQLAKLGYQVELPPLAQAA

SEQ ID NO: 280515 - protein, 321 aa, unidentified
MNKNTEFFGIDISKDVFDVFSLEMGHNQFSNNEKGFKQFIKKLSKGSLVVMEATGYYHYCLAQYLYEKGYAVSVVNPLSVKRFIQMKLSKVKTDKSDAKSICEYARNNEVPLYTAKDKSQAECLQLLRLMDTYVKHRTAVKNKLDGEKVLGIPSKAVYRSLSRTVKQLNKELALLEVRLIALVKEEQQEQLRLLKTIPGIGEKAAILLVVFTDGFSKFENSKQLCCYAGITPTIRQSGSSVRGRSRISKIGNKKLRNQLFLSSFTACQYNKACRELYERIVDQGKSKKLALLAVCNKLLKQSFAIAKSGMPYNENFVSKLV

SEQ ID NO: 280516 - protein, 342 aa, unidentified
MEVTTIGLDLAKNVFQVHGVDDEGTVLIRRQLRRSRVLPFFKKLPPCLIGIEACATAHHWARQLSGLGHRVKLMPPHYVKAYVKRNKNDAADAAAICEAVTRPSMRFVAVKTMEQQSVLMVHRTRELLVRQRTMLVNAIRAHMAEYGIVAPVGIPRVKELFAVIADGDDERLPAIARACLEGLARQFMSLHEEIAVAERRIHAWHRSNQASQRLETIPGIGPIIASALTASISDPEVFKNGRELAAWIGLVPRQNSTGGKQRMGRISKQGDQYLRWLLVAGAMSVIRHGRKTDFEKNPWLGNLVRQKPTKVAAVALANKIARTAWAVLVTGEPYRQPAPAKA

SEQ ID NO: 280517 - protein, 400 aa, unidentified
MDDIDGVGVFLGLDVGKSAHHGRGLTPAGKKVFDKQLPNSEPKLRAVFDKLAAKFGTVLVIVDQPASIGALPLTVARDAGCKVAYLPGLSMRRIADLYPGEAKTDAKDAAVIADAARTMPHTLRSLELTDEITAELTVLVGFDQDLAAEATRTSNRIRGLLTQFHPSLERVLGPRLDHPAVTWLLERYGSPAALRKAGRRKLVEVIRPKAPRMAKRLIDDVFDALDEQTVVVPGTGTLDVVIPSLARSLAAVLEQRRALETQIGQLLEAHPLSPVLTSIPGVAVRTAATLLVTVGDGSSFPTAAHLASYAGLAPTTKSSGTSIHGEHAPRGGNRQLKRAMFLSAFAALHDPASRTYYDKCRARGKTHTQALLRLARHRISVLFAMLRDRTFYEPRTPRLA

SEQ ID NO: 280518 - protein, 428 aa, unidentified
MNCNTQNAKIASITEKTLIVGIDVGSETHYARAFDWRNYEYTKKPLEFSNTEAGFQTFKAWMEDMAAKHGKTAVIPGMEPTGHYWFALGKFLQDSGMRPVHVNPHHVKKSKELDDNNPNKNDRKDPKTIAALVNEGRFSYPYIPTGIYAEIRSLSNLRFQTQEELTRIKNRIARWFSIYFPEYKDVYGDLKAVSGRMVLKAAPLPEDIRKPGAEGVNQIWRDAKLRGAGMKRAKTLVSAAEHSVGSKEAPEAARIELRNLLNDMDVYAARLEELLHGIEEKLKGIPYVDKLMGIKGIGLATVSGFIAEVGDIGRFDNPKQLQKLAGYAIVSNDSGKHNGESRISYRGRKRLRYVLYEAAISLIGKNHEFKEIHEYYRAREKNPLKKMQSVIAVACKIIRVFYTILTKGVEYDGNRLLGDIRRPQVQAA

SEQ ID NO: 280519 - protein, 420 aa, unidentified
MLMNIPSQFPYRATVGLDWADQKHDVFVRFANGDSYRRKIDSRPEAIQEWLLELRSTCAEATIAIALEQRRGALFYHLCTHLSWIDLYPINPHSLASFRQTFFSSRAKDDPVDSQLLEELLRTHPERLRSYQPEPTAERKLDQYCRHRRSLRDLATKTELKLISTLKQYFPLAVNLFADVGLKSEIALDFLSRWPTLEELHRAKAQTVRSFFYAHNSRSQSLIEKRLQLIAQAHPVTDDLALIEPLVLTSKCLVGQLRQSNQAIKEFDRKIKDLFKSHPDHFLFESLPGAGEQLAPRLFAVFGSNRSRWADATDIQKYSGIAPVVERSGKSLWVHRRLARPIFVCQTFHEFAQQSVQRSAWADQYYRRQREKGKSHHSAIRALAFKWIRIIFACWKANKPYDEAFYVQALARKNSSLSST

SEQ ID NO: 280520 - protein, 399 aa, unidentified
MAQPTLWAGIDAGKAAHHCVAINADGQRVLSRRVVNDEGALRDLIRAVKALADGGAVRWAIDLNSGGAAVLITLLLDDHQELLYIPGRVVHHASGAYRGDGKTDAKDAAIIADQSRMRRDLHPLRHRDKTAADLRILCARRTDLAADRNRAINRLRAQLLEYFPALERAFDYAHRKAALVLLTGYQTPDGLRRMGVARLEKWLRDRHAYHAGDLAARAIAAANAQRITVTGQQVAASVVARLAQTVLDLNAELVDVDAMIEAKFEQHRLAGIITSMPGFGSLLGAELLAATNGDLASFNTADRLAGIAGLAPVPRDSGRISGNLKRPRRYDRRLLRVFYLAANNSIKTCPESRNYYDRKRSEGKRHSQTILCLARRRLNVLWAMQRDNTSYQPGLPRAA

SEQ ID NO: 280521 - protein, 368 aa, unidentified
MSVYVGIDVHRKRSQVAVVAGDGKVQLNRNVVNGSEPMLRLIGGLPARTPVAFESAYGWGWLIELLEDYGFDPHMVHPLRCKAIASARLKNDKVDAAILAQLLRAGLLPEAWIAPLEVRQLRALLRHRASLVRLGTQLRNRIHAVAADHGYDRAASYWTGPGRGWLAELDLPPVSREIVTDCLAFIDALAPQIDRIDGEVRARARADPRVKVLTALPGVGQFTALVIVAEVGDITRFGSARKLASWAGLTPTVRGSDLSVRHGHISKQGSAWLRWVLNQAAQTAKRSPEFAATYAAIARRRGKKIATIAISRKLLTRAYHLLAAAQAAQATSTPGTAGHASADQERAPSPGHARSSGMSRPSSPRSIT

SEQ ID NO: 280522 - protein, 399 aa, unidentified
MFYGLDVHKEFIQVCALAAKGTKREEYRVGGSAEEVEAFAKKLQPSDPVVLEATFHTWILHDILSRHVDRVVVANPLQVKAIAQAKIKTDKVDAFTLAKLLRADFLPEVELPDPKAWALRQLVSHRRLLVKQRTAIKNSIHAVLDRRLVHNPNKDPFSKRARQWMKNLDLPAAESFLLQNAMTLLEDLDDRIDAVDHELLEQASIESNARLLMTIPGVGVTAAIGLIAAIGDVRRFGTPDQLASYFGLVPRVSQSAGRCHHGRITKTGSSTARSLVVESAQILARSSSPLTATYWRVRRKRGHNVAVTALARKIIVLVWYLLTKQEPYRYGEPGLARRKLRKATLPELRQRSKRVPQTLDAVYEEAGLPPLAHPSEAERRTVAINRRARTRISNSLKSQ

SEQ ID NO: 280523 - protein, 427 aa, unidentified
MLNAQVEKLSLVRGNVIIVGVDVAKKKNVARFFDTDGFELCKYFKFRNDRAGILSFISKSLNIKEQQGAERIVIGMEPSGHYWEPLAYFIKEYPIVQVLVNPYHVKQSKEMEDNSPDKNDIKDARLIAKLVKDGSFFKTYLPEGVYRDLRNLTSEREQQCAKLNSAKNRLVALLDRYFPEYVKVFKTLLGKTSVFLLKFYPFPGDIEKLTEEELTGVIKAASNKRLGSKKAKELKKAAESSVGLTEGLDSARYRIKSCLEEIEFHLKQLEATEQKMSVLLSQTGYKLNLLSIPGVGIVTAARFLGEVGDLSRFEHPSQVIKLAGFNLRGSTSGEKQSSKTVITKRGRSRLRCLLYQAALIAAARNPQLRALYYYFKTRPKNPLKTNQALIAVANKLVRIMFALIKKNEFYNPALVLGEIRESQLKVA

SEQ ID NO: 280524 - protein, 342 aa, unidentified
MNRVYVGLDLGSSNFHQVAIEESGAVTHNSVFATSEANLVKACSGLHGEIHVHLEAGELAPWASEIIRPLVHRVVCSHPQTNAWIARDRDKSDRIDAYKLASLLRLNEFKEVRYPQEQLRRDFKAVVQHYDELTQQQARLKTKIKARLRMQGVIRRGEQVFSVRGRKAVLAEVKSPVVRTAIQQLYALLDQSLTSQAEARRLMLRAAQALPEISIIRTAPGIGPIGACRFSAYVHSPQRFSSTRKLWKYCRLSVSHRSSNGKPLRRPRIDRSGCGRLKDVSRKAFEAALRRKDNNGFQRAYYRALEQTHDATHARLTVQRKIVSTLRAMWINQTPYSDRLMY

SEQ ID NO: 280525 - protein, 381 aa, unidentified
MKEVRLFRTMTAHLLALADWLQEAGCTHVALESPGVYWRPVYNLLEGQFELLVVNAQHIKAVLGRKAGVKDAAWIAELLRYGLLRGSFIPSKPQRELRELTRYRSTLVPDHARALNRLQAVLEDANLKLASVVTDIYGASTRAMLAAILAGQRDGEALAELARGHLRAKRDQLREALAGRVTAHHSFLLTEHLSTLEYLDEAIARLSAAIDQRLTAEQAAITLLDTIPGVGQRAAEILIAEIGTDMSRFPSAKHLASWAGRCPGNHESGGKRLSGKTQQGKRWLRQLLVEVAQVASKTKNTYLAAQYKRLAARRGKKRALIALGHTILIIAYTLLTRQQPYQDLGAVYFDRREQQRVERQLIQRVERLGYEVSLRPKDLAS

SEQ ID NO: 280526 - protein, 447 aa, unidentified
MRASPEEIPDEEYEQVLDRVAAVDVAKDSGMVCTRLPGSGAGGRRTSRVWQVPATTNAVSDLAAQLVDVGVEKVTVESTSDYWRIWYYLLESAGLDVQLVNARDVKNVPGRPKTDKLDAVWLAKLTEKGMLRPSFVPPAPVRVLRDYTRMRVDLTRDRTRNWQRLEKLLEDALIKVTSVASKLQTLSTRDMVEALIAGQRDPQALADLARGRLRGKHPALVQALTGRFDDHHGELARILLDQIDRLDTQIAQLTTRIAELVNDIDPVPPASPLDSAGDGSRPPATGRLQRLAEIPGLSTETAQLIIGEIGLDMTRFTTAAHLVSWARLCPRTIQSGTSTSAGKIGKGNPYLKGVLGLAAATAARSGGTFLAERYRRIVKRRGKGKALVAVARSILVIIWHLLADPNARYHDLGPDYHDKRVNTDRKLNSLVRQLEALGHTVTLNPAS

SEQ ID NO: 280527 - protein, 338 aa, unidentified
MRSLPTGVDMAKATFTAAICVDGKEQEVGEFVNQGTGFAELEVRLSALQQSQGLEQIHLVVEPTGGYELALVVYAYEHGWLVSLPNPKQVRDWAKGIGRRSKTDRQDARCLARFAAERQPAPQQPLPNEVRELDSLLQRRHDLEQLLQQERNRLRDLGERPGVAAAIRPNLEQVISALEEALRQVEEALTQHLKSQAHLEQNRQRLLALPGVGVRNVLPLLVLLYRWHALTNGQGDTKGITAFAGLDPQTYQSGTSVHRRATISKMGNREMRRLLYMGALGGVRGHNPLHTFYHRLLGRGTPKKVALVAASRKILCWAWTIFSRQTTWDPLHFAHFAS

SEQ ID NO: 280528 - protein, 369 aa, unidentified
MADYREAFVGIDVAKLRNAVAIADAGREGEVRFFGEVDASATNMRRVLGRIANRFDRVHFCYEAGPTGYGLYRLIRSLGHQCTVVAPSLIPRKPGDRVKTNRRDAVSLARLLRAGELTAVWVPDEGHEAMRDLVRARSAAVETLRIHRQQVSAFMLKHGRTYPRKKGWTMRYLRWLQEQQFDHPAHQIALQEMVEAVRVARDRVDRLERTIEEFVSTWSLEPLVRALQTLRGVDLVVAVTFATEVGDVSRFEGPRQLMGYLGLVPSERSTGEAVRRGGITKAGNGRVRHMLVESAWTYRHPPKIGKTKLYRLEQTSPAVREIAWKAQSRLTARYRKLAARGKRTTVVCTAIARELVGFMWAVARQVQTA

SEQ ID NO: 280529 - protein, 324 aa, unidentified
MNDTVVGIDVSKKTLDTSYAQGQRKQARIFENSSDGWKQVLSWLKAKGSQPAHVGMEATGRYSLGAALMRHDAGHTVSIINPAQIRDFARSKLGRNKTDKADAALIREYTTLFRPQPWTPPSPAMRRLCELQTVRAGLVANRTEWKNRLGSGLGDSTAIQVAKAVIDALSSQLKVIDQAIAETIEQDGDLRGRRDLLLSVIGVGDTLAALLLAEMPEPGVLRHSAEMIAYAGLNPSHHRSGTSIDRPTRISKIGNATLRSALYMPALSAMRFNPVVAALAARLKSAGRLKPKQIVVAAMRKLLVLCFGVLKTGTPFDPAIAMPT

SEQ ID NO: 280530 - protein, 316 aa, unidentified
MGKVYVGIDVSKVHLDVAVRPTGETWKIGNNEADIEQLMVRFGKLEPDLVVMEATGNYEIPLAAALQVAALPIRVVNPRQARDFAKSTGKLAKTDSIDALALAHFAEAVRPQPRALPDQETQRLAAILTRRSQLVGMLTAERNRLGHAPRILLRRLQAHIKWLGKELSQTDDDLRDAVKDTPMWAAKDQILTSAPGVGRVSSITFLADLPELGSLNRKEIATLVGVAPLNRDSGAFRGKRSIWGGRARVRQVLYMATLAATRHNPIVRDFYHRLCAAGKPKKVALVACMRKLLLILNCMVRDGTLWDPNNYSTSPA

SEQ ID NO: 280531 - protein, 415 aa, unidentified
MALKIVYKICCGIDVHKTFVVACIASTNDKGITSYERHRFSTYTSGLKTLLQWLLDRNCKDVCMESTGKYWIPVYNILEKDCSIVLAHPKYVKAIRGKKTDKKDAKWIADMFKHDLVAGSFMPPADIRQLRDLMRYRFKLTCFKSSEKNRLQNCLTVSNIQLGNVVSDTFGKSAQAILDKILENPADTSFDLEPLVFKSLKKKLPELRDAIDGYITPEQAGKLKVIKAHYENLESRKAELEELILALAVPYQQELAILQTAPGISSDFTSIGIISEIGTNMEAFPSAKHLCSWAGLTPTNNESAGKKKSVRVSKAGCYIKPLLVQCANAVIKSTKHPEMRNRYLRIKKRRGHKKAIIAIARMLLTALYHMLKNGENYNAELYQKSDLPPVDREITVEQALMIARNQGYKIKSATA

SEQ ID NO: 280532 - protein, 405 aa, unidentified
MNMNAVGIDVSKRKSMVAILRPGGEVVAKPFEISHLSGDLQSLIDRIHSLDGESRIVMECTGRYYEPIARELVAAGLFVCAVNPQIIHDYQDEDNSLRKVKSDKADSLKIARYTLDRWAKLKQYGLMDEVRNQLKTMNRQFDFYMKHKTAMKNNLIGLLDQTYPGVNSYFDSPAREDGSQKWVDFAATYWHVDCVRKMSRNAFVEHYQKWCRRKKYNFSRTKAEEIHGTAKELVPVLPKDDFTKQILKQATEQLHVASQTVEQLRTLMNETAATLPEYPVVMAMKGVGPSLGPQLMAEIGDVARFTHRNAITAFAGVDPGVNESGDYSQKSVHASKHGSPVLRKTLFQIMDVLIKTKPQDDPVYLFMDKKRAQGKPYYVYMTAGANKFLRIYYGRVKEYLASLPQ

SEQ ID NO: 280533 - protein, 409 aa, unidentified
MVLDQQDIDVFVGLDVGKSDHHAVALDRSGKRLYDKTLPNDEARLREILTGLGRHGKVLLVVDQPATIGALPVAVARDMGATVGYLPGLAMRRIADLHPGQAKTDARDAAIIADAARTMPHTLRSIALGDEAIAELGVLCGFDDDLAAQITATSNRIRGLLTQIHPALERALGPHLDHPAVADLLTRYPTPAALKTAGRGHVRARLKKRAPRAADRLTDAVFDALAEQTVVVAGTGAAGIVIPRLAAQLLALRTQRDEVAAQVEALVEAHPLHTVLTSMPGIGVRTCARILTEVVGKDFKNAGHLASYAGIAPVTRRSGTSIRGEHTSRRGNKKLKRALFLSAFAALHHPPSRAYYDRKRAEGKRHNQAIVALARRRSDVLFAMLRDSTLYQDPKPGDYPFNGVSGGFH

SEQ ID NO: 280534 - protein, 402 aa, unidentified
MNCVGIDVSKGKSMIAVMRPFGEVVVSPFEVRHTANELSELARLLKSLDGETRVVMESTGNYHAPVAWLLHGAGLYVSVVNAMLVHDYGNNSLRRGKTDKKDAVKLANYGLDHWLTLPRYVPEEDARLMLKTCYRQYQQYSKVQTMLKNNLISLLDTAFPDANRLFTSPPRADGSEKWVDFVATFWHCECVCGRSEKAFTTQYQKWCRKHGYNFSEDKALDIYASACRHFGVIPKTDTAKLLVEQAISQLQTTSSALAALKQEMQSLAASLPEYPVVMGMFGVGPTLGPQLLAEIGDVRRFHSKKALVAFAGIDAPPYQSGQIDVRSRSISKRGSASLRRTLFLVMSVILQCAPIDEPVYQFMDKKRSEGKPYRVYMMASANKFLRIYYASVKAYLESLEHD

SEQ ID NO: 280535 - protein, 455 aa, unidentified
MKHEPEEIPDAEHELVIERVAAVDVAKASGKVCVRVPGKAGRRVSRVWDVAATTAAVTELAEDLVELGVERVTVESTSDYWRIWYYLLEAAGLEVQLVNARDVKNVPGRAKTDKLDAVWLAKLTEKGMLRPSFVPPTEIRRLRDYTRLRTDLTHDRSRQVQRLEKLLEDALIKLSTVATDIIGVSGRAMIEALIAGQRDAKVLAGLARGRMKTKRAALIEALSGRFDDHHAELARMLLDQIDALTAQIDTLTARIEQLLAAMPEAQPVDPRRDGPTSGHPVGVTADTLAECARLTTVERLDEIAGIGEHNAQVIIAEIGLDMSRFPTPAHLVSWAKLCPRTIQSGPVTRGGRTGKGNPYLKGVLGDAAAAAAKTSTFLGERYRRIVKRRGKLKALVAVARSILVIVWNLLNDPTARFHDLGPDYHTNRIATERRMRNHIAQLTAMGYRVTLEPAA

SEQ ID NO: 280536 - protein, 474 aa, unidentified
MVVPNQEPKKPRKTRAKPNNSHARSLPVAVPASSAPLKLINPDAAGIDVHSNMHMVCVPADRDAKPVRQFGANTADLHEIVAWLKKCGVKTVAMESTGVYWIPLFELLESQGFQVDLVEPGQLSRCGARPKTDVLDAQWIQRLHSYGLLRASFRPPDTVLALRAYWRQRQMQVRYAAYHVQHMQKALEQMNIKLTEVVSDITGLTGMSIIDAILGGERNPIRLAKLRDPRCQKTKEQIALALEGTWRPEHLFELRQARELYRFHHQQITECDVQVEAELAKFSDRAGEKTQTAKPRKGGKKSNNVRFDANGPLFKALGVDLTLIEGIEVGTALVILAEIGVDVSRFPTEKHFASWLRLCPPQNESNRTKRRLAHRKATNRVTIALRLSARVVGRTMTPLGLFYRRIRSRIGGRGAVKATAHKLACLIYRMLKYGEEYVTQSMEEYEVKMTANVLKSLERKAAAMGFQLTPLPSP

SEQ ID NO: 280537 - protein, 342 aa, unidentified
MKTVTTIGIDLAKNSFSVYGVDAKGKPVIQRTLSRSGVVRFFANLPACLVGMEACASSEYWARTIESLGHTARRIHPRYVKAYLLGSKNDVNDSAAICEAVQRPNMRFVPHKSPEQTDIQCVHRIRQGFVRSRTALVNQIRGLLGEYGTIIRQGVSAVRKQLPELIANETNDLSPIMRQNLASLYESLCFLDGRILAQEKLLKSIARENEACRRLLKIPGIGLLTATILLSVAGVASSFKNGREFAAYLGLVPRQNSTGGKIKLLGISKRGDSYTRTLLVHGARAVLYSLMAGRTPPARQNAWLAELAARRGKNRASVALANKTARIAWSMLAQGTEYKIAA

SEQ ID NO: 280538 - protein, 431 aa, unidentified
MNESKPAMTSNDGGPLRWAGVDWSWSEHAVCVIDDAGAAVERCTVTHTAAGLARLVTLLHRHHISGVAIERGDGPVVAALLEAGLTVFVIASRQVTALRTRYGTTGNKDDRFDAYLLADVLRTDRQRLTPLTVDTDATVGLRMLIRTRADLVKARVAAHNQLRAHLQLAHPGVVGLFHVLDSKISLAFLTRFPTPRHARWLSEKRLATWLAAAHYTRPNTRTPAELFDHLRQAPAGHPDGPAADAAQVITAELIALLTCLRERITAIETGINDALAAHLDEQVFTSLPRSGRVRAATLLAEIGDARGRFPTDEALAAAAGISPSTRASGRSHYVVFRRGCNHRLRQAVVDFADASRAANPWAQDVYARARARGHNHAHAVRVLARAWIRIIWRCWTDHTPYDPTRHHALTALLATENPQHSDTPETTPLAC

SEQ ID NO: 280539 - protein, 345 aa, unidentified
MGPMYYIGLDVHKRTISYCIKDISGKIHAAGSIPATRLDLDRWLRSLPQPWTAAMEATLFTGWIYDYLKPHAAALKVAHPRMLRAIAAAKKKNDRIDASKICDCLRCDFLPECYMASTEIRERRRTLRYRNLLVRQMVQTKNKIAVLLMEAGVTYNKQKLHRAGYFRQLLASNPHIDEGLSSLLRSCRETVVRLQRTESALVRSLERDFLLMDRVERLTTIPAVGPITALTWALEIGDVTRLSSIKKAISYCGLCGEEKSTGDTTPRTPLSKQRNRHLQTTLIEAAKMAPRISPDLAMLYDREKQKGNSNRATLAVARKLVAYLVAVDRRQENFLVVRNEDRTAA

SEQ ID NO: 280540 - protein, 420 aa, unidentified
MPATFSIPRTNDLERAMTAVMIGVDPHKGSHTAVVISPAEEPLGEIRVRASAAQAGKLAEWASAWPERTWAVEGAAGLGRLLAQQLVAAGERVLDVQPKLASRVRLLQAGDTNKNDPNDALSVAIAALRSRTCREVAAEDHPAVLKVRAERHRDLARLRNQVACRLHAVLCDLVPGGIAKEISAAQAARILGQATPSGAVEVARAELAAEFPGDMRRLDAQLRGTRKKLAAAVKVSGTTLTQVFGVGPVIAGTIIGDIADVSRFPGRDHFASYNGTAPVEVSSGNRKTHRLSLRGNRRINHAIHMAAITQLRHKHSEGRAYYEKKLAEGKTHKEALRSLKRKISDAIFARLQADARQAAAAAPKGPGGHPGNDSASSAAGSHPARQLFGQATPGPGTSLRPATPAGTPSKPVPRKTQATT

SEQ ID NO: 280541 - protein, 408 aa, unidentified
MLYWGIDWSEHTQFVCICNAQGARLSQFNFELSAAGLQRLERERMQLAAPAADCLVAIETTQHLLVDYLLDQHYGVYWVPPNATHAYRNRQRSSQAHTDQSDAALLAEIVRTDRASHVRLQPNLPLTQQLHALVRLSETLRRSIQRQSNQLRAWLVRVFPAALELFADLTTQTALHVLSAYPSAPAARALSLDEFRTFCCAHGYTRPQRLAARYAHLQAAWPQASPALVQAAQEPVRLLASLLLPQVQARAQLHTQLQRLFVQHPDAPIFDSLPDAGVLLAPALLVKFGDQRERFPNAQSVQALAGTCPVTERSGQKRWIHFRHGCDHEFRRISQQYARASLRSSGWAQAYWAELRPHCRSDSHAYRCVANRWLAIIWKLWQTRQPYDEAQHLQHRAARRRPLAVPLH

SEQ ID NO: 280542 - protein, 343 aa, unidentified
MVYYIGLDVSLKQTSICVVNQVGSVVREGVVDSDPEAIAAFVRSKAPGAVRIGLETGPTATWLWTELKQLGLPVICIDARHAKAVLKMQINKSDRNDAAGIARIMQTGWFKEVRVKGLDNHSVRALLASRALLVKIKRDLENQIRGLLKNVGLVIGRAKFNVFTVRAEELIADRPELIAVVGPLLKARQAIEQQTDDLDRKVLKLARHDAQVRRFMTVPGIGPITALCFKATIDDPTRFKRSRSVGAYVGLTTRRHASGEIDWTGRISKCGDAMLRSYLFEAAGVLLTRVPKWSALKAWGMRLAKRNGLRKATVAVARKLAVILHRMWIDRTEFNWSKKEVAA

SEQ ID NO: 280543 - protein, 264 aa, unidentified
MPENVIGVDIAKDWIDTHCLDSGRSGRLEMTPHALKAFARRCAGALVVFEASGGYERPLAEALSAAGVAYARINPRQAREFARATGRLAKTDRVDAQVLARMGRALELSPTPPPDPARTRLTALMARRDDLTGEAAREACRLRQARDAFVRADIASLIGILKRRIARLEAEITALIKAHAPLAEAEARLRSAPGIGPITAASLIARLPELGHVSRGAIANLAGLAPHACDSGQMRGQRRIWGGRKDVRTSLYQAAFVASRYDPA

SEQ ID NO: 280544 - protein, 351 aa, unidentified
MNYIGVDYHKKYSYMVVKNEDGRVEGRGTVNNNKEEVQQFLEPYRPGMAVVEATRNWGLIYDWLDEVLDSVTLAHPLKVKAIAEARIKTDKISADILVDLLRADLLPKAYAPSKQTRDIKNILRQRMFFVRIRTMVKNRIYTILDRHPEVLSQVPEASDLFGAAGMQWLSQTTLSGEDNMLLSSELRLLKYLKEEITQSNGIVKKLAKKDARARLLQSIPGIGPFFSVLILYEIDDISRFRDEKKLCAYAGIVPSTHASGGKVFHGRITKTGNKWLRWAAIEAAQTAVRSDSEFRAYYQGIRGRKGTNAAKVATARRLLTIVYRLLRQGRFYERRTTNQEKNLVPAALVTS

SEQ ID NO: 280545 - protein, 419 aa, unidentified
MLYDSRVHMDRTLVDFLPSSALLQGGVFMTYFIGIDIAKYKHDCFIMDQYGSVIRDSFSFSNDSAGFSLLLSVLDSLEPSYEKRIGFESTGHYGLNLKCFLEEHDLSFMEINPILIKRFSSATTLRRTKTDKADAALIASYLTTVEYITYPTQSYHIRNLKSLTRSRDALVKLRSGQLVMITNVLDKIFPEFKPFFNKSLKSATALYLLRNYTVPSRMASMNSESYRKMASKLRRTISYAQFTKLRELAKHTVGREDACLTFELHTYLDIYWSLDSKIKEMETYIEEEFKKIRSHIQTIRGIGWISAASIYSEYGDIGNFQTPNQMLAYAGLDPSRNESGEHAYNGHMVKHGSSHLRYVLLNCAEMVIVHDPVFYDYYRKKREEGKPHRVALSHVARKLIRIIFFLEKNNIDYDPKKMR

SEQ ID NO: 280546 - protein, 377 aa, unidentified
MKRIKFVGLDVHAETIAVAVAEQEGEIRSLGVIPNREESVRKLVKKLGPVEQLRFCYEAGPTGYALYWQLSRMGAKCEVVAPTLVPVKAGDRVKTDRRDALKLARNYRAGELTAVWVPDAEHEALRDLVRAREAAKKDQLRARHRLSKFLLRHGRRPPVGATPWTVKYLEWVKRDVHFAVKAQEATLLDYLHEVEHMAARIVRLDSAIEEAVKVAPAKMRAVIEGLQALRGIAQISAVTIVAELGEVTRFSKARELMGYGGIVASENSSGERQRRGGITKTGNAHLRRVVVEAAWAYRHRPAIGFTLRKRQENLSEEVKEMAWKAQHRLHARYGKLMAKGKNKGVVVTAVGRELLGFIWAIGVQVEAQQKDSLRQAA

SEQ ID NO: 280547 - protein, 409 aa, unidentified
MRIIGLDIHRAFAEAVAWDDGKLKRLGRVDMRRHLLEGFAKKLSKEDVVVVEATGNASSVAAVIAPHVKRVVIANPKQVRIIAHAKIKTDTIDASVLAQLYASGFLPEVWIPDEPTQALRRQVTRRNQIVRQRSRLKNIIQSILHSHLIPSCPHADLCGASGRAWLFHQVLPEDERLAVERHLREFDRLGEDLKVIERDLARSALADEGVKRLMTIPGVDMIVALAIVAAIGEVGRFEQSQKLVSYLGLNPSVRQSGPGPAYHGRITKQGRGHARGMLVEAAWAAARAPGPLRAFFLRVRSRRGQHVAAVATARKLAVIIWHLLRKGESYAWARPALHAKKLRDLELKAGYKAERGQKGAAYVYNIKSHRNQERRWVEQAETAYARFVAGWNPRGPKRARTGAANEGRQ

SEQ ID NO: 280548 - protein, 356 aa, unidentified
MSEATSSDVIIGVDTHKQTHTAVAITGLGARVGELTVSACTQGYHDLEAWAASLGSIRGFAIEGTGSYGAGLSRFLRERRHTVHEVCRPDRRARHQHGKADHLDAEVAARTLLSGYRAAVPKSGTSEAEMIRHLKVARDTAVKARTQAMLTLKSLIVEAPAALREQLEALRGKKTLLRHLAALRPGAVTTTVASAKTSLRAIARRWLALDGEIRAHDAHLQDLVRRRSPALVEAHGIGVGTAAEMLVLVGDNPERIRSEAALAKLCGACPVPASSGKTSRHRLNRSGNRQANAALHRVAVVRMRAHEPTLRYVSRRTAEGKSKAEIIRCLKRFIAREIFGHLCAAPKPTSAAPQAP

SEQ ID NO: 280549 - protein, 352 aa, unidentified
MEIIAMDSHKHYSQVCVQDTKGRFLCEQRISHGRGNIFDFLTRWKQGDSVAVETIGNWYWIVDEIEAAGMLPRLVHAHKAKLMLGAVNKTDKLDARGLNKLQFAGTLPTVWIPSSDIRDKRELPRTRMVFANLRTRLKNRIHSVIDKYGWQNDFADISDIFGGKGREQMATTIKKLPPETAYTLKCLLKELDEVCEQIERIEKRMKKTFGETEEVKRLMTLPGVGFILAAVIASELGDIKRFSSPECLASYSGMTPRVHSSGGKTRYGQLRNDVNHYLKWAYSEAGNSTAVNHKRLPARHVSKLYSRIRSRVGHAKAVGAVGRHLAEASFWVLTKKVDYKEPKLKSFSSTAI

SEQ ID NO: 280550 - protein, 342 aa, unidentified
MKQRYYVGLDVSRDVTAICVRCANGVVERRCETVTEPEAICAALVDLRDGLERVVLETGRMANWLHGELTRRGLPAICVDARQAHAVLSQMHNKTDANDAAMLSDLARTGFYRKVEVKSRDGQERRALLAARDAAIGARRNAENTIRGLLASFGLRVPGRPRTYEARIRAVLEGQDALAPIILPLLAIRTEALRQAAALTKELVRQVKSSDACRRLMTVPGVGTVTAATFVATIDAPGRFTKSRSVGAYAGLTSRRHQSGAVDYGGRISKRGDRLLRTMLYEAANSLLCRVKPGRGQALKDWAMAVKRRTSHKKAVVALARKLAVMMHAIWVSGGVFEEREA

SEQ ID NO: 280551 - protein, 343 aa, unidentified
MQTIATIGLDIAKSVFQVHGVDAAGEVVIRRQLKRRYVLAFFQKLPSCLVGIEACASSHYWSRELQALGHTVRLMPPAYVKPYVKRQKNDMADAEAICEAVTRTNMRFVPTKTPEQQSALMLHRTRHLLIRQQTSVINAIRAHLAEFGITAPIGRRGIEELLRVVADPSDNRVPELVRACLAALGSQLLGLRKQILQFDRMILAWHRSNQTSKRLNCIPGVGPLLATALVASVADPKSFRSGRNFSAWIGLVPKQHSSGGRERLGSISKRGDRYLRGLFVAGALAVIRHAKLHGTNHRPWLTGLLARRPTKVAAIALANKLARMAWALMARGERYNYPVALMP

SEQ ID NO: 280552 - protein, 322 aa, unidentified
MDDVRLAAVLDVDSGETSERRFGATREELKDWAMPLQGSLAAVAIEATNGWRWVWRELSALGFDVRLVDPAQAKALRGRIKRAKTDRLDARWLCVLLAKEMLPESWLPPAEIQTLRDQTRLRKALAEDRTRWAQRLHALLTHEGWPCQRARLLTVEGRRWVASLSLSPAARSQVERLLRLIEAVRALETELRRFARADRRCIALQTIYGVGPILACHLLAELGEAARFRRARQAVRAAGLDPVVDESGETSRRGRLAKHGAPVLRWALVEAAQHAQRTNSPDRGLYTQAATRVGNKRAVLTVARKIGRRAYHVLNELETQAA

SEQ ID NO: 280553 - protein, 446 aa, unidentified
MTDKKRWRNRKERKEWAQRLQSENPGLEVVHPHAAGIDVGNGMHYVAVRPDRDPQPVRRFECFTADLHRLADWLQRCGVKTVAMQSTGVYWIPIYEILEERGIQAYLVNARHTKNLPGRKSDVQESQWLLKLHTYGLLNNSFQPRSEIRVLRTYWRQRGEHVRGAATCVQRMQKALTQMNVQLANVISDVSGLTGQTIVRSIVAGEHDPRKLAELSDPRIQASREEVAKSLEGNWRPELLFVLQQEVAMYDTYQQRIAECDQQLQKHLAGFANLIPLQPTEEEPKRKKTKPAKNAPRFELRSELQRITGVDLTRIDGIDVMVAQTLISEVGLDMSRWKTEAHFSSWLGLCPDNRTSGDKVLARGTRRVVNRAATALRMAAITLMRSRTYLGAQYRRLRTKLGAPKAITAMAHRLARLAYRMLKYGQRVSTSLRPALMEFSEFFLVC

SEQ ID NO: 280554 - protein, 378 aa, unidentified
MKKLYYIGLDVHARTIAVAVADGRSVRSLGAIEHDVPKVLKLLRKIGPMGNLRIVYEAGPTGYGLCRALRSAGCNCEVIAPSLIPSMPGDRVKTDRRDAEKLAMLAQAGLLTTVYVPELEQEALRDLVRAREAAKEWQKKSGQQLDKFLLRHGRRPAVKMTKWTTKHMNWVRSQRFEQPAQQTSFEEYLAEYDHQCERVRRLDDHLVAGAEQLRPEQQAIVRALVALKGVRFLTAVTVVSEVGDMMRFGHPTQLMAYAGVVPREHSSGDTVRKGAITKAGNAHLRRIVGESAWSYSRGLSGAGKDVRKRREGLSAPIVAIAERADHRLRQRYRALSGRGKHKNKVITAVARELLGFIWAVGVQAQLEHARAPSKAEAA

SEQ ID NO: 280555 - protein, 457 aa, unidentified
MEEFFEECNDLEVVCQRCCGLDIHKKMVVACLIILTADGKRLKQIRTFRTVTQELLELLDWLKAAGCTHVGMEATGVYWKPIYNLLEGHFELVVANARHIKAVPGHKTDVNDAQWIASLLQHGLLKASFVPSTEQRELRELTRYRTTLVEERARIVNRLQKTLEDTNLKLGDVVSDITGKSAQAILRGLLAGETDPKVLANLARGRLKAKRAELEAALVGTIKPHHHFMLTEQLDHIDRLEKAIGRVGAEIEARMGPSLPPEPEQGPSDKPAEPEQGPSDKPAEQANKEPLSLAQAVVLLCSIPGISRRAAEGILAEIGTNMDRFQSAKHLASWAGMCPGNHESAGKRLSGKTNKGSPWLRKLLVEAALAAGRTKNTYLSAQYRRLAARRGKKRAAIAVGHTILVIIFHVLQDQKPYEELGGNFFDERERQALEMRLVQRLEKLGYDVSLEPVAPAA

SEQ ID NO: 280556 - protein, 370 aa, unidentified
MENITYVGLDVHKATVCVAIAEGGRSGEVRQIGVFENRPELLLKLVARLSKGGRGLSFCYEAGPCGYGLHRLLSGRGHDCVVVAPSLIPMKAGDRVKTDRRDAVMLAKLHRAGELTPIWIPDAAHEAMRDLVRARATAGRVLSKARQHLQSFLLRHDQIYRGARAWTLAHRRWLTTVRFAHPAQQIVLQDYIHAVQDAEARLDRLTRQIEELLPNWSMAPVVTALQAMRGIALVVAVTVVAEVGDFRRFANARQLMAYLGLVPSEHSSGASIRRGGITKAGNALARRVLIEGAWTYRMPARVSRKLHDRNEGVSPVIRDIAWKGQIRLCSRYRRLAAAGKPKVVVTTAIAREMVGFIWAIARIAQPTLQV

SEQ ID NO: 280557 - protein, 430 aa, unidentified
MHNKNYISVGIDVGSAFSFMTILAPDETVILKPFKITHNNKDSLERAVSEIKKAEELYSLESRTFLESTGIYHFPLFCYLVDCGFNASIINPIITHSTKNGNIRKVKNDKIDSKGIAKLGLSKDIPVSQFPAKLVLELRSLTRKYYDLTDERSAHINKLKGDLHTVFPQYLDVFCDVTGKTSTMILRQYGTPDKILRGHKKTMIEKISKASRKGLAKASERYEKLCAAANAAKTFGCQIDSIYFNSFLTLDLVEKLDSALDSILNRIRQLITFNKNEKFIQQIKLLNTIPGVGFLTAVTIMCEIGDFSAFRNPKQLFAYFGLDPEVNESGKFVGTQLHMSKRGSRIARRAIFAVALASIRTKRNGEGINPYLRKYYELKSGQKPKMVAIGAVMHKVCNIVFAVLRDEKAFELRSPEEHCKQYQRPALAAA

SEQ ID NO: 280558 - protein, 386 aa, unidentified
MHHPTTLPVSEQTCSREDCATLFVSLELSRSTWVATSLALGSRKMSKHTLVGGDAHKLLDLLARLKSRAEQRIAAPVKIVTIQEAGLDGFWIHRLLEANGVESHVVDPASIAVPRRHRRAKTDAIDGETLLRTLMAWQRGEPRVCAMTVPPTPSEEDRRRVSRERATLLRERIRHTNRIRGLLFGQGITNYNPLHKNRREGLEKLRTGDGHPVPVHLKAEILREIDRLELVLRHINEVEAERDEMLRPGQASSPVALLMRLKGIGPEFAAVLYLEGLFRHFENRRQLAAYAGLAPSPWKSGSVDHEQGISKAGNPRLRTTMVELAWMWVRYQPASALSCWFRQRVGSERGRIRRISIVALARKLLIALSRYINHGEIPAGAVVKPV

SEQ ID NO: 280559 - protein, 381 aa, unidentified
MTTTATHNAHDTTPGRALFVAFELSEKPWKLGFTTGHGQKPRERSIAARNQTRVLQEVAQAKRRFGLPETAPVFSCYEAGREGFWLHRFLEAQGIPNHVVDSSSIEVNRRKRRAKSDALDVRKLLSMLMRYAHGERDVWRVVRVPSVEAEDQRHLHRDLETLKQERASTTTRIKGLLSSQGVRLTSVNKLPEQLEALRLWDGSPLPSGLRRRVLRVYAHHQFLSEQIAALEAERRARLQSAHDASIEKVHQLMQLRGIGINGAWLLVMEFFGWRELKTRREVGGLAGLTPTPYQSGESAREQGITKSGNRHVRWMTTELAWSWLRYQPESALSCWFRERFGGGGKRMRRIGIVAVARKLLIALWRFLETGVIPQGAELKAA

SEQ ID NO: 280560 - protein, 335 aa, unidentified
MPGVTSAAGLIHLGMDTSKNTIVVGVLMPGEEVPVIDRIWYEEGSVRHLVGRLGDPAGLRACYEAGPCGFELHRLLASMGVACDVVAPSLIPRRAGERVKTGKRDASRLARLHRAGELTAIRVPAGAEEAVRDLVRVRAALLAGRKRAQQRITAMLLRHGRVWRSGSHWTQAHEQWIAGQRFGEPALASALAHYRAALDTRRAELHAVEDELVPWAGREPLGPVVARLGCYRGIAGLTGLTLAAEVVDWRRFPSARAFMGFTGLVPAGYSSGERTRRGPGHQGGLRTGPHGADRGGLVLPVPAPDRPHLAPPPARRGPAHPGALLAGAAPAARSL

SEQ ID NO: 280561 - protein, 342 aa, unidentified
MQITTIGLDIAKNVFQVHGIDGNETVVVRKQLRRGKLIAFFESLAPCLVGIEACATAHHWARELTRLGHQVRLMPAKDVKAYVKRNKNDAADAAAICEAVRRPTMRFVRIKSTDQQCQLMQHRTRDLMMRQRTQLINALRAHLAELGIVAAMGDKGVTELLMIVADEDDGRLPVEARASLALLAAQLNALQMLIGSLEKQIKMQHRANPASQRLETIPGIGIIGATAIAATVADPTVFRSGRDFAAWIGLVPRQESSGGKHKLGSISKRGGRYLRRILVVGAHSVLRRAMEKPGKYPWLTQLMARRPFKVVAVALANKMARMAWALLTYGGTYRAPRLSIVP

SEQ ID NO: 280562 - protein, 372 aa, unidentified
MIKLTRTMNKCHSNTELSSHEGTRRQFNGGRCAIKLGIDVHQDFYVVVMQVGGANPKPPQRFQKEAFLHWAAKLKQSSGAEIHAVYEACGFGFGLQRALSALGMRSHVVCPQKLDEANKRVKTDGLDAKALCLRLDRFVQGNRDALALVRVPSEQEERLRAIHRQREQLVKARKQLEAQGRNLMVNHGIEPVKIWWKPRKFALLPLPQWMRELLNNSQPILIALQEKIGALTLQLQAAAASKQPRGLGAMSSVIIDREIGDWNRFNNRRQVASYTGLCPGEYSSGNTRLQSCVTKHGNPRLRAALVELAWRLVRFQPNYKPICKWNATLCKGALATGAARKKAIVAVARQLAVDLWRIRTGRLSAETLGLSN

SEQ ID NO: 280563 - protein, 421 aa, unidentified
MEGSYRIFVGIDWGSESHQACVLDHERRIVAERSFAHAGSAIAEFAEWLNGLVEAPEHLAVAIEIPRGAVVETLVERGFHVYAINPKQLDRFRDRYSVGGAKDDRRDAFVLSDSLRTDQSCFRRVVLDDPLVIQLRELSRADEDLQREGNQLANRLRDQLNRYFVQTLKLCPSADEPWLWTLLELAPSPSVAQRLRPNRVERLLREHRIRRLSTEDVISALQAPALKVAPGVVEAAVEHIALLVPRLRLVHNQRRRCGARIEALLNELQAPDEEDDKRRRHSDVAILRSMPGVGRLVAATIIAEAGAALSERDYHALRAHAGIAPITKQSGKHRMVQMRYACKSRLRHALYHCARVAVIRDLSSKSYYTALRRRGHTHGRALRTVADRLVRILIAMLTNGTLFDCSKARTTQLDTISEKVA

SEQ ID NO: 280564 - protein, 332 aa, unidentified
MYIGIDIHKRYAQVAVMNETGQIIEEARVENANLDEFAQRHAGAKAAIEATGNYYHIHDTLSEYLDVVVANPGKLKTIAQSDKKTDRVDAKQLARLVRLDSVPESYVPTEQIRECRALVRGRESLVQNRTEYANKVHALLSDHGVTRNVKPLSASGRESLRELSLPETAQALLESHLRVIQTLTDEITQLDERIEQRAESLPETQLLVSIPGISYYSALTIYAELGEISRFDGDKEVVSYVGLNPVIRESGDSRFEGGISKKGSSRARWVLVQAARVAVHTCEDEYLSRFYNRLAGRKNDQKAIVATARKLLVSIYYMLERGQEYDPPGVSS

SEQ ID NO: 280565 - protein, 429 aa, unidentified
MSYRIAGIDVHKKMLAVVVSDVEVDGEYRFERRMFGSNPEQLRSLAAWLIEQEAEEAVMESTAQYWKPVWEALERYWKPIREKREGASRRSGTLHLAQAQSNRGPRGRKKDFPDAERLVKRLVARELTLSFVPDAEQRLWRTVMRRKYQLTRDRVRLQNQLESLLEEGHIKLSSFVSDLLGASARRMLKAIADGETDPAALAALADRKLRATPEQLCDALGACTDLKPVYRRLLRMVLEQVQFLEQQIGQLDQEMAILLNQHQDAVQRLAEVPGLGVDSAQQIIAEVGATAATFPSEKCLSSWVGACPGDDESAGVNYSHRSPKGNRHVRRVLNQTANAAARTKGSIFEIVYRRSVPRLGHNQAIGAIAHRQCRLIWLILHQGARYEERGPAVTKQSKQKRTARMIRQLRSLGYRIEAPNPQPSQAQAQ

SEQ ID NO: 280566 - protein, 416 aa, unidentified
MKLFVGLDVSSEKLDACFMTDDSTCSVLKEASYGNSQLGASQIKEYILEFSQKFEIESLVIGMEATSLYSFHPAMFFKEDLELNQLNLMVSVEQPNKIKKYRDIFEENKNDQIDAFYIADYFRIQRQVNSIIKEEEYLALQHLTRTRYQLIKQLVRTKQHFIENIYYKCNTLSKELKAEGGSVLSATLVTLMTEDYTMDQLAELSLEEFANLIQKLGKYRFKNPEGIAKAISKAIRSSYRLGKVHQDSVDVVLGVLAKEIRSLEKLIKDLDKAIDDLVVVLPEYQCLTSIPGIGPVYAAGILAEIGPINRFSDESKLAKYAGLYWRQNQSGNSEYENTPMAKRGNRYLRYYLVEATNSVRRYEPEYHAYYKKKYAETPKHKHKRAIVLTARKFTRLVDTLLRNHQLYMPPRSVIDK

SEQ ID NO: 280567 - protein, 434 aa, unidentified
MTRYVGIDLHKHLIVGHVVDPAGKKVDAFRYESVHPVTLEHIGKMRLKPEDEVVLEATTHCWAVARALQPFVARVVVSNPMATKAIAKAKVKTDKVDAAVLAHLLRLGYLPEVWQPDDATRDLREWTARRSRLVGQRTTVINRLRSTLAQRLLHCSYEMTSPAARQWIAGQAVDDDARWLLQSDLRLMDSLQAELDAMDKLMAKRGYVDPRVKLLMTLPGVSQHTAQSLLAAIGDITRFRDADALASYLGLVPSTRQSANHCYHGPITKQGRNHTRCMLIQAAQSVRTHPGPLGYFFRRLKKRKPHNVAIVAVAHKLVLLAWHVLTKGEPYRYALPQATQKKLSRMRILATGEKRRAGLPPGTKQSPARLPGGSHRIKPLAEVYASEQVPAVRPAPAGELRHLAESQLNDFVDGLHQAHIVPRCRPKEDSAGSP

SEQ ID NO: 280568 - protein, 298 aa, unidentified
MAALSIADVPANVTVGVDTHKHSHIARAKDGMGRHLGQLEIETDPRGYAGLLAWAQGFGPVVTFGIEGTSSYGAGLTRFLRAHGQAVIEVLRPVRRDRRFGGKSDPIDADVAAGAVLSGKATAVPKAGDAGVEMVRALKIAKQTAIKARTQAVNAVKALIVMSPDPVREQLRHLKTPALVRTCSAYRVDGASDPTSAIKLSLRSMCRRYIALDHEVRALEKELDALTVRLVPQLRERFGVGQDVAATLVLAAGNSGDRLRSEASFSMLCGASPIPASSGMVQRHRLNRGGDRHRQAAT

SEQ ID NO: 280569 - protein, 452 aa, unidentified
MNRRVERPAGLPIIHDRAAGIDVGARFHVVAIGPDLSDEPVQTFQAFTGDIERMADWLISAGVKTVAMESTGVYWVPVYEVLEDRGIEVIVANAREARTVPGRKSDVNDAQWLQRLHACGLLRPSFRPGRDIAALRTYLRLRERHLEYGAAHIQHMQKALTFMNLQLQHVVSNVTGVTGLNIIRAIVNGERDPQVLATLRDVRCKASSETVRQALVGNYQPEHVFALSQALALYDFYQARIGECDVEIERALAVLNAIQAIPATPLPEPRHKTKQSNAVSFDTRVPLYQLTGVDLTQIHGIGPYLALSLVGECGTDLSRWPTPKHFTSWLTLAPGCKISGGKVLSAHTRKTTNRLAAHLRLAAVSVGRTSTALGAFYRRLAGRIGKAKAVTATARKIAVLFYNAMRFGLAYQDPGADYYESRYRERVVKQLHRRAAEFGFTLQEAAASTAVS

SEQ ID NO: 280570 - protein, 421 aa, unidentified
MNDSEQWQQHRAFGALDWASQKHSVIVVNQTGKVIEDFEIEHSALGWKNFRERLQAYGPIPFAIETSQGAAVEQLLEAGMMVYPLNPKSAQAYRERKAPSGVKDDRLDAWSFADALRVDGQGWKALRPEEPLIKELRLLCRDEVALIEQRTAFIQQLRHALAEYYPAALEAFKDWTSVSAWMFLQRFPTPESLAQAGKRKWQNFLHSRRLWGSEEGPRRMEIFAHALEFAGTAPTVKAKSLLALSLVQMLFAVEKQLAVYRHRIEELFARHPDHDLFGSLPGAGPKLAPRLLSEIGEDRGRFDGDPQALQCLGGTAPVTKRSGKKRKYCHVHQRWACDKHLRHAIYLFAEQSLSRCVWAELYYQHHRQKNCSHANALRRLGHRWLKIIHKMWLDRTPYNAEFHHRNQVKHGSWIFQLQPDQ

SEQ ID NO: 280571 - protein, 356 aa, unidentified
MPKIKQPDFAGQTIFCGIDVHKKCWRVNVRDDQFELEDYSQDPSEELLLKHLQKRYPGASFKMAYEAGFSGFGIQRSLKSWGVSCMVVNPADVPLTDKDKKRKSDRIDARKICRHLSNNMLRPIYVPTIKMEHARALVRQRIRLVSDQTRCKNRIWSFLMVHGLKLKMDKPNDYWSRRFIESLKTLPGITSLLRQSLDIELEEYLLIRKLVGNMTKQIRMLSTQKSLASLQSLIQSIPGIGLLNSMVIITELQDMKRFQTLDKLCSYAGIVPDTASSADRTTVKGITHRSNEYLRTAIVESSWVIIRKDPAMLHLYKKYCRRMVPNKAIIKIARHLLSRIRYVWTNRIEYEVGLVG

SEQ ID NO: 280572 - protein, 342 aa, unidentified
MKDSIYDHYLAIDWSIKNMAIARMTKKSNKITVIDVDSDIEDLQAYLKNLRGTKILTIEETTTSQWLYTELREYVDRIIICDPNRNKLLNEGAKTDKIDAGKLVQLLKAGLIKEVYHSTDKFLYLRRIVSGYEDLVKAGVRLKNQRYSLLRVCGKSGSEKKGSRLDAQGEQFVLECLDRQIEAYEKDKQGYEMQFTKLAQSYPEIKHQKSLPGIGVINAVKIVARVVTPYRFPDKGHYLSYTGLIKLAKISGGRSYGKRNPRYSRQLKSVYKSGVLAAIGGNNSINDYYNSLIQDGYAQHNARQKACRRLAIISLGVFKSGKRYQPYRRDHVKGDKEGTSSL

SEQ ID NO: 280573 - protein, 316 aa, unidentified
MSKRSMVCAGIDTGKRKLDVALHGRDERLEVKNDPDGHRSLAAWLRERGVKRVGIEASGGYEMEVVAALRRAGFVVVVFQPAQVRAYAMFHLQLAKNDKLDAVLIAACTAAAAKIHVPPDPRLSPLAARLTLIEQIGADIARHKTRLETCRDPHGREFWQQEIARLEATEKAELKALEKMIRQHHDLSQRLDLIESVDGIGIKTAIIILVRIPEIGRLGRTQVAALVGLAPYDDDSGTRHGDRHIRGGRKRVRSGLYAAALPASFRHNAQLRVMYARLKATGKDHKVALVACARKLVIFANTVVARGTPWQSQYAT

SEQ ID NO: 280574 - protein, 344 aa, unidentified
MRLFVGLDVSLAKTAICVVNGHGKIVKEAQVASEPEEFVRWIGELNGSITAIGLEAGPLSQWLHRGLTEAGLDAVLMETRQVKGALKAMPIKTDRRDAEGIARLLHLGWFRPVHCKSVSAQEVRAVLGARKAVQQSMIALEMSLRGLLRNFGLKVGAISRGRFEHRIRELAVGNPMLEAATEPMLRARASLRCELAGLERRVRQLAQDDPVCHRLMSMPGIGAVVALTFRSAVDDPARFTSSKKVGPWVGLTPSRNQSGERDVSGGITKAGDVNLRRALCQAATVMMNRGRSTWLRTWAAQIARRRGRKRAMVALARRIGVILHRIWVDGTAFQAEAPIIPQEI

SEQ ID NO: 280575 - protein, 493 aa, unidentified
MIHSFGVGYIPLRRLRIIAPLRLRAIALLLLLKEKTLSKRSKKSKFHKFNVQSLPEHLRHINLNAAGIDIGSERHMVAVPEGRDEVSVREFGAFTADLQALADWLQQCGVTTVAMESTGVYWIPLFELLDRRGFEVKLVDARHVKNVSGRKSDVLDCQWIQQLHTYGLLAGAFRPADELCVLRSYLRQREMLTQSSSMHIQHMQKALQQMNLLLHNVVSDITGVTGMKIIKAILAGERDPRSLARNRDGRCQNTSATIAKSLVGNYREEHLFALKQAVDLYETYQTKIADCDEAIVKHVAKQPDITDDTLPPGEKVIQARERIRSGIDVRELLFKKSGVDLFAIPGLAADTLLTLTSEVGFDLSPWKTIKHFTSWLGLCPGTKISGGKVLDKKTKRNPNRATQAFRMAAATQARSKTALGAFYRRIKSRTGGKQAVTATAHKIARIYYTLLTKGTSYVELGQQAYEQKYKQRRIHHLMTQAKSFGFQLVPCAT

SEQ ID NO: 280576 - protein, 372 aa, unidentified
MDQHSRLFIGLDVSKLKISVAVADGERGGEVRFLGDIPSDPASVSSLVYKLAKRGAKLHFCYEAGPTGYELYRQLTEMGHDCVVVAPALIPKRPGDRVKTNRRDAVSLARLHRAGELTAVWVPDRGHEAMRDLVRAREAAQEAQKRARQQLQSFLLRHGRVYSGRSSWSLAHRRWLSTLRFEHPAHFIVLQEYCQAIEDAEARLKRLTDLIAETVKSWTMAPVVEAYQALRGVSLMAAVVLVAEIGDIRRFDNPRQLMAFLGLVPSESSTGEHVKRGGITKAGNSRARRMLVEGAWAYRFPARVSRTKQAQLEGLPRSVREIAWKGQLRLCSRYRTMILSGKHKAIAITAIAREMSAFLWAIGQEVQPAHHA

SEQ ID NO: 280577 - protein, 346 aa, unidentified
MTNNIQFSSVCGIDIAKSVMQVYKVTSDGVVSNKAVKRADFLNEFRNTPPALIGMEACGGSQHWARELQSLGHTVHLMPPKLVKPYVTGLKNDKNDARGIYKALEMSVREVPVKSAAIRDLALLQTMRTKRQREKIAKINHIRGILTEYGLVMGKSINAFLAKAGSLIVQLKERADVSPYIVSELTALFREVKEAMEKIKELETNIDSIAKTLKQYDLFRSAPGVGPITAATMLVLLCNPAVFKNGREFAAYIGLAPKSSGSGGKNFVTHIPKKYECNNDVRALLVQCAHSICRCKHKSDWVSSILARKPKKVAIIAIANKLARQLWIMAKKGGKFERRFILAAAQ

SEQ ID NO: 280578 - protein, 373 aa, unidentified
MPKYSTAFGMDVHLRSTTVCALDADTGEAVTRRFPGNPWGEIAGWMDGFPGPSLAAYESGYLGFAPQRELAGLGVECVVAAVSKIPRSAADSASKNDRNDAARMAKAILAHDISPVWVPSPEVEGIRDLAGAYDGATARLATAKQRLLAFLARRGFAYGGTTPAGNPRKYWTYDFLRWLDKVRPEDDGGVRTLAALRNEVEAAAEARADLLSEYRAAVDASPIAAEVAALQSIKGCAFALAAAFSAEVGDFTRFRSGRQVTAYFGLAPSQRSSGDSVRLGGISGAGNALVRKLAVEGSWCYAAARHQPKLMPRDTGVPLEIRMHGRKGSERLLRRREEMLARGVPAAKANAATAAELVRWLWALGMMCREGAE

SEQ ID NO: 280579 - protein, 315 aa, unidentified
MSHAVGIDVSQGTLEVCAEPQSASRTFANTTAGIADLLAWVVPMTPTRFVFEASGGYEKKLLMALVGAGQTACRLNAQRVHHFAKALGQRAKTDPVDARVLQHFGDMVQPAATVLPRPERAQLRDLIQRRQQLITLRTGEINRSHQAESAVRVSHQRIRQALTDEIKRIEQTIRDILRATAELAALVALLSKAPGLGTLISATLCGQLPELGHYSRRAISALVGVAPMADDSGKHHGQRHIAGGRAVPRTALYQAVLSGLRHNPQIKALYLRLKARGKPSKVAMTACMRHLLCMLNAMVRDNQPWNPLPATTSKH

SEQ ID NO: 280580 - protein, 321 aa, unidentified
MTYIGIDVSKDTFVVAYSPDKNSKTKTFKNTTKGIHEFIRTISKEEHHCVMEATGNYSALLVYLLSEAGITTSLENPLKVKNFARAMLSTVKTDEIDARLIALYGEKMQPAPYKLRSDAILTLKQKRTVIRQLKKQLIATRNLKGSMEVLPFFDAKCKKSIDKTIAFLEKQIKDLEEDLASLAKSEYKKQMDLLTSVKGIGITLAAALIMATGGFTYFDNAKQLTRHLGLSPTYQQSGTSVNFKGHINRNGDSSLRSQLYVAAFASLRCNTECRACYDRLRSNGKPGKVAVIAVANKLIRQAFAVVTQEKPYVDGYISSKK

SEQ ID NO: 280581 - protein, 426 aa, unidentified
MNCNLNDKIKQVEENSLVVGIDIGSTFHYARAFDWRKMELAKVFKFSNTLEGFEALSKWMNNIQALRGKEKVIVGIEPTGHYWFALGQYLQSKGIKLVMVNPYAVKRSKELDDNNQTKNDTKDPSVIAKLVIDGRYSIPYVPTGVYADLRIMFTNRTRITEEIGKIKNRFARWFAIHFPEYKEVFRDYESKGSLLLLKVAATPSSIVALGAEGINKIWRDAKIRAVGLKRATTLYETAKKSIGQTQGTAAAEVEMKLLLEDYEAKKRQYASIMVALEEAVKRVPGTDRLLAIKGIGLVTVAGFLAETGDLGRFESPKQIQKLAGLSLRENSSGQHKGETTISKRGRHGLRNVLFNAVIPLLATNDEFRKLHEYYTTRAKNPLKKKQSAIALCGKLIRVFYVVLVKGVEYDGQKMLSDIHRNENQAS

SEQ ID NO: 280582 - protein, 327 aa, unidentified
MQGKAVSEQKTEGKSNVGIDVCKAWLDVHILPCRQAFRVPNTSEGHRALKRRLKAHDIALIVMEATGRWHHQIHRSLDASGYRTRVVNPLRARLFAEATGLLAKTDKLDAGMLAAFAVTLGDDSARSPAPEIIEEIKELMQARTSAVHDQTSLTNQLKSAQTPFLQRHLKGRIDKIAKSIKALEAQVLKRLKADDLLARRYDILCSIPSFGPVVAMTVLACLPELGHCNDRQLASLSGLAPWPADSGEREGIRRIKGGRQAVRNVLYLAALSAVRFNSDMKAFFNRLTANGKANKLALIAVARKLVALANTLVIADRTWTPKAPNQA

SEQ ID NO: 280583 - protein, 343 aa, unidentified
MQAVTTIGLDIAKSVFQIHGVDAAGNVIVRRQLKRRYVLPFFQRLPPCLVGIEACASSHHWSRELKALGHTVRLMPAAYVKPYVKRQKNDAADAEAICEAVTRANMRFVETKTPEQQSCLMLHRTRHLFIRQQTAVINAIRAHLAEYGIVAAVGRNGVEELLGVVADPSDKRVPEIARACLAALGAQLRMLKAQILEFDRMITAWHRSNETSKRLDAIPGVGPALATALVASVPDPKAFRSGRNFSAWIGLVPKQHSSGGKDKLGSISKQGDRYLRSLFTAGALAVIRYAKIHGTKHRPWLTALLARRPAKVAAIALANKIARMAWAMMAKGERYKEPVALAV

SEQ ID NO: 280584 - protein, 346 aa, unidentified
MEHYVGLDVSLKLTAICIVDRTGKIEREGVVASDPETIAAFIKSHAPHVTRVGLEAGATSTWLWTELNKLGLPVICIDARHAKAALKLQINKSDRNDAVGIARIMQCGWYKEVRVKDLDSHAIKALLVSRALLVKIKRDIENQVRGLLKNLGLVIGQAKMNVFAVRAAELAGARPELAGAVEPLLKAREAVGRQIADLDRKVMRLARNVAQVRQFMTAPGIGPITALCFLATIDDPTRFRRSRSVGAYVGLTTRRYASGETDWTGRISKCGDKMLRTYLYEAANVLLTRVAKWSALKAWGIRLAKRSGLRKAKVAVARKLAVILHRMWIEGSEFKWSSKEAANQPA

SEQ ID NO: 280585 - protein, 391 aa, unidentified
MINIGIDVGKFKHCATVLDDSTGEVLIKPFFLTNNRKGFDLLYSKTKQFIHRKHSVGMEDTGHYMINLTNYLLDKKFTVKYINPRATCLRRKGLGISAKNDRKDALLIAEMLSEKRFWRSISVRSIENSKFRDITRLYHQLQEQQNQDMNRLQRALDIVFPEANSLSWTRYSKAYMKFLSTYPSASLIALEDIRILRKALKTEGRGRQCKVTVEEIRELAKNSVGEDNISIDLEVTSIIAIINTREEQIRMLEKKIEEFSHKLNSPIISIPGISHISGMTILAEIGDINQFQNTGNLISFAGMDPLVYQSGKYDAAHMPISKHGSRYMRKALYQAVFTVCKYSPTFHDYYTKKRNQGKSHRCAQGHCARKLLRVIYKLLSTNSLYNQNHIQ

SEQ ID NO: 280586 - protein, 327 aa, unidentified
MDQPPRTTAAAPDNAHQMGPQPPVPFDRLDAFAGFDWAMQKHDVCVVARDGTILLRLEFADTAEGWADLRQRLKPLGKLGVAIETSRGPAVERLLEMGLSVYPMNPMAAQRFRERKAPAGAKDDPLDAWSFADALRTDGHAWRPLRPDDQETQLLRTLQGQINEYRRRIERAFDDHPDGGLFASLPGGGRKLAPRLLGELGADRSVFESAQALQCYAGTAPVTRQSGRSRFVKLRRACNKVLRATVHLWADESRHDCAWAQAYYRRKKEQGKNHATALRYLARRWLKILWRMGRDRRPYHESHHMGRLAKSGSWVIALVPKPEAQPG

SEQ ID NO: 280587 - protein, 319 aa, unidentified
MSEIKFTQVVEVGCGIDVHQNLIVATIQKGNDWLETREYDAYTSSLISLRDWCKSEKVTHVAMESTGVYWKPVFNILEEDFEILLVNARHVKNVPGHKTDKKDSRWLSKLLLSGLLKGSFIPPVDIRELRDLVRYRKKVVAQAASDKNRIIKILEDANIKLSSVLSNVDGAVGSKIIDKLIDGQTDIDGLMQFYHGKIKAGKEEFRKALQGHISPHHRFMLQMLKDSIADKGRMLERLDAQIDQATKAYQIELSMLQTIPGVAKDSAISILSEVGGDMSQFPDEHHLSSWAGMSPGNNETGGKKKLYGPSTGTNTFKAL

SEQ ID NO: 280588 - protein, 325 aa, unidentified
MGIDLGIASQHSVRVLEADGRVVCRASCVPTAGSLTLVERAALAGAPQGTRLAVVFEPTGPAWMPIAVFFARRGHDVYRVSSAKAADLRRFLRRHAKSNGIDAETLARIPLADPRGLQRLELSGPDAAALDRRVRACERLTRAASEHKVRIKDLVRQLMPMTPLTGDLGKADLAVLECHADPRALLAAGMAGLTRLIASTSNNQQGQDRARQWRAAAAAAVDLYGDHPAVPYDALAAEVATEVRLLRAIQAELAVHAAAREQHYRRPDPGQLARSLPGFAEISAPVLVAVMGRPGRFRDATRFKSYAGLAPRASETGETDPRAHR

SEQ ID NO: 280589 - protein, 327 aa, unidentified
MNRQTEVSYLGIDVSKKKLDCALLLGAKTRNKVVENSPAGMNVLKAWLARHGGNAAYVCMEATNTYWELCAETLADAGHPVSVVNPALVKAHAQSCGLRTKTDAVDARALADFCREKQPERWLPPSSSERALRALVLRHQALVEMQTQEKNRLETTREAVQDSVQVHLEWLSTELKRIEKAIREHINDDPGMRGRRDLLDSIPGIGERTIALLLAYLGTQCRFANARQFVAFAGLNPRQHESGSSVHHKARMCKVGHAEIRRALYMPAMVTLYRTDWGRRFRERLALAGKPDMLIIGAMMRKLAHVAYGVLLSGKPFDPTLHGACAK

SEQ ID NO: 280590 - protein, 315 aa, unidentified
MAMPVSVSKPIVGVDVAKNELVIYHAEVDLLETIPNTKAAIKKWLKALSCKVTIAIEATNIYHLEFADLAHEAGCVVYMVGGYELKHYRESVKIRAKTDALDAKLLVRYLRKEADELRPWTPPSPLYRHLLSLFRRRAALVQARVSLTQSWANEPLLKASFAEQVKSMQRLEGLIEKMISDCLKEAGLLGQLKRCLKVEGIGFLTGARLIATFQRGEFRNSDAFIAFLGMDLRVNKSGQKDGRRSLSKRGDSEARRLLHNAAMAASRTETWKAFYQAQRARGYSTTQALVILARKLARVVFALLKGQSEYQPKVG

SEQ ID NO: 280591 - protein, 340 aa, unidentified
MTVTTIGLDLAKSVFQVHGVDESGATVLVKRLHRKQMLPFFSKLPPCLIGVEACGTAHYWARTLATMGHEVRLIPPSYVKPYVKRGKSDALDAEAICEAVQRPTMRFVPVKTVDQQAILMAHRARSLLVRQRTMAANALRAHLAEFGYVTNPGIAHLAKLIDQVLADKNALPSYACTALEILIRQIMSLTNDVVALDQQIATWHAESEASRRLAAIPGIGVITATAIAATVSDPEQFSSGRQFAAWLGLTPQQHSTGGKTKLGGISKQGDRYLRRLLVIGATAVMRHTKDKTTPMANWIRKLLEKKPFRVVSVALANKLARIAWVVLTRKEAYRPYALTA

SEQ ID NO: 280592 - protein, 373 aa, unidentified
MPRYSTAFGMDVHLRSTTVCALDAETGEAVTRRFPGNPWGEIAGWMDGFPGPSLAAYESGYLGFAPQRELSGLGVDCVVAAVSKVPRSAADLSSKNDRNDAARMAKAILSHDVTPVWVPSPEIEGLRDLAAAHDAATARLAAAKRRLLAFLARRGYAYGGTTPAGNPRRYWTYGFLRWLDGIHPADDGGIRALAALRSEVEAADETREALLAEYRAAVAAGPLSAEVEALQSIKGCGFALAAAFAAEVGDFSRFRSGRQVTAYFGLAPKQRSSADSVRLGGISGAGNALVRKLAVEGSWCYAQAGHQPKLMPKGSGVPLEVRMHGRKGSERLLRRREEMLERGMPQAKANAATAAELVRWLWALGAMCREAGE

SEQ ID NO: 280593 - protein, 352 aa, unidentified
MGMQIFIKLLKEKSMAILTVGIDLAKNVFAVHGVNEAGKPDLVRPSVPRAKLHALVAALPPCTIGMEACSGAHHWARLFAAHGHTVKLMAPKLVAPYRMSGKRGKNDGADAAATCEAVQRPNMRFVPVKTEEQQSRLMVHRVREGFVAARTATINRIRGLLAEFGVVLPQKAEVVRREAAAQLEDLPGYANLAIGDLLSEVHHLDERIKQYDVHIHAIAHECTAAKRLMQLMGVGEVTATAIVAMVGNATEFDSGRQFAAWLGLVPGQYSSGGKARLGHITKAGDAYLRGLLVIGARSVLNAAADKKDSLSRWAVKVAERRGYWKAVVAIAAKNARMAWAVLTKGEAFKLPA

SEQ ID NO: 280594 - protein, 318 aa, unidentified
MTQVALFVGIDVAKDKLDWCIRAVARATASNSPDGCAKLAAELKARGVTLAVMEASGGYERTMAAALRKQRVPVRIVDPKRIKDFARAAGRRAKNDPIDANTIAWFAHTFTLAAEDKPDKEREHLAALVAERQDLVEIRTQCLNRNQHKAPVLCQHVRKNVLNEVKQGIAKLDAAIAAWIAKCPRLAARARLLASVPGLGRKSVAALLAWLPELGHITRQQIAALLGVAPFDNDSGEHAGIRHIAGGRRQLRNSLYMPLVGAATQHNPILKKYFKRLLASGKLKKVAILACMRKLIVILNVMLAREQSWNPQPTSAQP

SEQ ID NO: 280595 - protein, 341 aa, unidentified
MNDSKTVVGIDIAKRVFQLHWIDRETGEIVSQQVKREKFLEHFANRQPCLIGMEACGGAQHWARKLTAMGHQVKLLPGKAVKPFVTGNKSDRHDARAIWTAVQQPHVKAVAIKTEEQQAILALHRMRSQLVKFRTAQINGLRGLLTEYGEVMAQGKAGVRKGIADALARLADRLPAMIIDTLREQWARIEKLDGEIATIEQRIKLWLKEDEACQRIAEIPGVGPLTATAAVALMGDAKTFKSGREFAAFAGLVPRQTGTGGRIKLLGISKRGDTYLRTLLIHGARSVLTHAKDPGPWITELRRRRPLNVAVVALANKMARTIWAMLAHERTYQKEFVSQPA

SEQ ID NO: 280596 - protein, 437 aa, unidentified
MSDNKALELRVSVDVGYRRHSVAIGLPSGEVLEEFEITHRPEGFEEFFSRIEKHHKARNCEVAVAMEGYKGCARPLDRMVRRRGYRLYNINNLKLARFKEIFPGAAKSDRIDARKGLELFQLSDHLPLAKEVLQEVKGTPQENEVLKRLTRRRRRLVDERIRVSNNLQTDLQAVCPGLLEMTKNAGNQWFLNFLVSAETLPQLARLRPSTLLKIPAVGRKYARLIEDWQKRAHFSEEVEWVSEMIQEDAQRSLELDEKIKALKAKIKGVAKDSKIAKILLSIPGFGTICTAELAGEIGTIERFSKEGSLALYLGMSILDNSSGKYQGSKQPKHVNTRAKAAMMIALDRHRKYVPESQRYYEKKRSEGKKHNQAIRALGRHLCRIIYKMLKEEREYEIRPEKGNTKSKVSSRSLIKRQIRKPKISAKGKNNKIYQQSA

SEQ ID NO: 280597 - protein, 372 aa, unidentified
MPTPQLWEVPTMSESMALVGLDVHLAQSVAAVLDPVTGELRVERLRGEPLVVVPAFLEGLGRPVRAVYEAGPTGFGLARAATAAGLDLRVIAPGSIPRSPGDRVKTDRRDAQRIVRLFAAGELSFAFVPSETDERFRDLVRCVEAARGDLMRARHRLSKFLLRRGLRFPARAWTQPHERWLQRLVFDDALSQAVLVDYLCAVDTLVGRRRTLIGLLEQAVPESGHAEAVARLRCFRGVNTLTAAGVCAEVGSFERFAKPSLLSGFLGIVPCEYTSDQKRVQGQITKAGSTLARRLLVEAAHHYRRRPRMSEELAARQRGQDPRVVQIAWRAQRRLYQRWAHLAGERGMHTGTVAVACARELAAFLWEAATLN

SEQ ID NO: 280598 - protein, 325 aa, unidentified
MGVAVGVDSHKESVAAATVDELGRTLEVRRFANDSTGHDEVLAWVQSNPDVTRIGIEGSGVYGAALARVLMAAGEDVREVPPTLTFRERRRNGSHGKSDPVDAVAIARVVVREGALSSPRRTAVWDDLKLLVDYRDQLVRVRTQLSNRIHRDLVVVHPGYQKHVPDLRSKKNVAQAVKLLRGDRSVRAELTRRRISQLRRFDQELTANKTEIASTVARSETTLTELPGIGVLIAAKILAETGDVTKIRSQSAFAMLAGTAPLQASSGATSRHRLNRGGNRQLNHALHYMALVQYRSHVAPTSAIPYRSSFSLNARLFGPAGRTGG

SEQ ID NO: 280599 - protein, 318 aa, unidentified
MIHYIGIDISKRDFHVCSSEGGDVLIFTNDTVGIKKFIRHLKSIKCTTANTLIGLESTGSYHLPVAYLCTKAGYTVNVINPLITKRQNQTSLRRVKTDKQDAKLIRYCLVNGAGYPFRETSGTLALKTLIRQRSGYSMLRHRVRLRHEEVQKREEYLNTSITTVNKELHDFLDAKIKLLDATLRKCNPRTQKLLMTIPGVGPQTAVTCLSEIGDITRFPDAQKLTAWIGLDPRVHQSGTSINGKGYITKRGNKLLRTRLFNAASVAVIHPPNIFYEFHQKKLSEGKPYRVALCAVMRKMVHVIHAVWRNETPFVNKFK

SEQ ID NO: 280600 - protein, 351 aa, unidentified
MEKSQNNFIATAFVGIDVHDKSWKVCLLSNAGYRKEFSCEPETGILLKTLRNFLPNFNFECAYEAGFSGFWLHDELNEIEGVNCIVVHPADIPTTDKEKAQKEDRRDARKIAQQLKAEAIKGIYVPTKSEVGLREIQRLQFTITKDLTASKNRVKSFLKRYNIKPPKEQFPTAKTHWSAKFMKWLKELDLNDRFLNFTLQNLTDCVVQLRYRKAQILKELRIMIQESKKEKEYNKLTNIKGIGIVGATTILTEIVDIKRFNSYESFHSFIGLVPSTANSANTEKIRGVTPRANRRLRNVFIEASWVAIKYDTDLHHYYHELKQRMKANKAIIRVAKKLATKVRYNLLELQP

SEQ ID NO: 280601 - protein, 412 aa, unidentified
MDWVACVGIDWADQQHAFAVREAGGGEYEGRVGSDPESVHEWVAQLRERYREGWIVVGLEQSRGPLLYALASYDFLILVPINPRAASSYRDSLRLSGAKDDPVDAALIRDFVAGHLSRLRAWRPDAAITRKLRLLCESRRKFVDRRTALTHELSAALKSYFPQALQWFGAETSALLRRVLERWPTLRQLREASAEDLVPVIRKSSRKKAPAIDELVVQIRLAVPLTEDEAIVETSATLVQSLIPLIDQTSAAVRRYDSLIAQLWAEHPDRALFESFPGAGPVLAPRLELSFGNDRNRYADASELQNYSGIAPVIESSGKQRWVHCRWQCPKFLRQTFHEFAECSIPHCDWARAFYQQQRERGAGHHEAIRALAFRWIRILFRCWKENTPYDEERYLQALRRRGSALVDRIAA

SEQ ID NO: 280602 - protein, 370 aa, unidentified
MTRIAKFVGLDVHKDTIAIAWAEGGPLCEPVIDRTLPHDVPRLVRRLLELAPAEHLWVAYEAGPTGYGLCRSLLEQGIHCIVVAPNRVPHEPGRRIKTDKRDARDLARALRVGNLTGITLPEQAVEALRDLIRAREDCVRALRRARQQTKGFLLRHGVTWKGRSSWTAKHMEWLRGLRFGAEAQAVTFRHYLCEIDRLVLARDHLTGEVERLMPTLSQEPLYRSLQALRGVSTIVAATLVCELGEFTRFPSAGRLMSYVGLTPSEHTSGAKISRGSITKAGNGHVRRALVEAAWAARLRPSRSRELQRRQQGVDPAVVDIAWRAQQRLHQRYVALRGVRRPQNLVIVALARELTGFVWSIAHTVARSTAA

SEQ ID NO: 280603 - protein, 372 aa, unidentified
MKFTTKFIGLDVSKEKISVAIADEGQAKSRYYGTIAHTPAALRKLIKGLGPASSLSFCYEAGPTGYETHRWIESMGAHCVVIAPSLIPKRAGDRVKTDRRDAEQLARLFRAGELTPIYVPAREDEALRELVRAREAAKEDAHRARQRVLKFLLRHQIHRPEHIKRTWTKKYRVWLSQVTFPQSSMQTAFTEYLHTLREVEERIGRLDQALIDEAATHPKAEMIRILQSLRGIGFLTAVTLVSEIGSFARFSSPAKLMAYLGLVPREHSSGASTKRGSLTKTGNGRLRRTLIESSWSYRHRPAIKGDLALRLEGVSADVQLISWKAQNRLHTKYRRLIFGKHKHPNVAIAAVARELMGFIWAVARTVEQPNAQ

SEQ ID NO: 280604 - protein, 424 aa, unidentified
MKRHQDVEFAAFAGIDWSDTKHDICLQAANSEEREWAVVPHRPAAIDAWASALRQRFGGQPVAVCLELAKGPLVYALQKYDFLVLFPVHPATLAKYREAFAPSHAKADPTDAQLALELLLRYRVKLKALTPQSVPMRMLLRLVEQRRRLVGDQNRISNRLTDALKQYFPDVLVWFPDRDTPLFCDFLTRWPTLKQLKRARRATLQSFFHDHHGRSPSRIEERLRAIKSATPLTDDPAVLRPNQLLVLALVEQLRVTLQAIESFDAESATLSETLPDYALFRALPGAGAILAPRLLAAFGEQRERYQSAAEIQRYTGIAPVTESSGKKHWVHWRLQCPSFLRQTFVEWAGATIPRSFWAAAYYRQQRDKGCSHQAAVRALAFKWIRILYRCWQTRTPYDESTYLNALKRRGSPLLASIATTAKNT

SEQ ID NO: 280605 - protein, 365 aa, unidentified
MREAPVRIERTSVGLDVHARSVVAAALDADTGEVFERRLTPDPGDILAWVSSLPRPVRVVFEAGPTGFGLARFLSAAGVETLVAAPSKLQRPSGDRVKTDARDALHLAKLLKLGEIVEVRVPSVEQEAARDLVRAREDVRGDLMRCRHRLSKLLLRQGIVYSGGQPWTGKHDVWLASQTFDQPGRVLAFDAAYEAMLFTSQRRDRLDVAITAMALDSEFTEVVRRLSCLRGVSTLTAFGLAVEVGDWHRFNGNTIGAYLGLVPTEHSSGGSRSLGSITKTGNGHARRLLVEAAWHHRKTYRSPGAIMRARWEQAPPAARARGHEGNQRLHQRWQVYTDRKKKPVIANVAIARELAGWCWSLAVLE

SEQ ID NO: 280606 - protein, 352 aa, unidentified
MDSLYVGIDLHKKFAYWTAINGKREIVFEGKVPTDVKATEAAVGKLPAAASIQAVVEPVEHWGWYTDMLEKFGVETKLADCLKVGLIAKSRLKHDRVDAKVLSELLRSGFLPEAYLAPKEIRDLRALLRFRICLVRTKARFKNRAHGLLAKQGLRTSWTDIFGTAGRKWFGTLDLSSPHKEELDSLLVLYDALQTEVKKLDKEVRLRAATSNELRLLQTIPAVGAFTALLVKAEVGDFSRFPSADKLSAYAGLVPSSYSSGGKFRFGHITRSGSGYLRWIMVEAAQRIRPRDGELYSFYQRIREKKGNATARVALARKLLCLCWTIVTKGKPYSKTKAAFRGDLGVQLAPRG

SEQ ID NO: 280607 - protein, 339 aa, unidentified
MALYAGLDLHSRNTYIGIMDKTFNRVFKKRVPNHLELILQTLDPFRDQIKGFVVESTYNWYWLVDGLMDAGYSSAHLANPSAIKQYEGLKHSDDQHDAFFLAQLLILGILPQGYIYPKKERPVRDLARKRLFLVRHKTAHILSLQSLIQRCCSMKVRANDMRHLTVKELEAWLEEEYLVLSAQANLDSINFLKQKIQGLEKAIRKKVRIDKAFHNLKTVPGIGDILALTIMLEVGDINRFLKVGNFTSYCRCVPSQRLSDGKSKGYGNRKNGNRYLSWAFTEAVHLGRRHNERFRRYYNRKVAQANTSLATKALGNKLARICYYIMRDQVPFREELFCQ

SEQ ID NO: 280608 - protein, 350 aa, unidentified
MKLTRIGVDLAKQVFQIHGVDSHEQVKCRKQLKRVQMLDFFRQQEPCLVAMEACGSSHYWARELIQLGHEVRLIAPQFVKPYVKSGKNDANDAEAICEAASRPSMRYVTVKSAEQQASQSVHRVRSRLIRARTALLNEIRGLLGEFGHVAARSGIASTRALLQQALDESDKLPGELNEMLLLLQDELQDQDRRVKQLDEMLRRQVATDERVQRLLKIEGVGPISATAIVASVGDARQFRSARQFAAWLGLVPSQHSSGGKERLGGISKKGDSYLRMLVIHGARAALNACKCKPDRRSKWINQLQARRNTNIATVAHWRTKMPESSGRSSAEAKATNLPKRNEHYWQPVTP

SEQ ID NO: 280609 - protein, 319 aa, unidentified
MTNVEIFTGFDVSMDHLDFCTLDGSGKSSSGKVPFNAEGFKMLLRKIPSDSHCVMEATGPYHLKLATWLCKKGYAVSVVNPLVIKHFSRMNLRRAKTDKADARIIASYGQREKPALWEPPAEYMMKLQQLENMLDLQIKHHTAHKNQLHSIEATGMADPFVRNELKKLIQHTKKTIQKLEQKIADVIDNEHKSMLKNLTSIPGIGKKTAVALIVATGGFSRFDSHKKLSSYLGICPRIYESGSSVRGRSRICKIGMGRIRKHLYMCTWSAIRANKACKEMYARLVENGKPKMVALIAVANKLVRMAFAIAKSGVKYQPA

SEQ ID NO: 280610 - protein, 262 aa, unidentified
MKLSRVGVDLAKNVYQLHGVDRHGKTVWKRRLRRGQRLRILTDNVEPGCEIGMEACTGAHHWARELQSRGYMVRLIAPQFVKAFVKSNKNDANDAEAICEAMSRPHMRFVSVKTVEQQDMQATHRVREELKAHRNAKANQIRGLVAEYGLVAPRTLLALRRALPEWLEDAENGLTDNFRSLLHRLWNDLLTLEYRLKGLDKEIEKLARSFEVTKRLQQLRGVGPLVATALVATVGDGRQYAKGRQMAAALGLTPRQNSSGDK

SEQ ID NO: 280611 - protein, 393 aa, unidentified
MYIVGVDVAKRSHEATVIDANGNTIKKAFNFRNDADGFQKLMSALEAVSTDPSDFIIGMESTSHYWLALYSNLQRRGYTVHVFNPIQSSALRDMFIRQVKNDARDCFVIAEVIRFGRYTEGGMPPSDIYELREMCRARFYIVDMVADLKRKVIALLDQVFPEYETLFTDVFGQTSSELLRNCATPEEILAIDTEKLTELIAIPSRKRFGRQKAEQIQTLAENSFGILLNYDTMGILIKQHMEHIRFSEQQVADLDARIAALFAQFDTPITSIPGIGPVLGATIISEIGDISRFSSAAKLAAFAGIDPTVKQSGEFVGSRNHMSKRGSPYLRRALWQAASVAVHCDPAIKEFFAKKRAEGKPYMNAIGHVTRKMTSIIFAVLRDNKPYYIAPFE

SEQ ID NO: 280612 - protein, 427 aa, unidentified
MPYRIAGIDVHKRMLAVVIADVAVEGEYKFEYRKVGANPSELRKLAEWLIEQEVEEVVMESTAQYWRPVWGELEETWMPRRRNRADAGQMSGRLHLAQAQSNRGAAGRKKDFPDAERLVKRYVAGELTLSFVPDTEQRLWRTVMRRKYQVTCNRVQLQNRLECLLEEARIKLSSLVSDLFGLSARRMLHALADGETDPGRLAALGDWRLKATPEQFRDALGACRNLHPVYRQLLRLMLEELQLIEKQINELDKQMASLLIAHQDAVKRLAEVPGLGVDSAQQIIAEVGASAATFPSAKQLASWVGVCPGESESAGVNYSHRSPKGNRQMRRVLNQAANAAVKTKGSIFELVFQRLVVRLGFAQAICAIAHRLCRLIWKILHQGVRYEERGPAVTRKRKQQRAAKMIRDLRNLGYRVEFVGSPSGSPA

SEQ ID NO: 280613 - protein, 422 aa, unidentified
MLKVVHPICCGVDVHKKFIQATIVTTGKDGVPVYQYGRFSTFNEDLEKFKAWLAENNCNEVCMESTGKYWIPVFNILEDNVHITLANPKYVRAIKGKKTDKKDSRWIADLHRHGLVPGSYIPPKPIRMLRDLCRYRTKLVGNRSSEKNRVQNSLTVSNIALANVVSDAFGKTAQAIIEYILTCEVFDEAYCKTLIDPRIKATPDEIIKSIVGYNLPIEQAAKIKISKKHLGSIENCLESLNQCITKSAKPYELQIELLTSMPGITDVSATRIISEIGIDMSVFTSSKHLCSWAGLTPQNNESAGKKKSSKISRAGVYLKPLLVQCANAAIKDGNPYFRDKFQNIKKRRSHKKAIIAIARMMLTCIYNMLKNGAFFAPSDLITDDMPLAVRQKRNKQKINAAIALLEKNGFKVSLTDAEPVAV

SEQ ID NO: 280614 - protein, 466 aa, unidentified
MENNYILYVGMDISKGKADAAILKVSDRRSVKPKFIRKKLSFMFVKSEVASFLETVRSYSDVNCTSICFALEVTGIYSTNVYNYIKVNLYENESIKFLNTDFVNQWRNAHNIAKSDPLDAQTISTIIGTDSNVQYVNDNVFENKNGYQDLKALVHRHCQIKKIYSQEINRLIAQCDCLFPELQYVFEPKSAAFIAVLSSYPTTHDIINTSRVEVFDVVYEATKHRCSMDKIDKLFELCQDTLVPDDISSYGKSIILDLVENIKNIKGQLKSIERYIREVASLNPAYKLLLTITGCGPITAATVIAETGNIRRFKNADCFVSYSGTSPRNKRSGTSVETMGKISKKGSRYLRHAIYMIAEFARRHNPVLKHQFERIKNGNKKRHMLANIAIANKIARYIYSIMKNKSSFVILHDHIMRLPEETRYTFFNSISLDFPKNTRKQIYQYSDINGEVHKFVYTKTDEMIPA

SEQ ID NO: 280615 - protein, 408 aa, unidentified
MMKTPKSKSHFHQPRTNETSDLRPINPNAAGINIGSEFHWVSIPKDQASVSVRRFGCYTTDLYALADWLAECGVKTVAMESTGVYWIALFQILETRGFEVKLVNAHHVKTLPGRKTDILDCQWLQQLHSYGLLSGSFRPEDQICVLRSYIRHRDSLIKSACVHIQRMQKALTQMNMQLHRVVSDITGITGMAIIRAIAAGERDPQILAAKKHYRAKRSQAEIAAALNGNYRNEHVFVLQQELQLYDVYQTHIAACDRQIQECLAQFSNKVNLNESPLPIPLHPRHKPQGNEPAFDLRTHLYRISGVDFTVIDGLGILTVQTIISEVGLDPTRFPTVKHFTSWLSLCPCNRITGGKIKSSKTRLVVNPATNAFRMAAQTAGKSNSAESCFLPSFTFSPGYTQSYHCYCS

SEQ ID NO: 280616 - protein, 311 aa, unidentified
MEEITIDKGCGLDVHKETVVACVMGRGIKKEIRTFSTKTNDLLRLKTWLSGLGITHIAMESTGPYWKPVFNIFEDGFTLILANARHIKNVPGRKTDVKDSEWICRLLRSGLLSSSFVPPQGIRELRDLTRYRRKLIQALSAEKNRIQKVLEDANVKISSVLSDTFGVSGSQMLEAIMDGKLHEEEIADLAKGRLKSKKAEIREALVGYFHDHHRFMIKASLEHIKYLEKLISDLDLATKKKLEQYQKEYDLLQTIPAVKEQGAAVIIAEIGVDMDIFPSDGHLSNWAGMSPGNNESAGKKKVERQPTAIRI

SEQ ID NO: 280617 - protein, 388 aa, unidentified
MSKPFDLSKSLTALDQDSTLIVVIEMSQSSWLVAARAPGLARDPLKKLPPDPEQLFKLIDRWREESRRAGRVVRRVCVAFEAGRDGFWLARLLAQHEIEVHVIHPTSIPVKRDHRRAKTDRLDTELLMRAFLGWLRGEADHCSMAAIPTLAEEDAKRPTRERESRVNARSRLVNRMKGALARLGIRGFNPKLRKAAEKLEELRTGAGEPLPPNTLAELRRDMAQLRFVADQIKQIEKAREARLEKAPREGAHPMVLMLASIKGVGLETAEMLVAEVLSRKLRDRRAVARYGGLTGSPDESGSRSREKGLARSGNARVRRGMIQLAWRFLMFQKESALAKWFEARTANGPRGVRKTMIVALARKLLIDLWRFVEDGTVLVGVELFDSRA

SEQ ID NO: 280618 - protein, 379 aa, unidentified
MTMTIETGDVCCVALELSKTSWVCAFAVPGDGKAIVHKIKAGEVDRLIGFLDSSKARAERQLGRTLQIVLCYEVGYDGFWLARLLLARGIHTIVFDPASFLMPRRGRRAKTDRLDAEGMTRTLRAWLAGDREAARDVQIPSVEQEDAKRIERERKYLVEERTSIAGRIKGLLALHGIWLSGKRIGKGLRKRLDAMMTGDGRPLAPFLRRDIERMLRRYDLVSDQIAEVEADRKEALSEKRGRFPHAEKVHRLATLGAVGETTATVLVAEIYHRSFETRRHVASFVGLAPSPYRSGDTDRDRGISKAGTKLARQTLVELAWFWLRYQPNSKLSLWWHQRFGDKGMRGRKVGIVALARKLAIALWRFVEDGVVPEGATLKV

SEQ ID NO: 280619 - protein, 342 aa, unidentified
MLYVGIDVAKNKHDVTALNVQGKTVLKPLTFSNNKAGFELLDLSLRQLNQDCLIALEDTGHYAFNLLNFLHEQGYKVYTYNPLLIKEFAKSLSLRKTKTDKKDAHGIALKLLSDPNREQFQHDNRQVELKILARHIHRLKKKQSDWKVQYTRCLDIIFPELDKIVGKHSEYTYQLLTRYPNPQKRLEAGFDKLIEIKRLTASKIQDILSVAPRSIGTTSPAREFEIIEIIKHYKRLIDKAETCVNDLMAEFNSVITTVTGIGGRLGAVILAEIRNIHAFDNPAQLQAFAGLDSSIYQSGQIDLAGRMIKRGSPHLRWALIQAAKACARFSPAFKAYLKTKLE

SEQ ID NO: 280620 - protein, 410 aa, unidentified
MKVAGIDVHKKVLMVVVVDASTPEVKPARRRFVTMPSELHRLLTWLREQGVEEVVMESTAQYWRSVWLELESHMRLHLAQAFSNRAPRGRKHDFKDAERWVRRLIADELILSFVPSGEQRIWRSMTRMKLQLTRDRVRLQNQIECLLEEMRIKLSIVVSNLLSASGLRILHALANGETDPRKLAQLGGERLQCTEEQLVDALTGRAQPVHGEMLALQLQRLQLIDQQMARLNSMIAAAMKAQQDAVIRLAEVPGLGVDSAQQIIAEVGAQASTFPSAAELTSWVGTCPGKEESAEQNHSSRSAKGNKYMRRVLNQAAHAAVAKKGSHFQAVFRRLLPRLGYQSAIWAVAHRLCRLVWKILHEGVRFIEQGHQVGPREKRKRAQMLARALRKLGYEVTITPINQLTANPVV

SEQ ID NO: 280621 - protein, 345 aa, unidentified
MVMLADQIDVVIGVDTHKQTHTAAVVDRLGGVNTTFEFTADRAGYRKVLNQVDSHDRSRVWAIEGTGSYGAGLTEFLHAAGEHVVEVERPSRPARRYGAKSDVIDAVRAAREVLSRTDQVEPRQRGDREAIRVLLSTRHGAVVARTKALNHLHALVITAPIVLREQLASLSGMTLIRRCAGLRIRTEHTVEHQATVRALRACARRVISCGAEAHELEHHLELVLRDRVPVLLAEPGVGPISAAAIYLAWSHAGRIRNDAAFASLAGVAPIPASSGQTTRHRLNRGGDRQLNRALHTITVSRLVCHEETRAYAARRLAEGKTTREVRRCLKRHLARRVFKLLEHTT

SEQ ID NO: 280622 - protein, 449 aa, unidentified
MGNGSGVSRGDRNRNARLDRLRALVPVTNAIVGIDLAGKKQMVVVTDHDSKVIARRTFRCRAWDLGSALDWAAGRAAAAGWAGVTVSCEPTGHRWRVLGQLAAERSMPFVCVQPMVTSWARRTEDLTCDKTDEKDAVLIARLTAQLRCYVPEPVDETWGRLRHLGTRREHLITEAGGQVQQIRDLLECAWPAALDTARQPFRSATWVAALSVIAGRDGGDFTRTRRLGAARFEQVVRREITRRGGRKPCLRIVRGLFTALADPAGVIAHRPGALERVQLLLEDWQLTKDRLAETERRMTAVLGELGLTGLATSMTGLSPVGAAAILAETGDPRRFATGRALVTHAGLAPREKLSGAFTGRTRLTGQGRPGLRLAAWRAVWGAQRANPVYRARYQHLTSRKQNKLTPTQAQTVIAAAILRQLHAVITTGQAWDPVTATHGTRRQTKALAA

SEQ ID NO: 280623 - protein, 332 aa, unidentified
MFLGIDIHKREAQVAVRNDDGDVIEQVRVKNTDLEEIGEKYAGGKALLEATTNYFYIYDMLSEHLDVVVGHPPKLKAIAQTDKKTDEVDAKELSRLVWLGSVPESYVPTGEIRECRALVRGRTSLLEERTSFVNKIHSLLQDNGITREVKPLNVSGREFLDELTLQEPWDELLSSYLSVIDTLTEEIEQLNELITERAKEIKEAQLLVTIPGIAHYTALVIHAELGEIDRFDTAKEVVRYVGLNPVVRESGDSRFEGGISKKGPGNVRWLLVQAVHSAVHTVEDEYLSRFYHRLEQKKNKQKAAVATARKLLVSIYHMLDRGEEYDPPGVKA

SEQ ID NO: 280624 - protein, 324 aa, unidentified
MIDGILGIDVSKNTLDVSISSCSKVRTKSFANTSDGWHHLLEWLVAQKIRRVHACLESTGRYSLGIACALYEAGHIVSIINPAQVRDFVRTKLGRNKTDGVDASRIREYCELFKPLPWAPPSEAHRRLGELQTIRSGIIAGLTEWKNRKNSGIVDAEAQALADATILHFTSQIGAVDKAIALAIENDSDLRSKRDLLLSISGVGDTLAGIVLAELPGPDVLHSSGEVVAYAGLNPRQHQSGTSVDRATRISKIGNAVLRAALYMPALSAMRYNPAIVALVTRLKSRGRLKPKQIVVAAMRKLLVLCFGVLKTGKPFDPAIAMGC

SEQ ID NO: 280625 - protein, 405 aa, unidentified
MNAVGIDVSKGKGTVTIRKPGDVVLMSPCDIPHTQSAINDLIKQIKSLEGETKVCMEHTGRYYEPVATWLSDAGIFVSAVNPILIRDFGDDSLRTPKTDKADSKKIARYTLDRWAKLKQYGIMDKTRNQLKTMNRQFGFYMAQKTAMKNNLIALIDQTYPGANDFFDSPARNDGSQKWVDFIHTYWHVDCVRSKSLNAFTEHYQNWCKRKNYNFSAEKAAKIYQISSDLIAVFPKNDITKMLIWQAVALLNTASKTVESLRSKMNELASTLPEYPVVMDMNGVGATLGPQLIAEIGDVSRFTHREALTAFAGVDPGKNDSGKHIQNSVRTSKKGSPYLRKTLFQIMDSLIKRSPVDDPVYAFMDKKRSEGKPYYVYMTAGANKFLRIYYGRVREYLSNLSNNETI

SEQ ID NO: 280626 - protein, 345 aa, unidentified
MQPMYYIGLDVHKQKISYCVKDSSGKIYSEGWIPATHFDLDRWMKKLPQPWTAAMEATMFSGWIYDYLKPHAAALKVAHTLMLRAIAAAKKKNDRIDASKICDCLRCDFFPEAYMAPTAIRELRRTLRYRNLLVRQMVQLKIKISTLLMEAGVSYNKRKLHQAGYFRELLATNPHINEGLRSLLRICREMVVRLSKMENALIASLREDPLLLERVERLMSIPAIGPITALTWALEVGELQRFSSIKKAVSYCGLCGDEQSSANSVQRTPISKQRNKHLQTVLIEAAKMAPRYSPTLALLYDREKQKGNANRATLAVARKLVAYLVAIDRGQTHFLILDQETRTAA

SEQ ID NO: 280627 - protein, 348 aa, unidentified
MAVFAEKGEEPVSEKRLKNDTSLLIKEVKKYSTEGHTEAAYESGSCGYVIYRAMMKEGIICHVLPANKVAKKRDHRVKTDKRDARLIGRELRSKSIRPINVPDETDEAVRDLLRCRDDISRDLRRVKQRLLKFLARHGHIYTGDSSNWTLKHWEWMDSIKFIQMHEQDVYEEYRSQIYGLDDRIDRIIKKIEEIAESPRYKTKVSKLRAFKGIDYIIALALICEIGDFRRFAHARSFMSYLGFVPSENSSGSKRIQGGITKAGNGNLRNLLIEGAWHYTKNTRTGKRLDQRRKDSPLGAIDAADKALHRLHKKYNRLLLKGKHKNVAVTAVARELAGFIWAIQVNQAI

SEQ ID NO: 280628 - protein, 344 aa, unidentified
MKIRRVGVDLAKNVFQLHGADHQGKTVWKRQLSRDKWLKVLFNHVQPGAEIGMEACTGAHHWARLLRDAGYRVRMIPPQFVKPFVKSNKNDANDAQAICEAMARPDMYPVAIKTVEQQDIQAIHRVREEIKTHRTAKANQIRGLVAEYGLVAPRELTSLRRAIPIWLEDASNGLTVLFRELLHGLREDLRSLDQRMAELDQQVATIAQQNPTAQRLQQLRGVGPLIATALIATVGDGKQYRKGRDMAAAIGLTPRQHSSGGKDRLLGISKRGDAYLRCLLVHGARSAMRTAKDKDDRLSRWITSLQERRHANVAAVAMANKLARMAWVIMSKEIDYDPDFISAT

SEQ ID NO: 280629 - protein, 406 aa, unidentified
MNAVGIDISKGKSMIAVMRPAGEVLVKPFEVLHGKDDLKELSTKILSYGENTRVVTEATGRYHEPMAKALHEAGIFVCVLNPVVIKQSGAGSVRKVKNDKKDALKIAKYGIDNWCDLRQHSLMDITRQQLKMFSRQYNLHMKTVTALQNNLISLLDATYPNVNRLFTSPVRDEGSQKWVDFAMHFWHIDLVAEVKFETFAGRYQKWCKRNGYKFSITKAQQIHGASQGMLATLPKSEETKLLITSSIVALNQTMKVRATVKQEVIRIAKLLPEYKAVSALYGVGEITAAQLMAELGDVRQFNNRGAIVAFAGVDPEVNQSGLQNRISNKASKRGSPHLRKTLFQVVSTYLKHSPENEPVYQFIDKKRREGKSYYVYMTAGANKFLRIYHARIKEYLNGLDESHLVQ

SEQ ID NO: 280630 - protein, 462 aa, unidentified
MTERREDESRSDGTRQIEGLPVVRAQVAGIDLGSQRHWVCAPGLEGKGREVADFGATTAELQRLVQWLKARQVESVAMESTGVYWIAPQEVLEAGGLEVLLVDTRQLARVPGRNKKTDPTDCEWIQRLHSCGLLRGAFRPPEQVSMLRTLVRDKANLVGEAGDWVRRMQKSLDQMNVRVHRAVSDLDGVTGLAMVRAIVAGERDARKLAQLRDRRCHQSEAEIAEQLSGHWREDHLFSLRQSLKMYEATQERITAYEQESVRKLREMTPEERAGQTAPPLNNPHKAKAIRKRGEEARRQAWYRMSGVDVTQIDAIGVQTVEVVLSEYGPDLSRFPTEKQFTSHATLVPRVPRSGGKALKKKKRYSASTRVAAALRMAALALRHSPTALGAYYRSLARRIGGDVAVFATARKLATLIYRLLRWGQPYVDEGAQAFEERYRQQRIRSLTARAKELGYQMVPATT

SEQ ID NO: 280631 - protein, 454 aa, unidentified
MFRKSKGRRGMSLEDRPVEQPHAAGVDIGAREIFVAVPHDPEGQPVRKFATFTEDLWRLADWLQGCGVTTVAMESTGVFWIPLYELLEQRGLKPCVVNARHMKNVPGRRTDWHECQWIQFLHSVGLLRAAFRPEEQVCAVRAIVRHRQQLVEMAAQHVQHMQKAMTLMNLQLQHVLSDITGTTGLAIVDSIVAGERDPKELSKLRDPRVKASSDVIEKSLCGNWREEHLFTLGQSRQFHRFYQGQIVICETNIERLLQQFDPRVDPQQTPLPPDNKCNRSGAKRRKKAGHVERLFGVDVTQIPGLETNVLPLFGEVGRDLSRWPTASHFISWLSLCPDNDISGGRVLWRGMRKTNNRAGQIFRLAAQSLHRSPTPIGEYLRRLKAKLGPAGAITATARKIATMFYTLVTRQVEFDHTLWHANDAHRQQRIQARLTRQARRLGYQLVPLEVSSCT

SEQ ID NO: 280632 - protein, 348 aa, unidentified
MTISVIGLDTAKTVFQVHGVDESGRVALKRQLRRGELIPFFEQQPRCTVILEACGAGHHWARLLSGLGHEVKLIAPEAVRPFVKKGKKNDAADAAALCVAGSRPEMRFVPIKSVEQQAVLALHTVRSLLVKQQTMLANALRGLAAEFGLTTPKGMGKLAELIALVSTDESLPAAGRRAMAELYAHGRVVADRLAALEAKITSHARHDETARRLATIPGIGPITASLIAATVGDNIGAFRSARHFAAWLGLVPRQHSTGGKVRLGRITKAGNAEIRKLLVLGATSMVRRATLWNSKAGLWVQGVLARRPVRLVTVALANKMARIAWALITRKQVYQAQGHALTAAEAAA

SEQ ID NO: 280633 - protein, 337 aa, unidentified
MGEHIGLDVSLKETTISIRREGKRIWRGKSPSDPKLLSDTIRKHAPRPERVVFETGPLSVWFFHALTAEGLPAICIDARHAKAALDMAPNKTDANDADGLAQLAEVGFFREVRVKGYESMLSRTLIAARTRLVRMTTELSNQIRGLMKTFGLLVPSGKGGKFDAHVRRLLVGEDALARVILPVLEAWQGIRLRAAEPQLVASARQSDACHLLMSIPGVGAVTASSFVAAVEDPANFRNSRSVGAWFGLTTRRYQSGEVDHDGHISRRGDAQMRGLLYEAATVILTRTHAESDLRTRGLKLRERLGFKRAAIAAARKLAVTMHAMLKSGELFSRTAAA

SEQ ID NO: 280634 - protein, 261 aa, unidentified
MLSFCGIDVSKDRLDVMVLPEEQCCSVPNDARGWAALVERLRNFSIAAIGLEASGGYERGVARALLAAGISVRQVNPFKLRQFARASGVLAKNDPLDARMIASFVGIMPTRPAQRPTPAAEQLAEMLAVRRQLSAEKVAAENASRLLEDAMLQRLSRRRIRRLAADIELLAERLVEIVTSKVALAHRYRLLTSMPGVGPVLACTLIALLPELGGMTRKQVAALVGVAPYAFESCALKGKALHLGRSCERPPGALHGGDERQ

SEQ ID NO: 280635 - protein, 370 aa, unidentified
MTHNNTFIGMDVHKNSISIAIAQEAAERQVHFYGQIDGSLSALDKVIKKLAVKGRRLHFVYEAGPCGYPIYRHLRAKGYDCTVAAPSRIPRQSGNRIKNDRRDALMLARLHRAGELSAVHVPGAEEEAMRDLTRAREDAKGDEKKAKQRLKAFLLRSGYRFTGRSTWSTAHMRWLADIKMPHRSQQVVLQEYINALNQCQQRVLQMTEQIRQLLPQWRFAPVVEALQSLRGVSMLVAVTTVAELGDLNRFEHPSELMSYLGLVPSENTTGARVRRGSITKTGNSHVRRMLVEAAWAYRFRARVSQSLLKRQQHLPQPICQIAWKAQLRLCARYRRLWAKGKTKQVITTAIARELCAFMWAIAIKVDIPAA

SEQ ID NO: 280636 - protein, 343 aa, unidentified
MEHFAGLDVSVNETSVCIVDDTGRIVREVKVASEPETLLAVLKTGAYRFKRIGLEAGPLSQWLFSALAEAGLPAICVETRHMRAALQAQINKTDRNDARGIAQMMRAGLFRPVHVKTIRSQKLRMLLTHRKLLQSKAIAIENDLRGTLRNFGLKVGMVGTVKFEGRIKELVADIPDLAGMVEPLLIVRRVLREQIAVLHRRLLAIVKDDAVCRRLMTIPGVGPVVALTYRATVDVPARFRNSKAVGAVFGLTPARYQSGESDRTGAISKCGDGMMRVMLYEAAQILLVRTAKWSWLKAWAMQIARRRGMKKAIVALARRLAVIMHRIWVDGTEFSWSKNTVTA

SEQ ID NO: 280637 - protein, 356 aa, unidentified
MEYIAFDAHKRYTRASVIRPDGQRVREQRIAHERGALREFLERCDRGSPVAVETIGNWYWIVDEIEAAGCVPRLVHARKAKLMMGSINKTDKLDARGLNRLQQAGTRPTVWIPPGELRDQRDLPRTRMVRVRQRTRLKNRIHATLAKYALHDVEVSDLFGVQGRALVRQRLTLLPPHTAYATQQLLEQIEGLDGQVRGFEQRIQAVFTPTPAIQPRLTLPGVGLTLAGVIALEVGDVTRCATAEKLAGYAGTTPRVHASGGTTRVGPARPDVNRYRKWAFVEAANAICLTRGRTPRRHVSRLYERVARRQGHAKAIGAVARHVAEATYWMLSKGEAYREPKASGRVRPRGISAEAP

SEQ ID NO: 280638 - protein, 391 aa, unidentified
MICVGIDIAKDKHDCCILDSDGTVRADCFTIPNNMDGFKQLLQTIRNCTKKSDKIKVGLEATGHYSYNILGFLLDNGLPTYVINPLHTNLYRKSLSLRKTKTDRVDARTIATMLLSDVDLKSYTDIAYHNEELKSLTRYRFDKVQECAKLKQSVSRLATILFPELEGLVSSIHGTSIYALLSEYPGAKQISEVHLTKLTNLLTTASKGRYGKEKAIQIREAARASIGSVIPAKSLELKHTIKLIQELASEIDEIEDSIQKIIDELNPPILSIPGMGVNSAAVILAEIGDFSNFSSPDKILAYAGCSPSTYQSGKLTNCYAHMEKRGSRYLRHALYNATKYVCYWNPVFAEYLAKKRAEGKHYNVALSHAMKKLVRLIYALQKSGKTYLTAA

SEQ ID NO: 280639 - protein, 449 aa, unidentified
MEQPQEAEDEEHERVHERVAAVDVAKASGVVCTRVPGDEPGGRRRMHVWTVQATLGAVTELGDHLRCEGIEVVTLESTSDYWRTWHAGLEACGLKVQLVNARAVKNVPGRAKTDRKDAVWLAKLTERGMLRPSFVPPYDIRRLREFTRLRADLVRERSRYWSRLEKLLERALVKVSSVASKLTTQSVRAVLEALIAGQRDPRALADLAIGKMRAKRKELAEALEGRFEDRHAELARILLDQIDALTAQIGALENRISELIAQIPAAQGVDADGTTGPEAGRGPDAAVLPAVARLDEITGCGTVAAAAIIAEVGLDMTVFATPGRLVSWAKRCPQTRQSGQKNTSGKAGKGNPWLNGVLGEIAASASRTDTFLGERYRRLARRRGKRKALAAIARSVLVIIFHLLADPATRFNDLGPDYYDNRISRERKIHNHVRQLEALGLRVNVEEAA

SEQ ID NO: 280640 - protein, 408 aa, unidentified
MKKNSKAYTAFCGIDISKDTFDYCLLNRDKQTISHNKLPITREALYHLIGIVTEDVNQNIIFLMESTGKYHRRVSDLLACSGFDVCVIQPLLIKNYTEGKDLRKTKTDKKDAHLIAQYAVDNHDSLLLYNPDSIALKELARHRIKVVRDLTSIKNEYKENMMTYFPEVVAVNENFIYTKTIMNLLKGCCLPEKIARKHVSTLDNMLKKSGAARLSISGTQLKEMAKHSVGSTSSTAQFIISDLIDAMLTLIDRLKCIEEELENHTKDIYEEELEIITSINGIGKTTALNFLIEIKDIDLYDDWKKLCAYAGNDPGIVQSGSSVNKKGNITKRGNKYLRCTLFLMASSVCRHNDRYKSYSEKKKLEGKKYKERMVAVANKLTKLIFALLKKGEFFDENYELNRKFKRTG

SEQ ID NO: 280641 - protein, 358 aa, unidentified
MRGSRELFPKITVGLDLGDRVSEVCEVDWRGREVRRGRVVTTRAGLRQYFGGRERCRVVLEAGTHSPWVTRELEALGHEVVVGDPSRLYGGRRKKKSDRLDARYLARQGRADVELVYPIRHRGEQAQRDLAVIRARDQVVRTRTKLINHVRGAVKSVGGRIGRCSAEAFAKRAVRELPEGVGEALLPLLELIEELTARIRAYDRQIERLVERYPEAVRLRQIKGVGPVTAVAYVLLVEDARRFLRSRQVGAFFGLVPRLAESGGSEPQLRISKAGDELGRRLLISAAHYILGPHGPECDLRRYGERICARGGKNAKKRAVVAVARKLAVLMHRLWVSGSVYDPDYQRRRRERRRLQLA

SEQ ID NO: 280642 - protein, 350 aa, unidentified
MPQRNVPRPAAVYGIDIGKNIFHVVALGSDGAVVQRVRFRRDTLLQFFQRAAPALVGMESCAGSQWIARKIQAIGHKVRLIPAQFVKPYVKSNKSDIIDAEAIAEAATRPTMRFAAVKTEEQADLQALHRVRDQMIGTRTRLINQMRAFCLEYGVALRQGAGLFKLDLPEALEDQTNDLSPAMRRLLGDLFADLRQLEKRIADVTREIEAIADREDAARRLMTIPGIGALGATALLAAIGNGRQFQKARDLAAWLGLVPREYSTGGKQKLLGISKRGNRYVRKLLVHGARSCFRHLDRTRDQLGSWLDGLQARMHPNKAVVALAAKMARIVWVVLTKPGALYERRDPAFT

SEQ ID NO: 280643 - protein, 351 aa, unidentified
MMLIGVDYHPSFQTIAFFMEETGECGEQELNHSDGQAEKFYRDLKQRGICVRVGMEATGYSRWFERLLAELGFEVWMGDPAAIKAKRVKKQKYDREDARLLLRLMRENNFPQIWVPGPENRDLRQLLWHRHRLVQMRTRIMNQLQALAMNEGYRWKKKLFSEQGRAQLEKLALAPWASRRRQELLELLDRMNPTIEELTAAVEREARKRPEALRLMTHPGVGPLTALAYVLIIGTPMRFQRGKQIGTYVGMIPCEESSAGKQRLGHISKQGSSLLRFLLVEAAQAAARTQPDWRRRYMHLAMRRHRSIAKVAMGRRLAVRLYWMWRNGCEYSQSVEFGSYAGQLGTGHGVK

SEQ ID NO: 280644 - protein, 343 aa, unidentified
MQTITTVGLDIAKSVFQVHGVDVEGKVIVRRQLKRRYVLGFFKKLPPCLVGIEACASSHHWSRELQALGHTVRLMPPAYVKPYVKRQKNDSADAEAICEAVTRANMRFVVTKTPEQQSCLMLHRTRHLFIRQQTAVINAIRAHLAEFGIVAAVGRNGVEQLLGVVADSGDKRLPDVARACVAALGAQLRTLKTQILDFDRLIMAWHRSNETSKRLDDLPGVGPALATALVASVADPKAFRSGRDFSAWIGLVPKQHSSGGRERLGSISKQGDRYLRSLFTAGALAVIRYAKIHGTKHRPWLTALLARKPTKVAAIALANKIARMAWAMMAKGERYKEPVALAA

SEQ ID NO: 280645 - protein, 466 aa, unidentified
MTGIQKSTSSRRGRKQRDRAKLKPHDWTLGLSVVHPKAAGIDVGNGEHYVAIPPHLDAEPVRRFDGFTADLEALADWLRERGIETVALQSTGVYWIPLADILSQRGMQVTVVNARDTKNLPGRKSDVQECQWLLKLHVYGLLKNSFRPEEQTLVMRTLWRQRQQHIADASRAIQHMQKALTQMNVQLANVISDISGWTGQAIIGAILKGERDPWKMAELRDARVKATKAEIAKSLEGNWRGELLFVLKQEFEMYQTLEHKIQECDREIERHFQTIPQKADPEELEDVPRNKRPHGNVPENFDLRAEMYRTTGVDLIGIDGLNVLTAQTVLAECGGDMSRWETEGHFVSWLNLAPRNKISGGKVIGRDQRKVVNRAGQALRTAATSLLRSQSYLGAQYRRFRTKLGAPKAIKAMAAKLARILYRLLKFGQPYVDRGTEFYENKYRQLQIQILTKKAAGLGLQLIQST

SEQ ID NO: 280646 - protein, 410 aa, unidentified
MDVVLDRVAGLDVHKRTVVATVRTPGQGQRREVTRTYRTFTAELERLAAWLVTEQVGVAAMEATGVFWLPVYYVLEAAGVPVEVVNAGHVKRVPGRKTDVKDSQWLAQLAECGLLRGSFIPPQPIRELRDLTRYRTKLIQERVREEQRLTKVLEDAQIKLNSVVSDPLGKSARLMMRALIAGERDPETLAALALGRLRPKTEVLRQALYGRFNSHHAFQLRLVLDHIETIEQMIIELDAEVDRVMAPFAGDRDLLDTIPGVGKRIAEVIIAEIGVDMTRFPTPECLASWAAMCPGHHESAGKHHSGKTRRGDPWLRTALVEAAWCTTRTKNSYLAAQFWRIARRRGEKRAAVAVGHSILRSAWYILSTQQPYADLGGDYFTQRTDTQARVDYLVRQLRKLGKDITVTDAA

SEQ ID NO: 280647 - protein, 343 aa, unidentified
MKLSRVGIDLAKNVYQLHGVDRSGRTILKRRLKRHQWLKVLLEKTEPGCVIGMEACASAHHWGRELQSRGYTVKLIPPQFVKPYVKSNKSDARDAEAICEAMSRPNMRFVTVKTVEQQDIQATHRIREELKVRRTAKGNQIRGLVAEYGLVAPKYMSSLRAAIPCWLEDAENGLTHYFRSLLHGLWDDLLILDDRMCEMDKTIKRLAKDNEDCVRLQKLRGVGPMTSTAMVATVGDARQYRKSRQMAAGIGITPRQHSSGDKHRLLGISKRGDVYLRMLMIHGARSVVTGAKNKDDPLSRWVTEIAKRRHPNVAAVALANKNARMAWAILRNKTDYDPDFVMS

SEQ ID NO: 280648 - protein, 352 aa, unidentified
MVVAVQYRRPSLNKNVMVQIYGIDLGMSSFDVSFLSESGSVRHLSGVKNTVHGISKFLLSLPSSAVLCAEHTGVYGDLLLRLCTLNRTCLCFVPGYQIKHSLGLQRGKSDPLDACRIREYAERFYDLLRPCFYPGEEMSELQELYRTRSLLVESRKRLDTLNIGDNCKSSVSLAADHARRAVLAELNTQISGLDHEIEALIQNSSEFSRNYQILTSIVGVGPVTSCELIIKTENFRKLDTAKKCAAYAGIAPYPKESGKMKCGHKISPMGDKQLKTLLFLCARSAKEHNKEIRLYFLKKHKVEKKHFFVAMNNIANKLLRLIYSLIQKQQTYDRDYIQRDPRCVVISDTHKC

SEQ ID NO: 280649 - protein, 314 aa, unidentified
MSQPVFVGIDVAKDSVEVCCSDTSTHAFENTEAGHAKLLRWLRRKTVTLVILEATGGYERACAVALAGAGLPVSVINPRQARDFARAMGRLAKTDRLDARALAEFAAVLHAQGHQPRALASQEQRELVALVARRRQLVAMLVSERQRLAVAHERARASIEAMIEALLAQLADIDNDIQRVLQERYADLSALLQSVKGVGPTTASTLIAELPELGHLTRKQITSLAGLAPINRDSGTLRGRRHIFGGRASVRRVLYVAALVATRFNPLIRACYLRLVAAGKPKKVALVACMRKLLITLNAIARTGERWQPDFNCA

SEQ ID NO: 280650 - protein, 316 aa, unidentified
MQTFLNIGVDVAKDAVVVACAAQSFPAHSVANQRAPLLVWLKSLPASSRIGLESTGGYHELLADLAHAHGYTVYLLNPLDTKHYARAMGNRAKTDRVDAELIARLVAQEHTRLRPYTPPTANQRKLDQLIRRRAKIVRIRSSLKLTMLNLSGFATELKAVLCKLDALIAKIDAAMSAIAACSPKHVEAQQHLQTIVGVGPVVGMALTNTLERVPFRNADAFVAFTGFDPRANDSGHKTGRRRLSKRGPGELRRLLFNAAMSAAKTKVWKPIYEHYRTHGWSTTAALAIIARKIARAAWSIHHYHTTFDPERITKNA

SEQ ID NO: 280651 - protein, 412 aa, unidentified
MKYYTSTTEYNCGIDLHARQMYVCVMDRQGKKLVHTNVLNNDFEYFLKLIEPYKHDLTVCCECMFGWYWLSDACHKAGLPFVLAHALYVKAIHGGKNKNDRIDSEKLTHLLRSNLIPPAYVYPADKRPLRALLRQRVFFVWRRSELLARIYSHQLAHNRTPARQTRRVRDTWEEALLAAEDHPLRQITLKNDLAMIKHFDHQIFQLEEELQRQTKKVAGRDYELLQTVPGIGESLGQTILYEIGDIQRFPTVKDFLSYCRLVKGTVASAGKIKGLRGAKLGNPYLRWAFGEAAVIAKRDHYLVGPLSQRLEQQMGGNKFKSNTVVAIKLARAVYFMLKNKTVFDPERLVTSMQKCFSPGRRQPAGLTGCAKKARPLPAADHASCASSTPVCVGPASNPAASIGTCGQALPPI

SEQ ID NO: 280652 - protein, 385 aa, unidentified
MAPIRMPEAVIGLDVGKSSHWACVATRDGEVLLSAPVANREDDLDSLFGRFPDALVVVDQSRNIGALALARARAAGMSAAYLPGLAAHGAARLFAGDAKTDERDAMVIAKTALGIPDALLPVGDPGPTIAAARTLAAQRNFLTCENTRNKNRLRSILLESCPAFEALVDLSDGPQLRLMASLGGAWSVADAGPRRAAALTRGAARGKIEALVRSTTSSTRPDASVVAAEDRAVKLLARRISENSAEIEAITAEISALLEGDDTYRCLLTVPGIGPKTASELAISIDIEDFPSHDRLASYCGLAPRNRQSGTSISSVTASRQGNKRLKNLLIFSCNCLTRTEGRWGDYYTRCRERGMSHGKALKALARKRLKVIYAVMRDRVPYAA

SEQ ID NO: 280653 - protein, 361 aa, unidentified
MTGSGLAAAAARVLAAAPASVQVKVGVEAAGHYHRPVLDHRWPDGWEVLELNPAQVAEQRRVQGRRRIKTDAIDVEAITELVLAGYGRPVTDRDAVIGEVSAWAVHRGRRVATRTATKNQLLGQLDRAFPGLTLALPDVLGTKIGRLIAAEFADPARLARLGVTRLIRFAAVRDLQLRRPVAERVVAAARDALPTRDAVIARRILAADLVLLADLDDQIHAAETALESLLPRSPYATLTSVPGWGTVRVSNYAAALGDPKRWPGPRQIYRASGLSPMQYESAHKRRDGGISREGSVALRRALIDLGVGLWLTESASKSYAHGLKDRGKHGGVVACALAHRANRIAYALVRDHASYEPTRWA

SEQ ID NO: 280654 - protein, 353 aa, unidentified
MVEFSKAEAQEVVGLDLGDRSSQICRLDRRTGVVLEERRLSTTTASVQRYFSTLAPQLIALESGTHSLWMTRLLKSLGHEVIVANPSQVRAISSSLKKTDERDARFLAQLVRVDPQLLSPVQPRSEDSQQAIAVVRAREGLVKARTMLINQVRGMVKSFGFRLPSGGSAAFAPKAQQDKTLPSSLKVTLAPLLRVIAEMSEEIARFDKEVEALARRWPVTQRLRQIKGVGALTALVFVLTLGDPLRFACSRAVGAYLGLVPGSRSSGQSTPQMPITKQGDRMLRRLLVQASHYVLGPFGQDSDLRRFGLRLAERGGKSGKKRAVVAVALKLAVVLHRLWVSEADYQPLRGAAA

SEQ ID NO: 280655 - protein, 394 aa, unidentified
MKLVGIDVGKNSHHFCVMDKETGEFNVTPSSFPNNKEGFDFLINSLKPYSKKSILIGMEDTGHYHVALLKFLLSNGYTVALINPKTTDLTRKMEGGITKNDKLDTITICDVLDTPERKKQYRITKVDRFDLYEQRQLTRHHHNLKEELNVYCNRLQKSIDLVFPEFNTLFSSKYGIVYMNLLKTFGSAEAIASTDIRTIRKFFEIKGKGNRISLTPEKLKECAKNSIGISSEVETIQIKHLISQITLIKEQIAEIDKKIEEFSITNNSPILSIPGISHFSGTSILAELGDIGNYSKPSQIIKFAGVAPYHYESSQYNAQHTAITKKGSKYLRKTLYQIILPVINNNPVFKKYYLLKISQGKGHRCAQGHCIRKLLRIIYHLLETGQSFDPALLR

SEQ ID NO: 280656 - protein, 425 aa, unidentified
MSSAHIRTASVMAKELDKGGGLDIHKKSVAAAIASEDGSILEAEFGMTIEQIYHLKKWLLENGCKRVLVESTASYWYRIDQVMRDEITVIVVNPRDIKSPSSKKTDKIDARKLASRCLSNYEIHPSRKFTSEQLGLKRLTRSRQQYVQTRSKLKNQIHKVLDAAGITLSIFVSDIFGVSGRYILNCLVARKSLKELIPGIPTNRIRKRAQELPEHITVQLDDTQAFLIGKALHTMDDIQKTIDEIDALLYERADAYIDDLKILMSVPGIKFIAAITILAEVGNYKDFGDGDQLACYAGLTPDVKNSAERNIIGKITKHGPKGLRWILNQVAHGASKTKNSRLRKVYLRLLRRKGKPKAITALSRKILSIIHHLLVNREMWEEEGFKKKRLDFDFDGKSSSSQLTWLDLVVNNVVRIGEGKPGSGG

SEQ ID NO: 280657 - protein, 343 aa, unidentified
MKLMRIGVDLAKNVFQIHGVDCHEQPIWRQCLPRDRWLQTVLEKIEPGCEIGMESCGGAHHWARQLQARGFRVRLIAPQFVKPYVKSNKNDANDAEAICEAMSRPSMRFVAVKTIEQQDIQATHRIRAGLIEQRTAKANQIRGLVAEYGLVAPKELLMLRRAIPCWLEETDNGLTVRFRRLLDGLWGDLRTLDERVGELESEISAIAASEPTAVRLQQLRGVGPMIATALVAAIGDARQFANGRQLAASLGLTPRQHSSGGKDRLLGISKRGDAYLRTLMIHGARSALRTAKFKDDRLSQWAVRLAERSHPNVAAIALANKTARMAWAMLRNGTDYQPDRAAA

SEQ ID NO: 280658 - protein, 340 aa, unidentified
MGDIITIGLDLAKNVFQVHGVDEAGSVVVRKWLRRGQVLAFFAGIPPCLIGLEACATAHHWARELIALGHEARLMPPNYVKAYVKRNKHDVADAEAICEAVKRPSMRFVPLKTAEQQSVLMMHRARDLLIRQRTMLVNALRGHLAEFGLIEAQGLHKVARLITIVMDEMDGRVPDIARQVLKVIVSQIEDIRRGIAELETQVLAWHKNNPVSQRLATIPGIGPIIATAIAATVADPNTFRSGREFAAWLGLVPRQNSTGGKARLGGISKRGDSYLRRLLVNSAHTVLLCSKAAKTDPWLISLLRRKPRLVAAVALANKTARVAWAIMSRRETYRHVAAAA

SEQ ID NO: 280659 - protein, 338 aa, unidentified
MTIVILGIDLGKNSCSVVGLDATGRVVLRRRMRRESIIALAAKMPGCTVAMEACCGAHHLGRQLVVQGHEVRLMSPEYVRPYVKAQKNDDRDAEAIAEAATRPTMRFVALKTQAQLDTQLLHRVRDRLVGQRTALINQIRSILLERGIVVAQGRRKLLDTLAAMEGREVGARVRDLLDDMLDQWRALDARITALDDEFADMARKDPAARRLATIPGIGVLNATALVAAIGDGRTFSRGRDLSAWLGLVPRQATTGGKPKLLGITKRGSKYLRKLLIQGARAALPSLAKRATPLGAWLRGLLARAHSNAVVVALASKLARISWALLRNESCFAQGSRAA

SEQ ID NO: 280660 - protein, 342 aa, unidentified
MQSMYYIGLDVHKKTISYCVKDGSGQIHAEGAISATRFDLDRWMKTLPQPWTAAMEATLFTGWIYDHLRPHAAALKVAHPLMLRAIAAAKKKNDRIDANKIADCLRCDFLPECYMASTQIRERRRAVRYRNLLVRQAVQLKNKIAVLLMEAGVSYNKQKLHKVGYFRELLATNKDIDEGLRPLLRLCRETLVRLGKTESALVRSLGRDPLLAERVERLMTIPAVGPVTALTWALEVGDVQRFSSIKKAVSYCGLCGAEKSSADLVKRTPQRNKHLQAVLVEAAKLAPRRNADLALLYDKEKQKGNANCATLAVARKLVAYMLAVDRGQRDFVVAENQAPAAA

SEQ ID NO: 280661 - protein, 415 aa, unidentified
MALKIVYKICCGIDVHKTFVVACIASTNDKGVTSYESHRFSTYTSGLKTLLQWLLDRNCKDVCMESTGKYWIPVYNILEKDCSIVLAHPKYVKAIRGKKTDKKDAKWIADLFKHDLVAGSFMPPAGIRQLRDLMRYRFKLTCFKSSEKNRLQNCLTVSNIQLGNVVSDTFGKSAQAILDKILENPADTSFDLEPLVFKSLKKKLPELRDSIDGYITPEQAGKLKVIKSHYENLEARKAELEELILALATPYQQELAILQTAPGISSDFTAIGIISEIGTNMEAFPSAKHLCSWAGLTPTNNESAGKKKSVRVSKAGCYIKPLLVQCANAVVKSSKHPEMRNRYLRLKKRRGHKKAIIAIARMLLTALYHMLKNGENYNAELYRKSDLPPVDREITVEQAILIARNQGYKIKSATA

SEQ ID NO: 280662 - protein, 394 aa, unidentified
MLDSTVEPRAFQGTLLDPSLRAEREVELMRYHGVDLHKKYVTVSVRDEAGAQITFMGRELDIAAYVGRLTTEDVVGLEACAGALYWAERIAERGARCVVIDAYRFRIIRDSWQKTDRHDATNLSLALWLAETTGQVKLPVVWQPSPTVRELRRLTGTYEILNKQIRQLKNLVHGVLLDNGVRDHAVGEKLVEAPGQSTEVLASITLTPASRFCVQSALRQLLALGVEKEALQRRRYWTGRPLDSDVRLLMSIRGVTPLMALVFLSEVGDITRFTSARKMHAYLGVVPKVRSSGGTTHHGKINRASRHLARTLFTQVVPHLVDSSPLMGSFYSALVARKGYGRARIAVIRKTFSVMRRMLLDGQKYRGIEEALYARKIHAYERELRKTEVELEAA

SEQ ID NO: 280663 - protein, 349 aa, unidentified
MPVMIGVDPHKASHTAAALDEHGQLLDRQRIATTLDGYRLLRQWAVRWPDRCWAVEGAHGIGRALAQRLVGDGEQVLDVPAKLAARVRVLSVGHGRKSDPCDAVSVAVAARNAGGLRQVKVEDQATVLHLLTKRRQDLVATRTQTINRLHRLLMDLVPGGARRNLTANRAAALLATVIPAGAPAVTRWQLAGELVADVRQLEQRIAAIEARIKAAVAQSNTSLLELFGVGPVLAATFLGEVGDISRFPTKHHFAAHTGTAPLEASSGQVIRHRLSRSGDRKLNHALYMMAMVQVRRPSAGQVYYQRKLAEGKSPKEALRCLKRRLSDAVYRCLVIDQAKQPPVMATTSN

SEQ ID NO: 280664 - protein, 391 aa, unidentified
MSTYFVGIDISKYKHDCCIINAADQSIVAKFTIQNNKDGFNELLTSLQSLSTPDDIKIGFESTAHYALNLELFLEKAHHSFMEVNPVLISEYKKSTSLRRTKTDSVDCESIARWLMTVEYKPHSKGFYHAYSLKSLTRLRDRLIRQRSFYLVKITNVLDHTFPEFKPFFQERFSKTALYLLENYGSAEKMARMNSASYDNLRRISRGKFTPQKFIELKYLASNTVGVNNSIFDTELNCLLTLYKEAAKQVSILEAQITELIEEVHPHYMSIPGIGPISAAVIYAEYGDISNFSSPAQMLAFAGMEPGISESGTESHKGRMVKRGSSQLRYTLINCALPLIRFDVTFATYYAKKRSEGKPHRVAISHVTKKLVRVIFALERQSTDFVSTSLR

SEQ ID NO: 280665 - protein, 354 aa, unidentified
MSQTPNTAIAVIGIDIGKNSFHVVGHDARGAVVLRQKWSRGQVEARLANIPPCLIGMEACVGAHHLSRKLASLGHDARLMPAKYVRPYSRGQKNDFNDAEAIAEAVQRPTMKFVATKTAEQLDLQALHRVRERLVSQRTGIINQIRAFMLERGIAVRQGIGFLRTELPTILATRTDALSPRMLRVIEELAGDWRRLDQRIDGLSGEIEALARQDQACSRLMTVPGIGPIISSAMVAAIGTGDVFSKGRDFGAWLGLVPKQISTGDRTILGKISRRGNRYLRVLFVQAAWVVLVKIKNWERYGLKSWIEAAKRRLHHNVLAIALANKLARIAWAVLAKGRAFELTSTDDASFRPA

SEQ ID NO: 280666 - protein, 347 aa, unidentified
MKRIVKQVVGIDVAQKELVVCLGRMYDNWTPELYASKTFANTAKGFGALTGWVKKLTEESSSVRYVMEATGVYHESLAYFLEGEEFEVSIVLPNKISNYFRTLEIKTVTDKTASEAITRFGLERRLDKWKRPSEIFRKLKQKTRERDQLVAESTFVKNQLHAEQTEAYPSKESMVRMKTRINLLNKQIMQIKEEINVLVKGDKEVKKSIELISSIPGIGTLTAVTVLAETNGFELIRNKRQLTSYAGLDVKEKLSGTSVKGKPRISKKGNRHLRKAMHMPALAAIRYNERFKVLFTRLVSRHGIKMKAAVAVQRKLLEMIYTIYKTETTFNKDYLKEEVHTQLQDLK

SEQ ID NO: 280667 - protein, 347 aa, unidentified
MRFYTKSHQCYCGIDLHARTMYVCILNQAGDILLHRDMQASPEPFLQAIAPYREDIVVAVECIFTWYWLADLCAQHGLPFVLGHALYMKAIHGGKAKNDRIDARKIAVLLRGGMLPQAYVYPAERRATRDLLRRRMHLMRTRAELLTHVQQTNSQYNLPEIGKKLAYKTNRTGVTERFPDPAVQKSIEVDLTLVGHYDHLLRDVELSVLKTAKQHDANTLYLLRTVPGIGEILSLVLRYEIHDIQRFPRGQDFVSDCRLVTCAKESAGKYYGTSGAKIGNAYLKWAFSEAAVLFLRTNPAGQKYLARLEKKHGKGKALTVLAHPLARAVYHMLKRGTAFDMPRFLQS

SEQ ID NO: 280668 - protein, 341 aa, unidentified
MNITVLGIDLGKTLCSLVGLDREGTVVLRRRIRRASLAAFIEKQPRCIIAMEACCGAHHLARQFASLGHDVRLMPPEYVKPYVKSHKNDDRDAEAIAEAATRPTMRFVPIKAEEQLDVQTLHRVRERLVGTRTALINQLRGVLFDRGIVIAKGRPKLNLWLRENLPDNTLLTARMRQLVDDMIDELLSLDRRIKQLDQEFEALAKSDERARLLRSVPGIGALNATALAAAVGDVSAFAKGRDFAAWLGLVPRQVTTGGKPRQTGISKRGSTYMRVLLIHGARAALPYLARMDTQLGAWLEALLKRAKRNVVVVALANKLARIAWAVMSHQRPYEAVAVPIS

SEQ ID NO: 280669 - protein, 343 aa, unidentified
MDHYAGIDVSLEQSSVCVVDATGRIVREAKVASEPEALITFLRGLTLRLVRIGLEAGPLSQWLQAALVKAGFEAVLLETRHVKAALSAMIVKTDRKDARGIAQLLRMGWFRPVHCKSMPAQEVRALLVARKQLQAKMRDVELSLRGLLRGFGLKVGEISKGQFAARVRTLVAGHTMLERIAEAMLQAREALRVEFGKLHRAMLAIVRADAVCRRLMTVPGVGALVAVTFTSGVDAPERFARSKGVGAHFGLTPRKHQSGETDITGAVSRVGDVMVRTALYEAAHILLTRAVRFSALKRWALEVAKRRGMKRAKVALARKLAVILHRIWVDGTTFRWGREIAAA

SEQ ID NO: 280670 - protein, 430 aa, unidentified
MRTLRRRHRARSSQGAIRPFEGMRHVNPHAAGVDIGAHESMAGVPDGDDQQLVRAFGTSPTALESLADWCIDRGIQTVAMASTGVEWMPLCETLEARGIQGCLRSAQAITPVPGRQSAVLDWQWIQTLHSSGFLSASCRPHADCVALRTLRRHRAQLLEHRAPPVLHMPQAFFQRNIHVSHALSDVTGTTGQRIIRAMVAGERDPSTLAALRNSRWKQDTDEIAKALTGPWRAEPLFVLKHALALCACSTAQLSECDTQSAGACSVLTPRVAPVPAAPVPAAAPVPPRRKPHAQRKNAPEVNTRAHILRLTGVDLVAVHGSSDALAQTMLSDIGTDLSTWPDDKHCCSWLGLAPQHDLSGGTVLKSRTMNNRHRAAQACRMAAPSVVRAAGAFGACSQRLKGRLGPAQALVATAHKIARTVSHMLQDRVQ

SEQ ID NO: 280671 - protein, 317 aa, unidentified
MTSEQEGVVVGIDASKKTLDVNVYGEAHVTQWPNDELGVRQLGQWLSQRPIQLVVVEASGGVEMHLMRELAQRALPVAVVNPTRVRNFARAGGQLAKTDAIDARLIAEFGVKMAPPARQMVSTARQHLSALVTRRYQLVTIITAEKNRLSTTPASVQEWVSQHLDWLEVQLASLDEAINRCIADEASWQLETAVLASVPGVGAVTAFTIIADLPELGKLNRQQIAALVAVAPFNRDSGPKRGKRRIFGGRASIRRVLYMATLSATRHNPVIRDFYLRLLAAGKPKKVALTACMRKLLTILNAMMRSQEPWQPPAITA

SEQ ID NO: 280672 - protein, 408 aa, unidentified
MNDFGKRYIGLDVHKHYLIALGVDAELNVVLPIRRVELSRLGSWMKKTLREQDDVVLEMTTNTWHLYDELSEYAGSVTVVHPPHVALITRSQVMNDKIAASILARLLAKGLLVGIWVPPQEVRELRGLVAQRKKMTRLATQAKNRMHAVLQRHHLAPPEGNPFQDAQKEWWLELPLGKLERVNLQSDLDTLRFAEKQRAALTSMMEEIASQDEQVTRLMHLPGFGVVTAVTIWAAIGDIHRFAEPKHLVGYAGLGAKVHDSGMSIRTGRITKAGRRDLRTALVEAAQVAANTHPHWKAELARLEPRLGRNKAIVAIARKLLICVWSILFHQVPDRFAEPDAIAQKFLKFAYRVGKDNRPVGQSAAEFVRERLDVLQLGSDLTSIAWGSKKPIPLPPSAMQKRKERRPN

SEQ ID NO: 280673 - protein, 364 aa, unidentified
MSDGICFAGLDVHARKTAAAAIQLGSGEVWKAQLAGSPSAAIEWLQTLPGPVRAVYEAGPTGFRLARAARAAGLEVMVCAPGAIPRQPGDRIKTDVRDALKLARLHAAGQLRAVTVPSVPLEALRDLVRAREDLRGDLMAARHRISKLLLRRGLIYDGPGHPWESPRHAAWLSAIDVGDPLARVVLGEYLACHDGLLARRARLDALIGELADDPRWAALVGRLRCMRGVDTLTAVGLIAEIGDFAAFAHPKQLASFLGLVPTESSSGEKRKQGSITKAGSSHARRLLIEAAWHYRRRPAVSLTLRRRQDGQPPAAIEAAWRAQLRLSARWAHLDARRAKRRTTVAVAVARELACFVWEIARQPD

SEQ ID NO: 280674 - protein, 378 aa, unidentified
MVASPYEVVHTEQEVSNLTTCILSLDGEVRVVMEATGAYHLPLLISLKQAGIFVSVINPLAMKKYASAALRRGKTDKLDSVRIANYGIDHWFRLTDYSAPERIYDELRLLGRQYAHYISIKIASKLALTNLLDRTMPGIKKLLSSKRSEEPTKDKLGDFVEEYWHYDNIIKKSESRFIDDYCRWAKKKRYHANKAKAKEIYAMAHDGIPTLPSSAASTKMLTLEAVRVLKEVNRTLQTILAQMQALATTLPEYGVVRAMKGVGDVLASRLIAEIGDVRRFHSGSALIAFAGIDSPPYQSGNFTGTQRKISKRGSALLRKTGYEVMKCLKTTKPSQDAAVYLYMMKKEAEGKPKKVAKIAALNKFLRVYYSRVMEVYQS

SEQ ID NO: 280675 - protein, 371 aa, unidentified
MKKFSMFVGLDIHKTSIEIALAEAGRDGEVRSYGGIDGTLDALDKVVRKLVSKGCNLHFVYEAGPCGYEVYRHLTTQGFDCVVVAPSKIPRQSGNRIKNDRRDAQMLARLHRAGELTAVYVPCVEDEAMRDLTRAREDAKAMERKAKQRILAFLLRHGHCYSGKSPWSRAHFRWISILKMPHPAQQIVLQESLDTLAECTRRVDRLTEQIQTLSPQWRLFPVTQALQAMRGVSLIVATTTIAEIGDLTRFKKPTELMSYLGLVPSEHSSGRTTKRGSITKTGNGHVRRVLVEAAWAYRLPARVSRKLLIRQEGVSQEVCAISWKAQLRLCARYKRFTTKGKSHQLVVTAIARELCAFMWAIANEVQGSAKV

SEQ ID NO: 280676 - protein, 385 aa, unidentified
MDQTSSSTLSANILHCALELSKKSWLLAIQFPDREQPSLYSIEGGNTEKLMAKLIAARDSWAKVSGAPPTITLCYEVGHDAFWLARFLKAHGIECLVIDPGSLQVNRRGRRVKTDRVDVKMLLRALIAWCRGERHVWSLVRIPSVDEEDLRRSHRERSRLVRERTAHINRIKGLLFAQGIRGINIKSQYKTLAVDKLVTGDGHRLPPRLSCEVAREIQRLAMVQEQIAEIEHERDTAPTPCEATERKRHLLLQLKSIGPAISALLSREVYYRQFANRRQVGSFLGLTPSPYSSGEEERCQGISRAGSGHVRAIMIEAAWLWIRHQPKSALTRWFVERTAGQSTRLRKIMIVAVARKLAIALWRYVEHGLVPQGAILNPPTTGNAR

SEQ ID NO: 280677 - protein, 338 aa, unidentified
MRKFLECCAGIDIGKREITVTILTGSVEVEPVQQTQTFGTTVQELNRGLEWLLAHACSTVVMESTGTYWVPVWNVLHERVAVIVANPEHVKARRGEKTDPEDSRRLAERLRVGDVRGSFVPSEQIVELRDLTRRRKRLLSAANSERNRIQKLLEQANVKIGNVVSDVFGVSGQRILQALLQHPQLPPADLAELAKGRLRHKRQALIETLQGHRLNDHLCWMIQHSLDHLVFLEKQLTELSQRTLQKLQPFEREYELLQTIPGIAAETAAVILAETGGNMAQFPSPRHLTSWAGICPGNNRSAGKQNSASIKRANKWLLAALVQSAWATVRNTGGESER

SEQ ID NO: 280678 - protein, 349 aa, unidentified
MGEVSTIGIDIAKSVFQIHGVDADGTVVIRKRVGRAKVLEFFSKLPACLVGMEACATAHQWARELKKLGHDTRLMPPTYVKAYVKRGKNDAADAAAIYEAVTRPSMRFVPIKSVEQQSALMLHRMRDLLIRQRTQLINALRAHLAELGLVAAKGHEGLQQLVMAVTESSDERLPSNARFACQAIVAQLHAVQTQINGLDKRIIQAHRANADSKRLEAIPGFGVILSTAVVATMTDPKAFRTGREFAAWIGLVPRQNSTGGKERLGSISKQGDRYLRRLLVLGAISIVGTARTRPDKYPWVTELLGRRPAKVVAGALANKMARTAWAVLAKGETYRAPARSSSAAIAAAA

SEQ ID NO: 280679 - protein, 350 aa, unidentified
MTTMPPAVVGGVDTHLDVHVAAALDATGGLLGVESFPTTAAGYRRLLAWLRSFGEVELVGCEGTGSYGAGLTRHLLSEGVAVVEVDRPNRQRRRRRGKSDPQDAITAARAAQSGDAHGAAKTRDGNVEAMRVLRIARLSARKAKTQTVNQMRSIISTAPEPIRDELRHLNVYRLIERASAYRPGQRRDLTSITKLTLRMLARRAAALEAEIDELDAIIEPLVYETAPELIARPGIGTDCASALLIAAGDNPERLRNEATFAHLCGAAPIDASSGKNERHRLNRGGDRQANAALWRIVVSRTVIDPPTNAYIERRMNEGLTKKEAYRCLKRYIAREVYNALPRAELALDSP

SEQ ID NO: 280680 - protein, 420 aa, unidentified
MQPANTTFIGIDWADKKHDFHLVDPDGKIQFGVFEQTPKAIAGVVEAWRKAAPDANIVVAIEATKGALINALLEFEDITIYPINPAAMASYRKAFAHGGGKNDVVDAKLLAQYLIHYIDQLKPLEQDQPLTREIAAMSEDRRRLVDQRADLANELTAVLKTYFPAILLLKAAKPYAAFVLTLLLKYPSLELIQKAGGHKLRKLFLALGLKKTTSEVRIEILVSAIPLTTNSTTIAVASRRVLDLCEQLLLLNKLVKRLDNSLEGLVSKHADYKVASSFPHAATATQARLIASFGDDRTRYPTASSMSTYSGIAPVTIQSGRMKVVRSRWACPKFMRQTFHEYAGQSIKGSGWAKAYYDIQINRGKSKQTARRALAYKWQRIMHKCWASGTPYSEDQYVERLRATGSPIIAMLDKSSEIAA

SEQ ID NO: 280681 - protein, 341 aa, unidentified
MEIVVLGIDLGKNSCSLVGLDERGAIVLRRRMRREALADFVGSLQPCIVAMEACCGAHHLGRIFGACGHEVRLMSPEYVRPYVKANKNDDRDAEAIAEAATRPTMRFVPVKSETQSDIQALHRARSRLIAERTALINHLRALLLERGIVAPKGRKQLETQREVFGDEDDPRLSPRIRLLVEDLRAEWRRLDERIAAFDAEFVQMAKQDVAARRLSTIPGIGVINATALTAAVGDARNFERGRNLAAWLGLTPRQATTGGKPRLLGISKRGNRYLRANLIHGARAVLPRIMVQDTPLGRWVRGLSERAHKNVVVVALAAKLARIVWAVLRTGRSFDPVVAAA

SEQ ID NO: 280682 - protein, 420 aa, unidentified
MTDEIEWFVGFDWASEKHRACLLDRHGGVIGERDAPHGGAGLTELCDWLVDSAGAEAGAIAVAIEMPHGPVVEMLMERGFQLFAINPKQLDRFRDRFTVAGAKDDSRDARVLGASLRTDRHAFRRLAVDDPVIIELREWSRMAEDLQQERTRLANRVREQLWRYYPQALQLTDDLAADWFLALWHQAPTPAKAAKLRKTTIERVLHAHRIRRLGADAALRILRQKPLAVAPGATEAATAHIRTVAARIRLVNEQLKTAHRMLDELTARLEPAAESAPGQTSEQRDVAILRSLPGVGRINLATLLAEAWQPLRRRDYHAMRALSGVAPVTRRSGKSCIVVRRLACNKRLERAVYHWARVATQHDPASRRRYADLRKRGHSHGRALRTVGDRLLAVACTLLQRQVVFDPDYNADPAQDDAAA

SEQ ID NO: 280683 - protein, 318 aa, unidentified
MSSEIFVGLDVAKDHLDVALRPSGEGWRVANDEAGTGQLLARLRALHPTLVVAEATGGFERAAIAALAAAGIPVVVANPRQVRDFARATGELAKTDQLDAAILALFGERVRPASRPLPDATTQLLDALLTRRRQLLEMLVAEKNRLGCAPKPLHRSIGQHIRWLERQLDDVTTELTHQVEQSPVWRAKDDLLQSVPGIGPVVSCTLLGELPELGTLSHKQIAKLVGVAPLARDSGTLRGKRMIWGGRASVRTALFQAALSARRWNPAVRAFYDRLRAAGKPAKVALIACARKLLVILNAMVRTNTRWQALTPSAQHSC

SEQ ID NO: 280684 - protein, 320 aa, unidentified
MQLNPMINGVDVAKDELVVQCLGQDAVLQRLANSASEIGSWLSQLPKGSIVAMESTGKYHQLLARLAHAAGMRVYVLNARRVYFYAKALEVRGKTDRVDAGVIARYVAEHGHKLHPWQPASDQHGRIEELMRRRALIIVKRESLRQSLRGCKDLEAEFKKVERALDAFAHFIDLKINELIKTDDALRASQKLIETVTGFGPVGSGVLSVLLERVPFAGSDALVAYSGWDPRPADSGRKHGKRKLTKAGPAYLRKQWFMVGFSAARTKALKPLYLALRARGLASTEAFVILGRKLLRAAYAVWKTKRPFDLDRFLGHPRPA

SEQ ID NO: 280685 - protein, 371 aa, unidentified
MEKSIMYVGLDVHKNSIEIAFAEAGRDGEVRSYGSVDGSLAALDKVIRKLVSKNYDLHFVYEAGPCGYDIYRHLAAQGFDCVIVAPSKIPKQSGNRIKNDRRDAQMLARLHRAGELTSVYIPSVEDEAMRDLTRSREDVKASERKAKQRILAFLLRHGHRYSGKSSWSRAHFRWISDIKMPHPAQQIVLQESLEALAECTCRVERLTEQIQLLSPQWRMFPVAQALQALRGVSLIVATTTVAEIGDLTRFDGPTELMSYLGLVPSEYSSGQTTKRGSITKTGNGHVRRVLVEAAWAYRLPARVSRKLLIRQEGLSQEICAISWKAQLRLCARYTRFLIKGKSKQLIVTAIARELCAFMWAIANEVQNPGKA

SEQ ID NO: 280686 - protein, 370 aa, unidentified
MLNTTTFVGLDVHARSIKAVALDAMTGEVRSATFGYDAAEVAGWVSSVDPSAKCVYESGVTGFDLQKRLSSMGIDCVVGAVSKMIKPPADRKRKNDRNDAEFLARMLSVGNVVEVWVPDDECEAARDLVRALDDAREDLKRRKQRLSKFLLRHGYVFSETTPTGRRKGNWTAAHWAWIKSISFPEKADNDVLAYYVDAVRQAMEDKARLERLVEAEASKPRWKKRVDSVRCLKGIDVTSAADLVFEAGEFSRFKNARSFAAWLGLTPSEHSSGESVRQGGITKAGNKHLRRVLVESAWHYLGCSPHSKDLAKGQVPDPAARRHAAKGVRRLVERRRAMLERGVHKNKANVATARELACWCWAVGRMIENG

SEQ ID NO: 280687 - protein, 421 aa, unidentified
MSYHIAGIDIHKRVLMVVVVSVAEEVTDATGAAMEFECRRFGTGASERNHLVAWLQPHQVREVVMESTAQYWKPVWLDLEPHFEKLHLAQAQSNQAPKGRKNDFRDAKRLARRLLAGELMLSFVPEPEQRTWRLMTRGRLQLVRERVRLQSQVECLLEEARIKLSSVISDLLGVSGRRILEALSKGQTDAVQLAALGDDRLKCTKEQLADALRGAPEPGHLQLLKLHLERLQLLDEQISQLSQMSATALQKHPQAVARLAEVPGFGVESAQQMIAEVGVDAEAFASAGEFASWSGVCPGSDVSAEENHSSRCPKGNQYVRRILAEAAHAAVKKKGGHFQNVFRRFLPKLGYNGAIWVVAHRLARLVWKILHDEVSYVEQGQDSDPRARKHRAAKLALALRKLGYSVTLSEINSRPVAEAST

SEQ ID NO: 280688 - protein, 391 aa, unidentified
MVCVGIDVAKDKHDCCILDSDGMVRADCFTIPNNMDGFKQLLQTIRNCTKKSDKIKVGLEATGHYSYNILGFLLDNGLPTYVINPLHTNLYRKSLSLRKTKTDRVDARTIATMLLSDVDLKSYTDTAYHNEELKSLTRYRFDKVRERAKLKQSVSRLVTILFPELEKLVPSLHIASVYSLISEYPGAKQVSEVHLTKLTNLLTTASKGRYGKDKAIQIRDAAKTSIGSVMPAKSLELKHTIKLIKELTSEIDEIEDSIQQIMDELHPPILSIPGVGIQSAAMILAEIGDFSNFESPDKILAYAGCSPSTYQSGKLTNCYAHMEKRGSRYLRCALYNATKYVCHWNPVFAEYLAKKRAEGKHYNVALSHAMKKLVRLIYALQKSGKAYLTAA

SEQ ID NO: 280689 - protein, 394 aa, unidentified
MHFAGIDIASETHVVAVVDDNSAVVVKPTPFAEDAAGYQKLFDLLGVPSEVLLAMEATGHYWKNLFAALASAGYRVALVNPLRTHRFAGEDLQRTKTDAIDALGIARFAAQKRPPVTQLHDAVTEELRELVHLRTRLMQDFGDRVRQLHRLVDLGFPEFTRYVRGLNTELASTILHKYPTAAAFHRVPVKRLAALRYDRRHKVGPELATALIEAARRSVGRHHGPAYRVQVHYTCEDLDLLRRRLRELDDDIAGKLAAHEIGTLLTTIDGIGPHTAACLIAALGDPAHFRNASALAAYVGVVPGLKQSGKRTGIRAGLTPLGNARLRTALWMPTLSAVRNNPWLRAHYQRLLARGKLPKVALVACMHKLLFAIYSVAKHRRPFEPKLAAATAQP

SEQ ID NO: 280690 - protein, 349 aa, unidentified
MHSTTVAVDLAKNVFELAVADSEGKIGERLRLNRARFSSFFVHRAPCRVLMEACGSAHYWARWIGAHGHAVQLLPAQYVRQYVRRNKTDRADAAALIEAARCAAIRTVPAKSLEQQQVLVLHRLRSQWMSTRHRYLNTLRGLLREFGIAVPLGVGVARTRIAHYLAQPPQELPAAIRPLLAQMLSEVKELEHHIEQIERDLTALTRADPVVQQLRQIPGIGLLSSTAIRAAVGDVERFPCGRSFASWLGLTPREYSSGERRRLGGISKRGDVYLRTLLVHGARSALLAAHRQQRTGRPLDHLRQWALQCERERGHNVATVALANRLARIVWATWKHARAFDGNWGCAAQ

SEQ ID NO: 280691 - protein, 347 aa, unidentified
MDYIGIDVHKKESQLCILGEGGELSEQRIRTTPERFAAVLGDRPRARILLEASTESEWVARCLEGLGHEVIVADPNFAPMYAARSRKIKTDRRDARALAEACLLGAYRPAHRLSDAQRHVRGRLTVRDALVRTRTGYIAVIRALLRQHGWRVPTGSAERFSDRVLALPLPGRLLSELAPLLAVMRQVNQQLAYSDEAIAAIARADQRVERLQTVPSVGPVTAAAFVAALDDAGRFARAHHVEAYLGLVPREWSSGEGQRRGRITKAGHRRVRWLLVQAAVSMLRVRHPGTAALRAWALRVAARRGRFIAVVALARRLAGILYVMLRDGTRYEPACVRPAPGAAAVSA

SEQ ID NO: 280692 - protein, 318 aa, unidentified
MFVGIDISKAKLDIAILPSGELFEVKNTPSGIADLITRFDLERPEVIVLEPSGGYELPLLLELSAAQQRVALVHATRIKEFINATGKRAKTDALDAMNIALFAQVMRPEPRAMPGIERLELEFWVARRTQIIGMLTMEKNRLALSSGSVRSSLELHIAFLEDQRRAANTELETRINHSSVYQALSALLSSVPGVGVVTATTLVAILPELGCLSRGEITALVGLAPFARESGAWKGKRFISGGRVGVRNVLYMAALSAKRCNPVIKGMFGRLKGAGKPFKVCLVACMRKLLLMLNAIAGSGEVFDSSRWTGGNRVAVSV

SEQ ID NO: 280693 - protein, 367 aa, unidentified
MLGKGRYGTDPEGFVAMLAAAARWPDRVWAVEGCEGIGKHLVLRLLERGEAVVDVPAKLSARMRVYATGQGRKTDETDAHSIALVGVRMTGLREVVNDETLEVLRLLVDRRRRIGEDHTRMVCQLHQLLLELLPGGAKKDLSAAQARRLLATVRPKDVAGKTRKRVAMELVVDLERVYARKKAANKELIELVKQTGTGLLDLHGIGPSGATRLLVEVGDVTRFPTKGHFASWTGTAPIDASSGDNVRHRLSRGGNRQINKALHMMAVVQLRNATEGRAYYDRKVAAGKTANEAMRCLKRRLSDIAYRTMLDDLVATKAAGARTGPGGHRGNVSDSSAAGSHPHTDSSDKSLPGPAKTKPKTPLRRAS

SEQ ID NO: 280694 - protein, 327 aa, unidentified
MHGVNTAEQPALRKKLSRREMVKFFEKAPPTTIALEACGGSHYWARLLSSFGHEVKLIAPQLAKPYVKRGKNDAADAEALCEAMSRPTMRFVPVKTADQQAALMLVGVRERLIRNRTQLANAIRGFAMEFGIVAAKGMCRIEPLLERIAADQSLPELARELFAMHGVEYRDLLTETKAVEEKLIALHRSDECSRRLAEIPGVGPVGASLLMMKTPDPKMFKSGRDFAAWIGLTPKDHSTAGKVRLGVITRAGDEMLRSILVVGATALLQHVRLGRSRHTSRWLIELLQRKKPKLVAVALANKIARVAWKLMVSGETYRRTEGQTQAV

SEQ ID NO: 280695 - protein, 345 aa, unidentified
MKKVMAGIDLHSNNLMIGIMDMDGKRVASQKLSCGLKEVVGFLSPFKKRLEQVAVESTYNWYWLVDGLQRLRYPVVLANPAGMEQYSGIKHADDTNDAFFLAELLRLKILPTGHIYDEQLRPVRDLLRRRLTLVHHRTALMLSFKSLYTRTTGKEMTLSELKELEIKQAQDLYDHPANQLIAGMQIKHIEQLTESIEKVEKVVLDCARELAFYSKLTTLPGVGKILGMTLTMEVGDIHRFAESGRFASYCRTVEAKRTSNSKKKGENNSKCGNKYLAWAFVEGANFARRYNEQCRKWYDRKAAKTSNLIATKALACKMAKAAWHVMAEGTDYDSKRMFGQAASSK

SEQ ID NO: 280696 - protein, 314 aa, unidentified
MELFVGIDVSKAVLDIAVAPTGETWSVQNSAEGMQELVSRLQSMGPLLIVLEASGGLERRAIAGLAGAALPVVAVNPRQVRDFAKATGQIAKTDAIDAAVLALFADKIRPPIRPFKDEATQELEALVVRRRQVVDMITAEKNRLLAAPPSKRVRTAIGRTIKHLQLQLEEIDRDLDDAVRSSPAWREKEDLLRSVPGVGKVLSRTLLSLLPELGTLGNKEAAALVGVAPLNHDSGTLRGRRFVWGGRAHVRAVLYMSALVATRFNPIIRAFHSRLIASGKLPKVAIIACMRKLLTILNAMLRDRTSWSPSEISP

SEQ ID NO: 280697 - protein, 353 aa, unidentified
MKYYTSTTQFNCGIDLHAHQMYVCLMDRDGHKLVHTNIKNNDFAFFLKRIEPYRHDLTICAECMFGWYWLADACQAAGLHFVLAHALYLKAIHGGKNKNDRIDSEKIAHLLRANLIPPAYVYPADKRPVRALLRQRTYFVWSRAELLTRIQSHQLAHNRPTLRQTRPNRDPWEQKLLAQEDHPVRQLALQNELAMIRHFDTQIAALESQLHQLTKTILPRDFVLLQTVPGIGEHLGMMILYEIGDIDRFPTVKDFLSYCRLVKGTVASAGLIKGLRGAKLGNAYLRWAFGEAAVIAKRDSVLGPLAQRLEARLGNKFKANTVLAIKLARAVYFMLKSHTVFDPQRLVAALTHK

SEQ ID NO: 280698 - protein, 359 aa, unidentified
MFSERTSVGLDVHARSVAAAAIDGVTGELFQAKLPPGHDRIVAWVRNLPGPVAAAYEAGPTGFGLYRVLMDAGIRCVVAAPSKLQRPSGDRVKTDAKDAVHLARLLRLDEITPVVVPTADQEAARDLVRAREDSRGDLMRARHRLSKLLLRHGIVYDDGAAWTTKHDRWLMQQRLGGPASQAAFDAEYETVLQIKARRDRLDRAIEDLAADSEFTSLVRRLGCLRGVSTLTGFALAVEVGDWHRFTGNSIGSFVGLVPSEFSSGQSRVQGPITKTGNSHARRLLVEAAWHHRPRYHVGAVMQQRWEQAPAAARARGDLGNRRLHDRWVRFIDRRKRPTIANIAVARELAGWCWSLAVMD

SEQ ID NO: 280699 - protein, 430 aa, unidentified
MEPKSNMEPESPSVVAWIGLDWADQEHHVCLQAVGSGRVETAVVTQRPEALQEWVRQLRTRFPEGRLAIALEQSRGALIYALMSYDFLLLYPVPGKTLADYRKAFFGSGAKGDPTDAALLLEVLRCHQDRLHAWAPDDVPTRHLGLLNEQRRKLVDDRTALTNRLGTLLKESFPQALDWVGDLNRPAASEFLANWSSLAAVQQARPSHLRQFYDRHFRLPPEELEQRLAEIRRAQPLTSDPAVLETDALIVSLLAAQLQTLLPSIRRVEDVIAQLFSQHPDCDLWEILPGAGNALAPRLLVAFGTDRKRYKNARELQTFSGIAPVTASSGKSRWIHWRWACPKFLRQTFHEFAAQSISRSDWARAFYYQQINHGKHHHAAVRALAFKWIRILYRCWKDHKPYDEKFYLQALARRGSPLLAYLPSPPNQEV

SEQ ID NO: 280700 - protein, 360 aa, unidentified
MQTQRSLINFEGQNFFIGIDAHLKSWTITVMGESFSHKTFQQPPNVAALKSFLHSHFPGGNYYSVYEAGFCGFWAHYQLHDSGIKNIVVNPADVPTTQKEMLHKDDPVDSRKLARSLRSGELDGIYILEKPTIEERSLVRQRAAIVRDLTRIKQRVKMFLHYFGIEIPIKFSNSNHNWSKRFIIWLKEEVPAHLNMAGQTLGYMIEEVELLRSLLLKVTRAVQAMAKSEKYNKRMSLLRSIPGVGLLTAITFLVEIEDIKRFKNSDHFAGYVGLKPTKHSSGEKDKTGEMTFRGQKVLRKSLIESSWHAVRIDPVLSLSYKDYIQRMEPNNAIVRIARKVLNRMYFVLKNEQEYVSGVVK

SEQ ID NO: 280701 - protein, 345 aa, unidentified
MEREEAPLAIVMGLDQHRAQITAEWLDIDSGEVSRRRIAPADRVGVRQFAARFFGQELEVALEATTGWRFVADEFRAIGARVHLAEPAQTATLRGTRKRAKTDRADARHLRELLMVGRLPESWIPPEHLLELRARVRLRHTLVDQRREWQQRMQAVLYHHGVAPRSWLLGAANRRWLMELDLSPSGREQIVTALALVEAIETQLVPLDEQLRDYAKRQPGCRALMGHFGIGPLTSVTILAELGDARRFRSSREAVRYAGLDITVHQSDVRRAPGHLSRQGPSALRWALFEAAQCARRPSSPDHDYYQQAAARLGGNRACLAVARKLLKRSFHTLRELGEEAIAPA

SEQ ID NO: 280702 - protein, 319 aa, unidentified
MAQNDLVVAGIDVAKDKVDVCIRSLSLRRTFASTAEGRRELATWLRRKKVGKTVMEASGGYEREWAKALRDAKIEVRIVDPKRVRSFAQSAGRLAKNDTIDAEMIAWFAETFGEARGQAYDATREQLHQMVNARQAMKDMQSKLASQGEHAVPAAVQRIHARISKTIAVELVKIEAEITALIQATPNFAELAEIIESVPGIGRTTSAALIAAMPELGQANNKIVAALLGVAPYDDDSGRRRGERHIKGGRRRTRNVFYMACLGAATQHNPVLKAFYDRLVAKGKEKKVALIACMRKLISILNIMIERRQKWDASRYALS

SEQ ID NO: 280703 - protein, 345 aa, unidentified
MTYFAGLDVSLEETSICVVDESGRILKEARAASEPGALSEALREVDLPLERIGLEACSLTAWLHDGLRAEGLAAICIETRQANAAMKTMPNKTDRNDARALAQIMRTGWYRQVHVKSRQCRLWRSLLVARRTVLNEMRSIENVVRAMLREAGVKLGLPSRTAFAGRVRELAGGDAEVMAMVEPLLSVLSTMLREFARLTRRVFDIVRKEEACRRLMSAPGVGPITALAFRATIDRPERFGSSRAVGAHLGLTPARYQSGETDIQGRISRCGDELARTALYEAAHSLLVRSKKWSNLRAWGMNIARRRGMARARVAVARKLAVILHRMWADATEFRFGKEPAALAA

SEQ ID NO: 280704 - protein, 379 aa, unidentified
MDRTITSADLGNTLYGSMELSKKTWLLAIQFPDRPQPSLYPIEGGNTEDLMAKLAAASDRWAKVSGKRPSITLCYEAGYDAFWLARFLKTRGIECLVVDAASLQVNRRGRRAKTDRIDVEMLLRALIAWCRGERHVWSVVRIPSVDEEDLRRSHRERSRLVQERTAHINRIKGLLFTQGIRGINVRSKHKRLEVSKLVTGEGRPLPTRLASEIARELERLALVQEQLVAIERERDEAPTPCTSTEKKRLQLSLLNGIGPTVSAIMAREVYYRQFKNRRQVAGFLGLATSPHDSGAVERSQGISRAGSGPVRVTMIQAAWLWVKHQPKSAITRWFLQRTDGHSGRIKRIMIIAVARKLAIALWRYVEQGLVPQGAILTSR

SEQ ID NO: 280705 - protein, 338 aa, unidentified
MTCIGFDHHKKWTQAAAVDDQGKIIREMRVLNDNSSLKGFLKGLPQPLKGVVEAGPTWGWIYDTLTELGVKMIVANPSAVRAIAEAKIKTDKIDARMLASLLRVGLIPEVYVPTEEVRSQKMLWRERIWLVRMHVRLKNRIHRLLNHYHLEVPEFSDLFGAAGRRFLEELKLPEPGNRILNAQLKLLQSYRLQIEEVQRWAVKATQGHPNRAYLESLPGFGKVFAPIVALEIDDPKRFANPAKLASYCGLVPSLYSSGGKSWQGGIGKEGNHWLKWAFIEAAWAAIRSSAYFRLVYQRLRQRKTAQVSIIACARRLCEIAYHLLKERRCYEERPLRCA

SEQ ID NO: 280706 - protein, 464 aa, unidentified
MSKTKGKDTLDNLAVVHPKAAGLDIGSREIWACVPPGRDVETVKRFNTFTPDLQALADWLVASGVDTVAMESTGVYWIPVFELLEARGLKVYLVNSWHLKHVPGRKSDYLDCQWIQKLHSLGLLNGSFRPDAEMVALRAYLRHRAQLLEHRAPHILHMQKALQQMNLQLHHVLSDVTGTTGLAILRAIVVGERDPVKLAQLRNSACKSSEETIAQALTGSWKAEHLFVLQQSLELYDFYTQQVAACDAAIAKQYSAMKPRWDGPDEAPDVPPVKPDSHSKNQPKLNVRAEIIRLTGVDLVAVEGISASLAQIILSETGTDMSPWENDKHFGSWLGLAPHNDISGGKVLRTRTLKTHNRAGQAFRQAAASVIRSGSAFGAFYRRKRAQLGPMQALVATAYKIARTVYYMLKNRVQYHDIGAEAYEQKQNEREIAYLKKKAAKLGFDLLPHDPIAAISRAVAMAST

SEQ ID NO: 280707 - protein, 393 aa, unidentified
MRKPNRQDKPLNDLSRSLTPLDVNQTLIAVIELSKESWLVAGIIPGVERQPLKKLLADEDQLLKLLERWRTEAEKAGHKINRISVAFETGRDGFWLARWLRARGIEAYVIHAASVAVSREHRRAKTDRLDTAGLKRAFLGWLRGEREHCKMAAIPTLTEEDAKRPHREREMLVGEQTTIINRLKATLARLGIRNFNPKLKKAPERLEHVRTPEGEPIPPNTLAELMRDLERKRLVHEQILNIEKARLEQLKRAPKVGPNLMVLLLVRVIGIGIDTADMLVKEVLSRNLRDRRAVARYGGLTGSPDESGKKRREKGLARSGNARVRRGMIQLAWRFLKFQKDSALAKWFRVRTENAHRLRKKMIVALARKLLIALWHLVRDGVVPEGVVLRSAH

SEQ ID NO: 280708 - protein, 341 aa, unidentified
MKVSTLGIDLAKNVFQLHGVDHEGHTILRKKLTRAKFVQFVIQLEPCLIGMEACSSSHYFARLFTRYGHEVKLIPPQYVKPYVKTNKTDAADAEAICEAVTRPNMRFVQIKTEEQQAVLALHTERGILIRERIACANSLRATLAEFGITIAAGQSHLTRELPAILEDGENGLSPFVRTSIYRQSKHIREPEEQVKQVEEALASWYRTQEACQRMAKIPGGGMLTATYVVAAVGNARQFSTAKQFASWLGLTPKEHSSGGKQQLGGISKRGDGYFRYLLVHGARALTAWVNRNGAVEENSWLQGLLERKHYNVAVVAMAAKTARIMWSMLSHNTEYQPRQLA

SEQ ID NO: 280709 - protein, 467 aa, unidentified
MKLLYRCCAGLDVHRDTVSACIRRRVRGQAEATIEEQVFGTFTQDLECLRTWLKKNKVRQVAMESTGVYWIPIWNVLERHSRFTLTLANPATVRALQGQKTDRIDARRIAEYLQYGLLRGSFIPPKPIRELRELTRLRVHIQQDRNRVINRIARLLETVNLKLASVASNIAGTSGMAMLRLLASGVRDPERLAQCAQGQMRIKIPALLLALDGRPDAHFRWMLSEFLTQLARLDEQRARVDARIEQLALPDEDRLRRLSTIPGVDRTTALVLLAEFGTDMTQFPTPGHLASWAGLCPGNAESAGKRFSGRTRKGDRYVRRILVQSAWAASRCHDCFLAALFFRTAQRRGMKKAAVAVAHRILIIAWHILAEAGVEYYERGGDHFDRRHPERTARKLTRRLEAIGYKVTLIAPPKPPRPCSKPRVGTPPTPPVHPSVCARCARWGMPRCICLVKRNRTPSPPQSERPL

SEQ ID NO: 280710 - protein, 274 aa, unidentified
MGLRSPFLGCKKYGRLFFPNTKCMNKNKQFCGIDISKDVFDVVDHEDHHHQYQNDQSGFKEFYKILSDQSHCVMEVTGSYYQGLATWLHSKKVDVSVVNPLSVKRFIQMRLKASKTDKLDAGMIRLYGEYENPELWQPPAQYIIEANELHKLIVLLLRQRTALKNKLHGLKAKGIKKAMVITSLRRQIRSLDNEVSTLELKLEEVVKAHQADLITRLCSIPGIGKRTAIYLIVITQGFEKFETSRQLISYFGLDPTIHESGSSVRGKSRIVIGK

SEQ ID NO: 280711 - protein, 424 aa, unidentified
MNFKIQNKQNQLIERISSNHLIVGVDIAQQFHVARAVNYRGIIVGDPLTFENNEEGFMKLLNWMQDLQKLKHLNAEIVGMEPTGHYWLNLSKWLLDQGIEVVTVNPHLVKRNKENRDNTQSKSDKKDALVIADMVKNGYYSFVYPTSEVFEKLRVLMSNRDVIVKRLVMAVNQINRWVDVVFPELRHVFKDVSCKGAIATLRLFPTPREISSLTSLEIVSGWKSLMKRQPGPKKAQILIKLAKSSVGTGQALDAYKLHLEQLLEEYDLAVKQLERVEQQVKEALNQIPFAKNLLMIKGISEISLAGILGEAGDLSGFSHGNSLLRHAGLHLAEASSGKWKGQIVISKRGRSRLRRFLYLATMSLVMNNPEFKAIHSHNVKVKKMKKMKSIMKLIGKLARIFVGIARRNESYCPNKVQVLITLAA

SEQ ID NO: 280712 - protein, 391 aa, unidentified
MTDSNATLTKRHDAYLGLDVGKESHWGFLVDRDGEVLMSRRVTNTEAALDAALAACPADTLVVVDQHRNIGALAVRRARLAGMPVAYLPGSAEHELAKSFPGIAKTDARDAQVIARSALGMPQTLRPVPEEDPALAGVRIMSAQVATVVKDRTACANALHSRLLESCPAFELSCEMCEPWCAGLLSELGGPWNMLDAGRRRFLSCARRNGAPRGKADALWSSIGGERPPESAVRAEGGYVRMLASRIVADNEAEERLKADIDAELSGCETYRNLLTVPGVGPKTAAQLVASVNIENFESHDKLASYCGLTPATQQSGKSINYDRPHKGGNKTLKNLLMFSCNSLARSKSPLGAYFRKCLERMDYKHALKAVARKRIKVIFAVMRDGVPYAA

SEQ ID NO: 280713 - protein, 348 aa, unidentified
MDRSTTATTTSTVTYAGIDYHKKFSWVCLGDADGNIVAEKKLYHDDTAAVKEYFKPYRGIVCTVESCRAYEWFVDLLKDCGLEVRICNPRLAKLIVQSRCKTDKLDGKKLMELLAKGYLPTCYQASPEEKRLREWLRWRASIVRSASRVKIQIHSLLDKERKGLGPDTFASKMRPVLQEIELSPARRQLLDKQLELLSYFETKVKAEDAWVKAEAKQNGSVQLLKTIPGIGDLSALLYIAEVGNPHRFRKAGQVSSFLGLVPSESSSAEKRHLGAITKQGSPLLRWLLVQDAWQAIRTSAEFRRRFTSIRRRQGKHVAIVAIARILAEVAFHVLVEQQPYEEAKLQQR

SEQ ID NO: 280714 - protein, 398 aa, unidentified
MLGAKRKVVMEPFEVPHTVDGFASLAEKLNGLDGEVRIVMEHTGRYYESFAMSMYRAGFFVSAVNPLAIRDYQEGISVRKVKTDKADALKIAQFAIDKWEILPQYTPMDTIRYNLKTLHRQFQLSSKTRTALNNNLIALLEQNYPGANRYFDSPVRPDGTQKWVDFVDTFWHVDCVAGVSQNAFVERYRKWCKRHGYHFSEQKAIEIHTDARRKFPLAPKTDTCKLLVKEAVAQLNAISRTVETYRTEMNRLAAQLPEYDTVMAMTGVGKSMGPQLMAEIGDLRCFAHSKSLVGFAGTDPIKDDSGDKISGSNRSSKRGSPYLRKTLFVIMTILLQLQPQDDPVYQFLDKKRSEGKKYYVYMTAGMTKFLRIYYGRVRDCLKEKGLWDNPASQEVNPG

SEQ ID NO: 280715 - protein, 343 aa, unidentified
MDYFAGLDVSVKETSVCIVDDAGKIVREVRVASEPEALLQVLTKKNYRFKRIGLEAGPLSQWLFSALAEAGLPVICVETRHMRAVLKAQINKTDRNDARGIGQMMRVGLYRPVHVKTLRSQKLRMLLIHRKLLQSKAIAIENDLRGTMRNFGLKVGMAGTVKFEVRIKELVENLPELALLVEPLLIVRRVVREQLGILHRRVLAIVRDDDVCRRLMTIPGVGPVVALTYRVTVDVPARFRSSKSVGAVFGLTPAKYQSGENDRTGAISRCGDEMMRMMLYEAAQSILVRMVKWSWLKAWAMKIARHRGMKKAIVALARRLAVIMHRIWVDGTEFRWTREVAAA

SEQ ID NO: 280716 - protein, 370 aa, unidentified
MGSPLLCGIRCARLEMGSLPIMRRGSDMKVTRVGLDIAKEVFEVHGMNEHGKLEVRRQLRRARVLEFFANLEPCLIGMETGSGAHYWARELQKLGHTVRLMAPRFVKPYRKNDKSDRNDAEAICEAVGRPNMRFVAVKSEEQQVVLSLHRMHAGLKSERDALANRLRGLLGEFGFVLPQGAARLRSGLPVVISQERLPVLMNQVLADGWQRLRELDDQVNRHERQIRALALQSAPARRLMEARGIGPMTATAAVATIGDAKLFKNGRAITAWLGLVPRHSGTGGKIWMGPITGKGDTYLRTLFVQGARSVMNTTRGKNDPLSLWVERLRARRGDNIAAVALAAKNARMVWAMLARGEAYRPPQAAHGAAA

SEQ ID NO: 280717 - protein, 385 aa, unidentified
MKNRYASVACGGMDVHYKSSHVTFRNAAGRVVAREQLDHTNRKGLREQLARWPKGIPIVLEASFGWGWLSDLLEEVGLDPQLSNCTKVDGMRKARGWVKTNQKDADLLSLLPQEAEPWWQVWRAPADVRDRREWMRYRADMVGLTTGTKNRIHAVFHRHGIFFEEKTDLFGGLGRRFLDQLSQDGRHAGGVLPDGARQALCGLVNLHTYLRGQLLEVAKTLHGQLERDELARRLDGIPGIGLILSHTLRAEIGDIGRFKNDRKLAAYACLAPRSDDTGEAHPERAPLGRHLGGRGNRTLKWTFIEAAHGAVKHGGKWRVMFDRATDGGKKNRGRGYIKVARELVKVVYIVWSRNVAYREAPPRQPGNGRKTRRPRKDSRPGTGQP

SEQ ID NO: 280718 - protein, 390 aa, unidentified
MEARTVDTLPPVTADHDPVRCLLAIELSKKSWIVAINTPLSDKISRYTLEGCDWKGLLELIERVRTRVAREVGRPVEMISCYEAGYDGFWLHRLLEGQGVHSHVVDAASVQVDRRARRTKTDHIDAERLLRSLMAYLRGEPKVWSVLRVPSVAEEDDRRLHRERDRLIAERGQHVNRIKGLCAIHGIYDYEPMRRDRMQRLEQLHTGDGRELPPRLKAEIARELQRLELILGMLKGIEAERDAIALAENVSAHTNAKKIQDLVKLKAIGAEIATVLAGEVFYRPFDNRRQVAGYVGLTPSHFQSGPKCRDQGISKAGNPKARTIMIELAWLWLRHQPDSPLSTWFRERVRTLKGRIRRITIVAMARKLLIALWRYVETGVVPTGAVLKSS

SEQ ID NO: 280719 - protein, 389 aa, unidentified
MNMGYTLVTYEPSTEPKIRRQVMKDSNTVVGLDVHKNSIQIVTADTDGAMEVRRFGRIGGTMDALDRVVRKLVSGGSTLRFVYEAGPCGYEIYRHLTGKGFSCKVVAPSKTPKKSGDRIKNDRRDAETLARLERAGELTGIYVPREEDEAMRDLTRAREDAIKSLRTARHQLNAFLLRYGKRYPGKGSWTPAHMRWLSDIALPHPSQQIVLQEYITTVMVCTERTARLTDQITKLLPEWRWNPVVKALQALRGVAPIVAVTTIAEIGDMSRFENPRQLMAYLGLVPSEDSSGESTHRGSITKTGNGHVRRVLVEAAHAYGFPARVSRHLLKRQEGLPEPILAIAWKAQVRLCGRFRRLMARGKLKTKIVTAIARELSGFMWAIAREVEG

SEQ ID NO: 280720 - protein, 417 aa, unidentified
MLRIVHNICCGIDVHKKFVMATIGTTNETGTTEYETREFSTFTEALIKLRDWLVSNGCREVCMESTGKYWIPVFNILETECNVFVANPKYVKGIRGKKTDKRDSVWLCDLHKHGLVQNSFIPPWRIRQIRDLMRYRYKLTNMKSSEKNRIQNSLTVSNIMLSSVVTDTFGKSSMRIVNHLLENPEDTAFDVGSLMHKGIKASPEEVSKSIQGTLTKPQAEKMIVCLTHLDDIDKYKTSIESAVLELSSPYQSQIELLLTIPGIKNIYTAIGIIGEIGVDMSVFLSARHLCSWAGLTPQNNESAGKKKSVRVSRAGVYVKPLLVQCAHAAVKSKECPYFRMRFDQISRRRGKKKAIIAIAHMLLNCIYHMLVKNETFNYDLYRIDNPTKPRPIPEITKEQAIALLESLGAQVILPTAV

SEQ ID NO: 280721 - protein, 387 aa, unidentified
MPQPNDLSRSLVALDQNSTIIAVIEMSQSSWLVAGMLPGIERQARKKLDPSPDRLLALLHRWQDEAVRVGRTITRIALAFEAGRDGFWLARWLAARGIEAHVIHASSVAVSREHRRAKTDRLDTELLKRGFLGWLRGERGHCSMARVPTIAEEDAKRPNRERDCLVGERTRIVNRIKSTLARLGIRNFKPTLRKAAERLATVHTPEGVPLPPNTLAELQRDMARLGFVVSQVREIEDARQKRLEQQPETGPHAMVRLLARIVGVGVETADLLVHEVLSRPMRDRRAVARYAGLTGSPDESGARRREQGLARAGNARVRRGMIQLAWRFLMFQKESALAVWYRARTADSRIGTRKTMIVALARKLIIALWRFVTTGEPLEGVVLRPAS

SEQ ID NO: 280722 - protein, 344 aa, unidentified
MSTIKVLGIDLGKSSFHLIGRNHRDQNILRKKFSRPKLIEFIAQLPKCMIAFEACGGAHWLAHQCLQYGHQVRLLPPQFVRPYVKGNKNDFIDADAIAEACGRPGMHFVPVKSEDAQMLAVCHCLREGFISERIKVMCRIGAILLEFGLALPKGHATMKGLFQWLSKQKGELPTALMLELQVAQDHYKLLNERIAAQDRKILNSVKQDERCQLLKTIPGVGDMIASQLVMTVGSGQAFRQGRDMAAWLGLVPRQYSTGGKPKLLGISKRGNKRLRCLIIHGARAVLSRLGDGNRPFDAWLRTLRSSKPFNVAVVALANKLTRIAWAVLSKGQAFDGKALQPGLQ

SEQ ID NO: 280723 - protein, 357 aa, unidentified
MTPMLTDKVDFVIGVDTHRDSHTAAIVTAAGGLVERLTVATDAFGFRKLDTFAAKHATGRRVWAIEGTGSFGAGLTTHLLGRGEWVVEIDRPARPARRDGAKSDDLDAVRAAREALTREHLAAPRARGDREAMRVLLAAREGAILARTKAIGQLKAMIVNAPQSLRDQLRRGTTDEQLNRCARLRTLPSHSVEHRATVRAIRATARRALMLEAEAAEHETELELLVTAACPQLLDRPGIGVITAAQFLISWSHRDRIRSEAAFASLAGAAPIPASSGATVRHRLNRAGDRQLNRALHTVALTRLRFEPTTKAYAARRTAEGKTPREIKRCLKRAIAREVYRIMQTDAASITTIETAA

SEQ ID NO: 280724 - protein, 345 aa, unidentified
MTTLDCARPVTGGVDTHLDVNVAAALDPIGGLLGVGQFPTTSRGHALLLDWLSGFGPVARVGVEGTGSYGAGLARFLRNSGVEVVEVDRPNRQSRRRTGKSDPADSVEAARAALSGRAQGAGKTRDGNVEAMRALVVAKRSARSSKIQTLNQIRHLSFTASEELRERLKGVSRQELAAEAARLRPRAGSDAVTFATKTAISMLGRRVLALDAEKERLDTLLAKLVKETAPSLLAVFGVGVDTAATLLVTAGDNPGRIRSEPAWAHLCGVSPIQASSGKVTRYRLDRGGDRQANSALWRIVITRMGADPRTQIYVERRLKEGRSKGEIIRVLKRYVAREVYRYLPR

SEQ ID NO: 280725 - protein, 431 aa, unidentified
MEIIHNNSAGIDIGSRNIYISPGYSEVKVFGTFTSDFRAAASYLIEKGIQTIAMEATGSYWVILYDILVEHGFEVWLVDGRQTRQVPGRKTDVKDCQWIQQLHSYGLLNRCFVAQGELKEVRGYQRLREDHLRSAAMHINHMQKAMIEMNIRLPEVLDQIQGASGIAIIHSILEGERDPHRLLSLCHGSILKKKSAEILAALEGFYTERGLFTLRQAYQAYQFYQMQIRECDAALNDILCKINQDKDHRETGPRKPVRHHKPQIDELGRHMLDLFGGRDATVLPGITDYSWLQIYSETGTELERWPSEKHFTSWLGLSPGQNHSGKANKRPKKKGHPNAGQIFRLLAQSLLKSKKISFGAFGRRLRGRKGPMIAIKAVARKIAVQYWRLMVKGQEFVDQGVANYEMVMIKQKEKYLKKLAQELNLKVIEPD

SEQ ID NO: 280726 - protein, 459 aa, unidentified
MWPAPGFTDCLDARNESVGTRALRVEDPHHPRGFGETRPERNTTVISSLKHVPVKVDGRTIVGIDVGKQKHAAAAISPQGIERGPVIEFPNTRSGIDRLQEQVLAPLGRPRKVLVALEATGHYWMPLYWELARRGYASVVINPIQTRAKFRTRIRKTKTDQLDARSIAQLILSGEAKAARIPEEPIVELRLLTRHRWRLVDMAGDLDRFAQSLIDRVFPEYAGILCKPLLPTGRALIREIGLAPDTIASRADEVTELLERASRHRLHPDKIRSLIRQSKSSIGIRQAEDVLVRQLRSVIDLMEAVEAQVRELEDELDRRVTALDSPLGSLGIKAPLIATIHAESDPMTDFPHPWQYAAYTGLDPSAFKSGKFEGTRACISKRGSPYLRRALYLAAFALYRRHQDLNRRYRKSRKAGHRHTDALVIVAHKLARIIWRILTDNRPFKARPPKPAPNAKTRR

SEQ ID NO: 280727 - protein, 336 aa, unidentified
MSKSYLGIDVHKKWCVYTEIDSKGKVIRQSRFGNTFEEVSTFASSLNSKVHLVLEPVLNYLWLLDQFEAYAGSVHVATPFKVRVIAESKCKTDKYDSRILAELLRTNFLPESWVPPAEIRLLRGLIRQRHHLVKSVVMNKNRIRHLLFQHGIDLRVFNIASPKARLEIRKLCLPDVTKQTIDQCLKIIAMLDDQVLEINKRIGERVKDNPTVELLQTIPGIGKLRSAVIYAEVGDVTRFHSAKALASYTGLTPTVRSSGDSVWTGGITRLGSRPLRHALVEASINAVRKSPELHRMYCRILYRSNVQKARVAVARKLAVIIYAMLIRNEPFRTEAA

SEQ ID NO: 280728 - protein, 482 aa, unidentified
MKKRTIYTNQSQELLRLFEQVGNSAKVMCVPIDYAKKDHVVMFCNGYGDIVRKPFSVKNSAEGLKYLIDQVTRSCRHRRIRKEHVFFGGEDANSYAENFANALRSKGWLVAHVNAHDAKKQRQNLQASTDRLDLMGIATMLLNRRANCSPAQTGIYRNLRTLVRHRKKLVVMKTEVRNRVHAVVDRLFPGFLSEKKTSITPFSNSSLYLMENSFSAQQIRRRKHSTLVNILKRYGTAAPEGAAAKLRTYAAQVLTTQNQYAATLQLSLAHHIKLYRCLLDNTEQLEKEIALPLAQSQGAFLTSIKGIGIVLAAGVTAEIGSPFEQRPLNNLTSYSGIIPRVKQSGGPNGQAHTGRVSKRSNHLLKDSVVQSAFHIGHFGPKELSLDYKRRKAAGQHADFGMGRRFLRMAMSLMKTSQIYLPPPLRNEQLRAQERAGYYLAVWPQLRDKWNKVDALKVAFAKHNPLGQWRHIVQELYGIKLKL

SEQ ID NO: 280729 - protein, 387 aa, unidentified
MPQPNDQSRSLAALDQDSTLIAVIEISQSSWLVAGMVPGINRQPLKKLAADEVALLRLLYRWREEASKAGRTIDRVAVAYEAGRDGFWLARWLRGRGIEAHVIHPTSVAVSREHRRAKTDRLDTELLKRAFLGWLRGEQRHCSMAMIPTPEEEDAKRPNRERENLVSDRTRIVNRMKSSLARLGIRGFKPTLRKAPERLARLLTPEGALLPPNTLAELQRDMARLRFIMDQIREIEAARLVRLEHNPEQGSHAMVRLLAQVIGIGIETADMLVHEVFVRNLRDRKAVARYGGLTGSPDESGAKRREKGLARAGNARVRRGMIQLAWRFLMFQKQSALAQWYRARTADARGATRKTMIVALARKLLVALWQLVTTGEVPEGVVMRRAA

SEQ ID NO: 280730 - protein, 406 aa, unidentified
MELVPIHKRVIGLDVHQAQITACAIIEESGGETRIEQRQFGAFKRDRRELAFWAAALDPDEVVMESTGIYWKSPYAALEAVGIRATVVNARHVKQVPGRKTDIGDAQWLATLARAGLLRGSFVPPAKLRELRLIARQRQKLVGLLSSEKNRLHKVLTDAGIRLGVVVSDIHGQSARAMIKGILKGQAPNEVLALASRRLKASREELHDALQGELTASHVFVLDELLRHIEELEARIARFDARLLDELASEHNALALLQTLPGVDTVGAAMLLVEIGSDMSVFGSPDRLASWVGICPGNNESAGKRKSGRVRKGNPYVRRLLCEFAHAASRTKSAFHAKFQSLIVRRGHKRAIVALAHKMLRTIFFMLKRGDYYRDSATNYEQLCVQRNASRWIKALTRFGFIPAAA

SEQ ID NO: 280731 - protein, 346 aa, unidentified
MYQDNLFCLDLAKKSVQGCLLDKNHQVRFNRTFSRKKLIEWLSRQQPMTVAMEACSTAHYWSRTFERLGHRPLLVPTRTANRYREGHKTNATDALAVGVATRQPATRFVAPKTIEQQEMQSVERIREHISDDLTATSNMIRALIGEFGLEIPKGKAAFKRHVVELLEDAENDIPMVLRTELINEWERYRQLELRLKEVERTRDLLCKRHESCQRLIQLGGVGPVNAIGLYLALGDRGSSFKNGREASTCIGTTPKQYSTGDEVIMLGISKKCANKRLRSNLIQGARSVIKALKRRDPQNAQEAWLKAIIERRGEGRAAVAFANKTIRVAWAMLHYGDEFKLHASLA

SEQ ID NO: 280732 - protein, 426 aa, unidentified
MNTDTHNTRSDYAAFIAIDWADQKHVFSLKAADQTKKETGTLEQKPEIIGPWVAKLRERFGGRPVAVALEQSRGALIHALMAYDFIVLYPLHPTTVAKFREAFKFSGAKSDPLDTDQILEILSKHLDRLKPLNPDTQETRLLGRLVEDRRKAVDLRTSHIQACLASLKEYFPQAIELVNGNLSSRLACDFLMKWPTFEAFQQAKPSTLKRFYYGHNVRSPEVLEKVLSVATTAKALTTDPAIVESGSRLSQMYAQIIQALNPVIEDYDQRIKNVFHDHPDAHLFSDIPGAGPALAPRLLAAFGTDRSRYEAAANVQTFSGISPVTRSSGKTRFVYFRHACPKFLRQTFHEFARLSLAKCQWARNYVDYYTDKGKKYHTIIRSLAFKWIRILFRCWKDQTPYDDNKYMEMLKRRGSIFATLHLEKKS

SEQ ID NO: 280733 - protein, 408 aa, unidentified
MNTLYVGIDVSSKSNVVYLMLPNGDKHSNFSVANSHEGSTQLVKRILSALASHSLDTVLIGLEATSVYGDNLVYFLREDATLATFNRKIHVLNPKQVKKFHDTYNDLPKNDYVDSFVIADCLRFGRINKEVYMGEYRYKALQNLTRARFFAVQNLVKEKQRFMNVLFKKYSTMTQEKVFSDAFSTTALAVYDEFESAEALANMDLHELTDFIIEKGKNRFPDPDAVAKAIQKAARSSYRLPKTVNDSVNQVLSISITSMKALESQIKEFDKAIKAQMELLPNVLISIPGIGPVYSAGIMAEIGDINRFNSQAALAKYAGLAWKQHQSGGFESEVTRLIPSGNRFLKYYLCEAAFSLVRCDKEYSDFYHLKYKEVNRCQHKRALALTARKFVRLVFRLLKDNRLYCPAK

SEQ ID NO: 280734 - protein, 451 aa, unidentified
MPKDRTRSKPSGLPIIHPFAAGIDIGSRFHVVAVSPDLCDEPVQTFQAFTSDLQRMADWLVATGTKTVVMESTGVYWVAAYEVLESRGLEVVLANAREARAVPGRKSDVNDAQWLQRLHACGLLRASFRPGRDIAELRAYLRCRERHTDYAAAHIQHMQKALTFMNIQLHHVITDITGVTGMRIVRAIVAGERDPDRLAAMRDVRCKESLETIRSALVGNYQPEHVFALKQALALYDFYQRCIDECDVEIERAVAILNIAHPIPDAPLPKAKHRSKLPSDPNFDVRTAMYQLAGTDLTQIHGIGPFLALRLIGECGTDLSRWPTAKHFTSWLTLSPGCKISGGKVLSSHTRKTSSRITVALRLAAVTVGRSNTALGAFYRRLAGRIGNAKAVTATARKIAVLFYNAMRYGMDYRDPGVDHYEQQYRDRVIKQLHRRAAQFGYSLQPQDSPA

SEQ ID NO: 280735 - protein, 348 aa, unidentified
MSNPHRKQAPVQQAISGHDEASLFVGIDVSAATLAVALQQEGIAQRSFANSAVGHKALIQWLLQHEGKLRVSLEATGIYSLEVALALDREERIEVAVLNPKTVHRFAETMRRSKTDKADAIALAEYSRRMPFVAWRRPTTSALELRSLARHIGTLIQEQTRLKNRMHAAGGSATTSRCVLQDLRRSMKSLTLRIARLRKQAVALVEQNAELKPKFQQLIGIPGIAETSAVQLLAELAGLAPEMTVRQWVAHSGLDPAHRESGSSVHLPSRISRHGNRFLRRALYMPALVAVRFDPHLKAFYQALQTRHKSKLQALMAVARKLLHAIFGIFKTNTPYNGEKLFPNLALA

SEQ ID NO: 280736 - protein, 482 aa, unidentified
MKKRNIYQNQSQEIVNLFEAAGSNEKIMCVPMDYAKKDHLVMFCNGHGDILRKPFSVKNTPEGIAYIDDQVMRSCRRRGIKKEHVLFGGEDANSFAKNFVSTLRSKGFLVANVNAHDAKKQRGVIQASTDRIDLMGIAAMLLNCRANCCPAQSGIYRNLRLLVRHRRKLVQMLTEVKNRVHGIVDELFPGFLKEKYTGIVPFTQSSLFLMEDRFSPKQIRRRRRQKLIEILKRCGTSKAEETAAKLQHYASKVLHTPAEYVDTMQLSLSQHVKHIRCLKESVVQMDKEIAVSLSQTQGAFLTSVRGIGLVLAAGVTAEIGDPNEQKPLNNLASYSGIVPRVKQTGGINGKTYTGPVAKRCNRILKDYVVKSAYHLGLHGPPDLMVDYKRRDASGQHADFGMGRRYLRMAMCLMRTSQVYLPPDLRKDDYALEDRASYYLVNWPYLRAKWNKVGALDEAFANNRPLGLWRLIAQELYDIKLKL

SEQ ID NO: 280737 - protein, 428 aa, unidentified
MNKVDHIRLEGFRQLKKEIRGSQEHLIVGFDVAKDKHNAFFGTATGKTLFKRLVFENTLAGFERLLIQEEAIKVQHGLTKTVFGLEPTANYHKPLGEFLIKGAHSVVLVSGVAVKRNRELLDGRWDKHDTKDSANVADLISQGKCLFYEHPPLALRELRSLLSLKRRLKKQEHGLKVRIRNHLLAQYFPELDRYYGQSEPDGLSIVRWCVNPSVIAGLEYEHFLQLIAPRTRSIAHQKRLKAIWEKAVASIGCEAGEAAEFEAKVLVEGLEQVREALRATDSKIADICLQFPEYSYLLTIPGFGPDVSSNTLAAIGNPFRFTTRGQVLKMAGLDLSANRSGKRSDAATPVLSKKGKAALRYALYQAALIASTRNRNFIIYYTTTLQRREREKGIKTKMRVKLAAKLLIIAWTLMKKKELFNPEYLTIG

SEQ ID NO: 280738 - protein, 403 aa, unidentified
MSEENYTVKRFIGLDIHKHYFVAVGVDPARQVGYGPYRGRMDQLARWAQQTVTQQDALVLEMTTNSYSVYDTLRSYAHSVTVVHPPQVRLIVEVPVKTDKKAALTLAQLHAVGLLRGIWVPPLEVRELRALLAHRQKMVRLSTIAKNRLQAVLHRHRQEPPAGNLFGDEQQAFWAALALRPLERHCLEADRATLVFAQEQIQADEACLKALAAQEPRLPLLAQIEGLGWLSGLTALAALGAIQRFPTAGQLVGYAGLGTRVHDSGETHLHGKVTKAGRRDLRRAMVDAANHAIAAPGYWQTEFERLQPRLGRPKAIVAIARKLLVAVWHVLSQEVPERHASPARIAHRLYAFTRQVQVRNLPEHRSAASFTRQQLDRLQIGQSLAAIQVAGRTVHLPPSPPTK

SEQ ID NO: 280739 - protein, 389 aa, unidentified
MPPVADRPKAPTAIQTNLAANFISLELSRSIWLITSLSPGSGDKMSRHSVAAGDITALLTRFSELKQKALARTGKSFPIVVIQEAGLDGFWIHRVLQSEGIESHVVDPASIATSRRRRRAKTDRIDGEALLRALLAYKRGEPRVCAMVKAPTPEEEDRRRLCRERKVLIAERVKHVNRIKGLLFSQGVSGYEPLRRDRRQRLDELTTGDSRPLPTHLKTQISRELDRLELLLDQIKLAEAERDALLAAQQASAPAPAGRMLLELKGVGAEFAANLWLEALFRHFDNRRQLASYAGLAPTPWQSGSIDREQGVSKAGNPRLRTTLIQLAWLWLRHQPQSALALWFKERVSRNGGRMKKTTIVALARKLLVALWKYVTAGVVIEGAVMKAA

SEQ ID NO: 280740 - protein, 339 aa, unidentified
MELYSGLDLHSTNTYIGILDTDFKRVFKKRISNNLDLILETLEPFKDQLKGLVVESTYNWYWLVDGLMDADYGSIHLANPSAIRQYEGLKHSDDKHDAFFLAQLLILGILPQGYIYPKKDRPVRDLARKRMFLVKHKTAHILSLQSLIARCSGQRISSNQLRTFTSEDLQQLLKEQHLVLSAQANLDSISFLKQQIHRLEKVIKNKLKLSQAFNGLLTVPGIGHILAMTIMLEVGDIGRFAKVGNFTSYCRCAPTQRLSDGKSKGSGNRKNGNRYLSWAFSEAAQMSRRYNQRFRRYHDRKAAQTNTIVAARALSNKLARVCYYIMRDQVVFNEELILH

SEQ ID NO: 280741 - protein, 356 aa, unidentified
MTVNLRNEAGEVLLRRQVSTRGDAPRQFLEDVKQRSAAEGGYVAIVEVCGFNDWLLELLPQCGCRETVLVQADKRSKRKTDRRDANKLGELLWVNRHRLSAGKPISHLRRVRILTRREREDRRVTQIRRNLGRDLTRTINAVRTILRRENLEQHCPTKGIQTQAAAKWLKSLKLAPLDRMEMNQLLARWNLLQQQKADIEEEIAQRAAAHADAQLVQTLPGAAAYAALALAARVGPIERFPRPRSLANYWGLTPGCRNSGETTDRLGSITKEGSTLARYLLGQLVMHVLRKDPVMRSWFKRIKQRRGSKIARVAVMRRLATIIWHMLKKREPYQIGGPPRKKLKRHEPALATASRP

SEQ ID NO: 280742 - protein, 423 aa, unidentified
MAYRIAGIDVHKKKLAVVVVDVEVDDEYQFERRWFGSNPEQLQRLAEWLIEQRVEEGVMESTAQYWKPLWSALERYWKPSCQNREGAGKMSGTLHLAQALSNRGRRGRKKDFRDAERLVKRLVSQELILSFVPDTQQRLWRTLTRTRYQRTRDKVRLQNQLEALLEEAHIKLSSLVSDLLGVSARRMLHALAEGETDPAALAALAHQRLRATSAELRDALGACTELNPVYRRLVRLALDDLQLIEQQIGQLDQEIASLLREHQDAVQRLAEVPGLGVDSAQQIIAEVGAKAATFASAKNLVSWVGACPGEDESAGVNRSKRSPKGNRQMRRILNQAANAAVKHKGSIFEIVYRRFVPRLGHNKTIGAIAHRLCQLIWIILHRSVRYEERGPAVSEKSKRQRTSRMIRTLRNLGYRVEPLGNPA

SEQ ID NO: 280743 - protein, 349 aa, unidentified
MKKIVRQVLGIDVAQKELVVCLGRMFDMDWALELYSHRTFPNTDKGFAAMVLWVKKLTVENIPVRYVMEATGVYHEALAYFLEGKGHDVSVVLPHKISNYFRTLDVKTITDKTASEAIARFGLERKLDNWHCPKEIFRGLKQLTRERDQIVEDRTISKNQLHAEETQAFPNKKSVARVKARIKLLNKQEAEIKVEIAVLVKGEIEVAKSVALICTIPGVGLLTAVTVLAETNGFELIRSKRQLTSYAGLDVQEKQSGTSVKGKAKISKKGNRHLRKALHMPALSAIRNEERFTTIFVRLVSKHGVKMKAAVAVQRKLLELIYTLYKTNKPYDKDFLKNETGKEEQKMAA

SEQ ID NO: 280744 - protein, 345 aa, unidentified
MDVTYCGLDVGSSTCHVVGKTKDGDRVADRKFDTQADRIREVFEKIPGEIHVHLEASELAGWVRQILRSCPRIRRVLVSNPKENSWIAKDANKNDRRDAGKLADLLRSGLADAHAVYYSDDPDRAVFKQIVQHYEKLTWQESKLKMQIKSRLRQQGVLARGETVYTPEGRTAFVQQVLSPPAREMIGQRFTLLDRTLEGQKEAYAWMRKTSKRYPEIVRFDEVPGVGLITACRFSAYVQTPDRFGSKRKLWRYCRLGIAKRSSDGSPVSRQALDWNGVGSLKDVSRKAFEGAMRTRKDNLFQRAYRASVPRSGNPTHARLSTQRKIVAVLRALWKEGTHYQDDKG

SEQ ID NO: 280745 - protein, 408 aa, unidentified
MNPLFVGIDVSSRNNVAYLMNPDGSKYSSFSVQNNLGGAKLLSERIVSALQSMQLSNVVIGLEATSIYGNSLVYALREDGSLGRFQRKIHVLNPKQVKKFKEAYPDLPKNDFVDAFVIADHLRFGRIAKEVYMDDYRYQALRTLTRARFDVIQNLTREKQRFANYLFLKCSGMAQDKDIQNTSATTIALMEHFETVDDLANADLDELTAFIAETGRGRFSDPNTVAKVIQTAARGSYRLPKTVNDTVNQAMSVSIASIRALKEQIKVLDKAIEQQFEIIPNTLTSIPGIGKVYSAGIIAEIGDIHRFDSQASVAKFAGLVWTQHQSGEFEAEHSQMIKSGNRYLRYYLLEAANSVRRCDSEFRRYYDLKFKEVNKYQHKRALALTARKLVRLVFRLLKDNRLYTPPEG

SEQ ID NO: 280746 - protein, 359 aa, unidentified
MGERDRRAEAKPVENPNSRQGREGEPELRKAGGRPGRKWVKVMGQYTELFVGIDVAKRSLEVALSSGESWAVNNNAPGVARLVKELAARAAALVVLEASGGYEREVWLALIEAGVPTARVNPRDTHHFAQAHRQLAKSDRLDARGLVLLAAQVRPQPDAAPGAADEQLKELVMRRQQLTAMLTAERNRLQQAISAASRRDIKAVIRFLERRREALDHAIEEHLSNHPRLRAISELLQSAKGVRRVVAATLIARLPELGRLTRNQIAALVGVAPYDRKSGDWDGRSHIFGGRVEVRCALYMAALSAVRWDPYLRAFYRRLRERGKEKKVALTACVRKLAVMLNAMVKNATPWSPPCPSLA

SEQ ID NO: 280747 - protein, 402 aa, unidentified
MNAVGIDVSKGKSMVAIMRPFGEIVSAPFEIKHTASDINSLVELINSVEGESRIVMEHTGRYYEALAHQLSEANLFVSAINPKLIKDFDNDSLRKVKSDKADAIKIARYALDKWQNLKQYNVMDELRNQLKTMNRQFGFYMKHKTAMKNNLIGILDQTYPGVNTYFDSPARSDGNQKWVDFASTYWHVDCVRKMSQNAFIDHYQNWCKRKKYNFSQSKAEEIYGKAKELVPVLPKDDITKLIIKQAVNQLNSASTTVESLRTLMNETASKLPEYPIVMAMKGVGASLGPQLMAEIGDVSRFTHKGAITAFAGVDPGVNESGSYEQKSVPTSKRGSSDLRKTLFQVMDVLIKTHPQDDPVYQFLDKKRAQGKPYYVYMTAGANKFLRIYYGRVKEYLSSLPES

SEQ ID NO: 280748 - protein, 338 aa, unidentified
MNYVGIDHHRQYSHLTVMDQEGQVLRSGRVPNVQVEIEKFLEGLEAVEAVIETGRSSYTMVDALEEMGVAVKIAHPNEVKAIARAKIKTDKRDSEVLAHLLRMKMIPEVYRRSVENRQAQRVLRQRAFYVSAMTALKNRVHALLAQQKEEVREEVARETNIFSERGRRMLLGLDLARGEKRLLEALLKTYRHLETRIGESTALVEKLYEESREAQLIRTIPGFGKYLAVLVVVEIADINRFADAAHLHAYAGVIPSTHSSGDRTHHGKIVRAGNRWLRWAAVEAVWPGIRADFDLRCFYERLARGKGANKAKVATARRLLTIIYKVWKEQRNYIPYRR

SEQ ID NO: 280749 - protein, 339 aa, unidentified
MAQVTTLGIDIAKNVVFVHGVDAHGHVVVTKRLARPKVLPFVAQLPPCLIGMEASGGAHYWAREFTQLGHTVKLMPPQFVKPYVQSQKNDPNDAAGICEAVERPRMRSVPVKSVPQQDMQALHRIRERQIKARTALLNQIRGLLMEYGIVIPQRASQVRHKVPYILEDAENGLTATAREWLQALAEELQALDQRIAATDQQIERLFVADEACQRLAQLAGIGPLTATALVAAVGDATDFKNGRQFAAWLGLVPRQHSTGGKTTLLGMTKRGNRYLRTLLIHGARAVLRVVDRKTDPRSRWLQGVKARRGKHCASVAQANKTARIAWALLAKGDHYRQAA

SEQ ID NO: 280750 - protein, 406 aa, unidentified
MFYLGIDVARNIHRLVILDDNGERVSEGISFQNNTADFQKTLNKLKELSIKPDNSIFGLEATGNNWENLYCFLTAKGFKAIVINPHQTNKFREALRKKAKTDDIDAFVIAGLLRSGESANSYVPEDKVQTLREVTKLRYELIKDHKNYQRQVLALLNIVFPEYKQTALKNPFAIASAAIFKAYPTAKHLSQAKPKHIEKIVRSIKGNNFNIKEIENLISTAKTSVYSGRCQESRALTLGILLAQVESFSKSIQQTEEQINQIFSPASDDDINSFPGSNLLTIPGVGPKTLAAILSCVGESGQAFSDGVKLIGHIGFFPQIYESGETRRANKLSTKGPAYLRHALYVASVACIKHNLQLRSLYHKKVSQGKKPKQALICVAKKLAHICLSMLHSGQDYNPARVFCYA

SEQ ID NO: 280751 - protein, 404 aa, unidentified
MYYVGIDVAKEKHYVCILDNTNEFAVKPFWIYSDVVGLRELLKRLANLSLNNDDFIIGVESTGAFSENLYEYITDADYKVILLNSYQTAKYRDFSTMKKIKNDAIDAYIIAELLSSHKYKESHISSEDYHSLKVLGRLKRSLDDKIKSIKREISTVMATVNPEITLVFKNIFTKTALEIIKAYPTAVELQKATPKKLTKLFRHIKGNNFNDEKAKYLIELAKSSIYGGRANESRALMIKTNIKILELLSQEKQEIEAKIDTLIKSGISKELDAPIENLKSIPGVSDKTIAAILGECGDLTRFKSAKAFIGYLGLYPTQYQSGNSMSVGTLAKRGIPIAKHALYMAAVSSVLHNQELKKIFRDKVSSGKSKKEALIIISKKLATIIYSIFKYNTPYNAKRVLISL

SEQ ID NO: 280752 - protein, 405 aa, unidentified
MINAVGIDVSKGRSTIAVLRPGGITIRRPFDVSHSSADLSSLVQYIGSLEGDTRAVMESTGRYHEPVLHALSDAGIFVSAVNPHLIRNYGNNSLRKVKTDPADAMKIARYTIDNWSELREYTGMDNIRSQLKILNTQTAFLMKQKTAVKNNLIALLDQTYPGVDKLFTSPVRTDGSEKWVDYVYSFWHVDCVRKIGIKAFSERYAAFCKRHGYNFQKGKPQELFDASKELIATQPKDLICKKMIQNSIEQLKLLSRHIVELRSEMDRLASTLPEYSTVMEMYGVGPVYGPQLIAEIGDVSRFPRRESLTAFAGVDPGKNDSGQRISKSVHASKCGSSRLRKTLFQIMSTILQLGDNDDPVYRFLDKKRSEGKDYLVYMTAGANKFLRIYYGKVKECLRQQTNTTE

SEQ ID NO: 280753 - protein, 309 aa, unidentified
MSSWVGIDVSKNTLAVWVRPSGVNFIVCNSSEGHQALLLNLAEIQVERVLLEATGGYERAVMGCLAQAGHSVVRINPRRARAFAQAMGKLVKTDPVDAGVLAHLAQVIEPSACQPVSLARDELQELVRRREQVVKLRDDERRRLTLARSGVVQESLQTNISQLNEQIARLNSAIEAAAHRTDNQLVKQLGAIAGIGPVTVASLLAYLPELGQLSRRQIAALAGLAPYNNDSGQHSGKRCIKGGRASIRRVLYMATWSVIRCHSSFGTRYASLRARGKCAKVALVACMRVLLIRLNAMVRDHSSWRAEAV

SEQ ID NO: 280754 - protein, 354 aa, unidentified
MDIKYIGMDVHKEAIAIAVMNGDGKLVMESILETKAITILEFIQGVRGDLHVTFEEGTWAAWLYDLLKPHVRELVVCDPRKNALMKEGNKSDKIDARKLADLLRGGYLSSVYHGENGLRTLKELARSYLTISKDLTRVMNRVKALYRSWGILCGGQQVYAPRHRAEWLNKIGEAGVRRRAEFFYQQLDALRELRQAVRKDLLAESRKQSATKLLRQVPSIGPIRTALLIALMQTPHRFRTKRQLWTYSGLAIETRDSAQYRYMAGQLQRSKKPQQLRGLNQNHNHDMKAIFKSAATMASSREGAFHDFYQGLLTKGMKPAMARLTLARKIAAITLTVWKKGAHFDAKQLKLQAA

SEQ ID NO: 280755 - protein, 371 aa, unidentified
MSTTSITPERMVIAIDPHKASWTAAVVDASQQPVATIRVPVSRDGYRALRRFANRWPDPTWAIEGASGLGAPLTARLRTDGIDVVDVPAKLAPRVRMLSTGHGRKNDDADAVSVAIAARSARTLNSAAVDGAVTALRAIVEHRDDLVKTRTQTVNRLHVVLTNLIPAGASRDLTAERAAELLRGIRPRDTAGRTLRSLATDLVAEIRQLDRRIAKAAADIQTAVTDSGTTLTELCGIGALTAGKILGRVGTIDRFRSAAAFATYTGTAPIDVSSGDVVRHRLSRAGDRQLNLCLHVMALTQIRQDTPGRAYYSRKRTQGKSHKEAMRCLKRRLSDVVYQQLRHDANWMEAGPGGHSGAALSSSAASSNPAH

SEQ ID NO: 280756 - protein, 347 aa, unidentified
MRFYTKAHAYYCGIDLHARWMYLCVLDQQGEVLLHRNLRACPEAFLKAIEPFRRDLVVAVECIFTWYWLADLCAQQGIEFVLGHALYMKAIHGGKAKNDRIDSQKIAVLLRGGMIPVAYVYPPEMRSTRDLLRRRTYLMRKRAELLVHVQNTNSQYNLPEIGKKIAYRANRSGVAERFSDPAVQTSIAADLSLIDFYDTLLNRLELFITSQAKQQDHHSFYLLRSVPGIGKILALTLLYEIHDITRFPRVQEFVSYCRLVKCSRQSAGKNYGFSGKKIGNVHLKWAFSEAAVLFLRNNPEGQKLLARLERKHGKAKALTILAHKLARAVYFILRREKAFDLTQFLAA

SEQ ID NO: 280757 - protein, 350 aa, unidentified
MMIIGCDFHPRYQQIAMLNTETGEMVERRLEHENGEARAFYARLPKPALVGMEATGYGQWFERMLAEQGHELWIGHASEIRAGVVRKQKTDARDAAHLLRLLVEKRFPRIWIPSPAERDTRQLLRHRYKLVCFRVSVKNQLHGLAMSQGVCRKKKLFTAKGREELEKLSLGPWASRRRRELLAMLDQLDPVIEELDRAVQQEAESRADAVRLMTHPGVGPVTALAFVLTLGPMARFQRSKQVVSYLGLNPKERSSGDKQHTYSISKQGNTMMRWLLVEAAQTSVRFDTELQRVYRRIKFNKGASVAKVAIARKLAVKLYWLLRATASCAQMAPMQGSSRGTLVPNLGSTF

SEQ ID NO: 280758 - protein, 418 aa, unidentified
MNTTDYAALVALDWGDKTHAFARQTTGANETQTGQIEASAEALHEWLDTMQQTYGGRPVALVIEAGRNVLLHALLEHSWLEVYPVHPATSARFRTAFTPSGAKDDGPDAEMLLTLLARHRDQLTRLQLDGPATRELAALVSARRSAVDQRTQNTNQLRSLLKGYFPQALDLVGEDLGSALALDFLERWPELAVVQKARPATLRAFYAEHNVRSAERIEERIRRVASSRALVSDRAVIGPALLQLALLVALVRVQQAHVAQFEQRIAAAFAAHPRAALFRELPGAGGALAPRLLVAFGDLLERYPDAASFQKYAGIAPVREKSGRQVWTHWRWNAPKFLRQSLVEWAGQTVVYCDWANAYYRQQKRAGKEHHTILRSLAFKWTRILWRCWHDDIPYNERHYLDALKRRGSPLAADLVAA

SEQ ID NO: 280759 - protein, 337 aa, unidentified
MDAHTECTEIVVGTDRGRVILRRTVKTGAKALHEIVQKVRGPATIVVEESTLTGWLRTELAGLVDSFIACDPRHNRLIWAAEDKNDRNDALRLLDLAVLGRLKAVYHADADRYGLKELVLTYHRTVRDVARYRNRITAKCRQHGLGRIPASIYAGPQRKQLLTQFAWADTRRAMRHLLSTFDALARHRDKLYHALVRRGRRIEPVRRFQQLPGVGPVIAVTVFAIIDTPFRFATKKQLWKYAGLALREKSSANVTIARGASRQGSRWLKYVIMQAAIEAIQHGKNEFARHAQSMKCAGVCEGNARRTVARKMLATFYGIWKSGEAYQPIEMTVSRNG

SEQ ID NO: 280760 - protein, 344 aa, unidentified
MEHFAGLDVSVNETSVCIVDETGKIVREVKVASEPGALLTVLNSGAHHFKRIGLEAGPLSQWLYSALGEANLPVICVETRHMRAVLQAQINKTDRNDARGIAQMMRAGLYRPVHVKTLRSQKLRMLLTHRKLLQSKAIAVENDLRGTLRNFGLKVGIVGKLRFETRIRELVENLPDLAILVEPLLLVRRVLREQIAVLHRRLLVIVRDDDVCRRLMTVPGVGPVVALTFRATLDVPARFRNSRAVGAALGLTPCKYQSGESDRTSGISRCGDEMMRVMLYEAAQVMLVRSTRWSWLKAWAMQIARRRGMKKAIVALARRLAVILHRIWVDGTEFRWSRQEAAAA

SEQ ID NO: 280761 - protein, 337 aa, unidentified
MQHLAIDLGGKESQICVRDSKEKILEERKYPTKRLGEYLAKQPPSRVILETSAEAFAVADLARHAGHDVRVVPATLAPSLGVGARGIKTDRRDAQVLSEVSCRVELRSVHIPSEQARAWRTLCNSRDALVSSRTKLTNTVKSQLRCRLVLTHRRRSGATPEQIRSLWTELTGSVPPHVERQLLVIEMLDAQIAEADKEIRQLVKPNETCRRLMTAPGVGPLTSMRFVATLDDVKRFATAHDVQAYLGLTPGEHSSSTRTRRTHLTKAGSPQMRWLLVQAAWTALRCAPTHPMCTWATQVAQRRGKRVAAVALARKLAGILFAMWRDGTTYSQKQGAD

SEQ ID NO: 280762 - protein, 374 aa, unidentified
MGEHTRFVGLDVHKETITVAVAEREGVARLVGTIVHNPVAVAKLVRKLGPVGELRVCYEAGPCGYALQRQLASLGVLCEVVAPALIPVRPGDRVKTDRRDAQRLATLLRSGELTAVWVPDEAHEALRDLVRAREAAQKDLLRARHRLGKLLLRQGQHSPRGTRAGTQKYMSWVRSLTLSQAAQEVVRLDYLAEVDRLVERVARLNAEIVVAVEQLPAEVQRVVHGLQVLRGVALVSAVTAVAEVGQFSRFSTPRQLMAYSGLVPRERSSATAIRRGGITKTGNAHLRRVVVEAAWHYRHAPFIRPQLKRRQVGQPASICATSFKAQQRLHMRYRRLLGRGKNMQQTMTAIARELLGFMWAIAINLESTAGTRAA

SEQ ID NO: 280763 - protein, 358 aa, unidentified
MNYIGCDCHIASLDCAVVNERGHETKKQKINTGVKELMGFVRSIPKPRTIIIEEGSLAGWLLEICTAYGEKLIITDPKRNRWIGRADQKNDTIDAQKLAHLARGGYIKEIHHPIGHRRRFRELVLSYHDTVKSQTRIKNKLKAKFRQNGIKCSGETVYSAKHRKEWKKKLPKDKVVQVIVEGLWQQLDQVHEVQEELLNHIQKQSRHYPEIKRFKKIPGIGTVHAATISAIVENPHRFAHKKKLWMYAGFGLIEKGSGEKVYSRNLTRDYNRLLKKALKQATEAAIIARDNQFRRQYLRLTIEKGIPSHLAKLTVARSILATVYGMWKSGEEYDPNIDKKRLESDKTHVRAYHLVRSG

SEQ ID NO: 280764 - protein, 404 aa, unidentified
MRHFGTLTEDLEALADWLKDCGITTVAMEATGVYWIPLFQILEDRGFEVCLVNARHVKNVPGRKSDVQDCQWLQYLHSVGLLNASFRPPAAICAVRSLMRHRESLMRAACQHLLRVQKALDQMNVQLHHAVTDITGLTGLAILDSIVAGERDPEALARLRHYRCKKSEAEIAKALKGDWREEHLFTLRQSLEAWRFHQAQMVECDTQIAEKMDALGDCGVGPAPPSPKQGANAPDEPMRQELFEKFGVDLTAVEGISIQTTLAFLGEVGTDVEKFPSAEHFASWLGLCPDNRITGGRTHAAHTRKVNNRLATALRMAAQSLHRSKSGLGDWFRRIKSKLGTKAAVTAAAHKLARILWAMVKYRRPYDPKRLGNPELARARKERYLRRQAEQLGFALTPVHGEVS

SEQ ID NO: 280765 - protein, 350 aa, unidentified
MIIIGADFHPAYQEIASVNTDTGEYQEKRLAHPKEAEEFYRSLASEGHAVRVGMEASGHGRWFERLLEGLRIELWRGDAEVIRAKRGRKQKTDREDARHILKLLLKDDFPRIWVPSWENRDLRQLLWHRHRMVQARTRVMNQLQAVALNEGLRCKKRLWRASGRQQLESFQLAPWASRRRHELLELLDRLNPTIAELSQAIEQEAEKSPEAQRLMTHPGVGALTALAFVLIIGNAERFGCGKQVASYLGLVPLEKSSGNRRRLGHITKQGSSIMRFLLVEAAQVTVRSQPEWRSKYLHLLTRRGRKTAKVAMARKLAVRLYWMWRKGWDYEQWKKCGSYVGKPGKRDGVQ

SEQ ID NO: 280766 - protein, 368 aa, unidentified
MMGWMAPLRHLGAKVLVGENQPADREPSMSEITTVGLDLAKNVFQVHGVDAEGSTVLRKQLRRAQVLAFFSGLPRCLVGMEACATAHYWARELRALGHEVRLMPAQYVKAYIKRNKNDAADAEAICEAVARPTMRFVPAKTAEQQAAVLLHRGRERLVRQRTMLVNALRGHLAEFGVIAPQGLRNVGRLIAIIRDEEDARLPGLARQVLQVLAVQIEQLEAAIAALEKQLMGWHKSNPISQRLATIPGIGPIIATAIAAMVAEPSGFRSGREFAAWLGLVPRQNSTGGKNRLGGISKRGNQYLRRLLINGASANLLRSKATNADPWVIGLRRRRPSLVVAVALANKTARIAWAVMHRQENYQRMATAA

SEQ ID NO: 280767 - protein, 343 aa, unidentified
MDVRILGIDLGKNSCSVVGLDETGRVVLRRRMRRESIMALAAKLQGCVVAMEACCGAHHLGRVLAAQGHEVRLMSPEYVRPYVKAQKNDDRDAEAIAEAATRPTMRFVALKTEAQLDVQVLHRVRDRLVGQRTALTNQMRSILLERGVVVPQGRRRLLDALSALSSGSDGGGVGPRVRLLLEDMLDQWRALDERITTLDDEFADMARNDPAARRLATIPGIGVLNATALVAAIGDGRTFSRGRDLSAWLGLVPRQATTGGKPKLLGITKRGSKYLRKLLIQGARAALPSLARTPTPLGSWLRGLLRRAHGNKVVVALASKLARIAWALLRNETEFAVGGLAAA

SEQ ID NO: 280768 - protein, 418 aa, unidentified
MKVVYPTCCGVDVHKTFLVATLITSQGIMPHYSKRRFSTFNNSIHQFKQWLIANNCYDVCMESTGKYWVPIYNLLEDTIRITVANPKWVKAVKGNKDDTKDSKWIGDLFRLGLVPGSYIPSKPVRILREYTRYRSKLVSCKSSEKNRFQNAFTVCNVALDAVVSDMFGKSASSITDYLISSDSFNPEYCSSLLQKTLKKKADTVIESIEGYQMTQEQKERIVMVRSHLEFVRQSIDELDQKLDKMIAPYESAITLLCTIPGVDRASAITIISEIGTDMSQFANSKRLCCWAGLTPSNNESAGKKKSVRITRAGVYLKPALVQVAHAAVKSNLSPYYKVKYERLCKRRGKKRAIIAIARMILTATYHMFVTGEEWNPSDLYKIDIPQELQEKQKEKAIKQAVKLLISNGLIKATDIPAV

SEQ ID NO: 280769 - protein, 377 aa, unidentified
MKSIVYVGIDVHKDSYTLVCLEPGFGEEDQIYGLTKIQPDYHQVIQYLENMQKRLGPDVEFVCAYEAGCMGYTLYHQLTGKGVKCFILAPTSLIKERGSKIKTDKRDAIIIARSLAYGTGKHVHVPSAEDEMVQQYIRMRDGHQKLLKSVKQQILALCLLNGKSYSGRTNWTQAHLEWLHKLKLDWLLRETLDEFLATYEQLSDKMGVFERRIEELASSDSYRENVSKLSCFIGIRTYSALAILAETGDFARFATAEKYAAYLGLVPGEHTSSRNRNARGITKSGNSHLRRILVESSQALCRGNVGHKSKALKARQKGNSIQTIAYADRGNERLRRKYHQMTRKDKARNVCVTAVARELACFIWGMMTDNMQVRETV

SEQ ID NO: 280770 - protein, 344 aa, unidentified
MNGTTIAIDVAKSVFEVAISEHPGQVRERHRLTRERFHRFLAEQPPALVLMEACGSAHHWARHAQASGHRAILVPPHVVRPYVLRNKTDRSDAKGLLEACRNEDLRPVPVKSETQQALAALHRLRSTWLATRTARINTVRGLLREFGLVIPTGARQVVPHVWTLLEDADSGVPGLLRPALAAAAREIRELEERLHAVERQLETAAAETLIVRQLRTIPGVGLLTATALVATVGDVQRFPSGRHFASYLGLTPRESSTGQRRRLGAISKRGDTYLRMLLIHGARAVLYHAKAKTAPAPDRLRTWALQRERLRGHNKAAVALANKLARIIWAVWKHGTSFSGVPTM

SEQ ID NO: 280771 - protein, 457 aa, unidentified
MAASNQANTMAKRRNKNKTKHLLAQNIHTNAAGIDIGAEELVAAIPQERDDRPVRSFGTFTEDIHSLCKWLLSAGITTVAMESTGTYWISPYEILEDAGIEVCLVNAQHVKGVPGKKTDVCDAQWLQQLHTAGLLKASFRPTREVVSVRQLVRHRSNLVKDTSRHLLHMQKALTEMNLKIHHVFSDLDGASAMRIIEAILDGQRDPEVLWKLRDIRCRTSRTTFFKAIQGDWQTSQLFILKQCHQAWKQTREAITQCDDTIQELMTEVPSETQEQVPKIPRSRTKNHMCFDVYQEAYRFYGVDLSSIDGISAGVLPVIMSELGNSQDILSNFRSGKALASWLGLCPDNRISGGKVLGSKTRRVSNRIANALRMAAQSLTHANSALGEHCRRMKARLGKTEGTTALAHKLARLIYALIKSKEPYDESKAFQTTGKVRERRLKKLKKLAESMEMKLIPA

SEQ ID NO: 280772 - protein, 341 aa, unidentified
MGRMIGVDLHKNSFTICSYKSEDDYKLKTHRVSPKGIEAFKASLTRYDELAVESTGNTAFFVREVESKVKRIRIVNPIQFKVISSSVKKTDEADALTIARFLSKDMIPEVRMRTKEQSQIASLIGTRDKFVKLRTALKNKIHNILNANGIVTKPEMFTSEKGFEKIAAIELESSYRFEVDLIVGQIRNLNEAVDKINDELKARGQNIDGHKNLTSIKGISDIGATIFLNTIGDINDFKSDKQLAAYFGIVPRVYVSNNTAHYGRITKMGNKIARTALVQSTLVAIRYSPYLRRFYDKLKTKKGSGKAIIATSRKMLGIIYNTLKNNWIFEDFTQFKLVGCV

SEQ ID NO: 280773 - protein, 355 aa, unidentified
MKRTTKYVALDVHQATTVSSVRDETGRVIARAIIPTEAESLLTLVRSMRSAVHVVFEEGTQAQWLSELLTPVVQCVVVCNRRGDTTTGNKSDRHDADDLSDQLRLGRVRAVYHGRGDHARLKEVTRTYANLLQDSKRVMQRLKALFRARGIKTPGMSVYHPQQRERWLAQLTESGARVRAETLYAQLGVLRALRPRVKAAMVQEAQRDPAWSVLRSIPYFGTVRIALLFATPQTPWRFRTKRHLWAYAGLAVVSRTSAEYEIAADRPVRRRKRWVQTRGLNRDHNPVVKDVFKSAATTAATRSGALQDWYERIRARGLSADLARVTLARKLAALTLHLWKTGAHYDPTQLSVQAH

SEQ ID NO: 280774 - protein, 358 aa, unidentified
MVQRKELNFEGQNIYIGIDVHLKTWHVSILTESGCLKKHSQQSSAQALFEHLKKHYPNGNYLSAYEAGFSGFSTYYSLLAFGIECLPVHAADIPTGQYESVMKTDAIDSTKIARALKSGLLRGIYIPKKEVLDDRNVMRLRITLKRQLSGYKSRVKHLLYNNGVIYPECFQNSKSHWSKRYLKWVHEDVQLLSESRNSLDLLLRQVELFRKSLLEITRLVRTLSRNGRYGEAYENIVSIPGIGMITGMCLLTEIGDIHRFRNERQFASYLGLVPTSHSSGEKTSHGEMTFRGNKRLGPLLVESALVAIRQDRALAAAYGEYCKRMLPQEAIIRITRKLSNRILIILKSGKKYEHDRCY

SEQ ID NO: 280775 - protein, 311 aa, unidentified
MNTTLCGIDISKDWLDAHIEPIGTASRFANDAAGIADLAAWCQANDVELVVMEASGGYERLAFLLLWEMGQPCGMANARSVRYFAEAMGFLEKTDRIDAAVIARYGAVKRLKPTPPPSAAQQRLKALVARLSQVGGDLTIQKQRKSTADAETIASLDEVIALLARQSRRLEGEIATLIDDDPLWACLDRAFRSLKGVASRTVARLMAQLPEIGILSNKAIAKLAGLAPIANDSGKRSGRRPVRGGRAGPRGVLFLVAGIVAKYDPHLAAFKQRLQAAGKEKMVIRIALARKLLVILNAKARDARNEFANAT

SEQ ID NO: 280776 - protein, 347 aa, unidentified
MDHIGIDVHKRESQICILAEGGELIERRIRTEPERFAAVLGGRPQARIVIEASTDSEWVARCLEALGHEVIVADPNFAPMYATRTRKVKTDRRDARALADACVLGAYRRAHRLSDVQRHVRGRLLVRDALVRTRTRYISAIRALLRQQGYRVSSGSAEAFPARVRALALPGPLLSLIAPPLAVMRHLNRQLAYSDETIERVAAYDERVQRLRSVPSVGPVTAAAFVATIDDVQRFQHAHHLEAYLGLVPRECSSGDTQRRGPITKAGSGRARWLLIQAAVSILRRRPPEAEALRTWALRIAARRGKHVAVVALARRLAGILYALLRDGTVFTPRQISPPLASAARAV

SEQ ID NO: 280777 - protein, 400 aa, unidentified
MECVFGIDVSKENANVAVLVDNVVIKQFKIGLDRLGFSLLSDELNSFNAPLIIYEATAMYSRRLRAFLQRDGWKYTELNPLAAKKVMEEFRHTKTDALDAVGLARAMIKNHFRPTYQESPVYTELHDLERTYQQFNKDIVTNKNRLHRALQLTFPEIEHFMSSTDGVLYWHIVQRFPHPAIVLSHEENELTEIILTETSKKIGLKRAIKLANRLLALAQNSAPAKEPQSHAVRAVIALAKEVERINQLKAQIIVEMTTLGENLSEVPLLVSIPGIGIKTALCLIAELGDVRRFHSANAINAYIGIDLIRYESGQYEAKMHIRKRGNPYARKILYRAILNIISVSQYQPTLISANYKRKKQSAQSHGTKKIAIAAMSQFNRLMHHLILNNELYDSTTFMPE

SEQ ID NO: 280778 - protein, 328 aa, unidentified
MVAKVSDAIVGIDVSKETLDAYCAKGQRKQGRTFANSSDGWKLVRTWLKVMGSKQAHVCMEATGRHSLGVALALHDAGHVVSVVNPAQIRDFARTKLGRNKTDKIDAALIREYGELFKPEPWTPPSPAMRRLCELQTMRAGIIRSRAEWKNRMGSGLGDSIAIELAAATIDHFTTQLEAIDRAISETIDQDAELHDRRDLLVSVIGVGDTLAALLMAKMPEPGVLRRSGEIVAYAGLNPSHHRSGTSIDRPTRISKIGNAELRSALYMPALSAMRFNPAVAALVARLKSAGRLKPRQIVVAAMRKLLVLCFGVLKTGKRFDPAIAMPA

SEQ ID NO: 280779 - protein, 400 aa, unidentified
MYDSDEIGVFLGLDVGKTNHHGHGLTPTGKKVFDKQMPNTEPKLREVFTRLKTKFGTVLVIVDQPASIGALPLTVARDAGCQVAYLPGLAMRRIADLYPGEAKTDARDAAVIADAARTMPHTLRSLELTDEITAELTVLVGFDQDLAAEATRTSNRIRGLLTQFHPSLERVLGPRLDHQAVTWLLERYGSPAALRKAGRRKLVEVIRPKAPRMAARLIDDVFGSLDEQTVVVPGTGTLDIVIPSLARSLGAVHEQRRALEAQIEALLEDHPLSKVLTSLPGVGVRTAATLLVTVGDGTSFPTAAHLASYAGLAPTTRSSGTSIHGEHAPRGGNRQLKRAMFLSAFAALHDPASRTYYDKCRARGKTHTQALLRLARQRINVLFAMLRDGTFYEPRTPRLA

SEQ ID NO: 280780 - protein, 378 aa, unidentified
MTCKERGRVIRLARAMQYLINTELSSHEETRFEFNRSTGAIKLGIDVHQDFYVVVEQVEGGNPKPPQRFDKQAFLHWASKLKQRGAEVHAVYEACGFGFSLQRNLTALGIKCHVVCPQKLDERNKRVKTDGLDAKALCLKLDRFVQGNRDALALVRVPTEEEERSRAIHRQREQLVGARKRLEAQGRSLMVNHGVDPVQNWWKPRTFATLPVPHWMRELLLNSQPILLALQEKIAVLTLQLQNAAAPNQPRGLGKMTSVVIDREIGDWHRFNNRRQIASYTGLCPGEYSSGNTRLQSCVTKHGNPRLRAALVELAWRLVRFQPNYKPIVKWRQILAKGALATGAARKKAIVAVARQLAVDLWRIKTGRLRAQELGLIT

SEQ ID NO: 280781 - protein, 344 aa, unidentified
MLIIGCDFHSGFQQLAIFDNQTGEIEEKKLLHPAQAMEFYRGLQGEVRVGMESGCPCQWFRRLLQECGHQLWIGDAARIRAAETRQQKTDRRDAELILKLMLEGRFPRIWVPSEAERDVRQLLMDRHHRMRMRTKVKNQLQSLALNQGLQKGRRLWSEEGLQQLRELAMMEHAGRRRDQLLLTLATLEQQIAALDVVVRREVEAREEARRLLTHPGVGPQTALGMVLTLGEVSRFAGSKQVASYLGLTPREHSSGGKQRLGHISKQGSSFMRFLLVEAGQTAVRGDAELQRAYRRLAAKKSRAVAKVMVARRLAIRLYWMLRNRWTYAELARHAGKPGSFRGEQ

SEQ ID NO: 280782 - protein, 412 aa, unidentified
MKVAGIDVHKKVLMVVVVDARTPEEKPARRRFVTMPSELHRLLTWLREQGVEEAVMESTAQYWRSVWLELEPDMRLHLAQAFSNRAPRGRKHDFKDAERLVRRLIANELILSFVPGGEQRIWRSMTRMKLQLTRDRVRLQNQIECLLEEMRIKLSIVVSHLLGASGLRILHALANGETDPQKLAQLGGERLQCTDEQLVDALTGRAQPVHGEMLALQLQRLQLIDEQMARLNGMIAAAMKAHQDAVIRLAEVPGLGVDSAQQIIAEVGVQASTFPSAAELTSWVGTCPGKEESAEQNHSSRSAKGNTYMRRVLNQAAHAAVAKKGSHFQAVFRRLLPRLGYQSAIWAVAHRLCRLVWKILHEGVRFIEQGVQVGPREKKKRAQMLARALRKLGYEVTITPINQVASTAAIHV

SEQ ID NO: 280783 - protein, 391 aa, unidentified
MVCVGIDVAKDKHDCCILDSDGMVRADCFTIPNNMDGFKQLLQTIRNCTKKSDKIKVGLEATGHYSYNILGFLLDNGLPTYVINPLHTNLYRKSLSLRKTKTDRVDARTIATMLLSDVDLKSYTDIAYHNEELKSLTRYRFDKVRERAKLKQSVSRLVTILFPELEKLVPSLHIASVYALLSEYPGAKQISEIHLTKLTNLLATASKGRYGKDKAIQIRDAARTSIGSVMPAKSLELKHTIKLIQELASEIDEIEDSIQKIMDELNPPILSIPGVGIQSAAMILAEIGDFSNFESPDKILAYAGCSPSTYQSGKLTNCYAHMEKRGSRYLRYALYNATKYVCHWNPVFAEYLAKKRAEGKHYNVALSHATKKLVRLIYALQKSGKAYLVAA

SEQ ID NO: 280784 - protein, 412 aa, unidentified
MDVLYPCCAGLDVHKDSVYACVRRVGPGGAVRETVKVFGTMTPELLQLADWLAGEGATHVAMESTGVYWKPVYYLLDEHFELLLANAQQLKRVPGRKTDTQDCAWIAKLLQHGLIAASFVPPEPQRDLRELCRQRVQLGRQKAAASNRIQKVLEDANLKLGSVASDVLGKSGRAMLRALIAGETDPEKLAALALGRLRKQLPRLRPALTGRVTEHHRFVLRLLLDEVEMIEGLVIRLEERIGAVLGPFAEAVRRWMTIPGVDVRTAQAVAAEIGTDMSRFPSECHLAAWAGMCPGNDESAGKRRSGKTPKGSPWLKRALVQAAWAASHTKDTYLSAYYRRLAARRGRKRALVALGHTILVIIYHLQRNGTDYTDLGGDYFERRDKDKLTRRLLRRLESLGMKVTVESSEQAA

SEQ ID NO: 280785 - protein, 379 aa, unidentified
MKKFITHIGMDTDSRGFDIAIAEGFGSNNNEVRSWGRMPATLEAVDKLIKQLRKQGHTQLRFVYEAGPCGYGLYRHLKARGEECAVVAPSKIPRKPGERVKTNRRDACKLARLDRAGELEAVYVPTEEDEAMRDLSRGRTAAVEAATRVKQQLKSLLLRHGIKYTGKGESWSSAYREWLRRLQLPHAAQAYVLAEGLVALDEAEARVKRLTERISELLPEWRMQPVVAALQALRGVALVTAVEMVAEVGDLTRFGNPREVMGYLGLVPSEDSTGEKRRQGSITKTGNGNARRSLVESAWAYARPPRVTRALKQRQQGLAREVIEISWRAQVRLCGRYRRLSARGKNKKKIIVAIARELCAFMWAIAVAISDQKLPAQAA

SEQ ID NO: 280786 - protein, 344 aa, unidentified
MEIITIGLDLAKNIFQVHGINAQGEPVVRKALRRSQMLPFFSKIQPCRVGIEACGTSHHWARELIKLGHDVRLMPPAYVKPYVKRGKTDAADAEAICEAVTRPTMRFVPVKSAEQQAVLSMHRGRDLLVKQRTQLINMIRGLLAEFGINIAQGVCRALETARAIIDGEAIDVPPEGVRIVARLSQQALDVHAQVREIERDLLAWQRKSELASRLMTIPGIGTIGATALAASVTDPHQFRSGRQFAAWLGLTPLQKSSGGKERLGRITKMGDRYLRKLLVVGMTAVVRHAKSKPQSADPYLLALLQRKPVRLVTVALANKTARIVWAVMTRGEVYQQRHVPALSA

SEQ ID NO: 280787 - protein, 349 aa, unidentified
MSEVSTIGVDIAKSVFQVHGVDADGTVVIRRRVGRAKVLEFFADLPPCLVGMEACATAHQWARELKNLGHDTRLMPPTYVKAYVKRGKNDAADAAAICEAVTRPSMRFVPIKSVEQQSALMLHRTRDLLIRQRTQLINALRAHLAELGLVAAKGREGLQQLVAAVTDSSDERLPRDAGFACQTIVAQLHAVQTQVNGLDKRITQAHRANADSKRLDAIPGFGVILSTAVVATMTDPKAFKTGREFAAWIGLVPRQNSSGGKERLGSISKQGDRYLRRLLVVGAISIVRTARMRPEKYPWVIELLARRPAKVVAVALANKMARIAWAVLAKGETYRAPARSSNATIAAAA

SEQ ID NO: 280788 - protein, 342 aa, unidentified
MKDSIYDHYIAIDWSIKNMAIARMTKKSNKITVIDVDSDIEDLQAYLKNLRGTKILTIEETTTSQWLYTELREYVDRIIICDPNRNKLLNEGAKTDKIDASKLVQLLKAGLIKEVYHSTDKFLYLRRIVSGYEDLIKAGVRLKNQRYSLLRICGKSGNEKIGSRFGGQGEQFVLECLDRQIEAYEKDKQGYEMQFTKLARSYSEIKHQKSLPGIGVINAVKIVARVVTPYRFPDKGHYLSYTGLIKLAKISGGRSYGKRNPRYSRQLKSVYKSGVLAAIGGNNPINDYYNSLIQDGYAQHNARQKACRRLAILSLGVFKSGKRYQPYRSHHVKGAKEGTSSL

SEQ ID NO: 280789 - protein, 450 aa, unidentified
MSPLALDVVTKTGKTPVLGRMLSKYVGRKTSSIENDITKARNHSRQRGNIMRVVFGIDVSKASSEVAILVNGEKVHGYTIPNDAIGFNRLLGDLKTVHQPEIVFEATGVYSRRLQAFFEDNSYAYTRLNPLESKKQLDSLRVRKTDKIDAEKLAMSQFILNRKPSYVQEALYQELRDLSRFYQNLTEDIVCSKNRLHKVLQVTFPELENILSAPTGEQYWNLVITFPCNSFVLESDDATLTATIRQSTAKRISEKRVTYLVDKLTKLANQSYCAVKKTSPVIEEVKYYARELLRLSEHRQGVLEEMVTLAQSLPEYEILLSIPGIAETTATSIIGELGDIRRFHSANQINAFIGIDLRHYESGNFLAKEHITKRGNPYARKILFKCIHNIASASHTNPCHIADFYEKRKRQSQVTSTKPHTIASIHRLIRTMYYLITHNKLYDYTSTQNR

SEQ ID NO: 280790 - protein, 400 aa, unidentified
MQCTDHPAHLRAAVREEDSALFVALELSKSVWLIAASAPGSEKISKYRVAAADVVALLALLARLKAQAERYCGGPVQVVSIHEAGLDGFWVHRMLEANGVESHVVDAASIAVDRRSRRVKTDRIDVERLLRTLMGWARGERRICSMVRPPSPADEDERRLTRERGTLVTERTRHVNRIKGLLATQGVFGFEPLHKNRRQRLEELQQWNGQPLPPRLKTELVRELDRLELVMSQVAALEAERDRALQARRTAAMNPTKAPSPGTASAGEVGSQLLRLRAIGPEIASVLSLEAFYRNFNNRREVAAYSGLAPSPWKSGGIDIEQGISKAGNARLRTTMIQLAWLWVRHQPGSALSRWFHERVGDRRGKIKRIAIVAVARKLLVALWRYVTQGVVPEGAALKA

SEQ ID NO: 280791 - protein, 336 aa, unidentified
MNYCGIDLASQASAICVVDQNGRILREMEIPSDEDSFRTNLGAVSAMRCVVEASPLAEWAANCLEGLGHKAVIIDARRAKAVVCTKKKTDRVNAQDLAHMSRTGWYTEVHRKSAAARELRTWLTARDGLVETANALNARVRGLLRAHGIRIGKVAEREFELKIRDVVKAKVPALTGAITPLLELWRNAIEAAKQMEKRIASVAKDDAVCRRLMTVPGIGPLTATAYVATIDQAKRFERSDQVPAYLGLVPSVYQSGEVDYRGRITKEGDSLLRWLLVEAAHNLLTHTKREFALKRWGQRLEQHKGIGKARVAVARKLAMILHHLWVTGEAFDWKRA

SEQ ID NO: 280792 - protein, 338 aa, unidentified
MSYYVGIDLHSDNSYIGVIDKKDSRILGRKLPNDLDVILKVLEPFQKKIQGIVVESTYNWYWLVDGLQEAKYKVHLANPAAMQQYSGMKYTDDKWDSYWLAHMLRLGILPEGYIYPKEIRPVRDLLRKRTMLVQHRTAHVLSLQNMVNRNTGKKMQVNDTKRLSEEKISKLLADEHHIMAAQSDKAVIDFFNEQIESIETVVLKEVKLRYPYEELLTVPGIGKILGITIMLETGDINRFPTVSDYSSYCRCVSSKKVSNGKKKGEGNKKNGNKYLAWAYVEAANFMRRYSEPARSWHQRKASKTNQVVATKALSNKIAKACYFIIKDQKPFDPKKLFQ

SEQ ID NO: 280793 - protein, 436 aa, unidentified
MKKHSKSCRRSEASSKRAKSRGPVQRDAKEVMAEVLGKLTGKLDAPTVSTSAQENRRGNTVGPNRDRLTVGVDLGDRWSQYCILGLEGETLAEGQLRTTQEDVGEFFRGLTTARVVVEVGTHSAWVQDVITELGQEVLVANPRLMEGSKRRKRKNDRIDANKLARLGRVDPQSLYPIRHRSREVRQDLVVLRARDALVSVRTELINTTRGLVKSMGTRLPRCSSPSFAEKVKDAIPAEVGEALQPLVQLVETVNECIERYDERIEELGRKKYGHTTLLRQVKGVGPITSLAYVLTLEDPQRFASSREVGPYLGLVPKQEDSGDIQPQLGISKAGDRMLRRLLVGSSQYMMGAFGPDTDLRRYGLRLCERGGKNAKKRAVVAVARKLAVLLHHLWVTGDVYEPLHRTETGTGTAQAAAAIKPRSTCSIKVKPTQKIL

SEQ ID NO: 280794 - protein, 312 aa, unidentified
MTHIICGVDVSATTLDARIGRDGEYRRFDVSADGLADLIAFCQAHQVGLVVMEATGGYERRPAGHLWAAELPTAIVNPRAVRDFAKAMGVLEKTDRIDCGIIAWYAETKRIKPTPPASATQARLTALVRRLRQLTDLRTQQTNQRRLIVEPDVLASFAPILAAIASQQRQLETLIAQAIGDDPLWVRLDAAFRTIKGVADRTIARLMAEMPEIGTLSNKAVGKLAGLAPIARDSGQHNGKRKVRGGREGVRSILFVIAEVVRRYDPDFAAFHQRLSRAGKPNKVIRVAIARKLLVRLNAKARQIRRTTTIPA

SEQ ID NO: 280795 - protein, 398 aa, unidentified
MKGQDIMIYVGIDAASQKHDFFIQRDTGEVFSKKAISIKNDIDGLKKLHNSIQGFVESTKDSNVRIGLESTGHYCKNILLYLIKEGYQVSLINPILTSMDIKASSVRKTKNDKLDAEAICRFLDKNRFDFKPYTLLSYHIDALKSLTRQRFTIVKQQTQQKLIFQRLVNVIFPEFLSLFSSDYTESVLNILYAYPTPKKMARAHESSIDKLLHHACKTTASKIIETAKSSIGQSEDYLGFELQHTIDMIRFYQKQVEIYNNQIEIELNETEYGKIITSIPGVGTITGAMIISEIGDINNFKSPDQLLAFAGLDPSVYQSGEFEASHTKISKRGSKYLRWAIHQVSSGIWKWDKTFNDYYSKKINEGKHHYVAIGHIDKKLVRVIFSLLKNKQSFIPQK

SEQ ID NO: 280796 - protein, 388 aa, unidentified
MIYAGIDVAKDKHDCLIVDSDGKGLSKVFTITNNKQGFDELFMNLTTHSEDLSELKVGLEATGHYSDNLLEFLIANDLPTTVINPLHTNLYRKGLSLRKTKTDKVDAHSIVTMLRTENLKPYSQSSYHLRELKSLTRYRFSLVQDCARLKSSFARLCVILFPELEKLVPSLHMVSVYALLAEFPNARAVSECHLTRLANLLSQASKGRYSKDKAIEIRNAAKVSIGSYSEVKSLELQQTLQLIQVMEEQIAQADAKISPIVDSFHSPIMTIPGIGYRMAAIIIAETENFTNFDKAEKVLAFAGLEPSVYQSGQLTSTHAKMVKRGSKYLCYALFNSAKFVCHWDEGFNQYLAKKRAEGKAYNIAVSHAAKKLTRVIFHLVKTNQSFSR

SEQ ID NO: 280797 - protein, 377 aa, unidentified
MNYIGVDLHKDNMTIVAVNEKGEIFIKERIAPKCIGKIDQFFSQDFIHPCKVVCESIGFYHWFYDLIFQKVEQFILANPIETKKYSWNNPKTDFKDATKLAFLLFGGEFERNRSLSCYIPDKIERTFRETTRTRFNLVRRKTSIINSARRIFLKNNLAGPKILNYSTLSQFVNKYGDRFNEMHRKFLYMFAENLFYLEKQISDIERDIYNFLSMERFKNIHQILITIPGVGDMVSAVLISEIGDFKRFPDPKFLASYAGMVPRVFQSDTKLKYGKITKQGSAYIRYALINASWVAVRENKKIREIFIRIAKRAGRKKAIVAIGRKILVWSWHLVINNESWQSFNDKFTAEHRSGMTLKWVLNEIEKRDEFIKKSSIK

SEQ ID NO: 280798 - protein, 313 aa, unidentified
MYYIGIDVSKKDLSVFNGKKDLKFINQEGLRPFKKYLKKKYKNFSDLVIIFEPTGIYSFNLKEFCAENSIKAYIVNPKRSHSFARSLGIRPKDDKIDARILYQFHRLIDSKDIKVPKIDQQTKVLSSYLTSYEFAVKQRVAISNHLESIRDKKLISLLKKELKRAQKLEDKIFNDIKEYIRQNQNLREDYQRLLTISGVGEKMAIALLTLFKTYQGTNRAQITALVGLDSTKRESGSSVRGRAKISKNGKAIYRKVSYLPAVCATVHNQKIKIFYQRLLANHKPKKVAIIASMRKILLIAHAMYRDKTEYMAV

SEQ ID NO: 280799 - protein, 408 aa, unidentified
MKRYYIGVDWGDRLHQVYVGDHEGKKVREIKVPETVEALAEIGRWLDEQRAEGFELWAAIEKPAGRIVDFLLDHGVEVYPVNPKAVDRVRDRYRMSDSKSDAFDAYVLAEFLRTDQAHLKALRPSSENAQELKMLCRDQRRVVRLKSRLLNQLTTTLKEYYARPLEVFGDIETEVALDFLTRYPTPAHLGALKRKEFNRFATQQHHLSKQRCEELWEKLQKPQLAVPEHVVRAKAQLVEVLIDQLRASIKAVKTYHHKVESFFASSPAAPLAKTLPGGKSGTLVAAIWAELGDAQGRWESSGHLQAEAGAVPVTKASGKSHVVHFRFACNKHLRYSMYWFSFVSLNNSEWAKLYYRGQRDKGHSHPQALRALGAKWLKIIFVMWRDHKPYDEKFHLANIALQKMRQAA

SEQ ID NO: 280800 - protein, 457 aa, unidentified
MTRRKSKAKRKSFQVPKLPAHLQHMNLNAAGIDIGSERHMVAVPEGRDTVSVREFGTFTTDLEALAAWLKQCGVTTVAMESTGVYWIPLFELLERRGFEVKLVDARHVKNVSGRKSDVLDCQWLQQLHTYGLLAGAFRPPDEVCVLRSYLRQREMLTQASSMHIQHMQKALQQMNLLLHNVVSDITGVTGMKIIKAILAGERDPRVLARNRDAGCHNTAATIAKSLVGNYREEHLFALRQAVDLYETYQVKIADCNQAIVKQVEKQPNISDDGPPNPDKQIPARDRIREGVDVRDLLFKKSGVDLFAIPGLAADTLLILASEVGFDMTPWKTEKHFASWLGICPGTKKSGGKVLNTKIKRNPNRATQAFRMAAASLYRSQTALGAFHRRIKSRSGGQQAVTATAHKIARIYYAMLSHGTSYVELGQKAYEQRFKERRIDHLKVQAKSLGFQLVPCVS

SEQ ID NO: 280801 - protein, 362 aa, unidentified
MIVIGTDTHKRTHTVEAANSATGELRGGLTAPARTPGFVQLLDWGRELDSERIWAIEDCRHVSASFERYLVAHGERVVRVPPKLMGQSRRGERSAGKSDAIDAAVIARAALKEGPETLPAAYLDEKALQIKLWLDHREDLVRARAEDQQRLRWHLHGLWPDYEIPAGALDRAIWLDRVARRLARAEQSARVAIARELVVEIRRRTKRARELERQIAALVGDYAPQLLELPGCGALSAAKIIAEVAGAERFSSDAKLARLAGVAPIPASSGKTSRHRLDRGGNRQLNCALHRIAVTQGRVHPPAREFLARKQAEGKGRMEALRCLKRHLVRAVWNALRAPESLEHDSRKLQATSTSAVAAGLT

SEQ ID NO: 280802 - protein, 346 aa, unidentified
MEYYVGIDVSLELSSVCVVDGRGKIVKEAKVASEPEALVCFFNELGFPVDRIGFEAGPLSQWLHAGLTQAGFETVLLETRHVKAALSAMTVKTDRKDACGLAQLLRMGWFQPVHAKSIGSQEIRALLVARKQLLGRLLDVELSIRGILRGFGLKVGQVTRKTFEARIRELVTGHTTLERIAEAMLSARATLQAQYAKLHKAVLAIVGEDAVCRRLITVPGVGPVVAVTFKSAVDDPSRIAKSKAVGALFGLTPKKYQSGEKDVTGGITRTGDEMVRTALYEAANVLLSRITRFSKLKRWGMDVAKRRGSKRAKVALARKIGVILHRMWIDGTTYRWAEAKPIAAQA

SEQ ID NO: 280803 - protein, 278 aa, unidentified
MAQNDVVVMGIDVAKDKVDVCIRSLGARQVFPSATQGHRKLVAWLRKHQVGKAVMEASGGYERVWAKVLREAGIEVRIVDPKRVRSFALSAGRLAKNDTIDAEMIAWFAETFNDAPSQTYDAAREELQALVKARLDLIDSRIRLVGQTEHAAPGLAQKTHARILKSLASEIAKLEAAIRAQIKSTPDFAERVEIIESVPGFAETSAANLVAGMPELGEVSNQIAAALIGVAPYDDDSGKRRGERHIKGGRRWVRNAIYMPCVGAATLNNPVLKASIGA

SEQ ID NO: 280804 - protein, 409 aa, unidentified
MGLYCGIDWAENHHDFAILNDLGEVVSRGRVDNDAAGFARLLEAFAEAGDTAENLIPVGIETDHGLWVAALRASGRVIYPINPLAASRYRSRHSVSGSKSDSADAVMLANIVRTDATAHRPLPADTDSALAIRVLARAQQDAVWSRQRFGNEVRSLLKEYFPAALTAFQSLEDGLTRPDARSVLAAAPTPTAAAALTRPQLRAALKRAGRSRFLDRDVERLRGILRTPALRQPPQIEAAMGISLMALLRQFDAACAAAETLAAHVSVLFSEHPDAKIITSFPGLGPLAVARVLAEIGDDRNRFATARGLKAYAGAAPITRASGKKTFVLHRHVKNRRLAAAGTIWAFSALQASPGARRHFDARRAGGDWNHQAQRHLFNRFLGQLHHCLITREFFDELHAFPPPLPIAA

SEQ ID NO: 280805 - protein, 335 aa, unidentified
MEFTYFIGTDVSKNELDFAVMHGNMLLFHREIANTPEAISSFIKELVRLPDFDLSRAIFCMEHTGIYNNHLLVYLHKKRANIWLESALQIKNSSGKLRGKNDKVDAIRIADYAYTKRDKIRLWVPKREVIGQLANLTAARTRLIEAKKLLKTPLQEYDSFSTNKMIKQSVSVCSHALKAIDADLDRAEKAIDELIAKDPELKRLFGLISSVKGIGKVTATQILITTNEFKDINNAKQYACYAGVAPFIEESGIFKGKGRVSHMANKKVKTLLHMSAIVAIQYNHDLKRYYDRKVNEQKKNKMSVINAVRNKLILRIFACVNHNSPYENIYQKSFA

SEQ ID NO: 280806 - protein, 385 aa, unidentified
MLKIVYPICCGMDVHKSFLVACIASTNECGVTTYKSRRFSTFTKDLRLCADWLSANNCKDVCMESTGKYWIPIYNILEASCKIVLAHPKYVKAIRGKKTDKKDAKWIADIFKHDLVSGSFIPPADIRQLRDLVRYRWKLNNFIVGEKNRAQNCLTVSNYKLDDVFSDVFGKAATQITSYLLEHLNESLSDVSNFRTKGMKATDAEIRDAADGNICAEQAEKYTSQLSLVMSVPGIQTFSAISVIAEIGVDMSVFPSSKHLCSWAGLTPQNNESAGKKKTTRISRAGAYIKPLLVQCALCAIRAKRNPEIRNRYLSIKKRRGHKKAIIAIARMLLTAIYNILKKNEPYNAELSHKVDVPPAHRSVTIEEAVFILQRQGYLITPCTS

SEQ ID NO: 280807 - protein, 468 aa, unidentified
MPRAAHTSSRRSPAAKARFSRRYARVEDMPVIHRHAAGIDLGGDVSHFVALEIDDEIEVREFGGMTPELREMLAYLVKNGVTTVAMEATGVYWMPLYDLLEGAGIEVYLVNPAHVKNVPGRRKDDKLDARWLHKLHRYGLLSGSFRPSEEIRPLYSLQRNRSKLVRLSADEVRRMQKALDVMNVRIHKAISDLCGVTGMRIVRAIVAGERDPAKLAGLRDPGCRASEQELRDALTGSYQPHQVFLLSQALAGYDFQVGRIAKVDAEIERYLQALIPLPAQERERRLAEDPHELPKGHHAPAYNVAGYVVLVTGRDPTCLAGIAGPSALALLNFLGKDLHEWPDAKHFGSYLTLAPHHKISGGKVLSSRTPPGRPPAAEIFLQAAAAVSRTDTALGAYYRRLALRIGSGRARTATAYKIARMYYHLMRDGQAYVQAGAADYEARYRRQQLVGLERKAKQFGMALVPASG

SEQ ID NO: 280808 - protein, 394 aa, unidentified
MEDVLRSCCAGLDIHQKVIVACVIRSAEGKKRPEKFFGSFETTTRGLLDLSDWLSSYEVTHISMESTGVYWKCVWRILQNHFDLQLANPRHIKNIPGKKTDMKDAEWIARLTRLGVVPTSFVPPEPIQELRDITRYRKHLVEDLNREKNRGHMVLQSAGIKLTSVIKDVYGKSGRALLYALIENKEITETLILECVYTTLRRKVPQLMDSLEGFMTVHYRKMLALHLKQIECLEKQIQEVEETINDYLTPYEEYVERLEELPGINRRTAAVVLAEIGIDLSVFPTAGHLASWAGVSPGNNQSAGKTYSRRVGKGNSYLKKVLAQGALAVSQGKPNRIQAFFFRIRRNTGHKKAVVATVHLMVRIIYRMFSDASRYQELGENYLQNRKNTLTNNC

SEQ ID NO: 280809 - protein, 320 aa, unidentified
MNSIILGIDISKATFDAALLINSKIKTKKFDNNIKGFRTLIEWLKNKDANTAHVCMEATGFYGLKLAQYLYDNDFKISIVNPARIKGFAQSKLCRVKTDKADSTLIAHFCYTMKPELWQPTALHIQELQQFINHLEALIAIKNQETNRLEGLSNIVAINTKSHIEFLDQQIKEMEQLIKNHIEKHKDLSDKSTLLDSIPGIGKRTIAVVLAFLSGIENFDSVKQVVAFVGLNPKQRQSGTSVRGASRISKTGKAELRKAFFMPAIVSLKCNPIIKNFSERLNNRGKPKMVIVIAAMRKLLHIIYGVLKTQTTFNLKAHTI

SEQ ID NO: 280810 - protein, 406 aa, unidentified
MQGPVITVDVSKGSCHYQPYLENGRPMRKPKVLHDTIEGFAELNEVIEKTKQKSECDIVPVVFEATGVYHRCLQKYLDDNNIPYYIISPLLSAAYRKTKINGNKTDDLDCAHIAKAYYGEDDLLPYNKPTDHYALMRAMNRYYEQEVSHLRKYKVTFRSALDIIYPCIDKCFKGKGSLYDPVPLEVLKRYPHPSLLLKHKEETVVKAIVKRTDHNRKFVASIVHKMYECAQHCYSGAEVSDFEVIALPDMIEEIQFQMERCDQILGKLIEEARKDVNFQSVVSIVGIGENLAARIIAELGDISRFKSRKAITAYAGLNPKILQSGDVDGIHLRISKKGNRHLRSLLYLGASCNYRLKKHDPIYEFNQKKRQQSQSPLKKKAANIAAAHKMLVTIYALSSSGEIYRF

SEQ ID NO: 280811 - protein, 482 aa, unidentified
MKSKPQKRTKKATDHPTQRHWHEMNRKQRREAMRKIQSEEISLEVVHANAAGIDIGNESHYVAVPASRDSQPVRRFGCTTAELKAMAAWLKQCEIRTVAMQSTGVYWIAVYDILEQAGLEVYLVNARDTKNLPGRKSDVQESQWLMKLHTYGLLRNSFRPAQQIRTMRTYWRQRNDLVQSTGRHIQRMQKALTQMNLQLANVLSDVSGVTGQAIIKAILGGERDPHKLAEFRDPRVKASEEQIAQSLEGNWQEELLFVLKQEQDGYEFCRKQMAECDRQLAQYLQQREDRSQGAPLPEEKRKTRLKKKKGNAPQFDLRQGLFRLSGTDLTRIDCIDVMTAMTVISEAGWDMSKWKTEDHFVSWLRLCPDNRISGDKIIGKGRLPTNNRVNIALKMAASSLRLNNTYLGAQFRRLRTRLGAPIAIKAMAAKLARLVYRMLRYGMKYVDRGAAFYELQNRQLQIKRLKSKAAKLGLQIVQAPAA

SEQ ID NO: 280812 - protein, 348 aa, unidentified
MSTMTETARCVTAGVDTHRDVHVVAVLDERGAQLGCEPFAADPAGYRKALTWVRSFGPVERVGVEGTGSYGAGLTRYLHNQRVKVVEVSCPDRQRRRSHGKSDPVDAVAAARAAQSGEASAQPKSRTGNVEALRALRVVRRSAAHSRIDSVNQMRALLVTGPEKLRESFRDTTVWRMVTAAVRLRPGDPTTPAGAVKFALRELARRVQALEDELDRLDAIIGPLVKATAPTLVARHGLGPDTAGALLVSAGDNPERLHKESAFAHMCGSAPIDASSGVVVHKRLNRGGDRLANEALWRIVMVRMVSDPRTRHYVERRTKEGKSKREIIRCLKRYVARELYPYLVEERS

SEQ ID NO: 280813 - protein, 351 aa, unidentified
MILIGVDFHPSVQQVAYVDTETGETCERRLNHSDGEAERFYRDLERRQVRVRVGIEATGHARWFERLLAELKFELWIGDAAKIKAARVRKQKTDRQDALLLLKLLIEDRFPRIWVPTPENRDLRQLIWHRHRLVQMRTRAMNQLQATAMNEGVRRKKTLWSKAGRQQLESLKLAPWATRRRQDLLHLVDGLNGTIAELTAAIEQEAHKRPEVLRLMTHPGVGPITALAFVLVIESPDRFACGKKIGSYLGLIPEEDSSADRRRLGHITKQGNSLVRYLLTEAAQAAVRYDPDWRRRYIHLSKRRERAIAKVAMARRLAVSLYWMWRKGYDYQQHLKFGSYAGELELGHGVK

SEQ ID NO: 280814 - protein, 452 aa, unidentified
MKRKRACRAGAVPSLKCMEPNAAGIDVGAREVYVAVPADRDPKPVRCFLTFTEDLQALVAWLLSCHIRTVAMESTGVYWIPLFQLLETKGIEVCLVNARHVKHVPGRKSDVLDCQWLQYLHSVGLLRASFRPPDAICQVRSLLRHREDLVGMGAQHVQHMQKALSQMNLQLHHVLSDLTGQSGLAIVDAILAGERNPHVLAKLRDRRVQASEDTIAKALVGDYRREHLFTLRQSLQAYRHYQQLMAICDEEIEAYLREFDSHSDVDARPLGPEPHPHKPRKNEFRFDLRGELYRILGVDLTAVPGFNAISVHALLAEIGPDLSRFPNAAAFAAWLGLCPEVNKSGGRVLSARTRRTKNRANRTFRIAAQALHRSQTYLGSYYRKMRSRLGAPKAITATAHKLARIFFHLLRTGEAYSESNFAREQERSRVRTENHLRRQARELGYSLVPIAA

SEQ ID NO: 280815 - protein, 378 aa, unidentified
MRFYNQPHRFYCGVDLHARTMYLCILDQAGAVVLHQEVSAEPSAFLEAIAPFRNDVVVACECLFCWYWLADLCQAENIAFVLGHALYMKAIHGGKSADDRIDSQKIAQLVRGGNLPIAYVYPKGLRETRDLLRRRMYLVHKRAEVVAHVVNTNSQYNLPPFGKKLIYARNRQALQIADRFADASVRKSIELNLRLLDALDDLIGDVELYLQRTVKVDDADTFYRLRSIPGVGKILALVLLYEIHDIQRFASEGMFLSYARLIRPLKTSAGKVKGGGGAKIGNAHLKWAFSEAACLLARESDQAKRFLARQQKKHGKPKALGILAARLGRAVYQMLRQKKAFDPKRFWNGEPGVTPAQLKKSAVKRPRRTKGSRCVLEA

SEQ ID NO: 280816 - protein, 319 aa, unidentified
MSKTVLGIDIAKAKLDVALMFDGRVLVKKFDNNTKGFKLLQGWLMSLGQQQVHACLEATGSYGEAVAEFLHEQGHCVSVVNPLRIKGFAKSDLKRNKTDEADARTIAAFCLAKDPVAWHPLAPEIKQLQAFTRRIDALERMLAVETNRLELAPHAIRPSLKRIIRSLKKEIEHVQRLIKDHIDNNPDLKQQSKLLQSIPGIGEKTARLLLGEIEFRQFDSARALAAHAGVTPRKFQSGSSINRTRLSKLGNGRIRKALYFPAIVAVKYNQVIKQFARRLDQNGKTPMQIVGAVMRKLLHIAYGVIRHNTPFDPNPAVCI

SEQ ID NO: 280817 - protein, 365 aa, unidentified
MKQNRTCVGLDVHARSVWACTVDDDSGEMCTARISPKTAEIVKWAKALPGVVEVAYEAGPTGFGLARALIAAGMQCYVLAPSKMERPSGDRVKTDKRDSEWIARLVRLGELPVVVIPSEGQEAARDLVRAREDVRGDLMRSRHRLSKLLLRQGIVYEGTAWTTAHGTWLRSQSFDRPGVQFAFDEAYDTVLTTLARRDRLDKAILTMAAEPAWAPVVARLGCLRGVGTLTGFGLAVEIGDWHRFTGNSIGSFLGLTPSEHSSGGSRSVGSITKTGNGHARRLLVESSWHHRKPYRLSAEMIRRRDGQSPPVRARADQANRRLNQRWRTFDARKKRPTIAAVGVARELAGWCWSLAVMDGEKTTAP

SEQ ID NO: 280818 - protein, 411 aa, unidentified
MSQMLVGVDVSLKSHHVHFMKEDGSTLADFSVSNDQNGAETLIKRMLEAAEKSQANQMKIGMEATDLYSWHLAHYLQDQMKGYEPKFQASIYVLNARKVARFKKGYDSLVKNDRIDAWVIADHLRFGRLPAQMKDAIQYEALQRLTRTRFHFMREIARNKTYFLNQLFLKFSGLRQDNPFSDTFGATSMAVMEELEPETIAEMSLEELVEFLQDKGKNRFEKPEEIAKYLQKLARSSYRLNKAMQDPVNISLSVTLSTIQHIESQVKRLDKEISKLMKGIPQTLTSVKGIGDVYAAGLIAEIGDIKRFKDHHALAKYAGLVWNQNQSGEYESQETARMRTGNKYLRYYLIQSADKIRKYDSEYKAFYTKKYDEVPKHKHKRALVLTARKLVRLVFSLLRTNQLYTPPERRD

SEQ ID NO: 280819 - protein, 355 aa, unidentified
MKQEKYIGMDVHQATISVAVMDSNGKLIMECILETKAATILEFIHGLRGSLSVTFEEGTSAAWLHDLLKPHVTHLVVCDPRKNALLKDGSKSDRIDARKLADLLRGNQLHPVYHGEHGVRTLKELGRSYQTLTKDVTRVMSRIKSLYRSWAIPCSGTTVYAPRHRAEWLAKIPQPGVRLRAERLYQQLDLLQPVRQEARRDLLRESHKHHAVKLLRQIPSIGPIRAALLVALLQTPHRFRTKRQLWAYSGFAIETHDSGEYRYVRGKLQRNRERITVRGLNDNHNHDLKNLFKGAALSASTRPGPLYDFYGVLLEKGMRPTMARLTLARKIAAITLTIWKKGASFDAKQLHRQAA

SEQ ID NO: 280820 - protein, 347 aa, unidentified
MRFYTKTHTHFCGIDLHARCLYVCILKESGDPCLHRKIPASPEALLRCIAPYLDDLIIGVECMFSWYWVADLCEDNNIPFILGHALYMRSIHGGKAKNDKIDSLKIASLMRAGMFPLAYAYPRELRGTRDLMRRRIHMMRKRAELLAHVHNTASQYNLPPISKNLRYSFNREGVADRFADNSVQKSIALDLALIDFYDKQLSKVEYHIKRQASAFDPQALLLLRSVPGIGLILSLVILCEIHDIERFPGVQDFASYARLVKCKRESAGKTYGTGGAKIGNAYLKWAFSEAAVLFLRGNPDAQAWLERKARQHNKARALTILAHKLGRAVYFMLKRKVTFDQKRFLTG

SEQ ID NO: 280821 - protein, 356 aa, unidentified
MISSTKYIGMDVHKESISIAVRNAAGKIVMESVIETKASVILQFFDGLRGDLHVTFEEGTWAAWLYDLLKPHVAKLVVCDPRRNALLQDGNQNDRVDARKLSDLLYMNKLNTVYHGDHGLRTLKELGRSYLTMTRDQSRVMSRIKAIYRSWAIPCSGKQVYGSRHRAEWLGKIPEPGVHRRAELYYQQLDALRTLRQEVRRDLLAESKKHKIWKRLCAIPSIGPIRAAELLGILQTPHRFRTKRQLWTYCGLAVVTSSSADHEVEHGQLRRRKKRKETRGLNENCNHDLKNLFKGAAVVASLKPGPFAEFYAALLGKGMRPEMARLTLARKIATIVLIVWKKGVCFDAQHLKPQTA

SEQ ID NO: 280822 - protein, 317 aa, unidentified
MTQTSMTTAGIDTSKSKLDIALHGRAEQWQVANTLPGWRILTNKLTKAGVSRVGIEATGGYECGVVQHLRAAGFTVQVLQPVQVKAFGRMHLRRAKNDALDAVMIAACTAALDQVRDAPDPRLAELAEQLTFLEQVEEDIKRFKTRLEHTGQPRLRRMVLGEIVRMTARRLTQLRYIARQLRAHRDLAARLDLVLSIPGIGERTALAILIRMPELGRISREEAAALAGLAPFDNDSGQQKGQRRIAGGRARLRRSLYAAALPAAFRWNRALIALYQRLTAAGKAHNAALVACARKLLIYANIVVQRGTPWTERPLGV

SEQ ID NO: 280823 - protein, 404 aa, unidentified
MFFCGVDWSEDHHDVCVMDEAGDILGKRRIADGVEGVAELHDLVATHAEQPEEVVVGIEIDRGLMVTALLGAGYEVYAINPMAASRYRDRHATSGAKSDPGDAKVLADLVRTDRHNHRQVSGDTELVEGVKIVARAHQNAIWGRQRQMNALRSSLREYYPGALAAFGTDLSGNDAISVLSIAPTPALGRGLSRSKIASALRRGGRSRNIERRAEEIQVALRADYLEAPPGIAEAHGEVARSSLSLIEAYTKQITALELSLAEHFEQHPDAKVVLSLPGLGTVLGARVLGEFGDDRTRYASAKSRKNYGGTSPVTKASGRSRVVLARYARNRRLASALDRWAFCSLTHSEGARRYYDELRTRGKTHGHANRQLANRWVGILHHCLERNELYREELAWRADSQLAA

SEQ ID NO: 280824 - protein, 394 aa, unidentified
MILVGIDIGKNKHTFSIIDKNSGEILLSPSDFSNNLKGFLFLIPKLSSYTKSKLLIGMEDTGHYHFALLKYLLDRRYTVALINPTTTDLTRKLQGGITKNDPLDSLTICDVISSNHRNKPYRVTTLNRFDLYEQKQLTRHHHNLKEELNTYKNRLQKCIDIVFPEFNSLFHSKYGIVYMNILKAFSSAKAIANADIRSIRKCFEFKGQGKRISLSAEQLKLTAKSSIGIPSVAEEIQIRHLVSQIELLEKQLSEIDKRIEEFSLKNNSPILTIPGISHFSGTSIISELGDICNYTKASQIIKFAGVAPYHYESSQFTAHHTAITKKGSKYLRKTLYQIILPVISNNEVFYAYYTKKLNEGKGHRCAQGHCIRKLLRVIYHLLCTRQPFNPKLLL

SEQ ID NO: 280825 - protein, 351 aa, unidentified
MVVVGADVHKHTHTFVAVDQVGRQVGQRTVEATTKGHLKALAWAREEFGVELTWAIEDCRHLSVRLERDLLTAGQAVVRVPPKMMAGARRSARTRGKSDPIDALAVARAFLREPGLPVATHDEVSREAKLLVDRRETLVNTRTRTINSLLWRVHELDPAHAPKERSMGLVKHQQALKAWLETLEGVVAEMALDELQDIISLTIRIKEFDKRLACLVAREVPALLSLPGCGELSAAKLLGESAGITRFHSEAAFARHAGIAPIPVWSGNTAGRVRMTRSGNRQLNCAIHRIAITQARLPGTLGKAYYEKKLAEGKSKTEALRCLKRRLARVVFQLLTTDHNNRQTPALPAAA

SEQ ID NO: 280826 - protein, 409 aa, unidentified
MSGSRSPFQGFVGIDVSKDKFDACGIREDGAKLFQFSAPMDRNGFEKLKSHLSSVPMGSVLIGMESTASYQVNLFSYLVSEGYAAVVLNPLLISNYVKMQLRKTKTDKKDAGVIAQFLLANRDSLVRRATSPLISDLRELARQRESLVDQMTSLKNDIKRILNITFPELEHMAGIFTKSILKLLQRYPSAYALQEVDPDQLTRMLIEDSYGRKRGAFAEALWKAARSSIGTPSPMKDVILKQKVSLHFHLDEALQEITEMLLQTSRGMMRDDMDILNSIKGIGEKTAAGFLIEMGGDIQQFDDPNKIIAMAGIDPAVRQSGKHEGSSRITKRGNRHLRRIIWLMTTQVIHYCDVFRVYYRKRRKDGLPYKKAVLATSHKLIRVIYAMLTQQTVFRPAVNSGWLTVMLFF

SEQ ID NO: 280827 - protein, 340 aa, unidentified
MRQLYAGCDLHGNNNLFGIIDGEGKRDFKKKLSNDLLLVLDTLKPFQEELVGIAVESTYNWYWMVDGLMETGYQVHLANPSAIQQYSGLKHSDDKHDAFWLAEMLRLGILPEGYIYPKQERPVRDLLRKRGHWVRLRTSLVNSLQNILTRNLGRKVNVNDVKALKEDRITLLLEVSEDLALAGRVSKEAIDHLTRQIYKIEWAVQKKIALKEEYRYLLTLPGVGKILSLTIMLETGPISRFETVGDYVSYCRKVPSQWTSNEKRKGSGNSKNGNKYLAWAYSEASEFARRLYPEPRAYYNRKMQKSNAAVAHSALANKLSRAGYYVMRDKVPFQPEKLFG

SEQ ID NO: 280828 - protein, 370 aa, unidentified
MGWSPLPKTASECQSGECKFPLMREATTMKATTIGIDLAKHLFQLHGVDQHGKTVLKRQLKRDQMLSFFTNLPPSLIGMEACGSAHYWANKLQGMGHTVKLMAPQFVKPYVKTNKNDAADAEAICEAVTRPTMRFVPIKSSEQLAILALHRARQGFIKARTAQANQIRGLLAEYGFILPQGITHIGKHVPELLEDSENGLPGTFRHLLMRLHEHLKMLDKQVNELEDAIVRWHKDSAASQTLAQLPGIGPITASALVASIGNAKNFKNGRQLAAWLGLVPRQHSSGGKQNLLGISKRGDSYLRTLLIHGARAVLRVAERKESFSGSWLAGVMARRNPNVAAVAQANKTARIIWALLAHDRKYDAHNGMAA

SEQ ID NO: 280829 - protein, 427 aa, unidentified
MDVHRDFCEVAIAEGGCVRTAGRVASEPEALELFARSLVDSDEVAIEATANAVAIARIIEPHVRRVVLANPRAVREKARRAKTDRIDAGLLAQLLAVGYLDEVWTPDDATQTRRRLITRRCALVRARTRAKNQVHAVLGRNLLGRPPVTDLFGRRGRVWLAEQAVGLPLDERLSVDAGVRQVDFLAGEIEQLDKILGADALSSPDALRLMTLPGVNVVTAIALLAAIGDISRFPTPRHLVAYLGLDPRVRQSGNEPAKHGRISKQGMTEVRCLLVEAGWQTTRTPGPLRAFHERIADRRGRNKATVATARKLVVIAWHLLSRGEDYAFMRPALYREKLRRIELLLGAQRHQGRSATGRQLLKTDQRRAERELATQHERAYQRMVADWKASRPSSATLPQPTQLVGAGVTPGRASQRPSRGKAARQTP

SEQ ID NO: 280830 - protein, 344 aa, unidentified
MDHIGFDLGKVNSQLCIITAEGELIERRISTSRDSLTKLLGSRPPAHILIEAATESEWVARHLEGLGHQVVVADPNFAPMYATRSRRVKTDKRDARTLAEASRLGAFRPAHRTSDQQRHIRAQLAVREALVRTRAKYISLSRALLRRDGLRIASGTARCFSLRLAELSLPLELRAELTPLLTLLEGINEQIKQADEALSQMVKEDPVIKRLTTVPGVGPVTAVCFVATLDDVTRFPDAKQARAYLGLVPTEYSSGERQQRGRINKAGPNRARYLLVEAAWSIMRRRSSATADLYQWATAIRQRRGTKIAVVALARKLAGILYAMWRDECDFKPSSMKIEPAVAA

SEQ ID NO: 280831 - protein, 405 aa, unidentified
MSDIEQHESVEVFVGLDVGKGAHHAVALDRKGKRLLDTALPNDESKLRALIGKLKEHGQILLVVDQPATVGALPVAVAQAEGVWIAYLPGLAMRRIADLHAGESKTDARDAYIIAEAARSMPHTLRSMRLADNEVAELTMLCGFDEDLAGQITQTSNRIRGLLTQIHPALERAVGPHLDHAAMLDLLERHPSPAQLASLSEKQLANRLVKLAPRMGKTWAAEIVKALSEQTVVVLGTQAATIVLPRLAQQLAALRAQREEVAKEVERLVLAHPLHPVLTSMPGVGVRTAARLLIDVASRAFTSAGHLAAYAGLAPVTRRSGSSIRGELPSRRGNKPLKRAMFLSAFAALRDPVSRAYYTRKISQGKRHNQALIALARRRCDVLFAMLRDGTFYRPPHPEISLTTT

SEQ ID NO: 280832 - protein, 405 aa, unidentified
MLFVGDDWAEDHHDVEIQDETGRRLAKARLPEGISGIAKLHGLVGRFLPEGDAAAQVKIGIETDRGAWVAALVASGYQVYAINPLQSARAREGHGVSGAKSDAGDAHVLADLVRTHSHQLRTVAGDSEQASAVKVLTRMHQTLIWDRTRHVLRLRSSLREFFPAALEAFEDLASPDVLELLIKAPEPSSAARLTRPQITAALARARRRDRETKTTAIMDALRTEHLNQPPTIAAAYGATVRALAALIATANEQITALEGQVEAYFGQHPDAEIYLSQPGLGPVLGARVLAEFGDDPSRYVGARARKNYAGTSPITRASGKKKVVLARYVRNNRLADALHQQAFSALSGSPGARAYYDALRERDISYNAALRQLGNRLVGILHGCLKTRTPYDEHTAWAHIHNAAA

SEQ ID NO: 280833 - protein, 397 aa, unidentified
MIAVGIDVSKSKSTVAILNGDGSIRAKPFDVHHVADELQALVDYIKRTSEPPTILMEPTSHYHYPLLKAFTEAELPVCLINPYQMKKYGDTELRKAKTDKRDSLRIAQYALEKSYSLIPYTPQDQKYEDLRFLSRQYSQRISTLTVAKIQLLSLLDETMPGITTILPLKSRDPDNCVLLRFIKRFKSFDVIRKMSKTRFLDSYQVLVQKTKDRFAGSKGLAIYELVLNSVTTRGENPLSAMTQDQCVDLVSTSQKAADEINLQMRIIAETMPEYKVLRSMAGVGDRLGPIILGEIGDIRRFHSGKALNAYAGNDAPPYQSGQFESRNRHISKRGNPALRKACFEVMQALKLTKPQDDPVYLFLLKKEQEGKPYNVAKMAAVNKFLRIYYARAMELYK
